United States Patent Application Publication US 2019/0348154 A1 - sequence listing, part 30

SEQ ID NO: 112375 - DNA, 1128 bp, Enterobacter aerogenes
atgtctgccgttattgaagcgaaaagccaaactacttcgtcgagacgattaggaaagattcctgttcgtaacctgtggttgttgatgctctatgcttcggacctttatcgccaccttggcaccaataaagtcgacgtagaagacaacccagaagacatagcagatttggttgccgagattctctgccatcaagttgaagaacgcatgatgcgaaatttaagctatgggtatgaatcgaaagttgctgtaatcaatcgagttcgtggacgcatagataccctaaccaccgagcggcaaaggctacttgaaaaaggtaaggtatgctgtcgctttgatgagttaacggtagatactccccgtaatcgttatgttagatctgcattagaacgattatcaaagctgaatattaaaccaactcttgcccataaatgccgagccttaatgctgagtttagaacgtctaggcgtgagcaaggcaaagccaataaattacagcggaaagtcggaaagatttggacgccatgatattagcgatcagaagatggttgctgcagccgatttggctttttcactcgctatacccacagagtttgacggtcaatttcatctaacagctcctgacactcgaaaagagtggcttagaaaattgtttgaaaaagctgtagcgggtttctatgccgtagcactagataaaagagagtggcgagtattggctggcaaacagtttgattggcagatatcagataaaagctcagggatagacgaaattcttcccagcatgaaaacagacatcattatcgataatcgttcaccagacaagcgtttggtaatcgacacaaaattcaattcagtgaccactaaaggttggcatagggaacagactcttcgcagtggttatatctaccaaatgtatacttaccttagaagccaggaagacacttcagaccccaaatcacttgaaagtattggcatgttacttcacccgacagtagataaagaagtcgctgagatggtaacaattcaaggccacccaatatggttttgcactgttaatttaggtgagtcagctatttcaatcagagagcgcctacttgctcttttacaaaagagtttccaggagaaaaaataa

SEQ ID NO: 112376 - DNA, 855 bp, Enterobacter aerogenes
atggtcacattcgatcaacttatgctaccgctaataaaggcattagtgaaccttgggggctcaggcagtatcgacgagatatacgaagaagttgtcgagcttgagaagtttgatgagggtactttggctgttctgcacaaccctgaaaaaagtagccaaactgaagttggatatcgattagcatgggctagaacctacctgaagaaagctggataccttgaaaactcatctcgtggcgtttgggcacttacagataaagctagacaggaaccggaaatcgatagcagagaaattgtcaactttgttagagcactggaccgcaagcctgaacagactaatgctacgacatctactccagaactgtcgtccgatgactcccctgaagaggctatgctttggcgtgaaaaactgcatcatgtgctaattgaagaaatgagcccggatgcgtttgagcgactaacacagaggttattgagagaatcaggctttatccatgttgaagtgactggtcgcacgggtgatggtggtatcgatggcaaaggaattgcccgaatcaacggtttgatgagctttcatatcgcttttcagtgtaaaaagtacaaaggttccgttggggctcccgagatccgtgattttaggggcgcaaccgttggtagagctgatcgtgggatgtttatcactacaggtaactttacaaaagctgcgattgaagaagccaaccgtgatggcgttgctccgattgacttggtcgatggtgatcagttagccgataagcttaaggaacttagtttaggcgttaaaacagagttagttgaaaaagtaacagttgatcctggctggtttttaggtctttaa

SEQ ID NO: 112377 - DNA, 474 bp, Enterobacter aerogenes
atgccagtaactattgatgcaggtgatgtgatagctggattagctttccttttatctggctacgcaacatggcaaacggtcagctttaataagaggcagaagtcacttgtcgaaagccaggaaaagctaaacaccattctcttggaaaaagaaaatgaagatgctctgaaaggaaaacaagctgaccttggtgcatcaattataaaacttggcagcagtaagtatcggcttaaggtttggaataaaggtgctgctactgcaagaaacgtcagaattgagttccccgaaggtaacgatttagttattgaatcagaagtgactgacaaatttccaatggaaagcctcgaaaagtatcaagccgttgagctaatagccgctgttcatatgcaaacgaaacgaaagcatgttgttcggctagtttgggaggatgatgcccagtcttacaatgaaaagctgtcttaccccacactgtaa

SEQ ID NO: 112378 - DNA, 2151 bp, Enterobacter aerogenes
atgttcaaaaacctattttttcaaaccaaagcactaccagaactgtcatcgcaactggatacagaaattccacgctacccgccattcctgaaagggttgccagctgcgtcccccgaggatttgcagtctacacaagacgagctaattgccaaactgcgccaggtacttggctttaacctgcgtgattttcaaaggctaattcagccctgcattgatcatctggctgcttatgttcatttgttgccagcttctgagcatcatcatcacagtggcgctggtggtttattacgtcattcgttggaagttgctttctgggctgcacaagctgctgaagggatcatctttgttgccagtggcacaccggttgaaaaaaaagagctggaaccaaggtggcgtgttgcggcggcattaggcggtttgttccatgatattggtaagcctgtttcagacttgtctattacagacgaagatggacgctatcagtggaacccttttttagaaaccttatcccagtggaccacaaataacagcattgaacgctattttattcgctggcgcgacggacggtgcaagcggcacgagcaattttcaattttggttttaaaccgggtgatgacacccgagttgctcgcctggttaacccaaccgggccctgaaattttgcaagccatgctggaagcaattggcaataccgatccagagcatgtcctgtccaaattggttattgaagctgaccaaaccagtgtccagcgagacctgaaagctcaacgcatttccgttgacgacaatgcccttggtgtcccagtcgaacgctatctacttgatgccatgaggcgattacttgccagttcgcaatggctggttaatcagcgagatgccagagtctgggtacgaaaatccaatcaatcaacccatctttacctggtttggaaaagcgcggctaaggacatcattgagctgttggccaaagacaagatacctggcattccacgagatcccgatacccttgcggacatcctcattgagcgaggattggccactaaatccacctcaaatgagcgatatgaaagccttgcccctgaagtgctgatcaaagacgacaagccaatctggttagccatgctgcatatagttgaggccgatttattgttcagctcgaatgtaccaagtggtgtgacactgtttagtaaacctgattgggaagcaacacagcaaacacaagcagagcctcagagtcgctccagtgagcatttagacttgcctgaagcgtcatcatcaattgaactcagcaattcggctgagtcgccatcgacaaaatcatccgaacaagatgatgaacttcgtcatgccagtgatgttaatcaccttcaggcaactgaaaatgttccgggtgatggatgcgaaaagcctaacgattcaaacgatgccactatctcaaataacgtaaaccagcacgatgcagacgcatttaatctccctgaatctttggcgtggctcccagaggccagcagtgcgttgattatggctggtgaacagatactgatccgctatcccgatgccgtaagaccttggtgtgcaccccgaaaactgcttgctgaactaagtcgattagattggcttgaactagatcccgcaaacccgacacgtaaggccagaactgtgactacgaatgatggcgttcaggagcaagggttactgctgaaagtatcgatttctaaagggctaattgcactgattgacctttccaaacaagacgcagagtcagtggaaccaattcagaacgaagaggcttcacagcgtccgagtcgaactgagacagccaatgcccaagcaaaagagcccgccacaagagcggagcgtaagcaaaagccgattgcgcccaatgcgaactcaagtacagacctcaaacacgcgcagcggcaacaggtggttaattttgtgaaagatttgcccatcttactgaccgatggcaattacccagacgtggatcatagtgccgatggtattcgcgtcacgattcaaaccttacgccaagtcgccaatgagcatggcattccagccggacagctacttcgggggatctcggccagtgaccaatgccagtttgatgagggggaaacggttctgtttaccgctcacgctaaacgttaa

SEQ ID NO: 112379 - DNA, 1821 bp, Enterobacter aerogenes
atgaaagaaaacgcatatgagatgccctggcgcacgaactatgaagccatggcagtagcaggttggctggttggagcaactggggcaattgccgcagaaatgctgactgagctaccacctgagccattttggtggatgacagggatttcctcgggcatggcgttgtatcgcctgcccgaggcttaccgtctttataaactacagaaggggctaaaaggcaaaccattggcttttatggagctgtcgcatttacaaaaggtgatggcaaaacatcctgatgaattgtggttagggtatggctttgagtgggatcaacgtcatgcccaacgcgcttatgaaatcttaaagcgggataagcaaaccttgcttaaccaggggcacggtaagcaaatgggttcgacctggattcatggtgttgagcccaaagaagaagatgtgtaccagccagttggtcacactgaggggcataccttaattgtcggcacgaccggggcagggaaaacccgatgctttgatgcgatgatcactcaggccattttgcgcaatgaagccgtgattattattgaccccaagggagacaaagaacttaaggataatgcacagcgagcctgtattgccgccggtagtcctgagcgctttgtgtattttcatccggggtttccagagcattcggtacggcttaatcccctgaggaactttaaccggggtactgaaatcgccagccgaattgcggcattaattccatctgaaaccggtgctgatccatttaaagcctttggccaaatggcactgaataacatcgtgcaaggtctgttgcttacttctcagcgtcctgatctgaaaacactgagacgattcttggaaggtggcccagaaggcttggtagtaaaagccgtcacggcatggggtgagcaggtgtatccgaactttagtgtggagatcaagcgctttaccgaaaaggccaataccttggctaaacaagccatggcgatgctgcttttctactacgaacgcattcagcccgttgccgccaataccgatttagaggggctattgagtatgtttgagcatgacagaacccactattccaagatggtggcctcattgatgccggtgctcaatatgctcacttcaagtgaacttggcccactgctatcaccgattgcaaacgatgtggatgacagccggttaattacggattctggccgtattatcaacaatgcccaagtggcctatatcgggttggattcattgaccgacgccatggttggcagcgccattggttcgttgcttttatccgatctcacggctgtggccggtgaccgctataactatggtgttgaaaatcgtcccgtaaatatcttcatcgatgaggcggctgaagtcgtcaacgatcccttcattcaactgctcaacaaaggccgtggcgcaaaaatgcgttgtgtgattgctactcagacctttgctgatttttcagctcgtacaggcagcgaagctaaggcccgtcaggtgttaggtaacatcaacaacctgatagctcttcgggtgatggatgccgaaacgcagcagtacattaccgacaatctgcctaagactcggttgcagtacatcatgcaaactcaaggtatgtcgtccaactcggacagccccgcgttgtttaccggcaatcatggcgaacgcttgatggaggaagaaggcgatatgtttccaccgcagttattaggccagcttcccaacctggagtacatcgccaagctttcaggtggccgcgtgatcaaaggccgcattcctattttaaccagctctacacaggcagcataa

SEQ ID NO: 112380 - DNA, 561 bp, Enterobacter aerogenes
atgcatcattctgtctgtctgaaaatgacaacacttaccagtaaagaaatgctcgctcagtggcagcaacataacccccagttcaaggaaaccttaagactgcttgaaaccgactggcctcatgctttggcctcggtgtattgcttggcggactacttaacggatgcgttcacgttagatggccattccatctttgatttgtgtctgtgtaatggcttgggcagttatgaagaagtcagttgtgatgatgacagtgtacgcctgtggcatttcattgaggcgcttacctggactgctgccagtgctttaactgggattcgcctgcgtgatcctgaccatttcgagtgggccgccgtggatggtgtgtatttccacacctggattcgtaatcgtccaaatcggatggcgtatttggctgaaggacgcatcgaggtgcgttatgtcagtggtcatacgacgacaaagcggcttcaacaagtgattaaagcccggattatgacgccaaccgttgcagccatgctggcgcgagtagaagaggatgtttggcatgagcaagcataa

SEQ ID NO: 112381 - DNA, 636 bp, Enterobacter aerogenes
atgagcaagcataagtcggtttggctgctgtgtctggcactgatgctggagattattgccattggcgtgttagtgcccggtgattggactggccgggtcatcagtaaagagaagcagatgatccaaaaccaattgggcgcacaaacaagctattggattggtcaaactagccatggctggtatcaatcatgggttgtggatacgcagatggagcaatctgtgcgtgattttctaatccccaatgaagagcagcgactgcgctctaaagggatggagaacatgggaggcttttggtttgtctgggtggaagaccgtattcaggcattttttgatgtgttgtaccaagtgttcactcgatttgctttgctgatggtctggttgccctttgcgcttattctcatgttaccggcgctgtgggacggcttgatgacctggaagattaagaaaacaacctttgatttttcgagccctatcattcaccgctatagcatgataattctgggctcaggcatcatcttgttatttatgggattgttcgccccgctggctattccaccggtggtgttaccgtcgctgatcatcggtttggcattgatggcggggttggcgttaagtcacttgcagaagaagatatga

SEQ ID NO: 112382 - DNA, 588 bp, Enterobacter aerogenes
atgcaaattactaaaatcatttcctctgccacggttgaacgtttaaagcaaaaagcacgaaagcttaaacgtgaaaaatctattccacacactcaagcactcgatgaaattgcagtaactgctggttttaatcattggaatcaggttgtacaagctaatgacgtactgaaaccatcagaagtggcattatcttctggatgtgtcatggcttttgatgtcaaagatggtatggatgtcgataccagtgatggggtcttaattgaagaccacttcttggagatgctcactgaaaagcagctatttgaaatttatgccaattcccctgatgaggacgacgaacaaaacagaccgctaaaagaaacgctatcggattcagagcttcatgagtattttcgagatgattgctcattcatgtactttcgtcttgccgagcctcatgcaaacaaaccgttaaaagaagtattggctcttatacgacagtactctttttggatgcctcaatatatttggcttcaaggccaccttattgatacttaccatttgcctgctgaagacgagaacggcaataccgtaggcgtaaggttttag

SEQ ID NO: 112383 - DNA, 282 bp, Enterobacter aerogenes
atggaacctgtaaatattccatcctatatcgatgacccgccgcacttcctgctttggagtgccgatgagatggctcccattctgttggggctagtgatcggcatttttaccggtaatgccttggttttatgcctgttggggttggtgacaaccaagctctatcggcgttttcgtgatggccgcccagatggttttattcttcacgccatctactgggctggactgttgccaaccaaagccaagacgatccctaacccatttatcaggagctatctgccgtga

SEQ ID NO: 112384 - DNA, 627 bp, Enterobacter aerogenes
gtgaagttcgacgtgtttttaaaatcatggcaaggcacgcaattagagaaccgatggcaacggttcctgattgcggtgctggtgctatctaacttgcttcttgcggtagcggcattttctcgcaataccgtggtagccattcaaccaccaactttgtctgaaacggctgaagtgtcacgaaaccaggccactcagccttacttggaatcctgggggctctacctggctgagcttatgggcaacgtgacgccgggtaatgtgtcttttatccgggttgctattgagccgctactttctccagcggtgtaccagcaagtggtcgatgcactggagattcaggcaagacagatccgtgaagaccgagtcacgctcaaattccaacccagacaagtggagtatgagtatgaaaccggccatgtctttgtgaccggttattccttggtctctggaccatctggagatgaacagcgccaaactcgcacctatgagtttgacatcgatattgagcaataccgtccaaagctcagttggatggatacgtatgaggggcaagctagaacgaagcgcgttcgtgaaaagttgacccaagagcaaaaccggagggtgaatgatgcgaaccaaaattag

SEQ ID NO: 112385 - DNA, 897 bp, Enterobacter aerogenes
atgcgaaccaaaattagtcgatggataacaccaagcttaatcgcaatgagcttgagtggcgtcctgttatctcaagcgtcgtatgcagacgtggaattgccaattgtgccagccagtgtgatgaagcagtccgctactggaaatccaccggttcaaaccaattcggttgcaacggatgtgccaacaacgctactaatgacaccgggagtcaatgaactgatccctgtggcacttggccatctgaaccggattgtgacaccgtttgaatcgcctcaggtgagaacaaccagtgatgctcagacgcaaatcaaggcgaatgttgtatatgtggccacggacaaagaatcaccggtttcactttacatcactccgcctggtcaggaagcgccagcattatctgtcaccttagtacctcgtcgtattccaccgcgtgaaattaccttagctattgatggtcagcagtggcctattaagggcgtcgtgaaccgcaaagccgccacttgggaaacggctcagccatacgtcgatagcttacgtgatttactcagacgccttgcactaaatgagttaccacaaggctatgacatccgtttagctggccaaactgacacaagcccgaaatgttttcagccgggcttaaagtttggttttaagcaggggcaaattgtgacgggacattacttcacagtctatgtaggactggttgaaagctttgccgatgagccgatagaagccagtgaaatagcctgtcatgcaccagatatagtggcaagcgcttactggcctcgcaatatcttgttgccgggtgaaaagactgagttgtatgtggttgttcgcaatcatcgtgaagaaccagtggaaagtcagcgaccttcgcttcttgtgggaggtaagtaa

SEQ ID NO: 112386 - DNA, 1290 bp, Enterobacter aerogenes
atgaaagcacaatgggaacaaatgagcccgaacatgaagcggggtctatcggttgctggtattgctggtggtctgatccttatggtgatggtgttttcacctaatcctgatgatggcgcgaacagtcggaaccggcaggaaacgatccggcacattcttacggataccaatactcgtgatgttggggtcgatagtttggctgcgaacgtgaaactactcagtgagcgcaacgagcagttacgccgagaagttgaacgcttgcgtcgtgacgttgactcaggacggttaagccccggttcgccttctataccaagtgaggtcaatgcggagttggctcgtcttcgagcggaacttgatgatgttcgcgctggaggtgatgcagcagttgaaggcacaaatagccgtttcgaagtgcctttatctgccatggaattgcctaaagaagaaaagccactgccgtctaacccagacgactattttgccaatgcgccgctgcctgatccgctctatcagcagccagtcaatggccaaggcacacgagcacgggatgttccattgccgccaatcacgattcgtatgattgagcctgaagtggttgctgaaccagaggttgttgtgcaagaagcgccgcctttgtatttaccggcgggcagcatcatctcaggtactttgatcacaggtttggatgcccctactcacgagtccgcaagacgcgaaccttttcctgcattactgaggattcaaaaggaagccattttacccaaccgattcagagcggatatcaaagagtgtttcttgatcgccgcaggttacggtgatttgagctctgagcgtgcctatttgcgaggcgagaccatttcatgtgtgagagaagatggtggcgtcattgaaacgcgactggattcttatgccgtgggtgaagacggtaaagccggtattcgtggccgattagtgtcgaaacaaggccagctggtggccaaatcgatgatggccggattccttcagggcttggcaggcgcatttgatgtgaatcctgtaccaacgattcagacgggtaatgccggtgatactcagttgtaccagcaagtcatgagccaagaagcattacaaggcgctgcgattaaaggcactggtaaagcattggatcgagtggccaagttctatttggacatggcagaaaatatgttcccagtcatagaggtagacgctgcaaggaaaatagaagtcatagtcactcgtggggcctcgttgtcgttggccacttcgcaagggggaggtgcaagaagatga

SEQ ID NO: 112387 - DNA, 651 bp, Enterobacter aerogenes
atgaaaaaatcctgcatgttgctaaccgatcgaagtccgtttcagacaataagatgtgtatccagaggagagttaaccatgacgacatcaatgcagaacaacccaaagcaccagtcaaaacagtggtctaaagctggattacttttattggcagtcggctcaaccttattgtctggctgtagttcattgggtcttgggagtagtgaatatggatgcccaggtatgcctgacggtgcgcgctgtttatccgctcgtgaagtctatgagcttaccagtaatggtgttgcacccaagacgattgatgctgtggcgactcgaattggttctccctctgggtattcacaatctgatttagagacaggactgctgagccatcctgcattacccgagacgcagcaatctgcaccgattcgcattccttcaagggtaatgcggatttggattgcgccttgggaggatgaccgtggggatctgaatttatccagctacgtgtttaccgaaattgaaccgcgccggtgggatataggggtgtcagcacctcgaacggtttcgccagtgctacgtccacttcagactcaaagcgattcagcctcagcgggagctaatggtaagcgcgataacttgagtatctacggagaaactaacgaatga

SEQ ID NO: 112388 - DNA, 387 bp, Enterobacter aerogenes
atgacaaatgcagttcgcaccattcaaactcagcgcctaatgaccattggtgcgcttggtttaatggcgttaatgatttcggagccctcatttgcgggcaccggtggtgatgctttcactgatgtgtgggataccctaaaagattggacccaaggtactttgggacggatcgtagcgggagccatggttctggtgggtattgtgggcggtatcgctcgccaaagcttgatggcttttgccttgggcattggtggcggtatgggtctctacaatacgccaaccgtcgttgaaagtgtgatgtctgcaaccttacctgttgttgctagcactcaagaagtcattggcacaaccgttccagcaatcagcgccgttttactgggcacctga

SEQ ID NO: 112389 - DNA, 792 bp, Enterobacter aerogenes
atgtcatctaagataaactggcttgttgctcatacttctcctggagcgctagtacttcagcaatggctgactgaaaacggcgtgagctactcgttggctcagaagtacgcgcagaacggttggctgaagaagcttagttctggtgtgtactatcgtccaaatgcgcaaggcgatataaagccaacttgggttgatgccattcaagcattagatgtgcaattgggcgtttcagttcatttggctggattgagcagcttaactcaccagggactgagtcactatttacagctgaacaaagagcaagtttggatttgcgttaaaaacaagtcgtccttaccaaaatggtttcgtgaattcccttatcagaattggttttactgtggaaaccataagcttgaagtgaatcccgagaaagatttaaaaaggatcacggttaaagagaaagaactcactgtcagctgtgcagaacttgctgcctatgaagtggtagacgggattgggaagctgatttcatttgagcatgtcgcagaattatttcagggtttagtcaatcttagccctagaaaagtacaagatattcttgaacgaagcagctctgttcaggcaaaccgaatatttctatttctgggtcggtactacgatcaccagtgggtcaatcgcatagatgaaacaagaattaaattgggtgcaggaaagcggcaggttgtcgaaaaaggacgttttgatgagcgatatcaaatcacagtgccagagatattaagcgtcaaaaaaggtgaacaacataatggataa

SEQ ID NO: 112390 - DNA, 939 bp, Enterobacter aerogenes
atggataaagatagcccatattacaaacaggtttccttgctcataagaatgcttcctgtggtagcaacagagacagtttttgcacttaaaggtggcaccgctattaatttatttgtgagagattttcctcggttatctgtagatattgatcttgcttatcttccacttgaaccaagagatgaggctttggttaatgtcagggctgcattgcagcgcattacagacagaataaatactcaaccagatatccgagcggcatttcaggataataaagctgatgaactgagaatcgttgtatcaagtccggttgcgacaatcaaaattgaagtgtcgcccgtcgccagaggtacattgcatagtgcagagataatgccagttcaagagtctgttgaagacgagtttggttatgctgagattcaggtagtcagtcttcccgatctgtatggtgggaaattgtgtgctgcaatggatcgccaacatcctcgcgacttatttgatgtgcgtatgttacttggcagtgaagggatttcgagagagattttagtgggctttttaacctatacactaagtcatcctcggcctattaatgaagtcatgtcgccaaactggcagcctctgaatgagaaatttcaggcagaatttgacggaatgacttttgaaaaagttgaatgcgaagacttagcctctgttaggcctatcatgttaattgaactgcaaaaacatttcacagaaagggatcatgccttcctcatgtcattcaaaagagggcagcctgactgggcattgtttgattatcctaatgcagcagacttgcctgcgattcgttggaagttgcagaacattaacaaattggcaaagaatcaagcgaaacatcaagagcaattagataaattgaagcaagtacttgatgattggcttgttaacgcaaacgccaagtaa

SEQ ID NO: 112391 - DNA, 693 bp, Enterobacter aerogenes
atgcgaaaactatctccaattattctggcgcttgcgctgtctccattggttcaagctgaacctgtgtctgaagtgtcgcccgttggcaaaattgacggcatggtttctttgcctgtcacgggtatgaaagcggtcgaaagcaatggccgtattgttttcatgtcagacagtggccggttcgtcattgatggcacgctctatgatgcctggtcgaaaaagccgcttaccagccttgaagaaattcgtgaagcgggtaacacgctggacttaagtcgccttggcttaaaaatggatgatttgaacccactgacgctaggcgaaggcaaaaagaaagtggtggtctttgttgacccacgatgcccgcactgccatgagcttttgaaacaagctttaccgctaaccaaagaatacaccttccaaatactccctgtgccagtgcttggtcctgattcagagcgtcaggttcgacagcttggctgtgcgcgtgacaagaaagcggccaccgatgcattgctcaatggccggattggtaacctagaacaggatgatgcctgcaacttagagccaatgcagcgtaccttggtgacggctcaaatcctgggcattcaaggtgtgcctttcatcgtcgccaatgatggtcgcatcagccgaggccgtccttatgatctttctgcttggttggaggggcgttaa

SEQ ID NO: 112392 - DNA, 2400 bp, Enterobacter aerogenes
atgaaagcctctctgtattcagggcaacgcgcttctgagctgttgccagtattggcctattccgacgatgagcaactgtttttcatggaagaccaaagtgttggctttggttttctatgtgacccattgccgggtggtgatgagtctgttgcagacagggttaatgttctactcaacaacgactggccaaaagacactttgctgcaatttggcctgtacgcctcgcctgatattcaaaccgaccttcaacgcatgatggggttaaggcatcgtcaatccgatccattgcttagggcgtcgatacgcaaacgtgcggattttctcgatgggggcacggttcaaccgatagaagaatcgacccagactcaggtacgcaactttcaactgatcgtcacctgcaaattgcctttggaaaatcctataccgacggagcgtgagttaagtcgagcatccgcgcttcgggcttctttctcgcaagcgctggcaacggttggttttcgcgttactgagatgactgaccggaactggctcgcggcattaagtgcgcagcttaactggggaaaagatgcttcttggcgtaatccatctccaattcgaagtgaggcagataaaccacttcgagagcaagtgttggattatgaccgggctatcaaggtggatagccaaggtctgatgctgggtgattaccgagttaaaaccttatcgtttaagcgcttgcctgagcggatctggtttggtcatgccgcaagttttgcgggcgatatgatgacgggcagtcgcggtttacgcggaagctttttgctgaatgtcaccattcactttccttcagccgaggcgatgcgatctcgtttagagacgaagcgtcaatgggcggtcaatcaggcctatggcccgatgctcaagtttgtgccggtgctggcagccaagaaaaagggatttgatgttctttttgaagccttgcaagaaggtgatcgtcctattcgggcaaatatgaccttaacgctgttttcaccaacggaagaggcgtccatcagctctgtttcaaatgctcgaacctatttcaaagaacttgggtttgagctgatggaagacaagtacttctgtttgcccattttcctgaatgccttgccatttggtgctgaccgccaggcgatgaacgacttgtttcgattcaagactatggcgacacgacatgtgatccctctgttgcctttgtttgcggattggaaaggtacaggcacgccagtgattaactttgtttcccgtaatggccagatcatgagtgtgtccctttatgactcgggcagtaattacaactgttgcattgcggcgcaatcggggtcgggcaagtctttcctggtgaacgaaatcatctcctcctacttatcagaaggcgggcaatgctgggtgattgatgttggccgctcttatgaaaagctgtgtgaagtctatgacggtgagttcttacagttcgggcgggacagtggcatttgcttaaatccgtttgaaatcgttgaggactatgacgaagaagcggatgtactggttggattattggccgcaatggccgcgcctacgcagtcattaactgattttcagatggccaacctaaagcgtcagacccgtgaactgtgggagaaaaaaggtcgtgccatgttggttgatgatgtggcagaggccctaaaaaatcatgaagaccgtcgtgtgcaagacgtgggtgagcagctctatccgtttacgacacagggcgaatatggccgcttctttaatggtcacaacaatattcgcttcaaaaaccgtttcaccgttctggagttagaagagctcaaggggcgtaagcatctgcaacaagtggtgttgcttcaacttatctaccaaatccaacaggagatgtacttaggtgagcgggatcgtcgcaagattgtgttcattgacgaagcctgggatctgctgactcaaggtgatgtcggtaagttcatcgaaaccggttaccgtcgatttcgaaaatatggcggcagtgctgtaacggtaacgcagtcggtcaacgatttgtatgacagccctacaggtaaagccattgctgaaaactcggccaatatgtacctgcttggccaaaaagctgaaaccatcaacgcgctcaaaaaagaaggccgcttgccactcggtgaaggcggttatgagtacctgaaaaccgttcataccgtcacgggtgtctattccgaaattttctttattaccgaaatgggcaccgggattggccgcctcatcgtcgatccgtttcacaagctgttgtactcgtcccgtgcagaagatgtaaacgcgattaagcagttaacgcgcaaaggcctttctgttgctgatgccatttcccagctgttaaaggagcgaggctatgaataa

SEQ ID NO: 112393 - DNA, 348 bp, Enterobacter aerogenes
atgaataagaccacgctttggccatttatggcttctattactttgtctgttgctggcagcggtctaatgaccagctggctcttaatgaaaacactcgaacccatccacagccagttggcgttaagtacgcccattgcagtcgtggattttggggaggcggtgttgtcactgggccccaatgccagcgaacaagacatcgaatccaggttgcttcagatcaatcagcaaattgaaaagctaaaagcagccggttttatcgtgctggatgcccaagcggtggtgggtgctgatgattctgtatttgtgccagtaggctcaaaggaggtgtctcatgcagatactccgtaa

SEQ ID NO: 112394 - DNA, 513 bp, Enterobacter aerogenes
atgcagatactccgtaaaagaatgccttggcggccatatctcattcggttgaccgttcttgcgttaatcatggccttggtaggcacctacgccatgatgcgctaccgaataggtattgatacccagcaagagcgctgcctgcctgataccacggtgtatctgattgacctatggaataaagagccggttaaggatggtttgtatgccttccattcaaaaggacttgctccgttatataacgacggtactcgtatgctgaaacgcctaacagggatgcctggggatgaagtcaaggtgacgcctgagcatgtgctggtgaatggtactgaagtctctaccggcatggcattagcccagcgtcttggtgtggctgaaacagaatttagccgctcattgacgctgcaagaaaacgaatattggttttccggcgaggctgcaacaagtttcgactcccgctattggaatgccgttaagcgcgagcagattgtcggtcgcgcttggccgctttggtag

SEQ ID NO: 112395 - DNA, 1125 bp, Enterobacter aerogenes
atgcaaagactatgtctcttattttggttggttgctccattgtcttgggttcaagtttcctgggcacaagagccttatccgttgtcagacgaagacaaaaagatcgtcgaaatgagccgcagcattttacaaagtgctgtggatggttcatctgaatttatcgagccttttgcaccggttgaacaacctgtgtcgctcaaacacagcgatgaatggttgatatttgcatcgtcctcattgggtgattcgtcactgaagcagctatttaaagaggccagtgctaccggcgctattgtgttgtttcggggaattcctgaaggaaagactttgggggcggctatccgtgattggcataccctgatggcgggacttgatcctgttcctcaggttcgaatcgatccgaaagcctttgtgcactggcgggtgactagcgtgcctgccattttccgcatagaagatgacaaggtgactgcaagtgcactaggggtttacagcaaggactggttgcagcgccaaattgaaactggcaatagcggttcattgggtcaacgcggtccaattcattcgattttagaaccggatttgatgcaagtggcgatgcagcgtttacagtcgcttgacctcggcgcgttaaagaaaaaagccattgagcgtttctggtctcgccaaacatttactgacttacccagagccacgcagtatcggataagaatggttgatccaaccatcgtcatgcagcggccactattggatgccaatggccgaacattgatcccagcaggaacgcgtattaacccgctaaaagccttgccatttactcagcagctcgtggtgtttaatgcatcgaacactgaagaagtggacgcagtagcgcattggcttgagacgcaagataggacattgcgccgcattacgcttatcaccacgcagctcgaccgtgcccaaggctggaatcgcctcaatgcgctcgaaaagacattggacagtccggtttaccttctcaatgcctcgctaaagcagcgctttgatctgcaagtcaccccatcgtttgttcaagcaaaggggctcgcgtttgaaatagaagaaattccagcaaaggagcttgttcatgaaaaagctcaataa

SEQ ID NO: 112396 - DNA, 1029 bp, Enterobacter aerogenes
atgaaaaagctcaataatacgtatcgtcggttgcggactctcgttgtcatgcttgtcctgggcgcatctattcctgctaaagccgacctgacctgcccagacgcgggtttattgtcgggcaagttgctgacggatgtttgctggtcatgcatttttcctatccgggttgcaggtcttccgcttggcgcaggcaatgtcccaagcggcgcatcaaacaagtcattttgcttatgtgacgacaacttaggcgtgccaaggccaggtattgttaccagcatgtgggagccagctcgtctgattgaattggtcagaacgccgggttgttcgccttccctgggagggattcgtttaccgttaggtgataggcgactgcaaggtggtcatggtgaaggtgaatacgataccggtgatctcgctttctaccattaccattattacgcctttccgcttttggtcatgctcgatttgttcatggatggcaattgcaatgccgatggttacatggactttgacttgatgtatttgtcggaattggacccaacatggctgaatgatgaactggccttttttactcagcctgaagcggctgctgttgctaatccattggctatttcggcttgtaccgctgacgcagcctcatcaacgcttggtaaacccatcgaccagttgttttggtgtgctggcagttggggccatctctacccgttatcaggccacaccttagcctttggctcattagcagaaaataccagccatttagcggcgcgtgcaatcgcggctcaacacaggcgtggtcttgctaggcgaacaatggggaacagtgcgctatgccgacctgttatcgaacccatgctgccgaaatcccaatacaagatgagcatgttcttccctgtaccggaaactgaaagtgcgcatgtcatcggtgaaagcaccatgaaatggggagagtggcgaacaatccccggtgccggtgaagatgcgctctacattttgtggcgctggcaagactgctgtaactcgggaggttaa

SEQ ID NO: 112397 - DNA, 3693 bp, Enterobacter aerogenes
atgaaaccaacactttttacccgagtgttagcgggtattttatctatcactatggcttgcttgcccctacatggtgtggccgctgatgtgcagcgccaattcggtctaagcggacaacaggaaggtaagcaattgctgcaaaactggacgatgcccgcactcaacggcaatacattgttggtgccgagtggaagtggtaatgagtccatcaacttgcaagagctatttcctggtatggatcaaggctcattggatgtcttaacgggcgtttatggctctgatgccagcatgaatcaattggggacacagcgccaagagagcatggcatctgaaagtggcgctacgggtgaggcgtttcgctcgctacagcaaatcaaagacaggtctcggccagatatggtcaatgatccgctttgggcattaactgatgcagttcaaactgacccaaatcttttaacgcaaagcttcccaggctgtgagtctcaaggtgaagccaacccaaactaccagcaatgtgacaggctcaatacagcggttaacagctgcactattactcacgattacacggcaggcattattgagcatgtttcagggccgatgaaccttcgctcttgtggtgaggggtgccttgaagtttggattggacgtatgggagacgactactggagtggaaactgtaaagtatttgaacaagccatcacactcaaagtcgtgaaccccgatgcgattacctcagccgttcttgagtacgccaaatgggatgactacatgcaagtttggcttggcgatcagaaagtctggtctgggccgaacaataactttccaccagaaacggctggccgctgcgagctcagtaccagttgggagcgcaatcctaataccgatctaacagccaagctaaaagcggtagagcccggtttagaagtgccggtaaaaatccgcgtatcggtaacggggagtggtgaggggtatgcacgcatcaaggtgcgctttgatccaaccaaggtggtgatgaatgatagttggtcgccacaatcctgtattgaacaagcagcggatatcccgacgaagttttcagactacagcattcaatgcacggatcagccgtcttcaaccaacggatgtacggtggtcaatggtgtttcagtttgtgaatcctattttgccccaagccctgtggctggtatatcccctttgtgtcggcgtgtacaagtgagtgtggatgatgaaagctatatggggattgaaaatcaggcctgccaagtgcttgaagcgaatcctttctgtggattcatgtcgtcagaatgtgccgagaccaatgataaaggtgaatgtactcgttttaccgatacctatgactgtggattgcaaaccagcgatccaaagtgcgtggtatccaatcttatgccgagtagttttgaggcctgtgagcctactcagacgattacgccattcactgaaaccaagcatgtaccggattaccaggtgtgcgaaaagatcagcacgcttactcagtgtcagttagagcgacgtgtatccgctgaaacccatcaacaaagctgggccattgagcgcggttgctttagctctgaaacgctcagctttgttccacagcacagcaccaccatgcaaactggaaacgcgacactgagagtgtttgataatcaaaatactgagataaaaatcaccgagtcgccatccaaggcaaatggttggaaaacgacactctcattgacgggcaataaggagacggtgactgagacgaaaccgtctattaaataccctgaaatgacctgtccaaaaggaacattggttggttcattgtgtaaagtcgtcaatgggtcgattatttcgtggcatgaaccccaggaagtcactcgttccagatgtgagtccggctggaacaaagtcgatttcgacacttgcagccgagaagttcagaagtgtttggctcctgcgaaactgagcgcttcattgaccttctctggcaaatacttagagcaagacattgttcatcaatcaactgatccgggcatagagcaatgcttgatgcaaacggatcagtttactgcggtgcagtggcagtgtttggatacgggcacaaaacgaatcgacggcttaacggttggtagtggcgagttggcgaatcttggaagcctttatccggctgttgtttcatctccttctcatttaaccagtcgcggcagttctgatggactggggctttcatgctggagggcaagagcgacctacaatgcttcgactgctcatccagagttcaacatgggcagctcagatagctgggtagatgccaatggtaatactcaaaccatcgtcaataacggacaaaacacgaccaccaatacgtgtgccgcgctagagcaaaacccgacctgccagtatgtcagaaccgaatgcactgaaggcggggctggtcatgaaggcttctgttatatccaaagtttggtgtatgactgcggacaaagcgttgaagtgcaaaatgcacgaatggaaactcaatacaactgtgaggggccagttcgctgtatgggcacagattgtttagagccagagtcaatcaagcaggctaactttgcagaggccgctgcgatgcttaatgcggcgcagtttatgaccaatgatatgtcatgtacgggagctgatggccaagataacgtcgagtgtacggtctttaaaggtaatgctggccagtgcaaaaaagccgttggtggcatagtggattgctgtgaaaagccaagtggcgtgtcgttatcggattacatcacgatgatagtggcggttaacaagcttgatacggcagtcatggccatgaatccgtcttcggcaatctatggttcctggaatacgctcagggaaccaatcaccagtacctggagtgcggtcaaagagccctttgtgtcttcatgggactctctcatgggggccgggccatctaccgctgctggcgcgggagcagagcaagcagcgacaggcttcatgcaggtgttgaccaacaaaacggctgagtgggtaggctctacctttggttcgggggcgcaatcggcactgtttagtaacgttggtggcgcagttggagccgatggtgtcgtttcgggtggtaactttgccctggggggcgctgcgggcgcggttctgagtacggttatgacggcctacatgatttattcagtcaccatgatcctcattcagcttatctggaaatgtgagcagagtgagtttgaaatgaacgccaagcgggtattgaagagttgccactatgtaggctcttactgcaagtctaagtttttaggtgcctgtgttgagaaacggcaatcatattgctgctttacttcgccgctttcacggatcattcaagagcaagtgcgtccgcaattgggccttggctggggcagtgcgaagtctccaaactgtgaaggtttgactgcgagtcagttaaaccaagtagattggagccaagtcaatctagatgaatggataggtatcttatcgataacaggcaacctacccgaagtgccgtcactggatatggaacgactcacaggctcaggaagtacgctaaacgtggatggaaaccgtcaaagtgccgcagatagagccatcgaacggctaaacggaatggatgcccagaaattgcgtcaggaggcgacggaagaaatttcggggaataattaa

SEQ ID NO: 112398 - DNA, 5775 bp, Enterobacter aerogenes
atgaaagtcaaaaaatcagcaattatctatacaggctatgattatcagacgctgcagggcgtaaaactgcttgcggaatggcttcatagcccttctcagtatgtcagggttgcctttgaagccgatacggatggcaatgaaacacctgaaggcatagatgatgttgtttgtgaacgaccaaatggcgttcaagatttttggcaagttaaatttaccccctcccctgagaagggagaaaactgccttacgtgggattggttgttaaaaatctcaggtaaaacagctagatctcgttccattcttaaaaagctttacgatgctattaatgctgtgcctgctgaaaagcttggggatgtagttctattgaccaacaagcggccggatagatctatggagtcctgcctgcgtggttccaaaatagactttaatcaggttgatggtgactcacaacaagaggttatccgacaattaggaagccacgaagccgctatgtttcttttttcgaagttgaccgtccaacatagtgatggagactacattacgataaagcgtaatgttcgagccgagcttttgaagttttccgacgatacaggcgttgagcggcttgtcgcaagagcacgtgaatgggcaatgtttcagaataatcccccagaaaatggttggatttatcttcatcatgttagagaagttttatcaccaaaaagaccggagcccatacctgaaatattctctgtgcctgaggattattgcctcccaaattcagattttcacgaaaatttacttgctcgtattagcagctcggacggcgaagtcattacgttaacgggcaagcctggtgttggaaaaagtacgtatctatcgtttttgtgtcaagaattggaagatcaggaaattccgctattacgtcatcactatttcttatcgttgggggatacaactgaagacagactaagcccaagaatcgtcgctgaatcgctgctacatcaaatcaatagttttcacaaagaagcaaatgcaagtacatcccatcctgaaaacctgcgtgatgcactggtaacctgcgcaaattattacaaagacaaggggaaaccatttttagtattaattgatgggctggatcatgtttggcgagacaatgccaaaaataaaaagccattggacgaaaccttcagacaattgctacctacaacagataacttagtgatacttgttggaacgcaaccagttgacgatgaattactccctcacacactacttacttattcacctaagagtgattggcattggttgcctgaaatgtctggaaattcgatatacgagtatttaaaacttcatattgaatctggtcgattattcttaaactgtcatgaggatcatgtggatgaagaaattcagacaagtgctggcgcgttattaaaaactacaaatggctatcctctgcatgtaatctactcatctgagtatctgtctcatcatggattagcactttcttcttggcaaattgagaagcttcctccatgctccgatggcaatattactacttactattccgagctttggcgtaacctcaattatagacaaaaggatgttcttcacctttgcagtggatttcaatttgcatggccgagacaggcgattggttccgttgtcaaagatattcatgaatattctccgagcgttgatgccgttgcacacatgctgtctgaagggctttgtggagtaaggccttttcatgaaagcttggttgtgtttgttagaagtcaggaagaacacgaagaacgaataagtgccttgctgccatctgtgtgtgaatggctaaaattaagcgcacctattcatctcaaggataattggctttggtcctgtttagctcgaatgggcagcacatccgaattacgagaaggcgttgtaagggactggatacttgataaacttattactggcatgcccgtcaaatcatgtataaggctattatctgaagctgaaacatatgcatttgaagaacttgagtatgctgaagcatatagccatagagcattaaaaacccggcttataaatggacctgaattccagacttgggaccccaataatttaagtacgctttcccttatattagctgatgaagcatctataaatgaattaatatcaggacaaaacgagtattcatcaaccaaattatccatattggcaattgcattatggtatagaggggcagttgaacaagcagagttattatcgcagaaggctattgatcgatatcgggctaaaaccaaacttttgtcttcacgacactctcaagataacgaagctgaagctgctgtattgataaaagcaggagtattaactgacagccttaactacgatgtgatttttgaaggaggaaacttctctaattggcccgatggatatgtggctagttttagacgtgcatgccgtacaaaaaaagagctgggtctgctcttcagggcttggcagtgtttacccagtaattcaaatcatatcggtcaaatcgaactcgatgcaattagattaagcattatagagggtgcagatattgcccgtaggccagaatatagcgctttttcctcacagacgttatctcactttctagatttattctctaagaaaaaatttgccagtattaagactcacctttttgatggcctgtcggcaacagtcttcaaagttgaaaaaactggcggttatcatagctggtttttttcttcactttgtatcaggttaagtgctggaggcgacttctcttggttaccagttagtgcaacatcagatcgagcggatgtgtcagctcattatgcattgcttaatcagctttcagattggatcgcaaatgaacttttagcagggaatacattaaactttgacgtagtttgtgcgatgtttcctttggaaccaatattggatggggaccaatgggacacacgacgagctgacataaattttaagcgcgattggattgaaattgctgccgattgtcacctgataacaaccaggtcagaaatcacgcgtgatgaacttgagaacactgttgactctggtgtagtcagagttgactggcttcgattatggtataaggagctaggtctcagactgttagacgatgatgcagttgtactactcattgaactcgaagaggatcgacagttaaatgagctagaagaaacaattgagaattctaatgcttaccttgaactcgctcaaatagcattccaacacgataatctagccctttttgaaaggtgtatgaaaaaaacatgggattttgtgctcggttacgggcatcacaaagatcccaccatatttgatgttttgacagctgtggaatacctttccgaagctgatccagattctgctctggaaatattagagcggatatctccgattgttttcaatatatctaagtttaccgacggggatgaaactaggcactctaagcactccatatcttcactattagcaaaattaaacccgcaaacagctgcttctgtttatgatcaagagcttagcgatggcgaatggtattatgctgaagagacaatacttaggctgcttgaaaaatgtgacttttcttcgcctataactaaacatttatatctgacaggtttgcactcaagctgttaccaaattcttaaacaaaaaattgaacaaaaaaattcacaagcaattcatatcagtgatgaaatagagagcttgcttggtattaaagttcaagacattgctgaagataagcgttcatcgactgataaactagatgaaaaaatttcgttgcagccatcagattatccgcccgacaagtttgaagagctgaatgttgcgctcaaaggtaaatacagtacaagtgaattttggaagacatggtacaaatattggagtgttcagggtaaagagactgagctattacagaacttaataccacaatcatcgacatttgctgatcgttttagtgacaaacgatacttgttagatctcctttatttcagtgtcaaaaagttagagggcaaagcaaaagcctttgggcttttggttgcagcccacagggctatgggcggttggtctgattggtacgagcgagctgagaatagtattggtcggcttaaagtcgttgcagagcaataccccaaaaggattgatgagttcataaagctaacaacatcacagttagatagctggaaggataattttggaagcttaattattccaaacgacaaattagtctttttactttctcatagtggtaggaaagatgaagcgcttgcacttactttagcgatggttgaaaagctggaagatgacgttcgtaaccttaaacttactgcgccagcctgggattggcgtcaggatgactccctcgaagaagcattagttaaacttttagtttcaaggctgaagctcccggtaccttctattaagctttgggcactagaccagctttcactgcttttaataggtcagcacccaagagtagaggagttgttgaaggaagatttagcaaaaagaaagctcgaatctgagtgcatagaagtgttatgcgtatttttcatcgcaaagtctaagggatatgtttgccaaaatgatctgggccaatatatcaaagcaaggtccacattgtctgacctaatgctctcggaattaatatcaactccggatgatttcggggagtatgcttatccattttatccttttgttagtctagataatggaaataatcgatttgaatattaccagggaagtcatgtacctctcctgtacaattcttggttgaaaaaagaagagcgaagaaccggtttaccctttactagtcattaccgatcagaatggaacactacattcgaatatcagccttcttcgggaactgcaattgattactttctaggtagtgatagacaaagagctaccgggcaattttatacgcaagcaagccatcgtggtcgttctgcatatctgagaacaatagaagtcgcaaagcaatttttcggtatgcccgattcttatgcagagcatttatcgataccggcactacctatcgagcctgcgtatatgggattactacctcaaaagccaaaatggctgcctgaatgggaggaagatagttctctcgatagggataatttgattaattatgttgaagatgcgttggcggattttgaaagagaagataacactcttgacctgttagcaatttcattgcctattaagcttgatgatgagcgttgggttgatttaactgttgtaaaagtcatcacggaattagagcaagaagcgaacattcaaatagaggaacgttctgggtgcctaacagtaggtaacctcttagataagccgttgtcatatgagtttgctgaaagtgaaaagtctgaagtcactgtattagcgagtactgcatacccatttatgagatatggtcattggcactctgatcttgaatcgaggggactctacacccctaaatgtaatattgcaggcaaaaaaattattggatcttcttccggcagtcgatttggttacttcgtcggtgatgacaatattggcttctcatcattctggtacaatgattggcaacctattcacccgaaaggagtccgctctctatgtggttcttttaccgctgttaacagggataaaattggaaaatggctaaacttaggcgtaggaaagcagaatagctattatgtttgcactgccgtagtgcttacatctgaagatagctttagagactacgatcagcatgtgtttagcttttcagttggaaaagtgtag

SEQ ID NO: 112399 - DNA, 603 bp, Enterobacter aerogenes
atggcccaagcaagacccaattactcaaaacccatctttgaacaatcattcacaattaatagcttacaggcacaacgtgtcgttgaccgtgtttttagacggacggtcagtgcgctttacggaatcgatgtgatcctgcgcatcattggcgatgagaacgaaattgatgaagtggaacagatcattagccagttgatcgaggattgcgctaaagcggtagacaacgaacaagctcgtttggacaaactgatggagtccaatggcatcgatgaagtacctgactacaccgacccgataaccttcaacgccaaaataagctcgccccaagttggccagtttgttggcttagtgcgcaaactcgatgcgttgatgatctcaatggacacactctggttatctagcgtgcttagcaacaagcaacgtgttgatggtaactacgcatggcaacagcgcattatcaaactggctaggcgcattattgatatcgaaattcgagcccgaaaatcagctcaagctaagggtaaagaagcagaagttgaacaagctgtgccatcaaccgatgacgatatcactgaagaggaaacagatatccccgccaactag

SEQ ID NO: 112400 - DNA, 327 bp, Enterobacter aerogenes
atggaatatatctgcggatttattatccaaatcgcaggcattatgttgcttgcaaaactgagctggtcgcttttgcgattacttgctcgtcaaaccgtgcgcccgtttcgatttgtacttactcaaatcaagcgattgctcacaccaacatcaaaacgtcgtccaatggcagtgcctaaagctcctggtatgccccgtttgacatctgcgttttacaaagagccacatcagtacgacatggctttactcgaaataccaacctatctgcgtcgtcagtcttctttgcccagtcgggtagaagcaactgtgtgcacagagttcaactaa

SEQ ID NO: 112401 - DNA, 420 bp, Enterobacter aerogenes
atgaaaaaccaagtaacactcataggctacgttggctctgagccagagacgcgagcctatccatcaggtgatttagtgaccagcatttcactggccacttctgagaaatggcgcgaccgtcaatccaatgagctcaaagagcatacggaatggcatcgggtcgtttttcgagatcgtggtggatttaagttagggctaagagcaaaagatttgatccaaaaaggagcgaagctttttgttcaagggcctcagcgcacgcgctcatgggagaaagatggcattaagcatcgattgaccgaagtggacgcggatgagtttctgcttcttgatagtgtgaacaaagcatctgagccatcaccggcggatgatgcgagctcccaagctaattgggcacaaacttatcctgaaccagatttttaa

SEQ ID NO: 112402 - DNA, 819 bp, Enterobacter aerogenes
atggaaaaaccaaagctaatccaacgctttgctgagcgctttagtgtcgatccaaacaagttgttcgataccctaaaagcaacagcattcaagcaacgtgacggtagtgcaccgaccaatgagcagatgatggcgctcttggtggttgcagatcagtacggtttgaaccctttcaccaaagagatttttgcgttccctgataaacaagctgggattatcccagtggtaggtgtcgatggatggtctcgcatcatcaatcaacacgaccagtttgatggcatggagttcaagacttcagaaaacaaagtctcactggatggcgcgaaagaatgccctgaatggatggaatgcatcatctatcggcgcgaccgttcgcacccagtcaaaatcactgagtatctggatgaagtctatcgaccgccttttgaaggtaatggcaaaaatggcccttaccgtgtagatggtccatggcagacgcacactaagcgaatgctaagacataaatccatgatccagtgttcccgcattgcgtttggctttgtgggaattttcgatcaagacgaagcggagcgaattatcgaaggccaagcaacacacgttgttgagccatctgtgattccacccgagcaagttgatgatcgaacccgagggcttgtttacaagcttatcgagcgggcggaagcttcaaacgcttggaatagtgcattggaatatgccaatgaacattttcaaggtgttgaactgacgtttgcgaaacaagaaatatttaatgcacagcaacaagcagccaaagcgctcacacagcctttagcttcttag

SEQ ID NO: 112403 - DNA, 1017 bp, Enterobacter aerogenes
atgaaggttatcgacctatcacaacgtactcctgcatggcaccagtggcgcattgcaggggttacggcatctgaagccccaattattatggggcgttcaccctacaaaacaccttggcgattatgggcagaaaaaaccggattcgtattaccggaagacctatcgaataatccaaatgtacttcgcggtattcggttggagcctcaagcaaggcgagcatttgagaatgcgcacaatgactttcttctgccgttatgtgcagaagccgatcataacgcaatctttcgggccagctttgatggcatcaacgatgcgggtgaacccgttgaattgaaatgtccttgccagtcagtttttgaggatgtgcaagctcaccgagaacaaagtgaggcgtaccagttgtattgggtgcaagttcagcatcaaatactggtcgccaatagcacgcgtggttggttggtattctattttgaggatcaactgattgagtttgaaatacaacgagacgcggcgttcttaactgaattgcaagaaacagcgcttcagttttgggagttagtacagaccaaaaaagaaccgtcaaaatgccctgaacaagattgttttgttcccaagggtgaagcccaataccgctggacatcgctgtctcggcagtattgctcagcacatgccgaagttgtccgactggaaaatcacattaaatctttgaaagaggaaatgcgagaagctcagtcaaaattggtcgctatgatgggtaattacgctcatgcggattatgctggggtcaaactcagccgctacatgatggcgggcactgtggactataagcaattggccaccgataaattaggcgaactggacgaacaggttttagccacttaccgaaaagcgccacaagagcggttgcgtatcagcaccaataagccagagcagcccgttgaaacaccaatcaaaatcagccttgagcaagaaaacttggttctgccaggtgactcgccgagctcattttatttttaa

SEQ ID NO: 112404 - DNA, 960 bp, Enterobacter aerogenes
atgactgaacaatccccatttttggttcaagtgaatcaagcgtttaatgtcccggctcctgatgctttcattctggaaggatttagtgccgacactacccatccaaacattcccgttcgcaaggacgagtatgtttttagaaaagaagacttacgtgacgtattggcgttcttgtctaacccagacggtgacggtttgtatattacaggccccacgggatgcggtaagacctcgctaatttgccaagttgcttctcgattgaattggcctgttcagcaaattactgcgcacggtcgattggagttgtccgatcttatcggtcaccacacactggttaatggcaacatgacctttgtgtatggaccgctggcactggctgtcaagcatggccatttgctgatcattaatgaaatggatcttgctgagcctgctgaactggctgggctcaatgacattttggaaggtgccccgttggtcatcgcacaaaatggcggtgagatcatcatgccacataccaagtttcgttttatcgctaccggcaacagtgcgggcagcggtgaccagacgggcttgtatcaaggtgtgcttcaacagaatttggcttttcttgatcgctttagaatcattgaagcgacctatgcagagccatctgtagaggaagccattctggagaacgttgcgccgggcttaccagaggtctttcgccaaaaaatggtgaaggtggctggtgacattcgtcgtctttttattggcggtgcggatggcggtgcagagctcagtatcaccatgtccactcggaccttggtgcgctgggcaaagttaacacttgcttttaaaggcgctcctaacgcagtggaatatgcactggttcggtctttgacggctcgtgctgagttggagcaacgtgaagccattcaccgtattgccgctgatgtcttcggtgatcactgggaggattga

SEQ ID NO: 112405 - DNA, 768 bp, Enterobacter aerogenes
atgatggaaaagtgctttgctctttaccgttacagtcattctgatgggacagccaaagaatgggccatttacgttggatcagatacccaggagattgaagttcgatttggaaaagcaggtcaactgtcgcagcagcgattgattgattcgactgatcctaacgctgaagcagaccgacgaatcaatgagaaaatcaacaagggttatcgacttgttggacaagtcggcattgatcatcaagggcggccatttgaactctcaaatgcgctagatagcgtcgcctgtgccaataacgtcagttgggagtttcgtactcgcaaggacgtcaatggccaaacctcgctggcgcaaaaagcgttgttcgatatggcaaagctgcttgaagcctatggcttggctgttattgatgataaccaggtcaggattggagaatggtcattagggttttgcaaaagcggattacctagtaccaatcaaatcagcatggtgtcaggtgaaggcgctggcattgttaacactgatgatggcccgtggccattgttgctgttactggcctttaagcgtcaattacccccactgtgttcgctcacagtagcgagtcctgaagggatagaagtatctgaccaactgaagttggaaaaagatgtattgaggctgttaggcagtgatttagagcgggttcgcccgatagctgaagcactggatttaatgcctgcgaaaatcgatctcaaccaatcgtcgcctgattcgcaaaattactatttctga

SEQ ID NO: 112406 - DNA, 954 bp, Enterobacter aerogenes
atgagtattcaaaccctcgacaaacttttgatttgtcacatcgactgttccatttggagcggtagaaaaaaactaaggcctgaagatttcagattagctaatggcagccaacttccaccgaaggatgttgccagcttagggagtaaaaaaatttgcgacccagaggcattggcgaactttgaaaggcttaagaaagaagcgcagcgcttgtgtgagcaagtcggtgtacggtttttaggtggctatgccgtccctgaagatcgaattgatcagattgttcctgagcttgaccggatcggtcaggagtttgcgcagtgcaagcagttgttcttggacaactatgatcaggtgacgtttgactgggttgcgaaacacccggaatttgcagatgcaatccgacgtgcattatcacccatcgaagacgtggaacaacgtcttcagttcgattatgccatctatcgaatgcaaccggctgaccaagctggtggcttagatgacaaggtcaatggtatgggacacaccctctttagggaggtggctcgtgatgccaatgaactgtttgagcgttccgttgcaggtaagaatcaaatcagccagcgagcccttaatcctctcaaacggttaagagacaagttggatggtttgtccttcctggatcatcgagttcagccaatggttgaagcgatggacaatttatttgttcgtctgccgaagaccggccctgtgacagacaatctctatcacgaactgatggcgaccattttaattttgtctgatccagacaagatgagaatgcacggtgaaggtcaattggatatcagacaactgatgcccaaacctgaacctaaacccgcacagccggtatctgctcaggcagataacttacgtgcaataccacaaccaaccgtcagaccaaaccttggttcgactgtaccaaactcattttatttctaa

SEQ ID NO: 112407 - DNA, 441 bp, Enterobacter aerogenes
atgcaatcaactatccataaccccagccaactgaaccagtttgaagcacattttcgtggtgtgactgatgcggttgaaagtgaatcgataccagaagtggcgtgttgtcgaacgttagtacaacggtcgtactcaacacatagtgtcgtgatccccaagaaccctgtgctgatcgcagatgcggacgcacatggagcttgggtaacggccatggtatttgttccaaacatggtattgcagcaaaccgcttatgagcgggcctggctgcaatatcaacacgaggtgtctactcagttacaagaccagtacagtctgacattggatgacatcctgagtttagaccagcttaaaacgtcatttgagcagcacgagagtccagctcaattggtggcttggttaggtcaaaaatacgacctggataagctaaaagcacaggtttaa

SEQ ID NO: 112408 - DNA, 1656 bp, Enterobacter aerogenes
atgaatcatccattaaaaaacgcactgccaatcgttgccgcagcttatggcgaaaagtttggtgtgaaggtgcttattcaaggacaagatgcgtttaccgatggtgagcggattgtgatcccaacagcaaacccagacgacccacactatcaacagatagcttggggttatctggctcatgaagcggcgcatattcggcatactaattttgacatggtgcagaaggcgtcgtccaaaccgatccgtaaggcacttctcaatatcattgaggatgttcgcattgaaaacgaattggcaaaggattaccccggaacccggcgcagtatttcaaaagtgattgagtacatggtggacacacagcaaatgtgtgtacctgaacagcttgagcctgcatctaacttgcaagcatggttgttgttccgcttgagatgccattttctgggccagaaagcactgacgcctttgtatcaagcagttgatgaaagagtgagacaactctttcctgccgcagcgatgagccggttaagcgccatgctgacagcagtacctagcctggcatctacaggtgaagtgctaaaacttgtcgatgccatcgttgccatgttggaagaagaatctcgtccaccacaggatgagtcggatgctgatagcggtaatgacattggacaagaagcgagtaatgacagcaataacagtagtggtagtcaaaccccagaaacagactcgtctgcaacgggggattttgctgaaacgggtgattcagataactctgatcaagctgacaatttgcgacaagccttagaggccagtgccgctcagtttgaacccgatacctttgcacaagtggcagaagtgttgtcggaacaagctgaaggacatcagggcgtcactccactcagtttgccccaagcagagcaagctatgttgggtgatgaggccatcttgaccttatcggcgtctgagtcggctcaaattcgagcccgacttagaggtatggttcagtccagtcaggacaatcggaatcatgccaaacggcacggtcttcgagttgcaacccatcgtcttgccgcttcccaagcaggtgagtcgagattgtttattcaaaggcagccgcgcattgcgcccaatgctgctgtgcacttgcttgtcgatatatcgggctcaatgggtaaacccattggcgaaggtaatcgcaagtactttcatgttgccaatgaagctgctttggctttggccatggcattggaaggtatagcgggtgttgtacctgcggtcagttattttcctggtattcatcaggaagtatctatcgcgttattgcccaagcaatcggttcgacatcgggccgcctgttttgaccaaaaaccacgaggttgtacgcctatggcacaagctatgtggtttgcggcaaacagtttgttggcacaaaaacagaagcgaaagctaatgatagtgctaacggatggtgacccagatgattgggctgccacgcatgacattgttgaccggtgcagacgcagtggctttgagctgctggggatcgggattcaaacacgcagtgttgagagattctttcctcaaagcatcgtgattaatgatgtcaaagatctgaagcgtgagttattcgaagtaacacaacaactgttaattcagtaa

SEQ ID NO: 112409 - DNA, 498 bp, Enterobacter aerogenes
atgaaaaacaaaaagttcttagctggcgaagaagccggtacttacatcgttcctgagcaagtgactgaagcggatatcttagatatggcgctcaagcttgcccgtggtcgattgagtaaaggtcgcaaaattgaacagccatcgtcggcgttctcatacctgcaaacactgatgcacgagtatgagcacgaagtctttggcgtgctgtttcttgatacaaagcatcgcgttattcgatttgaagagctattcaaaggcactttagatgcggcgagcgtgtatccaagggaagtaacaaagcgggcgttggaacttaatgcggcagcagtgatactggttcataaccatccatcgggtgatcctgaacccagtgaagctgataaacgcatcactcatcgactccgtgacgccttgtcacttgttgatattcgaacgcttgaccatgtcgtggtcgcatccgagggctgcgtttcgcttgccgaacgcggttatctttaa

SEQ ID NO: 112410 - DNA, 342 bp, Enterobacter aerogenes
atgaatgggcgcattgcccattttccttcatcacaaaagcagtcccatcaacacacgtcatcacagctcgaatttctatttgagtttgatgatgccccagtcacttggtctgacacggaaatctggcagttacgcgaaggcattcttttggatgcgatccgtgtgttgctggacggtcgtgtcagtactcggttgcgcaaggatgtgttgtcgtggattcaaaatgacgaaatagcgccattttgctttcgtgtttgcgcgatggctgcggttgtcgatcctgatgtgcttcgtgattccatcatgtggctattaagacgacatggtatccagcttgactaa

SEQ ID NO: 112411 - DNA, 1068 bp, Enterobacter aerogenes
atggcgttacctttacaaattgacacagtaaggccatatctcaatggccaatggcttcaagtcttggcggcattggtgccagaacttgatgccgctattgctcgaaaaggccgacatgtggcttgtcctgttcatggcggtcgtgatggctttaggctgttcaaagatgctgaatataccggtggtggtgtttgtaatacctgcggtatctttcatgatggctttgaactgttgtgttggattaatggatggaactttgctcagtctattgaagcaatcggtcaagttctaggtattcaacccggacaagtaccaactcgggcaataccgagtaacgcggttgactggaagactaaaaagcaggaagaggacaaagcaattatccatcgcttgaatcaaacctggggagaaaccttatcccttgcagatactcgtgcgcaaccagtttggaactacttgcatcgtcgtggcattgttacgcggcttcgtcctgaatgggattcggtgctgaggtttcatccaaacttgccttaccataatgaagatggtctgtttatcgatagctacccagcgctgctaggtaaaatcgttacgcagcaagggcgttcggccacgttccatcggatctacctaagtgaagatggattcaaagcaccggttgaaaagcctaaaaagatgatgcccatacccagtgaccgaacaatcacaggtggtgccattccgataggtgaacctggtgaggtattaggtgtgtctgaaggtatcgaaacagctttagcggttaccagagcaacggggcaaacatgttggtcggttgtaaatgcaacgctactggctaggttcgaaccaccaagtaatgtgaaaatgctgtacatctgggcagaccacgatctctctgagacaggcctgaatgcagcgaatgaactcaagaaaaaggcctggcagaaaggcattctgacacaagtgttgatccctccgataccaacgtcactcggcgtgaaaagttgggattggaatgatgtgctgaatgtttacggtgccatgggctttccgaaagttcatatctga

SEQ ID NO: 112412 - DNA, 708 bp, Enterobacter aerogenes
atgatggtattaaccctgttaacaaagcagattgatggtgagtttacggtttactggaagacaggccttcgaagaggaggcgaactaaaggtcgatttaggtgagcaatacgacaagctacctgagcagcaaaagccaattgcagctgagctctatgcgattcatcacctactgtcagtgaaagaggtgatggggagtaaccgaagcggtaatgggcttcaaatccgggtcagtaaaggagctatcaaaaagttacagaaacaacgatcaactcagcattcactttacagcctgactaggtttttgctcactcgataccaggaagcacagatctcggtagaaaaacgggaagaatggctctctcattccttcgaagaatactgcgtcgataatgctaccgtgagagaaatcgatgaggtaataaatgttccgaacatgggacctgtcgtggtgactcgtcacgcgcttgaaagattcgtggaacggctttcagacggtgtacctaagcatccttggaaggctttgtgctcaaagctgctatgttctgcgctaactaaagcccagttatctgaaagggtcactatccaaaaagccaaaaaatatgcacaacaggccgagttctggcagcatcttggtagcaaaatgcactttgttttgattccgggtgactcaatgaagacgttggttacggtttttgcagtaaagtga

SEQ ID NO: 112413 - DNA, 363 bp, Enterobacter aerogenes
atgaaagcagaaacggaatcgcggattttttcggtggatgaatatgtccgtccgtctaacggcgaaccgattcgttcggttgttctggaaaccaacgactccgtcattgttgtttggcacgcccaccctgggcaggaaatagctgcccatgtccatcctcacggccaagatacttggacggttatctcaggagaagccgagtactatcaaggtgacggcgtagccactcatattaaagctggagatattgccatcgcaaaacctgggcaagtacatggtgcaatgaactctggcccagaaccttttatatttgtctcagtggttgcgccggccaatgccggttttgcgttggctgaaaaataa

SEQ ID NO: 112414 - DNA, 960 bp, Enterobacter aerogenes
atgactcgttcacctttccttgaaagcatcagacaggttatgcgaaccaagcattactcaattcagactgaaaaaacctatttactttggataaaacgcttcattttgtttaacaaaaaacagcatcctaagaacatgggggaacaagaggtaactaattttttgacatatttagccgtaaaccgacaagttacggcgtctactcaaaacttggcgctttgcgctatcgtcttcatgtataaacatatacttcagagagaacttactttactacctgatacgataaaagcacgcgcacctaaacgggttccatccgtcttatctcataacgaagcaatgagtatcatcaatcagctatccggtagctataaactgatgttttcgcttttatatggttgcgggctaaggaaagcagaactattaatgctaagagttaaagatatcgattttgagtcaaggaatgtctatgtatttcgtggcaaaggcggtaaagatcgagtcacgatgttacctgaaaagcttgttgaaccccttaaattgcatattgaaaaggttcgtgatcttcatgaaaaggatctttgcgaaggtgagggtaaaacaagtctcccgccagggctcgctcgaaaatacccttacgcaatttctgattttaagtggcaatttatattcccatcatctgtcaggtgtaagcatccagtggatggatatgtttgccgccatcacttgcattggacgtccctaacaaagaaattaaggagcgctgttatacggtcaggtgttcagaaacacgttaccgcacacacattcaggcactctttcgcaacgcagcttttaaaagcgggaacagacattcgtacagttcaagagctgttagggcatacggatttgaagacaactcaaatatatacacatgtcatcggtcaacattcatcagggacaattagccctatagaccgataa

SEQ ID NO: 112415 - DNA, 945 bp, Enterobacter aerogenes
atgagaacgcctttgttaccttggttcatcctatgggtgaccatcccaatcattattttctttctattcatcttgcccgcctatgctagtgatgggcaattctatcagcgtggtcaggaaggctggttttggtatcaggtcattcctgagccagcggagtctgaagagcaaataaagccggaatctggagtcacagagcccacaaaggacgagctaaaacccttcagtgctgcatggtttcgtgagcacatgcagtcgttcatggacaaggctattgatgagccgacgaatgagaatgtcagagcctatctgtatctccagcgagtcatgatggataagggctcacagtttgctgatgttagccagcaggtagtcatgggcgatcctgtgttggatgaaatcagtcgcagaccattggcgacttatgctgccaatcggatggatcgagaagctggcgctcaacgtgatgtagctttaggtgaagtagcaaaacgggctggcttgttcttcttctatcgttcggattgcccttattgccatgctcaagcgcctatcatcgaatctatggccttgaactatgggttcgaggtgtttgctattgctgtcgatggcttgcctttacccggtggagagtttccaaactacaaagtcgattcaggacaagcacaatccttgtccgtttcgactgtccctgccgtgttcttagttgatccgcctaacgtcatcactcccattggccaaggcgcaatgagccttgatgagctcaataatcgaatcattctcgcagcccatcaagccggttggattgacgatcaaacttactatgccaccagacctgttcagcccggcgtttcactcgcgatgtcagcccaagagcttaacgaaaagatattacaggaccctgagttccttgttcgctatctgcgtgcacaaggagggttataa

SEQ ID NO: 112416 - DNA, 1389 bp, Enterobacter aerogenes
atgaaaaaagtatttcaagtatcgctaatcgcctgtgcgattggtttttcgtctatgagccaagcaagtttgcaacaggagatgaaccagttgtttggttcaatgaccaacagcactgcgcctggtgtattcgagagtcaacgacgtggcgttatatctggaggaagtgttgttgttcgtaacaggatcatgaacgagaacctcgtctctatggtgccaccgtcattccaagccggttgtggcggcattgatatgttcgctggaagtttgtcatttgttaatgcagatcagtttgttcaattacttcgctctgtagcggcaaatgccaagggatacgcattccaattggcgctcagtgctatgtgtgagaaatgctctcagcacatggagacactgcaaaagaaaatccagcagttgaacgagtatttcggcaattcctgtcaaatggctcagggagtcgtgaacgataccctggctgcttttggtaaaaaggggcaaacagaagccagcatgttgagctcacttaaaggggctggagacgtttttaccagttggagtgaatccaacggtaagaacccttacgagaatgcttcaagtgtcgcggcatctgatgtgaacaaaacgattaaaggtaacttggtctggcgagcactgaaacgtcactcggcatcaagctggtttgcatcgggggatgatcgttttcttgaagcggttatgtcggtcacgggctcgatcatcgttggtgatttggctaatgcggctgatggtcaaggtaaagccccaaaactgaccagactgaatggcaataaagtgactattgagcatctaattcatggcggtaacgtcgctatgtaccgatgtgacacagtgacacaagacggctgtctgaatccgacaatcactaacgtgaccctgaccgggttatcaacccaagtagaaaatttacttcttggtacaggttccagtaacggcattatttttaagtttgctcgaaatacaggggctgctagcaccaccgaaaaggcttttatgacctcggctcctgcgagcattggcggcatgattcgaacactttctgcattaaatgaaggggctgctaggtcgtttgcttcaagagctgcaccatttattgctgttgagatggcccgagcattggttgaagacatgctcaacgcagctagaagcacctctggtgtggaagatcatgcctatgcgaagttgttaactgaagaccttgaacgtgcacgtcgccaaatcaatgaggaatacgccgcgttacagcgaagatacggttcagagcaagaattgctggcgcattttaatcaggtgattcagaccattcgcaaacagcgttattacaccgttaaatctacggcgctgggggaatag

SEQ ID NO: 112417 - DNA, 3570 bp, Enterobacter aerogenes
atgtgggaaatctattccatcggggattcggcttttttagaacaggtcctgaatgctgtctcgatgatcactggtacaggcgactttacttcaatggttcggattggcttgctcattggggtattgatggtatctgttcaggccttaatgcaaggtggtcgtgggattaactttcaacacgtcttagtctcatggctagtctttgcaaccatgtttgggcccagtacccgagtgagcattgaggatgcgtacacgggacaagttcgagtggttgataatgtgcccatcggtgttgctgccgcaggcagtacgatttcgactgttggctttcaaatcacgcgattgtttgaaacggcgttctcaactcccgccatgacggaatacggctttgcatccagtttacagtcactgattaaagtgagaaaacaggtgatggatcgctctgggttgggtgatgcaaatcgtgtcgggggttcggacatcgagcaatcgtggtttaactacatcaaagagtgcaccttgattggtatcgacattggccaaaagaacctcgatcaggtgctgagtgatcctaacccgatgactgcgcttaggtttgattcgcgcatttatggcacgcgcatcatgctcagtggtagcagtagcgatctggactgcaccgatgcctatagccagctgaaactcatgacagaatcaaccttcattccaaggcttaaacaggttctgtcggcctcattgggaacttcgtcagccactgacactgatgacgtaatccgaaatgcactgaataaccttggtttggcttcggttaacacccaagagtacatgaccgcgtcagtgcttttgcctatttatgagcaaagcgtgacgggcaagtatatggatgatcaagctttcaccgcagccgtgatggttaaccaagcgattgagcagcgcaatacacaatgggcggcggagcagaccctgttccaaagtatcgttcgtccgatgatgacgttttttgaggggttcatttacgccatcaccccattgatggcctttgtgattgcccttggccaaattgggatgcgaatggccgggaagtacttgttaatcctgctttggatccaactttggatgcctgtcatggccatcattaacctgtatattcatttaaccgttgcagggaaaatgtcggcgcttgatgcctttgctggtacagaagtaccatcttttgctgggatgatgcagatggattcagtgctgcaaacctggatagctactggcggcatgttggcgtcgagtgttccggcaatttcgctcatgcttgtgtatggctcagcaataactgcaacccacttggctggacgtcttcaaaacggtgatgccattgatgaaaagatggcaagtccagatgtcgcgaaaaatgccccggtgatgcaatcacagtcaatgttccagaattcagcccttacgggttctgctatgaccggcgcgtcaaacctactaagcagtttctctgtcggaaacgcagtgggttcaatggtcggctctgcaaaagaatccatgactcaggcaacccaagcctttagtcgtcaggttgggaatactatgagtcgaacttttggtgaaaagctaagttacgacaacctgtcttcgattggacgtcagatcggctcatctaactccgcatctagcgccgttgttaatcaggttactgatgacctgcaaactcggtatggttttggagacgataaaaaagatgctgtacgtggcttggtatcgggcgtgctatcgggaggcctaagggtcggtggcgatggaactattactaatcccggtgagaaagaagttgctgataagggctttcttggaaggcttcttggtactggcggcaatgattctccacagggcaacttgccaggagtcgataagccagactcatctcgtgtaccaaaactatcaagggtacgagcagggctggatttaggtggtaactttagtggccaagttgagtcgtcagaaggcagttctcgatctacgaccgcaaatacgctcacaggagagatgcaaagcttggcatcaagtgattcacgacgtgctgagtatcgcgatgcgatggttaaggacctttcagattcaagacgttctggtgttgagatgtccttgtctaaccaagactatcaatcacttcagagttcagcacaagacgttgtcacggcatcaaatcgctttagtgagcttgatcaggccagctacagtctatcaggacaaagaaatactgatggtgcgacgttaacccgactagcggcggataatcctgaagtcatggattatttaggtcgctatatgaaccagcatgttgaagccggtaaccgattacgtgaaaaccttccaatgtatcagcgcttgctacctgatgataatcaggcgtatgtggccgcagctatggagtctttaacctatagcaactcttcaacgcccgctgaacgcgacaatgattatcaagctgcaatgacggttatggccatggctaccggagccgatttacgatcaattcagccgcgctctaatgaaggcatgtcatcaactgcccccacttttggtggtattcaaagccaagttgaatcgggtgtattgggaggctacgaggatgcagcagcagttcaaactcagttcaacgcagctcaatcggcttaccaaaccaatctgtctggtatagatggacagttgaatgcgcatcagcagcaagcccagcaggccgtagcttctgacacaagtacctatcaatctggactaaacagtgaagctggatctcagtggcgatcacgcattatggctgatgatagcggagtctctggtgctgaaatgttcttcaacagcgccagtgctattggtgatttcagtggcaaacatactgatgcagcactgcataccttgaatcactttggcgaagactatgagagttacaaagaacaagcgcttgaagatcctggctcacgaggtttcttgcacaacgctacggtggccagcaaatcaacctgggatggcttaaaagccgccgttgatgccggaacctctttggaaaatccattgacggcgtttaatgatgcatacagtggatcgagttcgcagtatgcctccgaagtaaactggggcactaagtctgaagccatgttggcgggggcatttggtgcggcagttaacaatcggtatggtgagttcttagaacagtacgccgatgattttaaacaggaagcatacagcgaagggcagagaatgggattgactccgatacaaagtcaagtgttcgctcaagctttcaatgaaggtttggcagggcgcgttttcaactctgaagactcatcgagttggtctcctgaaatgcttggtctaagggagcaaatgctaaatgactatcgtcaaaaggatgagagtggcgcttacatccctgacagtgtgtccgaagaagataaagcatttgtggataagcagatagcggtgatctcaaatgcatcccttgcgggagattatgctcagaacaacttgatcgatattagggcctataaccaggcatcaggaaggaactga

SEQ ID NO: 112418 - DNA, 534 bp, Enterobacter aerogenes
atgattgataacctgtccaaaagtgagttgtttacccgagcctcgctgcttattaaatacggatttcgaacgaccattatcgcgctcgatactggtttgccaatccacattatcagaaggctgcacaaagaagtgactggcaagtcaccttgtcctggtcaattgcctgaatctgatgccattgttaaaagcagaagagccctagttgaaggctccctgctgatggcgctttatgtcaatattggtggtgataatgtctacaagcaattaaatatcgatgctttgatgaaggcttacgatgcgtacttggttgcaagagaagaggcagatcttccagctgagatcccctggaaaaaactgaccatcaatgaaggttgggttctagctcgtgatttaagatcacagcttgcatccttacaccggtgtcgatgcggtagtctgtatttgacggtatctcaacagcgcattcagcttaaatgtcctgtgtgcgagattatggccgagcaaaccactagagcactttttgaaaactaa

SEQ ID NO: 112419 - DNA, 300 bp, Enterobacter aerogenes
atgacaaccaatcaacaagacttctatcaattaaatttggcatacctacacgcagcacgggaattggcgcgaattgatccgcaagaggcggtcttgcgctttggacttacacgcgatgtggttgatgcgctgattaatgctggagttgacgacctgcaacgagtggcgacctcatcattcatgctgtttcaaccaaggggtaaccaaagccaactgattgagatggtgaagagcaaaggcacaggtatcccaagaatcgcttatttattatcaaccctaaacaacaagggggatgcatga

SEQ ID NO: 112420 - DNA, 549 bp, Enterobacter aerogenes
atgaaaacgattaaagcaaaaaccattgccctagtgatagccatgtccgcaagcacttcagtctatgcgtttccgggctatcagtgggaaaaagcagcacaaagtgttggtattgatccagtcatgctctacgccgttgccttggctgagtcggcctcacatcgaggtctcaacatgaccagtccatggccatacgcaattcgcaatggttcaaacgcaacctacgccaaatctaagacagaagcggagcaactgttaaaccaggcacttcaagagagtgaaaaataccagctcgatattggccttatgcaaatcaatttgcattggcatgggcatcgagtgagctcagcagccgaactgctagaccccgtcaccaaccttacggtcggctccagtattttggccgaagcaatcaagtcttcaccaaacgatttagagcttggcataggccgctatcacagttggaacgaagagcgtgcacgctggtatgggcaaagagtgctttctatctatcgcaatattttacatgaactggaggtccgtcaatga

SEQ ID NO: 112421 - DNA, 663 bp, Enterobacter aerogenes
gtgcaggaggttgataaacgcgagtttgctgaagtttggggagcagcttgggccatgtatggcaaaagcgtatcaccgcaattgctatccatcgcatttgaagcccttcgtgcttatagcattgaagaagtgcgaatcggtctgactcggcatattcaatcaccggatactgggcaattttttccaaagcccgctgacgtcatcaagcatatcgacggcaactcgggttcaagagccatggttgcttggaacaaagttgacaaggctgttcgtcaggttggcgcttggacatcagtgatgtttgacgatgcgcttatccaccgcgtgatttcagatatgggtggatgggttgaactctgcaaggttgatgacagggaatacccctttaagcaaaaagagtttttaacacgctaccaggcttacttgctgcgggacgaagtgggtgaatacccaaggctattacagggtattgccgaccatcagaaccagcaaaaaggatttgatatgcaagcgccggttgccgtgggcgactggtcaaaagcggcacaagtttatacgagaggcatcgctgactttagcgcagtgcctttaaaaagaataagcccgaaagccattcaggcgcttctcggaaatcaattagaggacaaaaatgaaaacgattaa

SEQ ID NO: 112422 - DNA, 870 bp, Enterobacter aerogenes
atgcgtgattatggcaaggtctatacccgcttttggctaaagcaaaacgttttgtcctggagcgactctgcgaagttgctaggactgtatttgcttacatgcccacattgtaatttgcttggctgctttcggttgccgattggttacgttgcttctgacttgaactgggatgatcaacaggttgccaaggctctaaatgagttagaacaagatcagttcctgattcgttgcgaggaatccggttggactttgattcggagctttctgaagcacaacccaatcgaaaacccaaaccaaggtaaggcagcctttcggttacttaaagatgtaccttccgacttcgttggtatggcatcgcttttgaagtcacttgccgctttccaagctcggcttccagaagaattttcatcattgtttatgcctgatggcaacccggtaagggactctcaacggtcggatgactctgagagaagcaataagtcaacagttaaaactgttgcccacatacagtttgaagacttctgggaggtacaaatacgcaaagaaaagaaagcgaaagctaaagaagaatggctacgcatgggcctcaatgaagaccatgaactcgccttggaagtgctaacacgctggaaagagcaacgtgacaaccgattgcagtatcaagatcggactaagacccctatgccacataactggcttttaaaccggcaatgggaagacgagtacgttcgcattgatgaagtacagcaatcatcgacgagcctaaagggcagcaatcaccaattgaatattgaagaaagcaatcgtcgcatcgctgaaagctgggccggaccaggtattcgggaggttcgttcaagtgcaggaggttga

SEQ ID NO: 112423 - DNA, 252 bp, Enterobacter aerogenes
atggaagtgttcaacacgacacaaaaacatctccgccgtgccattgacttggtcggcgggcaatcagcattagcgcgagccatcaactcaaaacagcaaaacgtctggttttggttgaataaatcagggcgtgttcccgctgaattcgttttacccatcgaacaagctacgcaaggacaggtaacccgatcccagttaagaccggacatctatcccgaatgcccaagcgagctgaaagccagtaaccagtag

SEQ ID NO: 112424 - DNA, 648 bp, Enterobacter aerogenes
atgaaaactttatccgaacgactaaaccatgccttgcagcttactggggtgactcagtctgagttggctcgtcgcattggtatcaaacagcagtcgatcagccagatttgctctggtaaatcggctaggtctcgttacaccatgcagatcgcggaggcgcttcgcgtgaatgctcattggctcgccacaggtgatggcgagattggcttgggggtcggtaatgtagaagtcgggcctgatattaagggaagaattcctctcattaactgggttcaggccggtgattggactgaaatagcggagggatttgcccatgaagatgctgaggagtggcgtgaagtcactgggaaagcacatgagggttgtttcgcacttcgcgtaaaaggcgacagtatggaaaatccaagcggaaaaaaatccatacctgagggagcagtgatcgttgttgatcctgagttaccgtactcttcaggttcattggttgttgcgcgtttggatgattcgaaagaagcaacctttaagcagttggttattgatggtgaacagaagtatctaaaacctttgaacccgcaatacccggcaataccgatcaacggcaactgcaccatcatcggtgtagtacgacaagctatcatcgatttctggtag

SEQ ID NO: 112425 - DNA, 318 bp, Enterobacter aerogenes
atgagcattgaacaagaaattattgattatatatatactcatcatagccataagaaatactgtttttttggcgaacgtccagaagtcacgttagatactgaattaacaaagggggggctgaatatcatctgggaagatgcagaagatactttagattactatttcaaacaatggaatgtaaaaatgaatggcttcgaaattatctattactttgaacctgagtttttaggttccctgcctccagagaagccgcttaaaccgctaacagtacaaatgttggttgagtccgcaaaagcaggtgaatggttgtacgattaa

SEQ ID NO: 112426 - DNA, 741 bp, Enterobacter aerogenes
gtggttcagtgtaaaaaaagggtgtggaaaactgtagcttcaaaggaaacaccagctagctctctaacaattcaagaaatcgatgatgaaataaaagaattcattaattcagggaaaattgctgatcgttatattatagcaattacggggttgagggataaatcacttcagaatcatattgactccataaatgactctaaagttaatacttttgaagtaaatatctggttctgggatgaatatagtgaatggttaagtgaaaaccctaaaatagaagcaaaatattatcacgatattgttaagtttcgcagtgaatatagctctgaagaattgttctgtgaaatgcttcattctgcttttgatcgacctgcctttcatactgaattctattgtgaaaacaatatagacaactttttgcaggcacttgagagtattcaacaagcattaactacaggaaatcttgtaaaccgagacgggcatgtacaaaatcaagttcgtatacctgataaaagaaaattacctcttgaatataaacaattgaagaaaaaaattcaaaatctaagggattatactacgcaggaggtacgtacaggtgctatcacacagcagaatgagtggttaatcattagtaatagtgtcattataggaaagatgaatgcatttagaatagagatcatacatctattaaacaaaattctagaccactatgggtttgaacatttttcattagaagcctattaa

SEQ ID NO: 112427 - DNA, 933 bp, Enterobacter aerogenes
atgactagtcgcccacagatgattattaatgttcttcaggctaatcctgatgagcaatttacagcccgtcagcttgcccaaaaaatcattgatcactatggcgcagagcttgctgtaaagcgtcaaaatcctcgattcgccagtgatgaagatttcttgagtcaaatagctgctgaagtcggtgggagcagaaccgttcaggcaaaagcgatgtgtcctcaggttatgacgcgtgacaaacctcggcccagactttattactggggtaaggaaatcgataatggcgtgcaacaagagtcatcttttgatattgctccgactccgtctgctgagacggtagctttttctgagcatgctctttacccgcttttgattgagtacctttctgaagaagaagaattgctttgccgtcgtatcgatgaaaagcgttcaagcaacaacaaaggtcttggggcaaaccattggctttatccggatattgttgctttgcagcctctcgataaaggttgggatagcgttgtgcaaaactgcgtacggtatagcgaagggcgtttaacccgtctgtggtcttttgaggtaaaacgtcagcttaaccgtagcaatgttcgagaatgtttcttccaggcagtgagcaattcaagctgggcccattttggttatcttgtcgcgaccgaaataaatgaagataagcagcgtggtgtagaaagagagctacagatgttgtgtgcattgcatggtattggcgtgatccttcttaatccgcaagatcccggtaatagccaaacgctgattcctgcacgagagcgaacaagtattgattggcaatccgtcaaccgcttggtggtagaaaacaaggattttaaagagtttatcgatctggtttccgattatcaccagacaggaaaaatacacaaagctctctggaataaataa

SEQ ID NO: 112428 - DNA, 891 bp, Enterobacter aerogenes
atgaataaacctaacttcggtaataagtgttttattattaatatttctgagctgctatatgggaaagagttgcctattaatgtgaaatcaagcgtaaaatattctcagatactatccacggtgaaagcagttggtattatagaacccatagttatttatattaataatttgtcagaaaagataatacttgatggtcacttaagagttgaagcatcaaaggatattggactatccactgtgccttgtttgatttctgaggatgaagaatcttacagctataacaagtatgtcaatcgattaccagttattcaggaatatcgtatgatattacaggctgtggatgctggtgtttcagaagaaaaaattagtcaatctctgaatatatcagtagatacactcagggcaaagtttagattacttgatgggattagcccggaaactaccgctttattagcaaatcaacatgttcctcaagcaatattcgctattttacgtaaaatgaaaccagaaagacaactggaggcggtatccacgatgatgagtataaataatttcagtcgtaaatttgctctatcattattacattacactcccgatgatatgctaataaatccgaaagattcgaagctcaagcagcaagacatcgctaaaaactttgccagaatggaacgcgaaatggctgcaatggaaatggagactaagcaactcgaaaatatatatggtacaaataatttaaagttggcagtgattattggtcacattaagaaattgctatcaaattatgctgtattaaattggctggttgataataacccagattatttggctcaactaaagaaaatttctgccattgactcattgccaatgtgtgaagacgaagagttgcattga

SEQ ID NO: 112429 - DNA, 747 bp, Enterobacter aerogenes
atgtcatccaataatagcagtagcggttcaacactttctttattaggctttgtagatgggttatgggatttagccaaagtagcaaaagttatttatttcaccttatgttttgatgtcctatttttccttctaaaagggaatgggttgtttggtataaaattaggtaaagaattcgatctctcactcgcagatctggccggaatgattatttccttagggattttctcgtcattaatattagaggtaatgacattgtttttttacatgttgttatcaaaaataaaatttagcgaatttttacaaagtaaagacgagaggagctatcaacgttcttcaactgacgtttttatttctgaactgcgagatgatgccttagataacggtgatgatttgtcattcaaattgtatactgaagaacaaacgaaaagagagaagaattttaaagaaagaaaactggttgaactaatttctttcgggactttctttgttttctccatagagtggtatctatctgcatcagacggctccagcaagatgtttattgactggttatgggagcaatctaagcatagcgatccaataacaccccattttctcattggccttttagtttcgtctgcattacttttctacgcagtggcagtttgttggcctacagatcatgaccgtaaaatatattatcctaagcttgctaaaaaactgagaaaaaaagaagaggactggaagaaaaaatttgataacatgtaa

SEQ ID NO: 112430 - DNA, 195 bp, Enterobacter aerogenes
atgacagcagtagcgcaccaggtaaccccttttctaacatcttacgaagtgatggctcgttaccacattagctatacgacgctctggcgaagaataaaagatggcagcttgccgcaacctcgtatcaaccgaaatacacgaaacaagctgtggcacattgaagatttggaggagtatgagaagaaagaggactga

SEQ ID NO: 112431 - DNA, 1242 bp, Enterobacter aerogenes
atggcgttatcagttagctggctcgatgccaggttaaataaagaagcaaaagaaaccgtagtaaaagccgaccgagatgggctaagtgctcgggtatcgcccaagggcaaaattgtttttcagtttcgttatcgtttcgatggcaagcaacagcgggtagacattggtacttacccacttatgaagcttgctgaagctaggaatgagctggataggttaagggcggtactcgaccagggcagaaaccccaagctctacctacagcaggaacgggccaagtattctgccaatcaaagcttcgaatcgatttttcgagactggatagactctgccggtaagcaagggctaaaggagaaaacgtggcactaccaaaaacgcagcagtgaaatatatttgctgccccgacttggcaagtacccattaactgacatcaatgaattgtccttgcgaaactgtcttcgtgaggtttcggagtcgtccccttcaaacacagaacgtctggtgtctgtgctgcacaagttttatgactggctgattgatgaacaaattttggaaattaacgctgccgctgggatcacagcaaaaaaggttggcggtaagaaaggcaaacgaactcgggtgctaaatgacaacgagatcaggatactttggcgctatttgcatgagtcaaaaatcactgagaagaatcgcatctacataaaactgcttctcttattgggagggcgcaagggcgaactcattcaagctgaaaagcatcactttgacttgcaatctgcaatgtggacagtgcccatagagatccgcaaacaaggtgagaaaattggagcgccgatcatgcggccattgattaagccagctattgagctgattgaactggcgatgcagatgagcaaatcaacctacttgtttcccgcgaacggacaagaagagcttgccacaaatggctttgataccactattcctaacaatgtgaaaatttgggctcgcaggtcgcttagtgtcgagatggaacattggtctatgcatgatcttcgcagaactatgcgaacgcgaatgtcggccatcacgacgcaagaagttgccgagttgatgattggccacagcaaaaaagggttggatgctatctacaaccaatatcagtacctggatgaaatgcgtcatgcttacgacgtttggtatcaacagctagagaccatcatcgagccgacaggctttccgttcaactggcgtttcggacaataa

SEQ ID NO: 112432 - DNA, 975 bp, Enterobacter aerogenes
atgtttgtactaggcgtagatatcggttactcaaacctgaagctggcaattggccaatcaggcagtgaaccgaaaaccattattctgcctgcgggtgccggtcctgcggatcgtatgccagagcgtatcggtggaggcgatgatgaaacttgtttgtatgtgtcagtcgataatgagcgctgggccgctggtgttcctgctggacgccttcaaggctgggaacgagagcttcacccggaatatcccaccacaaaaacctataaggcactttttcatgccgccttgttaatggctgaaacagaatccatcgatttggttgtcactggattaccggtttcccagtttcatgaaccacaacgtaaatctgaccttgtgaagcgcctaaaaggtgtccatcaagtgacgcctaaacgcagcatcaccgttcatgacgtcaaagtgctgccgcagcctgccggtgcctatatggatctagttcaaacaggtggtgatttgggcttgattgaagaaggtcgcgtcgtcgtcatcgatcccggctttttttctgttgactgggttgcccttgaggccggagaaattcgctacagctcatcaggaaccagtcttcaggcaatgtccgtgctactggaaaccattgataagctgatttcagaagatcacggtgccaaagtcggaatggatcgacttgaaaaagccatgagaactggcgacttacaggtcctgctatttggagaaaaagtcgatatttcaccttatctgaatgctgccatgaaaaaggtagcgcctgttgctcttacagccatgcgccaatccatgcgtgacgaaagcatcaatgcggacttggtattgatcgccggaggtggagccatggcttataaggaagcggccaaggagattttttcacgaagcaagataatcgtgccggaacagtctgttttggcgaacgtccgaggcttctggttttatggggcctga

SEQ ID NO: 112433 - DNA, 426 bp, Enterobacter aerogenes
ttggtagaaatcgtcaatgaacaatggaaagcagaggtatcagatttacttcagcaagaaacagacaggctaaaagcgctggcacgagctgaagttgatgacttttgggttacccattacaaggttcgagagaatgagccctttaaagactggggtctgcttggtgtccgtatcagagactttaagtatggctttggcatagagtggtacatcaacagttttcacggtcaacgaggcaagcgcgtagtctttagcaaggggctgcgtatatcaaagacgaagctgagatacgcatttttggactgccaaggtctagccaaagaatgggagttagcgctggccatggagaaagaagaattcttcagtgatattcgacgccaggttgataagctcaacatgctgcgtcgcagagtgaatgcatattga

SEQ ID NO: 112434 - DNA, 1104 bp, Enterobacter aerogenes
atgcggcagaatggttgctcacttactcgtctatttttagcgggaattcttagccaactgtatgagctgtatgcggatttaagcagtcgagtgatgcgcactttggaggagatggcaccacgagtagaggtttactccattgacgaagcgtttttggacttaaccggtattgagtctgccatatctcttgtcgagttcggacaacaagtgcgagagcgcataggccactggattgggatcaccgtctgtgtaggcattgcaccgactaaaacactcgccaaactggcaaaccatgccgctaaaaagtatccagccactcagggcgttgtagacctgaccaatccagaacggcaacgtcgattgctcgcattagttccggttgatgatgtttggggcgttggtagacggctttctaagcgtttaaatgcgttgggtatcaccacagccttagatctcgccaatgcctctcctagagccatcagagaccagttttcggtggttttagaaagaaccgtcagagagctcaatggtgagtcgtgcattgaacttgaagagatcccgccaactaagaagcaaatcgtctgtagccgttcatttggcgcaaaagtaacgcaatttgaattgttacgtgaggccgtatgcgaatacgcaacccgcgccactgagaagctacgcaaagaacagcagcaagccaaagtgatgaccgtgtttatacgaaccagcccctttaaggacaacgagccgcagtacagcaattccgcatccggtgagttactgatccccagttgcgatacgcgggattttatcgagctggccaatcacttactcaagcgaatttggaaggatggttttcgttatgccaaagcgggcgtcatgctgtctgacttttacgatcctggcatgtttcaaccaggactattcgatgacgtatcgacccgcgctaatagccagcagttaatgtctgtattggacaccattaaccaaagcggtgccggaaaggttttctttgctggacaaggtacgaagaaagattggtcgatgaagcgagagcatttgtctcccgcttatacaacacgctgggaccagttaccacgagtgaagtag

SEQ ID NO: 112435 - DNA, 2979 bp, Enterobacter aerogenes
atggccatcaaaaacgaaattactattctcacgagagcagaacaggcagatctttattccccacccattttttcaatcgaagaacaacgtctgtacttttctctgaacgatgcggaattggcagtttttcggtcaattcgtctcagagctcatagatgttactttgtcgcgattttgggatacttcaaatcaaagcccgtcatcctagatatcgcttactcgcaggtttctaaggatttaatgttcatcagtaaagagctgcttggcggcaaggggctcagaccattcactccctcacaaaaacaaaaagatcgactctacgcaaaagtattagaccttgctggttatcacaaatgggacgaaagtcagcacttcaattctcttttcgaccaccttgttcaggtgggcaatgcctggctggagccgcgttacctctttgatactgctattgaattcctaaccagtcacagcattgctatccctaggtacaccgtactccagagactgataagcagagcgatgcagcaggtcagaaaagacctggcgcaccaacttaatcaactcaccagtcctgaacttcacgtctttctggacagcataacagccattgatgacggactaagcctgaaccagctcagaggcggtgcaaaaagtctgaccgtacctgaacttaaaaaagagcttgccctttatcatcagttagggccatggcgcacgcaaatcaatggcgttatcgatgggcttaatctgtctcttaaaaatcgacaacacttcggtgagctcatcaactattacggtagtaaactcaaacgattcaaacgcgcacagcagcatctatggttgctatgtcacctgacagagcggatacaactggcactggaacggttaactgatgggttcatttaccatatccgcaagcaacaagaagctgccaacacctttgcacaacaagcagtgttcctgtcctggcagtcagccgcggacaatgtcacgaaagcggcagagttactgcatctgtttgtggatgagaacattgatgataatcaacccttctcagtagtcagacaacaggcattgaaggtcatgaatgacagggatatccagaccctctgcctttacctgaaaaaacagaaacggaccgtggaagagtaccagtggcaacattacgatgaacaatgcaatctcctggagcaactgttaaggcaggtgtttttgtgccttgaatgtgaggccggtaaaggctcagaagccgtcgtcgcccaacttcaacagatgcagacggaaatcgcattcggtggaccactgaagacgatggatacgtcgctcatcccgaaaaagcacctcccatggttggttaaacaggataacgttaacccgcaacgttacgaatggctgctctaccggcagttaacctcacgactgaatggacgcatttatttgccaaatgttaccaaataccgcgcactggaagacgacctgatcccccagacatcgcaggataccttgctggcctcatcaacactggacagactaaaacagcccgcagagttattgttacaggagaaacaacaccggctggaaagtgcactcaaagacgttgctctccatattgatgagggagacaatcgaaatgtgatcatgaaaaatcgtaccggtacccgctggcgtctgccgaccaaaagcgctacatctctggtcaacaatcccttttttaagcgaatgcaaccggtcggtatcgcggatgtactgcggtatgtagagcgcgaaaccgggttcatgaaatgtctgactcatgtacttccgatacaaaaacaagggttcactcatcaggatgatttactggccattctgattgccaacgccactcaccgtggtgtgtatggcatggcgcagatctccgatcgaagctatgaacacctgagtacggtgcaggccaactatatccggcctgaaacgctgcatgacgccagcgacgtgatcaataatgcggttgcagcgctacccatcttccgccactaccatattcaggaggaccagctgcatgccagtgcggatggtcagaaattcgaaacccatctggaaacctttaaaacccggtactcctctaagtatttcggcaccaacaaagggatcacggccatgacactggtggccaaccacagcgccctcaatgctcggatcatcggttccaacgagcacgaatcacactatatttatgacctgttacaatccaacagcagtgaaatcaaacctgacgtactctcgacagatacacacggtgtcaatcatgttaacttcgccttactggatctatgcggttacagttttgcaccgcgatacgcgcagttcagtagtgtcatcaatgatctgtttgatgtgactgaaagtgaacaaggcagcaccatactggcgctaaagaagcctatcagaacgaatgttattacaacgggatggcaagatatcaggcgtattgttctgtcacttcagacaaagcggacgacacaagcaatgctggtaagaaagttgtctggttacccttctggacacccaatattacaggctctgacggagtataatcgactggttaaagcgcaatatttacttgactacatcgacgatgccagtttgcggcagtatgtgcaacgtgccctgaaccggggagaagcatggcacttccttagacgagccattgcgtcggtgaatggtgatcagttccgtggcaaaaacgagtctgaaatcgctatctggaatgaatgcgcaagattgcttgccaacgcgatcatctacttcaactccgcgatactgagtcatcttctgggacactttgaagcgagaggagatgaagagaaagcgggtatcactcgtgctgtttcgcccgttgcgtggcaaaatatcaacttaagcggaacgtataacttcactaatactgggaaattgcccaatattggcgaaataacaaggccgatagtggatgattag

SEQ ID NO: 112436 - DNA, 1485 bp, Enterobacter aerogenes
atggccatcaaaaacgaaattactattctcacgagagcagaacaggcagatctttattccccacccattttttcaatcgaagaacaacgtctgtacttttctctgaacgatgcggaattggcagtttttcggtcaattcgtctcagagctcatagatgttactttgtcgcgattttgggatacttcaaatcaaagcccgtcatcctagatatcgcttactcgcaggtttctaaggatttaatgttcatcagtaaagagctgcttggcggcaaggggctcagaccattcactccctcacaaaaacaaaaagatcgactctacgcaaaagtattagaccttgctggttatcacaaatgggacgaaagtcagcacttcaattctcttttcgaccaccttgttcaggtgggcaatgcctggctggagccgcgttacctctttgatactgctattgaattcctaaccagtcacagcattgctatccctaggtacaccgtactccagagactgataagcagagcgatgcagcaggtcagaaaagacctggcgcaccaacttaatcaactcaccagtcctgaacttcacgtctttctggacagcataacagccattgatgacggactaagcctgaaccagctcagaggcggtgcaaaaagtctgaccgtacctgaacttaaaaaagagcttgccctttatcatcagttagcgccatggcgcacgcaaatcaatggcgttatcgatgggcttaatctgtctcttaaaaatcgacaacacttcggtgagctcatcaactattacggtagtaaactcaaacgattcaaacgcgcacagcagcatctatggttgctatgtcacctgacagagcggatacaactggcactggaacggttaactgatgggttcatttaccatatccgcaagcaacaagaagctgccaacacctttgcacaacaagcagtgttcctgtcctggcagtcagccgcggacaatgtcacgaaagcggcagagttactgcatctgtttgtggatgagaacattgatgataatcaacccttctcagtagtcagacaacaggcattgaaggtcatgaatgacagggatatccagaccctctgcctttacctgaaaaaacagaaacggaccgtggaagagtaccagtggcaacattacgatgaacaatgcaatctcctggagcaactgttaaggcaggtgtttttgtgccttgaatgtgaggccggtaaaggctcagaagccgtcgtcgcccaacttcaacagatgcagacggaaatcgcattcggtggaccactgaagacgatggatacgtcgctcatcccgaaaaagcacctcccatggttggttaaacaggataacgttaacccgcaacgttacgaatggctgctctaccggcagttaacctcacgactgaatggacgcatttatttgccaaatgttaccaaataccgcgcactggaagatgatctgatttaa

SEQ ID NO: 112437 - DNA, 291 bp, Enterobacter aerogenes
atgacccaacgaagaaaacctagaaaatatactgatgagttcagagaagaagctgtaaagctagtcactgaacaaggttacagtgttactgaagcagccaaatcattaggcataacaactaagctgctttacaactggaaagacaaactagccaagcaaacttcaggcgaagcattaagcaaagatgagagagctgaactggttaagctcagaaaagagaataaacgcttacagatggagcgtgagatcttaaaaaaggcgagtgccttctttgcgaaagaaatgaaataa

SEQ ID NO: 112438 - DNA, 798 bp, Enterobacter aerogenes
gtgagtcggtcagcctattacgcatggctgaggcgaccagccaagattattagtgttgaagagttaatgctttatcgtcgcatgaagaggttatttgatgatagccgcagtagtgctggtgccagaaccttaatgaagttgctacgcaaagaaggctttaaaattggtatttgtcgggttaagagcttgatgaaaaagctcggtttagtcgttaaacagcgagtggcttataaagtgacgactatgcgcaaacatagccatgcggttgctgataacttattgaagcgccaattcaatccagccagagcaaatcaggcgtgggcgggtgatatcacctatctaagaacgcatcaaggctggatgtacctagctgttgtgatggatttgcattctcgccgtattattggctgggcgttgagtaaacgcatgacggttgatttaaccatgagagcgatgcaaatggctatcaacctgcgtcaacccaaagcaggcttgatcttccatagcgacagaggctcacaatacaccagtaagcgttttcaatcattgctatggagcaatcgaattacgccatcaatgagtggttgtggagcatgtttagataatgctgtggttgaaaggtttttcggcagcttgaaaaatgaatggctattaaatgtttaccatttaaccagagaaagcatgaaaactgatgtagagaaatacatcaaatactacaactcagttcggcttcatacttcattaaatgatatgtcgccaattgagtttgaaagtgtaaggaaaaagtgtgcggcctag

SEQ ID NO: 112439 - DNA, 270 bp, Enterobacter aerogenes
atgccagtatttgccttggtggactgcaacaacttttacgccagttgtgagaagctgtttcgtcctgatttaaaagatacgccgattgtggtgctgtccaacaatgacggctgcgtggttgcacggtcgcgtgaagctaagttactcggtattaaaatgggcgtacccgtctttcaaatcaaagctgaaatgcagcgccatggcattttggcattctcgtccaactatgcgcttacagttgggaaatactttagacatcacatgttgtaa

SEQ ID NO: 112440 - DNA, 450 bp, Enterobacter aerogenes
atgagtgtctcgctgataggccgtagcggcgcacttgccttcatcaaagccaagcgccttcgtattccattgttcatggaacgtgtttctgctggttttccttcaccagcgcaggattatgttgagcaaacgctcgacctcaacgagctgtgcatcaagcgaccggctgcaacgttctttgtgcgtgttgaaggtgattcaatgattgatgccgggattcacccagatgatattctggtggttgatcgctctgtccaagccgaacacggtgacattgtcatcgctggcatccatggtgaactcacggtaaaggagcttcaactaaggccgtgcgtcatgctgatcccaagaaaccaggtgtatgagcccattcatattcctgaagggacagagttagagatatttggtgtggtcaccaatgtggtgcgaaacatacgccgtaagtcgtga

SEQ ID NO: 112441 - DNA, 906 bp, Enterobacter aerogenes
atgacaagagcccctgcgccatttccgctagagcgcctcgcggatatcccagacagaccagaagattttagattgctggagcgtattccattaacgcgtgagccgcagtcctggccacttgaactatctcctgtggtcggtgatgaacagccaatggtgctgctcgatacagagacaactggactgtctgccgatgacgagtccattattgagcttggtatggttaaggtgctttacagtccctcggctaagcggattgtgtcgattgttgatgtgatcagtttgtatgaagatcccggcaagccaatccccgagctgattacagagttaaccggtattaccgatgacatggtgcgaggccagcgcattgatgattcactggtagcgagttggttatccgatgatccgctggtggttgcacacaatgcacagtttgatcgtcctttctttgaaaagcggtttgctgcattaggccatctatcttgggcctgttcagccagtggcatagattggaaggcgctgggttttgaaagtcgaaagcttgagtacctgctgcttcgcttaggttggttttatgaaggacaccgagccgcaaccgattgtttggcgatggcctggttgttccatttgttgcccgagtccgttgcaaacttgttgtctgaagcagacaggcgaactgtgttagttcgtgcgtttggtgcgccgtttgacgtaaaggactatttaaaagaacgtggttaccgttggcatgacggcgttaaaggtgccaacaagcattggtggcgcgaaatcagcgaagacgagttgccgcaggaacaaacttacctggatgatttgtatcatcgtggctcagaacatgcccactatgactacaaagatgcccgtaatcgatttaaagctttgtag

SEQ ID NO: 112442 - DNA, 300 bp, Enterobacter aerogenes
atgtaccaagacacctacattgaatactggggcgaaatcttcgtctctgcccgcatcattgaatttggcatcacgttcgagcgctttcttaaagatccatggaagcacttgatgtcctgtggccaagactcagccccagacgcgattgctgaagggatgttgccattgctaccagcccaggcagaggttgctaggcgcattcgggagagtgaacaacgagccctgatgtctacagagtcggacaaaggggtatcgcatcgcggtaacatcgtggtgccattggttcgggtagcgcattga

SEQ ID NO: 112443 - DNA, 981 bp, Enterobacter aerogenes
atgacaaatgatggtctgaaacaaacggtaccagcgagttcactcgctaaagaaggcgcgaaaggaaagccagataggcttttgcagatagcgcagttgccacaagcaaccagggatcgcattgcccacatcgatttcactttattgtttaagggagaagcggtgcgggcggatttagtcgatcgcttcagcatagctgctgcacaagcaacgaaagacttcacaatgtaccgagagcttgcaccaagcaacattgagtatgaccaaaagctcaagttgcataaacgtggtgaagcatttgaacccttgttcgactatgacgttgttcgaacactggcaaccatcagccaagggtacggcgatggcttcagtggaaaggtaaaaccgcctctggcttgtgaagcgccttatcaccttaacaagccgagtttatcgatagtggcgaaggtcaccgaggccattcacaaaggcaaagccttgagcatcacttatgtgtcgttatcgagcggtgaaacaacgcgtgaaattgtaccgcatacgctggtggacaatggcctgcgttggcatgttcgtggttttgaccgcaagcatggccaaagcggagcgccaaatgggttccgtgactttgtgcttacccgaattaaagcagcggtcgtgcttgaggattccattctgtcagaggctgaacttgaaacccaagaccggcaatggaatcgctttgtagagcttgagttagtaccgcacccacgcatagagcacagcgaagcgattgagcttgactatggcatgaaaggtggtgttttaaagattgagattagagcggcaacggcaggttatttactcagacaatggaatgtcgattgctccaaagcagctcagctaaaaacacccgaatttcatttatggttaaaaaattatcaaactttatacggtgtcggtaaccttgcgattgcgcctggtttcgatagcgtcacagcatag

SEQ ID NO: 112444 - DNA, 1716 bp, Enterobacter aerogenes
atgaataattcagaacagcagtttttaaaagaactcgatgtaaagttgtggtcggcagccgatcggttacgtaacaacctcgatgccgctaactataagcatgtcgtgctagggatcatctttctaaagtatgtgtcagacgcttttgaagagcgccaacaagagttacgtcagttgtttactcaggacgatagcgatgacaatatttattacatgcctcgtgaagattatgactctgacgaagaatacaacgatgcggtcaatgcagagttagaactgcacgaatactatcaagagaaaaacgttttctggataccaaaaagggcaagatggaaatttataaaaagtactgcttctcttccgatcggtagtgtaattgacaaagatagtcatggaaatgaaattaaattgagatcaatttcatggttgattgacaatgcactggatgaaatagagtcgcatcggataaatgataagccagcaaatccaaagttaaagggagttttacctcgaataagtcgttacgaagttgaaaatacgaatctaacagagttaataaatagattctctgatacgagttttagtaatcctgagtttaatggaaagaagttaagcttaaaaagcaaagatattcttggtcatgtatatgaatattttttggggcaattcgcgttggctgagggaaaacaaggtgggcagtattacacacctaaaagtattgttactctaattgttgaattgctagagccatatcaggggcgggtttatgatcctgcaatggggtcgggtggatttttcgtttcaagtgaaaaatttattgaagaacacgcaaaagaaaaaaaatacaacgcatcagaacaaaaaaaacacatatctgtttatggtcaagaaagcaatcctaccacatggaagcttgcggctatgaatatggctataagaggcattgattttaattttgggaataaaaacgctgatacttttctagatgatcagcatccagatcttaaagctgatttcgtaatggcaaatcctccgtttaacatgaaagaatggtggagtgaaaagttacaaggagatataagatggatgtatggaacacctccaaaagggaatgctaattatggatggcttcaacatattatccatcacctaaattctaatggtaaggcagcaatcttactttcaaatgggtctttgaccgtaaatgctaaagacgaatatgaaataaggaagtccatcgttgatagtaatttattagattgtgtgattgctctcccgacacatttattcactaacacgcaaattggtgcatgtatttggtgctttagtaaagcaaaagacaaaagacaaaacagagcgaaaaatgtgctatttatcaatgctaaaaatttaggaactcttgagactaaagtaatcagatctctatcaaagtctgaaatagaacaaatagcggattgttataaagactgggttagatctgaaggatacaaagatcagcctgggttttgtagaagtgttgatataagtgagatagaaaggcataaatatgcccttgtaccaggtcgatatgtgggttttgacaggaaaaatcttgtatcgaaggaagcacagattgaaatgtttaagaatattcaaaaagtaagtaataggcttaatgaagtagttctggcggctgaaaaaacaaaacaaataatggagaaagtttcaaatggctga

SEQ ID NO: 112445 - DNA, 705 bp, Enterobacter aerogenes
atggctgaaccatttctattaagtcataaagattggtttcatggaactttagaggcttgtaaaaaaactggattaattcttcaggttgaatcaggtggcacacccaaaacaaatgaagatgattattgggaaggagatattccatggctaactcccaaagaaattactgacatggatggtgtttacgtcagtaaaacagagagaaatatcactactttaggtcttaaaagttcggcagcaaaactattgcctgcaggaacagtaatgctcagtaaaagagcccctgttggtgcagttgctgtcaacactgttcctatggctacaaatcaaggttttttgaattttacatgtgggccacttttgaggccgctttatttagcatattggtttcgcttgaataagccttatcttgacgcagttgctaatggttcaacatatcctgaactctataaaagtgatctctttgagtttcacatatcagtgccttcagtagatgtacaagacaaaatattgaaagtaattagcgcacttcagttttgtaaactatcagggcatgcactagaacaatccgcattagatatgcagcaacttagcaatataaaagcagaaagtaacgagttagaaaagacaataaatcaggtgatgttcctactattttcaggggagctttcaatagatgatcttagtaaaaggctctcattatga

SEQ ID NO: 112446 - DNA, 1155 bp, Enterobacter aerogenes
atgattggtttgtgtcaaaaaggtagttgccgaaagttgattggtcatactgggaagtgcgatccttggccgactaactgctggtcatttctggaagaaaaagataagaaaaaactttcaaaagcaggctacgcaacaccgcgaggaggaaagaagggggcttatcaaaatcatgtttatagaaacaataaagttatcattccttttgaaaagattaatgttattgatacttcaaactatgaagatgggtacatcgtaaggctgtaccctgatcaagcttttatttcttcaggtattttgagtgaaataaatttgccagatggtgagccactcgtaatcggtgaaaatgcttttgtattgtatcgctctcatcaatcttttgatgagtttccaccgcttgacgaatggtccgttcgtcacttggaggataagaatggaaatatcgttgaaaaaagaagttcagaagtattagacaaagggcattatattcttcgccttccaaaagttggtggaggcaagaaaattataaaaaatgaagttatcgaagggccaccgcaggggatttttgctcctgaatatgctaacaaggaaactaattttctatcacaagcatctttagcatggcaaattatacatacatcgtctagcccatatacagcatcacaagcattacatctgaaattaattctagatgagtgctcacttagtgatggggttcactataactatcttgggatgatgaaaggaaatattacaacttgcccactatgcctcaaaagaatttcatatgatgagcttcatagtcatataaaccttgagaatgaagaatctcttttaaactctggcctaatagtagatggaaccaatcgttctactacagtaaatctatttcatatgattccacttgaatatgaacggttgcatcataatcacttctacgtttcttgggggcatgcaacttgtaataccaagcttgggcagcgaagatgttattcgcttgctgaagtaaaggaaatggatataaaagtagctaagttaattggtgatagcattgaaacttttgggtggattagtgatgacgacaagatgattagatccccgaatggagctgtttggatcagaatctctgaagagctgtatatagagagggattaa

SEQ ID NO: 112447 - DNA, 771 bp, Enterobacter aerogenes
atgttctgcgcagacggtgaaaacagtgcggaggtgtactgcggggccaccacgatggcgcaggcgaaaaaggtattcaccccagccagacagatggcagaccgccttccgtcgctccgctcaaaattcaatatttcggtatgggtagatagcctgacccgaccagacggttcgctgttcgctcccatcgccggtaagccaggcgatggtgacagcccacactgcgcgattattgatgaatatcatgagcacgatacggatcacatgtatgaagccatgacgctgggtatgggcgctcgttcgcagccgctgacgcttatcatcaccacggcgggtacatcgctggaatcgccatgctacgacaaggataaacaagtcaaggagatgctcaacgggcatgtgcctaacgaccgtctgtttggcctgatttatgagcttgatgaaggggacgactggaccgacccgaccaacttcattaaagcgaatccgaacctcgatgtgtcgatttcgtatgacgatctgctggcggagatggaggtagctaaacaggttccgcgcaaggtaaacgcctttaaaactaagcgcctcaatatctgggtatccggcaaatctgcgttctacaacatgacgcaatggcatgctgcagctgatgaatccctgtgctacgaggactttgccggagaggattcagtatctatttctggaggggctgcgtcgtggaacggcgtggaccccaacatgtcacgaattgtttttttcttcggtccctaa

SEQ ID NO: 112448 - DNA, 597 bp, Enterobacter aerogenes; identical to SEQ ID NO: 79269

SEQ ID NO: 112449 - DNA, 1134 bp, Enterobacter aerogenes; identical to SEQ ID NO: 79287

SEQ ID NO: 112450 - DNA, 843 bp, Enterobacter aerogenes; identical to SEQ ID NO: 13691

SEQ ID NO: 112451 - DNA, 291 bp, Enterobacter aerogenes
atgaaaatagaacttaatacgacagagcagtttattagtgaagctgaatgtttgtataaccattatatgaataaacgactgcaaaatcagtctgtgcatttctaccatttgctgaaaaataaggaggatatggatgaagtgattgaaaatattatcgagaaaacaaaggtctttttttatggggctgaaggtgaacaaaaagcagaatggatctccgggagtgttaactatgtgaaagtaaaacagcatcttcgtcagctttggattatctataagtgtgtataccgctga

SEQ ID NO: 112452 - DNA, 276 bp, Enterobacter aerogenes
atggaaaataataccatcaaatgcccattttgcttcaaagagagtcagcgtggggttcacgtctgtacaggctgtttagcgacggttttatatggtgcctttcccggctggtatgctttcgtgatcatcctgttatcttttggcatgtcttttctcattggcatgtctacaggtatggctggagctactatcagcttgccagtaatcgctgttgttggatttgtcgctggaaaagtcattttctcagataatgttgtgttcagaagaaggacgtaa

SEQ ID NO: 112453 - DNA, 282 bp, Enterobacter aerogenes
atgttagatattggttcaaccattaaactatgccgtgaagcacgtaagctcaccttacaagaactatcagatagaacggatttaacgaaatcttatctatctcgtatagagaacaatcaaagagatcctactattacagcgttagaaagaatatcattagcgctacatattcctctaaatataatcatccttctttctgaaagtgaagagacaaatgatgagttttctgacatcaataatatgctcaaaaaaactataatggatacattagttaatgcataa

SEQ ID NO: 112454 - DNA, 414 bp, Enterobacter aerogenes
atgcataaaaattggaattattcaaataaaccacttgctaatttagagtctctattcaaaatgctggaaacaaatgaagagaggctcacttatcttttaaaaaacaaaaaaaattatttcaaaacggtgccggtaataagaaaaggtaaaaaaagaacgacgtataaagtggttggtgaattattaaagatacatgagcttattaaacagcgtattttttctaagatatcactcccagagtatattactggaggtaggaaaggagtcagctatattgatgattgtaaatcccatcttaataagtcaattatcattcaagaagatatgaaggatttctttccttctataaaagaagatctgatagctaaagcttttcaatattacatgaattctctcctgaagtttcgttattaa

SEQ ID NO: 112455 - DNA, 480 bp, Enterobacter aerogenes
atgatattgtcaatggcgctcaaaagtggggttagattaaataggaagaaatcaagggttttgaggaatggtcattctaaaattgtacatggtgtaaaagtaattaaagagcttagaccaacacaaaaaagaaaagataatataagggtgtgtctttttaatttgaagaaaaaagtgattgaaaaagaaagtgttatggatgtccttacgttgtattttaaaattagaggattaataaatacattaaagcagcaaggtgataagaatcatgcagagtatataaaacaagctaatcagttagtagctggtgttgataaaaaggaggcaataaaatcaatcaggaaaatgagaaaggttaaagatatcaggaaattaagatcgttatattcaaagttaaaaccattagggtatacatctaaaagtgtttctgccattttggatgttgaatataaaacctgtaaatgtaaaattaataactaa

SEQ ID NO: 112456 - DNA, 312 bp, Enterobacter aerogenes
atgaatacggatgataaaggtagaaagccgagatcagaaaaaaccattaagcaaaaaatagcatcagctcaaatgcgtctgaatcgccttaagagtaaagaaaaatctctatccaagagcgcagagacacgcttaaagatcattttgggtgcagaagtggctaaagctatgggctgtaaagttgaagatgtcgataaggagttcgtattggggatattattacaaacttcgaacattaatgcggatgctaaagcaagagttaaattacgagggaaaagattccttgagaatatggttggacggcaggagtaa

SEQ ID NO: 112457 - DNA, 1146 bp, Enterobacter aerogenes
atggatgaagtcaatgttgctcaatatttgagaatgtctacagaccatcagcagtattcaatattcaaccaatctcaattcataagtaatttcgcgtcagaacataagatgaatatcattcatacttatgatgactctggaaaaagtggggttacggcaaaccgaagactggcatttcaacagttaatagatgatgtggttgaagggaaaataaatattaaagcagttttagtttatgatataagccgttttgggcgatttcagagtatagatcaatttggatattatacccatcaacttcaaatgcatggtgttggcatcatatattgtgcaaaccctatcattgaaggtaatagtgactatgctgattttcaattatttatagatcgaaaaaaagcttcttctttaagtcgggatttatcacaaaaagtctttcttggacaagctaatctggctggtcgtggttatcaccaaggcgggcctgctggatatggtttacgaagaatgctgatagatgaaaaccataaacaaaaagggatacttaaatatagagagtggaaaagcatccagactgatcgaataattttagtattagggccggaagatgaagtcataacggttagatggatatacgatcaattcgttaataagtctaagccagagagggttattgcgtctgagttgaatcgaagagggattacagcagagcatggcactaaatggaccagaggaaagatacacgagattttaactaacgaaaagtatattggtcataatgtctataaccgaacctcttcgcgtttaaagcagcgtcttatccacaacccacagcatgaatggataagatgtgaaaatgcttttgaagctattatttctcctgagttatttttacaagcgcagactattattagtaacagaagtattcaccttagtaatgatgatttacttggtaaactctccgagctttttaaaacaaaagggaaactatccggtataattatagatgaagatgatgatacaccttcctcatctgtttataggaaacgttttggtggcctattacaggcttataaattaattgactataaaccaaagcatgattactgtctcttatacacatctccgagcccacgagaccgaggctga

SEQ ID NO: 112458 - DNA, 1266 bp, Enterobacter aerogenes
atgcagatatttttcagtgagctaaaaacactgtatatggagccaaatcaccaatttatccctctagatattacttttcgagattatattgattgtgatgcctatccgattaacacacaaaatgattgggaatattggttaacgcgtttaccacaattaccaccagccccacaattgccactaataaaagatccagcacagattgtgcaacctcgcttctcgcgtttacaaacatcattatctacttctgtttggcaagcactacaacaagttgctcagcaaaataatgttacgccagcagcacttttgattgctgcttattgcgccacattatccgcatggagtaaaagccctgagttaacaattaatttgacattatttaatcggcatcctgtacatcctcaaataaatgaagtacttggtgattttacctcattacaattactcgattggtatacctgtgatctttggtcaaacagtatctcaatgatgcaaaaacgtttacataaagatatgcaacatcgtagtgtttcagccattaaagtaatgcgtgaaatggcaattcaacgacagatgtctcatatagagatacctgtcgtttttacctgtgcattgggctataaacatgatgaaggttttctttctcatcattcatggctaaaacctgtttggggaatatcacaaacaccacaaacatggctagatcatcaagtatatgagtcagacggtgaattatatttaaactgggattttgtcgaacaattatttgactacacaaccattttttccatgttccagcaatatgaacatatactcactaaactggctactgaaccacaatcttggcaattgccactaaataaacttataccaagatgcaataatctcgtcatcaccccagttttcaatgccaaaaataatcaaaacacacattataaacaatctactgatacacaaaaaacaggtcagacaatacaaaaactacaacaacttgttaagcaagttattggaataacgttagcacctgaaacaaattttttcgaagcaggtgccagctctttacaattggttcaacttcatgcagcactacaaaaaaatggctatagccatattacaattactgatctgttcgctagtccaaatctaagtacattagcgcaattgctttggcaaaacacttcaccaacatgtgagcaatattccgaccgagacaaacacaaaaacaagagaaagaaacggttacaactacgaactcatagtagataa

SEQ ID NO: 112459 - DNA, 711 bp, Enterobacter aerogenes
  misc_feature (27)..(36): n is a, c, g, or t
atgctgaattttgaaactttctatggnnnnnnnnnncctgatgcacaaaatattgatcaattttggcataacataattaataaacacgatagctctcgtcttttttctgaagaagaactaaaagccgcaggtgtcgctgaacaaacttatcattcacctgattttgttaatcgtggcgcgccgttagatgaagcggaatattttgacgctactctatttaattattcacgctcagaagctgaacttatcgatccccagcaaagaatttttttacaaggtgcttggcatgctttagagcatgctggatatgccccttgcaatataaccatcaaaacaggcgtttttgcttcagcaagaatgagcagctatcctgcccagcaagatttagcattgcacaatattggccatgtccgtggcatgcaaaaattattagggaatgataaagactatctcgcaacacgtattgcatataaattaaatttaactggtccagcattaactatacaaaccgcttgttctagctccttagttgccgtacatatggcttgtgaaagtttacgctctggtgaatgcagtatggctattgctggtggaattggtatcacatttccacaaaccggtggttatctatatcagaaaggcatgcttgctcacaacgatcgattgtttcggcaaatgttgttgaatgttggtacatcactttacccatag

SEQ ID NO: 112460 - DNA, 606 bp, Enterobacter aerogenes
atgcattttaatcacccaaatcctcaattacaaatagaaaaaagcccgttctacattcctaaaaaccctaaagcttggtctagcagaatacgaactgctggtgtttcttcatttggtattggtggaacaaactgtcatatcattgtgcaatcattgcctgactcattagtatcaatcaaacctgaacaagaggtagacaataattttgaatactcattattgcttagtgccgccacaaaagagagtctaaaaaaacttgctggtgattatgcaccattaataaaaattaccccagcaaacattctggctcataatgcattgcagcaaagacaactcaacttaccatggcgcttatctatccccttaacaagtgagagtgatatttcactgttagctttctctcaaggaagtgctgattctttaatacaatatggtcatacatcaacaaataagaaaatagcgtggctattttctggtatgggatcacaatatcctgctatgggtaaagtgatgtaccaacattcaacaacatttgccgaaacaatcgatcgttgtgagcaagcatgcctttctgatatagataaccaccggtttgtggaaatgtga

SEQ ID NO: 112461 - DNA, 954 bp, Enterobacter aerogenes
atgttcaggttaaacccttttgcccgggcgggactgtgcgcgtccgtcgtagcattggcatttccggcgctggccgcaaatgatgacgaaacgctggttgtcaccgccgcggcgactgaacagagcgtcaaagatgcgcccgccagtatcagcgtgatcacccaacaggacttgcagcgtaagccggtgcagaacctgaaggacgtgttgcgcgatgtgcctggcgttcagctcaccaacgaaggggataaccgcaagggtgtcagcatccgcggtctggatagcagctatacgctaatcctgatcgatggcaaacgtgtcaactcgcgtaacgccgtcttccgccataacgatttcgatctgaactggatcccggtggactccatcgaacggattgaagtggtgcgcggcccgatgtcttccctgtacggttccgatgcgctcggcggcgtggtcaatatcattaccaaaaaaatcggccagaaatggaccggtaccctcagcagcgatgccaccattcaggaacaccgcgatcgcggtgacacttataacggccagttcttcaccagcggcccgctgattgacggcgtgctgggcatgaaagcctacggcagcctggcgaaacgcagtaaagacgatcagcaatcttccagcaacgccgcgggcgaaacgccgcgcattgaaggttttaccagccgcgacggcaacgttgagttcgcctggacgccaacggagaaccaggacattaccgccggctacggtttcgatcgccaggatcgcgattcagactcgctcgacaaaaaccgccttgagcgtcagaactactctttgacccataacgggcgctgggatgtcggcaatagcgaagtgaaattctacggcgagaaagtggataacaaaaacccggggcaggctgggaccattacctctgaaagcaatgcggtggatggttaa

SEQ ID NO: 112462 - DNA, 324 bp, Enterobacter aerogenes
atgactgatatcaccgaactggcgcagaggttaaaacttgaggtccatcgtgcggtaagcgatttcaatcctcagatgaatattaaaaccagagacctaaaagcgctggtagaggcgctggagaaggcgcaggagacgattgcatttcagcaaggagaaattaaagcgcttttgtcgtcgttggagtcccgcaccgtcaccgtgaagcttcctccacgagttgatagctcgaatgttccgtttgccgcgcatacctggaattgctgcctgaccgaggtcgagaagcgtcttaccggcgctggcatcaaggtgggagatgagtga

SEQ ID NO: 112463 - DNA, 213 bp, Enterobacter aerogenes
atgattgcacttgctgtagccggttcactggctatagctgcgccggtttttgccggtaaactctccatcgttatcgatgatttcggctaccgtccgcagacggaaaataaggtactggcgctgccgcctaccatctccgtcgccgtactaccgaatgccccccacgcccgggaaatggccactaaagcgctaatctgggccatgaagtgctga

SEQ ID NO: 112464 - DNA, 951 bp, Enterobacter aerogenes
atgaatattagagaagagtttaaatttgaagaagggcaagatgtaataatagagtttgagcgtattctaaaaaataacgatattaatgtaagtattgattcagatatggagtcaaaattcttatctgtctttgatattctttttcatttcaaaagtggtaagcctctggattcaaatgttgacaaacgagctttgtttagggatttttctgcactgtacgatctcgctttaaaagttgtcaatgttgaaagtaacagtgcttttaatcaacttattccgcatttgaacttattgaatggttgtgcaatttctcaaaacacaagttctctcattacggatcaggattctaataagattattgaactctatctagcatgtttatgtatgagattaagcaataacgtatcattagatcatccgcagaactctcatggtgataatccagatgtgattgcggaaattaacagagtaaattgggggtttgcatgtaaaactgttcatactataaatcctcaaacgatatatgagaatattaaaaaggcagtagatcaaatagataagtcaaaatctgatgttggtataactgttattaaccttaagaatgttatagatcatgacaagatatggccaaaagatacttctttccaatctgtcgatgccccgctgaaccaactttttaacaatattgatatggttaagacatcattgttaaagactattggtaaggatgaactattgagtgtttttgaagggaaaaagtcattgccaggtgttatttttattgggcaaagcgtatcctctgttttccttccggaaacaaattcaccaactgctacaagattgaatgtaatgcgtttgttttctttggatgacggagggtttacagatgagcaatttaatactttgaatgaaattaatcattacatgcagttggcaaatcgtgatttttaa

SEQ ID NO: 112465 - DNA, 924 bp, Enterobacter aerogenes
atgaacttcttcaaaaatgctcttatttaccggctctctcgcgatattaccatcgtggaagaacacaccatcgcggatctggcagacaagcttgaaccattccgtttctctccttgcgggagtcaggatatggctaaatccggttgggtatctccccttggacagtattctgaccagctatttcattttgttagcggtcagcttctgctcgtgatccgccgggaagagaaaattatcccacgcccaaccattaccgatgagctcaacaagaaaatttctaagcttgaatcagaacaggcgcgacgtctgaaaaagactgaaaaggatgctctacgcgatgaggttttacatagccttctccccagggctttctcacggaacatcttcacgcgaatctgggtgaataccaccgatcacatggtaatagtcgatgcctccagtgcgcgcagtgctgaagatgccctggcactcctgcgcaagaccctgggatctcttcccgtcgttcctttgacaatggaagagcctgtcgagctaacgatgactgaatgggttcgttcaggcagcgcgcctaatggttttaatctgggtgatgaagcagaaattaaagctgttttggaggccggaggtattggacgcttcaagaaacaagacctcgtaagtgacgaaattcatacccacatcgaagctggaaaggttgtcactagattatacctcgattggcaggatcgtattcgctttaccctttgtgacgacgtatccattaagcgtattaaattcgctgatgagctcgtatctcaaaatgatgatatcgaccgtgaggatgtagcacagcggttcgatgctgatttcattctcatgacaggtgaaatgagtgctctgatttctaatttgaccaaagccctcggcggcgaagctaaacgataa

SEQ ID NO: 112466 - DNA, 234 bp, Enterobacter aerogenes
atgaacaacgaaattatggagttaaggatttccgccattgaggctgcaattaaaactatttcagcagccatatgcgctaatgaaggcccggtctccgaagacttgcaaaaccaaataaaaatcctacgaaatcaacttgctagccaaggaaggacagtgaatcaggaggcagttacctatcaggtaattaagcttcttgatccgcttcattgcgatccttgggagccgttttaa

SEQ ID NO: 112467 - DNA, 633 bp, Enterobacter aerogenes
atggataccgttggaagcaggctgagatttaggcgaaagcaaaagaagcttacgcagcgcgatattgctgagtgggctggcgtcagcgcatctgcagttacccaatgggaaagtgatgtaaccaagttatcaggtgaaaatctgatactggtatgcaaatgccttcaatgctcgccggaatggttggtttttggcaatggggatattgagaatggtattaatatcaatctcatctcaaccagagaagtccctgttatttcatgggttcaggcagggaactggacggaagtcattggaaatccaggtaatgaactggttaaaacgactcgtaaactttcagagtcggcatttgctcttagagtaaaaggccattcaatgacgtctaatcatgaacttagtatcccagatggatcgattgtaatcgtagaaccagaatatggttttgttgacgatgcgaatggtaaaatagtggtagcgcagacagttgccggtggcgaggcgaccttgaaaaagttagctatagatccgccatattcctacctaatcccattaaatccatcgtttaaacctattgaagttacccaggatacaaacctgatcggtattgttaagcaaatcattatagacctctaa

SEQ ID NO: 112468 - DNA, 198 bp, Enterobacter aerogenes
atgttaaaaaatcaagtcgtcgaatactacggcggcattactaaaacagccattgcgttaggggttacccatagcgcggtgtgtcaatgggggagtgtaatccctcaaaaacaagcattcgtcatcgaacgaattacgaaaggcaagctgaagtatgacgccagcctttaccaaaagggtacagattcagccgcttga

SEQ ID NO: 112469 - DNA, 213 bp, Enterobacter aerogenes
atgcgagagctcaaccgatggttcagagatcactacggcgtcccggtcagggtcatacgctgggagccccaaacacagcgcgttatatacctgcgcgaagggtacgagcatgagtgcttcagtcccattgagcagttcaaacgaaaattcagggaaatagaggggtcttatgagcctgttaatgccatcaaggccgatagtcatcaatcctga

SEQ ID NO: 112470 - DNA, 981 bp, Enterobacter aerogenes
atgagagcactactaacccctgagattgccccacgcatgggcgttgttcttcttcgcccaggtactgatctcatgccgatgttcaggagagggcgggtactgattgagcctgcaccggaaaaatatagtgactacgcaaccggcgctatcccaccagccacgcagccactggcagaagacccggttttgaaaccagtattcgaaaacaaagaagtcattctgcgtgcgggtggtatcagctcgctggaggctgagcttgagcgtcgttttgaatgccagtacccgcacggttcgtggcacagcgaaaattttacgctgtttcgacatgagcctggcagcatccgcctttgctgggcctgcgataacctggtgcgtgatcagtacacagagacgctggcaggcattgcgcgtgagaacctggtatcctggctgataacggtcatccgctcgcagctggggttcaacgaagaccatcaactgacgatcccagagttgtgctggtggctggtaataaacaatctggcgcatgtaatccctgaatcgctggcccgtaaagccctgcgattgccggaaataaagcatcaaccagtgatgaaggagagcgatattgtgccggagccagcggcgagcgaagtggtgcagaaaaagattctcggtcttcgcgtagatcctgaaacgccggaatcattcatgctgcgaccaaagcgccgccgctgggtaaacgatagctggacgcgctgggttaagtcccagcagtgtgtctgctgtaacaaacaagcagatgatccccatcacctgataggccacggacaaggtggtatgggaacaaaagcgcatgacctgtttgtgttgccgctttgcagagcgcatcacgacgagttgcacgctgacaccgtggcatttgaggagaagcacggctcacagctggagctgctgtttcgatttctggatcgttcgctggcaattggcgtgctggcatag

SEQ ID NO: 112471 - DNA, 579 bp, Enterobacter aerogenes
atgattaacccgtccgaggttggaaaagctggtgaaatggtcaggctgaaaacgctggaggccatctggattcaagggaagttgcgcatgtggggccgctggtcttacatcggcggcggtagtggcggcaatatgtttaaccagttactggcttccgggaaagtcactaaaacagccatcaacgaagcattacgcaggatgaagaagtctggcatctcgaagccagagcttgaggcgttttttcgtgaaatactcgcggggaaaaacaaaagcggcctggccttctgtacagacgatgaaggattgctgattgataaggtactgggggcagtccttattacgggtggtcacaaagagctgtatcacctgctggtggagcattaccggttacggaagagcaaacgccgcatagcggaagagctctatgaaaagcatccagactggtgctttatgacctgtagacgcagagttgatacgtggcttagtttggcagaatcgatgctgtacgcaccaatgtgtgacgcattcggcacaaatggcgacatattttacttgaaaagtgagccagaaactgcttga

SEQ ID NO: 112472 - DNA, 2547 bp, Enterobacter aerogenes
atggctggaaagtcccttggtacactaacaattgaccttatcgctaaggtcggcgggtttgtccaaggaatggataaagcagaacgagcttcgcagaagtggagtgaccaagtaaaaaaggacgctaaagaggttagttccgccataatatcagtaggtgctgccgccgcgaccgcagcggttggtattggtgccgctgggttagccattgtaaaaaatacagctcaacaggtaacagaggccgaccgctgggctaaatctttaaaaatgtccactcaagatttattgtcttggcaatatgctgctgaacaggctggtttaacaggcgataatattgcagaaatttttaaagatataaatgataaagttggtgatgctgttttaaataaatcaggcgaggcggctcaagctctcgatactcttgggctctctgctaaaaagttatctgagcaatcaccggataagcaactgatagctatcagtgaggcattacagaaaataccaagtcaggctgggaaaacaaatattcttgaaagcctcggtaacgacttgtcaaaaatgcttccattgttcgagaacaacaatgagaagttaaagcaatttattcaattatccaaagattttggtgtagccccgccacaagaggatattgataatctcgttaaagtaaaccagttctttcaggatattgaggctagtgctcgtggcctgaagatggagattgcctccggactagctaaggtagatctttcccctcttcagtctggcctcgatgatattcgtgatgtgttcactgatcctgcgatactccaggggctatctgacctggttggtgaagccatcagccttgccggtgtagtaggccgtatcgctggtggattagggacaattgcatcctatacccgctcacggattggtgctgtttcagggaattatgatgcagccgatgagttagacattgaacagcgtattgattttcttaataagcgtggagataaaagcaaagagcaaaatgcagagcttaattttttaaataaaagattaaattttctgcgttcaattaaaggtgcattgactccagatcagatagataaaggagcgaaagggcttacgtctctactttctgatcttggcatagacgaacctaagactaataaattttcgctaggaaagggggagtttaaccaagaacagcccaaatctaaatcaaagaacaataatgctgataatgcatttaagggaaaactccttgatttgcaaagacaagctgtccttatagaaacaacaggtaaaaaaacagctgaagtaaccgagcttgaaaaaataaactttgaagtaacgagcggcaatctaagtaaattaactgaggggcagaaggaacaacttagaattgcagcgaaatttcttgattcaaaaaaagaagaattgcgcataaatcaagaaaatgcaaaggtttctgagtttgttttaagtctggagagacaaaataagttaataaagcaaggttatgataatgaccttgttgggcgctctttgggcagcaaagaacgcggtcgaatgcatgatataaatagtattcgacaggattatgaaataaggcaagaggatttactaaaacaatatcaatcaggggatataactaagtcactttatgactctgaaactgatgcattaaaaaaagcgttagaagatagattacaaatacaacaagattattatggtgagtcagatgacctaagtagtgattgggcgtcaggggtttcaagtgctctagctgattttgctgatagctctagtgattattaccaacaagcagcggatgcaatgacatcaatcttaggggatgctacggactcagtttcagaacatttatatgatgttgtaagtggaactgaatcgatgggggatgcaataaagggaatatttgcagaccttggccaggcagtgattaaagctctggttgatatggctgctcaatggattgtgtatcagggaattcaaatgttggtaaataagacagctcaagcatcagctataccagcaatgattgctaatgcgcaagccacagctttgcaggctcaacttgccgcttttgcatcaacggcagcgatcccaatagtcgggccgggattagctccagctgcaatggcttcagcggctgcggtcactgagcccatggttgcagcaatttctgctgcttcactttcaggtatggctcatgatggtgttgattcagttcctgaaaccggaacttggctgcttcagaaaggcgagcgtgtcacaacggcgaaaactagcgcgaaactggatgccactctggatcgggtagctaaccagtcaactggtggaggggctatttacgcacccaatattaatattccgataaatgggaatccatctgatgccacggtagctctggttcggaaagctgcagatgaaggggcagaacgagggtatcgcaaagctgttacttcgatcgtaaaggggcagggtgatttgcaccgtgcattgatgggtaaaacaaattccgggaggaagattcgctga

SEQ ID NO: 112473 - DNA, 729 bp, Enterobacter aerogenes
atgaaaaatagaactaaaaaggaaaaaccattaccaagcaaaacattagacatgttcaaaaaaaaacgaccaattctctttggccgccttgaagaaaatgttctgcccagtgttttgtacaggtttttcgatgaagccacgcatgctgaatctttcataaaagggttcgtgaaagtatcaaccctggaaacatgcagaaattatgaagaccctgagcaaggagataatggggaaggcatacatatatatcacatagaacattacaaccctgaaatagacatagagcataaaatggcctttaatgctcgctcaccagtaattattgggagaaactcaaaaaactgtaccgtcagcaatatatcaagattaataaaaatacctgatgcatacgtactatgcacaactcatgagttcaaccctgagttatttaaagaaggatttggaaaatattgtgtaagaataaatgaccctttgaatttcatgaagcgagtggcgcaagcaatgaacgacacttatgggataagggcttgtacacacggttatgtcgactattcgagtagaataataaacctacatgaaaatgataaacctttaggtttcgtaaaaccagaagacccatacgcaccacagaaagagttccgttttatttgggacccaattactttaccaatcttcccgtcaatattaaaatgcattgaccttagtgatttatgtgaacgaattctataa

SEQ ID NO: 112474 - DNA, 333 bp, Enterobacter aerogenes
atgagtatgaaagattacgagattgatttaaatggcgttgatccagcgaacctggatgctgttacaggagtgttggagtcacactcccatctgttcgaagattatttccttgctggttatggcggtgatgcaagctactccgttattgatggcacatttgaagttgtcagcattggtgaaaattacttcgaatatgaagtcgggattaatttctttgctggatgcaaagatatgaatgattcccacgaagatacagggttgattaattatgaagttagagatgggtgcattcacattgaattggatgactctatctggagactagataattag

SEQ ID NO: 112475 - DNA, 195 bp, Enterobacter aerogenes
atgacagtcaacgaaatctacgaaacatacgggatcgaaccagcacattatgatgcaaatgagtctcattttgctttcactaaacgcatcctgggctcaagtcaggtaacagtagagaataatggtgttagttattcttccagtagtactaataaaggcaatacagataataataacagtctttatagttactaa

SEQ ID NO: 112476 - DNA, 909 bp, Enterobacter aerogenes
atgccgaactggaatgaagttctgaacgagatgaccattcttgaacagaagagtaacccgttggataccgtcaggaagaagtatataaagagtctttctgactacacagatagaaatgtcatttgttactactcaggatggcttcagaagaacacatccagtattggtcatttagtttctatgactgatgacgacaaaaacggctttatgacagccatcaatggtatggatccccaaaagggattagatattcttattcatacccctggtggtgagattgctgcattagagtctcttgggcaatatctaagggcaaaatttggcacagacattcgtgcatttgttcctatgatcgctatgtctgctggcacaatgttggcatgctgtgcaaaagagattgtgatgggtaagcaatcaaatattgggccatttgatcctcaaatggggggattacctgctcatggtattcttgaggaggttgaaaaggccaagcaagaaatgatggaagaccacagaacgattcccttctggtctttcaatcttcagaaactgcatccaaccttcatcggtgagtgcgaaaaggccatcaaatgggcaagtgaaattgtttctgaatggttaatttccggtatgttcaatggcgaagatgatgccaggcataaagcagagttaatttgtggtcgtctaaatgatcattcgacaacatatgcccacgctaggcacattcatatggataaggcccgcgagatagggttaaaaatcgtctccttagaggatgatcaagagcttcaagatctggtgcttactattcatcatagttatatgcatacctttgggagcagcactgcggttaaaattattgaaaaccacaatgggtcgacgatgatttggcatgcgggaaaccagtag

SEQ ID NO: 112477 - DNA, 846 bp, Enterobacter aerogenes
atgaaaaagttaatcatggccgccatcgcggtcgtttcgctgtgcctgagtaatgttacggcagctgcggatgtcgtcatcactactggtcagcagggtctgacctataacgcggtgtatggcgttaatctcgccagcgcactaagtgagtatggctatagctcgacggtgatccccagcaaaggctctctggacaatctcgacaaggtggccagcggtaccgcccagatcggtttcacccaggctgatgctttccagttctggcgcagtcggaatagcaacgaagcgcagaaggtggacatcatcggcgaactggcagatgaatgcgtttttgtcgcggtgaagaagggcggcaaggtcagcgatgaaggggatttaaaggctggtgtgaaaatcgcagtcggcgagccaaccagcggatcgtatgcgtcctggcaatatcttcaggggctggaaaaggattacgccaaagtcgagacctatgccaaaggcggggtgcgctctctggcgaaagtcaccactggcgagtatgacgccttcctctgggtatcagcaccggaccggtcgaataagtttctggaggcggttaatcaggaaggcagcggcctgacgatgatcgacatgaacggctggcacgtagacgataagttgcctaacgggaaaccggtgtacgaactgaaaaaggcggtgaccgaatccggttggctgagcgattcgaaggtgaaggttccctgcactaagacgctggtggtcgccaataccgaggcgggcgatgacatgctggaaatggcctcgactgtcctgctgaaaaacctgagccgggtgctaggtaccaacggtaaataa

SEQ ID NO: 112478 - DNA, 393 bp, Enterobacter aerogenes
atgtccgatcctgtctctgggactacgattgcggctggtggtctgatgggggccagtatgtttggcctggctaccgggattgattacggcgtcgtgtttggtgcctttgctggttcagttttttatgtggtaactgcggcagacattagccgaatcaggctggctggatatttcctgacatcgtttatcgtgggcgtgcttggtgccgggctggcgggttcaaagctgaattcactaacccattacgataagccgctggatgcactgggtgctgttattttttcagctttatgcataaaggtgcttaccttcctcgacagtcaggatctgaaaggcctgtttggaatactttcccgaatatggggaggaggttcaaatggtaatagcaaatga

SEQ ID NO: 112479 - DNA, 333 bp, Enterobacter aerogenes
atggtaatagcaaatgacccggtaatgatgctcggccagatggtcaacgctgttctgattagtgataccacggcaaaggtgaattcgatcctctgcctgctgataatcggagcgttaatgttctatcagcgtcgaggcgcaagacaccgtccagcaatatcgtttctggcttacctgacaattctggtgtacgccaccatccccttaaaactaattttcggtctgtaccctcagtcacactggctggtggttctggcaaacattcttatctgcggtgccgttctctggttcagagggaacgtcgcacgtctggttgatgcactgaggcactga

SEQ ID NO: 112480 - DNA, 759 bp, Enterobacter aerogenes
atggctaatacgcttaccgggttgatcccgactatcttcacggctctggataccgtatctcgcgagcaggtcggttttatcccggctgtatcgcgcaatgctaaagctgatgcggcggcgaaggaccagactgttactgcgccggttgcgccaccggcaaccactgttgatattaccccgggggctactgcgccaaatgacggcgaccagacgatcggcaccgttgatgtcaaaatcaccaaatccaaaatggccccggtcaaatggaacggtgaagaacaactagcgctggggcccgcagggacatacaacaccatcctggctgatcagtttaagcaggcttttcgcgcgctggctaatgagatggatgcagatctcgcagctctgtattacgcatcctctcgagctgttggtacggccggcaccgctcctttcggtattgcaggtgatttgtcggatgcggcaaatgcgcgccaggttctctctgacaacggttcgccgacgactgatctgcagatggttctcggttcttcggctatcgctaacctccgcggtaaacagtctgttctgttcaaagtaaacgagtccggtatcgaaccgccgcggctggtgttctgcagctcgacgcgcagtgtttatgacgccatttttgaggagatagccccgcaggcggacggaacctgccaggtgacgaccagacagtatagcgacattttctaccagtacgacgacgcgccatacccaggcagcgtttcttaa

SEQ ID NO: 112481 - DNA, 1461 bp, Enterobacter aerogenes
atgcttaaggtaattaataagggattgggttttaataagacggaaaaaaggttaataaaactagcaaataaagcgtttataggattatggtcttatcctaatgtttacagtaatgagggatatgctaaaaacaaatcaggcaaggaagtttgtgatttgcttattgtttttgaaaataatgtaataatattttccgataaagacattaaatttcatgatcaaatagatatatctgttgcatggaaaagatggttcaaaaaatctgtaacggaatctgctatccaattacatggagcagagaaatttttgaaagagcatcatggaagattatttttagacaaagaatgcaaagaacttttcccaattgaaattcataaggatatgcatttttttttgatagctgtaacgagtaacagcttgaaaccagctgctaaatactttaaccgtatagcacccggaagctcaggcacattaatgaatattttcccatttggaatcaaggatagttcagaacacccttttgctattggagatattcatccggataaaacattcgttcatgtattagatgagttatctttaaagcttttactaactgaattggatacgattactgattttattgcatatttaaaagagaaagagcgtgttatacgctccggttatttggggttaagcccaggagaagatgatacacttggggcttatttgaacggacatggagtaatcgtcgatgagaaggaggtaccagataatacatttgttcaaatttctgagcatgaatgggagggattaaaaaaatctcctcaatatgaatactataatgcattgaaaaaaggaagtatattttgggatgatacaatacaacgcttttccgactcaattctaactgccactgttggtttgggaatggaaaatgattttctcagccatgaagaagccgtaagacaactggcagcggaaagcagaaagtcaagatattatctttccaaatcatttttagataaatttaaacaggtgccgacagatagaagaagttctagaatgattgaatcattagatgaaaaaggtaaatattatattttcctattcttccctagagaatattcatcatatgaagaatatagaatggaacgtttttcatgtattcatatgtatgctttggtggcaaaatataaatgtagttatattaaaaagttaataatcattgcaacagaatgtaaggatgcagaaggaagatcagaggatgtcgtttattgtagatttgataaaccattaacaaaagatgaaaagatttttgctaaaaaagctatgaaggagcatagaattcttactgattttttccctaatccgacggctgaaagtttttcaaagcctgtgattaagaatgaggaaaaaattggaagaaatgagccttgttattgcggttcgggtaaaaaatttaaaaaatgtcatggttag

SEQ ID NO: 112482 - DNA, 207 bp, Enterobacter aerogenes
atgaatcagctcaatacacgccttattcgccttcccgaagttctaaatcgaacaggttatggaaaagcctggatttatcatcttatcaatcaaaatctttttccagcacctatcaaaattggctctcgtgccgttgctttcattgaaagtgaagtagacgaatggattcaattgactatcgaaaactcacgaaagcacattggctga

SEQ ID NO: 112483 - DNA, 975 bp, Enterobacter aerogenes
atgaatccaataattattgatgcagctactatatatgatcctgcccgcttgcttgcagtattagcctctgttgatatcagacactctgaagtttgggtttcacaacgatatgaccatttcaaagaaaaggattttttaaccggatgggggacagaggatcgcattgggcttcttccagcactggacggaagctacaaagcaaaaccattagaaatcccatcacctgataagaaattaaatccaagacattgtgataccgggcctcagatacttcgctgggctttggataaaggtatggctgtgcctaaagatttgtttaagctcgaagagttagctatagagcttgaaaagcaaaatggattagcacaaatttcagaggcaataatgcttggtccgcctgctgcgtacgatataagagctggcgaagaaaaaactaaagaatatttaaaaatgacaggcaaaaagagtctaggaccagaatatgcatggagactagagccgtatggaattgggcatggtcttggtttaatgttggcggcatctaaagaatactcggtagagccttttttcagtcatccattctttcgagatggtatatctacacataactatacacattataaacgtgacaaattaattggtgaattatctcaagctcatattagccgagaaaaaggtgatattgaaataggttgctccatcatagaggcaaaaaatcttttaaaaagccctgagtcacttacacttgcagaagttgctttttatttagatcaaaaagaacgtattaactctatttcaggaatcattactgcctcaaaagatctcgaaaatcgtggaaaagacattggcataatagcaagtaaatatgctggcactgttgcagctgatacatttattttcggaggtcttcccgtaacgacgtcaatagtttcattatatgacataggagctagattttttaaatcaagaaaatag

SEQ ID NO: 112484 - DNA, 132 bp, Enterobacter aerogenes
atgagcaagcagcagacctgtctcttggggaagacggacttactcagcattgagccgtataaagtgttttgtcagacaggattggcccttaactacaaaaaatatcaaaaacatgggtacgaagacaagtga

SEQ ID NO: 112485 - DNA, 1533 bp, Enterobacter aerogenes
atgtcaggatctattaccgaaaaaaggattgctgcacaatatttgcggatgtcgactgagcatcaaaaatattctccagagaaccaacgggagtatttagagaaatatgcgaaagaacataatattattatccaacatacctatgacgatgcggggcgaagtgggctaagcctggataatagacctggcctgcgtgccctgctacatgatgtcgaaagcggaataataaaagtatccttaatcctggtttatgacgtcagtcgctttggccgatttcaggatattgaagaggctgcgcattattcgtggcttttgaagcgcaacggagttcgtattatttattgtgccgaaccgttctctgaagagcagactgaactgttcatgttggggctttcttattcccgctatggcgctgctacctacagtaaaaacctctcggaaaaggtttttcttgggcaggctaaccttgtccggaggggatatcatcaagggggaatgccaggatatggcatacggcgattactcatcgatgagcatgccaaaccaaaagggcaacttcttcccgggcaaaggaaaagtttgcagaccgaccgggtcatattgattccgggccctgatgacgaagttcaggtggtgaaccggatatacgacatgttcatcgatgatggcaaacctgagcttgttattgcctcagaactaaaccggaagcatatccccgcagaaaatggactacaatggactcggtgcaaaatccatcagatactgaccaatgaaaaatatattggtaacaatgtttataaccgaacctctggccgcctgaaaacccgcagcatcaggaacccacaggaacagtgggttcgctgtgatggggcgtggcaacccgtggtatcaatagacaaatttgaggcagccaaaagcattattgagtccagggccgtacaatacagcgataatgaattgctggataagttacgtcatctgcttaaaattcggggaaggctttctgggatcatcattgatgaagaggaattattcccatcaagcagtatcttccgatcccggttcggggggctggtgagggcctacagccttatcggatacacccctcagcatgattactcttatcttgaaataaaaaaacagattgctgaacacaacctctctttcattgatactctggtgcaggatatttaccgctacggcggctggggctcgatacaggaagatggttctttatatatcaatgatgaattttccatttctactcatttgattcgatgtcagcgtctgtcgtccggtaaactgcgctggaagattaagttcaatatgttacatcgttacgattgtatgatattccctcggctggatagttccaataataccgtggtcgattattttattttccccgccatagatattttgcatagtgatttaacgcttcatgagaacaatggttttattctcgaactgtaccggtttgacgatttgtcatgtctggaatgtctggttaaacgaaccttgctggagttttaa

SEQ ID NO: 112486 - DNA, 891 bp, Enterobacter aerogenes
atgatgaaatcttttgatgaaaaaatagagcttattgatatcagtgatatttatatagctaatccgcggagacggaataaatttatccataatgaaattaaagagaatatcaaaactattggcctgaaacgccctgtcagtgttcggcctgtaaatgatggagactataaatatgccctgatttgcggacaagggcggcttgaggcttacattgagtatggcgagacgaaaattccggccattatcaaacatgtcgatgaggaaactgctcatttgatgagcctggctgaaaatattgccaggcgaactccccgtgcagctgaactgatggaagatatccggagaatgaaaaccagcgggctaacggacagggagattggtttgcgtctggggtacaactccagttgggtaaacggcgtcattaccctgctgtcatcgggagagaaacatcttttacgggcgtttgaaacaggaaatataccgttgtatctggccgtagagatctcccgctctggtgacgatgagactcaggagttactgaccactgctctgaaagatggacatatccggggtgggcaaattaataagatcagacgtattctggcacaacgaaaaaaaggcgacaaaggtacggtcagtacggcattttttccagggaagaaacagaaaaaactcactcctgaggaactggctggtgtttatcaggaaaatattaatgaacaaaaaacgattctcctgaagtccacaatggtcaaagagaagatactggcagtgaaacagatctttggccacctgcttaagaatgatgagtttgttaatttgttgcaccgtaataatattcatgatgtcccagcattgctgggcgaaagtgaagttctggaggagagctaa

SEQ ID NO: 112487 - DNA, 888 bp, Enterobacter aerogenes
atgatctcacaatgctttgactcccgtttctataccttcaaagtcgattctctggtttattccagatcattaccggtgaatgtaaaattcagtactaagtacaaacagattaaagcctcggttgaggagtttggattaattgaacctataatggtttatattaatgacatcagtgaaaaaatcattcttgatggtcatctgcgcgttgaaattttaaaagaactgggtattgaaacggcgcactgcctgatatcccccgttgaggatacctattcgtacaataaacgtgttgctcgccttactattgtacaaacccagaatatgcttcttaaggcagttgagtccggcgtaccggttgaaaaactatgcgcggtgctgggaattacgccggataccctgattagcaaactgaaaatctctgatgggattgccccggaagtgatggcgctactggcagaaaaaaatgtgccccagaccattttctctgtgctgaaaaaacttaagccttacaagcaaattgaaatggttaacacaatgattagtattaataatttcacgcgtaagtttgcgctttcgatgctacacgctgtttctgtcgaacatcttgttgaacccaaaaaggacgccagcagagagacggatatcaggaaaactcttgagaggctggaaaaagagatggcttccgttcaggtagaaacacaacatcttcaggatgagtatgcagaaaataatctccggctggttattattaaaaatcacattgaacgccttttggataacggccagatagttaactggctgtacgataaccaccaagaatacctttcagtgctcaagcaaatttcggggctggatgatcttaataatctggttcagaaagctgaatga

SEQ ID NO: 112488 - DNA, 1587 bp, Enterobacter aerogenes
atgataccaataaaagatctaactcttggctatgctgatgctgaaaattataagagaagggaaaataaagacttacttaacaaagtattcatacgtgataatcacttgtctgaattatgcgagccgaatatatcgtttcttgtaggagagaaaggtactggtaaaaccgcgtactctatctatctctcaaataacaatattaacaacacactagccacaactaaatatataagagagacagaataccaaaaatttatcactcttaaatccgaaaagcatttaagtttgtctgatttttctggtatatggaaagttattctatatttattaatttccaaacaagtattagataaagaaggggcaatttcaaagttactaaactattcaaaattctcatcacttactgatgcaatagatgaatattatctcaaggctttctcaccagaaataattcaagccctcagttttgttcaagaatcgaaaattgcagccgaattacttcataagcatgcagccttaaaaggtgaagaaagagagtctttgtctttttccgaaagcagatttcagataaatttattttatatacaaaaaaaatttgaagaggcctttagccaaatacgtttatctcaaaaccacattttatttatcgatggtatcgatatccgaccctcctcaattccatacgatgattatctagaatgtatcaaaggattagctcacgccgtctgggagattaataacgatttcttcccaagtataaagggagggaaagggagaatgaaggcagttcttttgatcagaccagatatatttgaatccataggattacaaaatcaaaatgcaaaaatcagagataattcagtattcttggactggcgtacagaatatgttaatcaccgtaactctcaattatttgaggtactagatcatctgcttgggactcagcaagaaatgccccttgaaaaggggcaagcctgggaccattatttcccttgggattcaccaaatgttcgtgatgattataaccatcccacatcatttattaatttccttcgttggtcctattatcgcccaagagatatattgcgaatgctcgagattcttaaatcacacaccaacggtgataatgggaaaaatcaatttactctagatgactttgaaaatcctagcatgcaaagagattattctaactatttgctcggggaaataaaagatcatttgtcattttattatggaagtgagcattatgagatttttctaaagttctttgaattcctctctggaaaagatactttcgattatgctgaatacctcttagcatataaacaacttgaaactcacattgactccatttccactacaaagccaaaatttatgacgacagcaaacgacttccttcagtttctgtttgatcttaatgtaatatgctatatagaaacaacagaagataatagtagatttatacgttggtgctttagagaaagaagttatgcaaatatttcaccaaaaataaaaacaggaatgaaatatcagatattttatggattggcaaaatcattaaatgtcggaaaaactttaaaaaaataa

SEQ ID NO: 112489 - DNA, 633 bp, Enterobacter aerogenes
atgagtgagcagaggccgccgtcttcacgtccgccacaaggaccgattggctggctgctgtcgctggccggaaggtttatcgggttggttattggtgcgctggtgctgcgggtagtactggaactgacgggtttctatttctggtggccacaggaggggaacaggcatgtttttcaggtgatgaggcaggagcaaactgaactggttattgcgttgcagccgcatcctttggggaatgaaatactgatgctgctggaaaaaggaacaactcacgtgcttatggccaacaggctcctgcagaaaccgttcaccaccctggcctatacgctggtgagttttatgcagcgcttggtatggctcgcctccatgctccctctggtctgtctgtgtgttttaatcgggctgacagaaggtctggtccggcgggatttaagacggtttggctccgggctggaatcggtttttcttcaccgctacgtcatcaggtccggcaattcagtcgccacagcgctatgggtggtttatctggcacagccgctgtttctgcctacaatgttgattttactgcctatcaacttatggttcgggataacggtatggatggtggctggtagttttaagcgctggttataa

SEQ ID NO: 112490 - DNA, 186 bp, Enterobacter aerogenes
atgcgcgggaacgtcccgcttcgggtttggctcattggctgcaagcccctgagttactggcagtacgggcattccgcgctgtgcgcctccgcgtttcaggaatgcatggcggactttggtgataacggcattaacagcaacagctttcggggtgagagaacagcgagatttgttaccggtggctga

SEQ ID NO: 112491 - DNA, 354 bp, Enterobacter aerogenes
atgctcccgaatcgaatggcgcttagtcgtcagactgaagaacagcttaaaaagcttaaagggtatactgggattacacccaatattgctgcccggctagcatttttccgctcggtggagagtgagtttcgttattctcctgagcgagatagtcggaagttagatggctcgttggtgctggataaaattacatggctgggggaaacactacaagccacagaattggtattgaagatgctttacccgcagataccacagaaggacatgattaaggtttgggcggcacatgttgaggatggtatatctggggtgaggaactatcgaaatcttaaagactttactttaggaatataa

SEQ ID NO: 112492 - DNA, 219 bp, Enterobacter aerogenes
atgatagattcatttaattatatattttccatttggtattcggaaaataaaaaccttgttaataaattcattttttgcatctttaactcttgttatcacctaacgagagaggagattgatttgcttgcaaaggaaatggagttagagggaataccgttggatgaaaaccttaacaaaaaaatgctgttcgatggcaaagatttattatttttagaatag

SEQ ID NO: 112493 - DNA, 1164 bp, Enterobacter aerogenes
atggatttctttgaaaaaactaatgctgacaaaaattcaataggttttacctatcaagattacgttgctttaaaacatgccttagagcttaaaccagaagaacacattgggattgaagtttatgacgatctccatcttgagagcatcgagggtcataaaacctttatccaagttaaacattcaattaacaagtctaatataactaataaagacatagacttatggaaaacattgtataattggtcagaggcgattaagaccataggcgacaaaagcattagccttattttttacactaataaagggcttaccttagagcctggtatcgtgcaacttttagctaacgacactaaggacattgaagaaataaaagatgaaataaaaaagatagaacaagatcataaaaataagtcagatgacctctataagtatatttctatcattaactcactcgatagtaatacttctgacagattatttaatagtataagttttcaacatagtgaagatgggattatatcccaaattaaaacattactaaaaacattagcaatcccaaatgataaattagatgatgtattttattacatatcgggtacgttctttgaacgtaaatatgatctaattaaaaatcacagaaagataaatataagctatgatgattttagaaataattttggtatagatagaattattcaaatttcaagaaattgtataaataatttcgaccaatactacgattttgaatctgcataccctactaatgttgaatcaaagatctcttacaaacaactcaaagatttggatttgaatagcgattcaatcgtaaaatatataaatgaaatggccaagacagaagctttcattcaaaaattacaaagctctggagatttaacaactcaagaagaaagactaatatatcaaaaagcgcttgatgaatggcaatcacgtcattcagcaacgtatatacgaagccgttttacagaaataaatgaagatcatcttaataaagccttctctgtctatactgaattgacaggaaactgtaatattgtgttggataaaaatcaattacctaagtctatgaccacaggaacgttcttgctcctttcagataagcccaaaataggatggcttcaaaactgggagtcagtctataaatga

SEQ ID NO: 112494 - DNA, 1197 bp, Enterobacter aerogenes
atgattattagagatacaactaacaaaataaaaagcgtctacacagaaataaaagatggtgatcttgatttgcgccctaatttccaaagaggtgaagtctggacattaaataagaaaaaattgttgattgattctatattaagagaatggtacgtcccaccaatacatacagtagcactaggtgttggtaaatcggaagtgctggatggacaacaacgattaaccgctatcaaggattttcttgataaccagtttgcagtagatggcaatattgaaccaaaagatgaagagattcttgcattgcatgggaaaaaatttaaagatttacctatcgatgtacaaaagaaaatagagagatttggtataacaatttatgagattactgaatataatttaggtgagccaagtgagttattctatagactaaatcaaacagttaaactaacctcgtcagaagcaagaaatgctatttttggagacgtgagagatgatatttcttcatttgtcacatatatggatgagcttggagttgggaggaatatattagggtttagcaattccagaatggcttataatgacttattatctagagtgtgtttgttgctggaaaaaggtagcatacgatatcaattaagtgatgcaacactaacaaatagataccgggatgatactagctttgattcagatatatcaaacgcaattaaatccacaattaaattctttggctatctatctaagtactcttctcaagaagatataaaaacaaatttaacaaaagcatcatcacttaactggatatatcttatctgttgtatgaatatccattccgatggtattgatgtcgagaagttatatagtgcttttatttatttagagactgcgaggacatgtatcaaaactaatgagcgattccctaaagatgtagttgatttttttggaattggtcaggcgaatctacgtgaactaatgatgatttacatagagcgttcttcatcacgggtaatgtccataggttctataattataagggatataatacagaattttgcatgttacatggctggaattgtgccagtacacttaactgatgttgataccaatcatcttgaaaaatttgccgatgcattaagacatgaaaatgatgttaagttcttaattgaagatatggccgaaatttggaaggaaactggattatga

SEQ ID NO: 112495 - DNA, 357 bp, Enterobacter aerogenes
atgactgagcaacaactgcgagaggaaatggtgcagattggcgcctcgttgtttagccgcggctatgccaccggctccgctggcaatctgtcgctgctgctgccggacggcaacctgctggcgacgccgaccggcgcctgcctcggcgaactgcaggctcagcggttgtcggtggtgacgctgcaaggggaatggatctccggcgacaaaccgtcgaaagaggtcacttttcaccgggcggtctatttgcacaacccggcctgcaaggcgatcgtccacttgcacagccactatctgaccgcgctctcctgcctgcaggggctcgatccgcacaactgggcactgttgcaaagttag

SEQ ID NO: 112496 - DNA, 936 bp, Enterobacter aerogenes
atgaacaaaataaaccatcacgtcaaatatatcgagtatttgttgaggaaaagcaggacaattttaaccaatgatatttcatttcatgcagacaggctaagcaagatatctggaacatatccggacttgcgtaacccagtaacgcttaatgaaaaaatttgccatcgcattttatttagacacgatccattttatacaatgcttgctgataagcttctggtcagagagtatgttgagaaacggactaatttaatcaagcttaatcctttagtaggtatttataacagagttgatgatattgatttcgacaaactacccactaaattcgttttaaaatgcaatcatgatagtggtagcacgatcatatgcacggacaaaactgattttgatcccattatggctaaaagtaaattaaaactatcgcttaaaaagaatatgtattatacaacccgagaatggcagtataaaaatatacagcctgtgattctctgcgaaatgtatcttgatattttttccaataaaaacaggaatgtaaccccagaaatgctaagaatacactgctttcacggtgtagcatgttttatcgaggccgattttactgacagtgatggaaacggattcattaacgtttatgacagatcgtggaatttacaaccctttcagatggagtacccaaatacgccatccccggttgatgaacccgaatcttttcatcaatctgttattgctgcccaggagttagcaaaagagatagactactgccgagtcgatcttatgctaaaaggagaagatatctatttcagcgaaataacattaagtcccaaaagaggcaagcttaaaatcacccctgcaatctgggacgcaaaactcggcagtatgtgggatctgtctcttgctaaaacagacccaatcgagcctgtttattcatgcccttga

SEQ ID NO: 112497 - DNA, 1074 bp, Enterobacter aerogenes
atgaacaaagaaacgatcctgagccgtcagattttgacatatatgctgtctttaacattcgttattattgcaattgccgtactgggttcctatttgttttacagtttcttgatttactatcttccgggagggggaaacgttgaaaatgaagacgctatgacctttcttgattggatgtggatcttaatcgcttcattaaccagtctggtcgtttcgctcttttttactgtaaaattatccgcaagaatattaaaacccttgaatgatgtagcgtacagccttaaacaaatctctcaggggaaccttagcgcaagagcgattaactgtggttctcagttgggggaaatgaataaactcgtcgatgattttaatgagatggcggagaagttacagacgctggatgcacagcgaaatttatggaatgctgcaatcgctcatgaactccgaacacctgtgactattttgcggggcaggcttcagggactggttgacggtgtattcgaaccagaaccaccgctcttcagaaacctccttaaacaaactgaaggcctgactaacttaatcgaggatcttcgagtcgtgagctcctctggaggagcaggatattccttgatgctcagtgaagtcgatcttgcgacactaatcaccagtgcgcttgatacctttttgcccgactttgaaacaaaacgctttaacatagtgaccgagcttagctgtcagcgttgcatctgcgatcctttacgtattattcagtgtctgaccgttctttttgataattccttaaaatattccacatcacaaactcttttagtaaagaatggtattgtgggaaacgataattttattatcgttcaggataaaggacctggaattcctgaagaactccagaagtccttattccagccttttcagcgaggagaatacgctaaaaatattaatccagagggctgtggtttagggttgtcggtagttaaagccattatgcgtgcccacggcggagacgttagctatggtataacgcaagaaaatggctcacttttcaaactctcatggcctgttcaagggcatgaataa

SEQ ID NO: 112498 - DNA, 702 bp, Enterobacter aerogenes
atgaacaacaatctgattatcgtcgcagaagacgatgatgacatcgccgccatactgacgggctatttaaataaggctggcatgaaaaccttaagagccgaagatggcgagcaggcgatcaaccttactcgtcaacacaaacccgaccttctgctgctggacattcacctgcccgtatatgatggctggaatgttcttacaacgttaagaaaggaaactaatgtccccgtcatcatggttacagcacttgatcaagacgttgataaactgatgggtctacggctaggggctgacgactatgtgataaaaccctttaatccatcagaggttattgccagggttgaagctgtacttcgcagaaccagaccggttgcagagtctacacattcacggcctttaagaacgccttttataacgatctatcctgatgagttttacgttgaaatcattgctcaaggtgaggtttccacgccagtattaaccaccacagagtttaagcttctggcctatctggcaagaaacccgagaaaagtctgttctcgtgaagagttacttgatgcgtgtttgcctgagggagactcgctggatcgcactgtagacagccatatgagtaaacttcggaaaaagcttgaacatgccggattgaagggcattccggaaagcatccgaggattagggtaccggttgggtgacaaaaaatga

SEQ ID NO: 112499 - DNA, 912 bp, Enterobacter aerogenes
atgatttataaaggcaacaacaaaccaacggctcccggggttgctatctcactgaagagacttgcttggcggcacaggaagaaattatgcattactttcatgctggttattgctgaaaacgttgcattcctgctctaccccattttggcgggcatggcgatcaatgccatcctgggcggacagacgtcacgtgcggccctttatggcctgatggttctgtttatgtggtgcatgggagccaccagacgtagtgtagatacgcgaacatttgcacgtatctacgcaagtcttgctgtgacagtagttttagcccagcgaaaatattcacttaatcactcgactattgctgcgagagtcactctgtcccgtgaatttgtggatttcttcgagttgcacctgcctgtattgattacctcgatcatttcccttttcggcgcagcaataatgctgttatggattgaattctggacaggaataacctgtttgatcatcgtagccatactgatgtgttttgtctcaagttatactttcaaaaatgagacattctacagacggctcaataatcgccttgagaaagaggtcgattatgttaacaaggcgtcttttggtgctcttaagcgacattatgacacacttgcccgcctgcgcgtggtgttatccgacagagaggcatggggatatttatgcataggccttctggtttctgctctcttttccatgaccattatcaggatgagcatggagtccggaattaatgcaggacatatttattccgtcatgacctatatgtggatgtttgcaacaagcctggatgacgcaccacaacttcttgagaaattttcccagctcagggatatcggtaaacgagtttcgacagacgatgagacctctttatcaggaaaaccatgctga

SEQ ID NO: 112500 - DNA, 3117 bp, Enterobacter aerogenes
atgccgcactttttcattgagcgccccatcttcgcatgggttatcgccctgtttattgttctgactggaatattgtctattcctcgtttaccggttgcgcaataccctgccgttgcgccacccggtattatcatttcagtgagttaccctggtgccagcccggaggtgatgaacacgtccgtcgtgtctctgatcgagcgtgaaattgcgagtgttgacaatttactctattttgaatcttccagtgacacgacggggatggcgtcaattactgtaaccttcaaacccggaaccgacatcaaactcgctcagatggatctgcaaaaccaaattaaaattgtggaatctcgcctgccgcagtcggtaagacagaatgggataagtgttgaggcagctaattccggttttttaatgatggtgggattaaaatcccaaaacggggactatcaggaagctgacttaagcgattattttgccaggaatgttactgatgaactccggcgcgtacccggtgtaggtaaagtccagctttttggtggggaaaaggcgctccgcatatggctggacccgatgaaattacacagctatgggctctcagttacggatgtattaagcgccatcagtcaacaaaacgtgattgtttcaccgggcagaaccggagatgagcctgcggctagcgggcaaggtgtgacttatcctataacggtaaaaggacaactctcttcggttgaagaatttcgcaatatcacgattaaatcgcaggtctccgccgcccgcctgacgctggcagacgtcgcccgcgtggaatccgggttacaaagttacgcatttgggatccgtgaaaatggggtccccgcaacggcggcagctattcagctttctcctggcgcaaatgcgatcagtactgcgtcggatatccgcgcacggttaacagaactgtccggtgtacttcccgagggaatgacattcaccgtgcctttcgatacggctccgtttgtaaaactgtcgatattgaaggtagttgagacatttgttgaagccatggttctggtctttttcgtgatgctgcttttccttcacaagatacgctgcacgcttattcctgcgattgtggcccccgtggcgctgctcggcacttttaccgtaatgctattaagcggttattccatcaatattttaaccatgtttggaatggtgctggccatcgggattattgttgacgacgcgattgtggtagtagagaacgtcgaacgactgatggaagacaaaaaaatgtctccacaggatgccacgcgagaagcgatgcgtgaaattacgccggcaatcattggcattacgctggtgcttactgcggtgtttatccctatggcctttgccagcggatccgtgggtattatttatcgacagttcagcatttcgatggctatatccattttactgtcggcattcctagcactgacgttaacccctgcgctttgtgcaaccttgctcaaaccacatggtattcatcagggtaaaagcagcgcattttcagcgtggtttaacgctcactttcatcgcctgacgacgttttacgccactggtctgggatttgttctgaagcgtaccggccgtatgatgatgatctacgctgcattatgtttggcattgtttgcaggtctgtcttccttaccatcatcatttttacccgatgaagatcagggctattttatgtcctcaatccagctcccttctgatgccacgatgcagcggacacttaaggttgtcgatacatttgaggaggagatcgcccacaggcaggcggtagaaagtaacattatgatcctgggatttggtttctcaggatcaggtcaaaattcggccatggcattcaccaccctcaaggactggaaacaacgcaaaggaaccacggcacaggaagaggccgaccatattcagtcccaaatggcaaacgtgccggacgccgtaacaatgagtctgctgcctccggccatttctgatatgggaacctcatccgggttcacttattatttacaggacagaggggggaaaggctatcaggcactcaagcaggcggccgatgagcttattgtgcaggcaaatcataattctcaacttgccgatgtctatattgatgggcttggtgagggaacaagccttgacctgcatatcgacagggaaaaagcggaggccatgggggtatcgtttgatgagataaatcaaaccatttccgttgcaacaggttccaattatgttaatgactataccaataatggccgggttcagcaggttatcgtccaggcggatgcgccgtaccggatgcaaccagaacaactgttggctttgtctgtcaaaaatcgtctggggcagatgcttccgttatccacttttgtgacgctttcgtggaatgttgcaccacagcaactgatacgctatcagggatatcctgccatacgcataaccgggagtgctgcacagggaaaatcgtcgggtaccgcaatggcggcaatggacaaactggctgagcacttaccaccgggattcgccggtgagtgggcgggaagttcgttacaggaaaaggagtccgcatcacagcttccgggtcttattgtgctctcggttctggcggtattcatggtgctggctgcgctttacgaaagctggtccattcccttctcagtcatgcttgttgttcctttgggactgctcggtgctgtgctggccgtatccgttacgaatatgacgaatgacgtctttttcaaagtgggcctgataaccctgattggactttccgccaagaatgcgattctgattatcgagttcgcgagacaattgatgaaagaaggaaagagccttatcgatgcgacattgacggctgcaaagcaacgcttacggccaattctgatgacttctctggctttcacattaggtgtggttccactgatgctcgccagtggagccagcgacagcacgcagcatgcgattggtaccggtgtattcggcgggatgattagcggaacgctactggccattttctttgttccggtatttttcgtgacgatcacaaaatttactggcatgcgtaaagacagaccggggaatagccggaacggctaa

SEQ ID NO: 112501 - DNA, 537 bp, Enterobacter aerogenes
atgaacatcattgtcactcaacggttaatcattcgcccttttaaggcagaggatgcggcagcacttttcgattacctctcttcaccacgtgctccttgctttaaggatgaaaagttacattcgctagccgaggcgaagagcgacgtggctaaacgagccacggacccagcacagtttgccgttagtctaaaagaaactgatacgttaatcggacatctttttgcggacaatagcgacgagccagacagcaatacctggtcagtgggctggcattttaatcaacgttatgaacgtcatggatatgcgagcgagtcagttactgcactgtttgattatttatttaaagtaaaagatgccaggcgtttgtatgcctgggtagaagtttacaatctggcctctcaaaaactctgtgaacgtttgcatatgcggcatgaaggttgttttaaagagtttgtcgcctttgaaaacgaggatggtaaggcaaggtatgacgacacaaacatctatgcgttactgcaaaaagaatgggcgaagtag

SEQ ID NO: 112502 - DNA, 195 bp, Enterobacter aerogenes
atgaatacgctgtttgcccttgtcatcagcgtgtgcgccctgaccggcgagtgctctgatgtcctgataggcgtgtatccatctgagaccagttgtaacagcgatgctgaggcccagcacgtaaaaggcacatgccagccatacaaaaaggcattgaagacggctgacgaccaacagcctgcagtaagtttttga

SEQ ID NO: 112503 - DNA, 360 bp, Enterobacter aerogenes
atggctaacagtctgctgaacattgctggcctctctggtggcttcctctttccgttcagccgcggcgacgctagcagcggctttctcttcagtacgcttttgtgctgctttggcttctgccttactggtcccgcggccgaacgcaccagcgatagcacccaggatgaggaccaccagcccagcaataatttcaaagctcattgttgcggctccttctgttcgtcggccttatctttcaatgctggctggcgtacgtattgtgagagcaccgccagcactaccagggcgggactaatcatcgcaacgatgtttggcggcaagatgtttttgatgtccggtggcagcatcgcccaggcatga

SEQ ID NO: 112504 - DNA, 435 bp, Enterobacter aerogenes; identical to SEQ ID NO: 10324

SEQ ID NO: 112505 - DNA, 723 bp, Enterobacter aerogenes
atgttagaggagagaactggtgaaccatgccctaaatccatcatccaggaagcactggaagaactgcttgtcggtaaaccatccaccacagagtttgtgcagcaacttacagcacaaaacatcatggcagtcccgaatatcgcttctactggacgtatgaacggtttctcattcaaatacgcggggattgctttcaaagcttctcaattgggaaaagggtattcatgggctgaattacaaaacaagatcgattaccgggctgaacgcgacaatgcttttctgtttgatttgaaagcatatgtcagtgaagagcctgaaacagtcatcccttcagaaaccataataaaagaggtaaacacccctatagaagcgcttatccaggataaccgtgctgttcaggacgaatacactaatgaccagcttcacttagctgctggtgctggtgctggtgctggtgctggtgctcaagaagcgtttgcaaccgaagcggtaaaacaagcctccaagagaagctatatggtttcaacgtttagatggttagagaccatcccctatctcaacaccattattgccatcttcaaaaacctcaaaatcccaatcctcaaacgccctcgaaaacacaaaaccatcactggcgtgagagtagtagagattatgcctctgccccaaaaaaatctcatcgaatcagcacctcaatccagaagagcttcgctttcgaggtaa

SEQ ID NO: 112506 - DNA, 654 bp, Enterobacter aerogenes
atgagtatctccactacgaaacaccataacattggtctgtctgagcgacagcaacaagaaatcattactaataaattcgaactgtttggtgaatctttcgagtttgcggaaattttctctgcgactgtcatcagttccaacccaacaaatgctcagatcttggtaaaaacaaatgatggcgatgaaaagcagatttcagcctatggtatcgcggtcaggaactcacacaggattcgtctatacgagcttcgaaagtatagcaacgataactcctgtgtcgtatatgccgatgcgctcattattaattcaaacacgggtgaatataaagtaaacttaaacaggaaaaccgtcattattccagcttttctgacaatgctatttcataattcttcgacggcatctttcttcagagtaatgccagttccgaagtggttttatattctcttcactttgctttgtttggcttctttcattgcattttgctcattgcttgtgggattcaaagatggatatgtgtgggatgagcacaagtatatgtggctcacatttttcttttcaaggatcggaagcttcgtttgtattaattggattaaaagaagaaacgagagatttgatcatgaactcagatatcttatcgatttagtaaaaaaataa

SEQ ID NO: 112507 - DNA, 171 bp, Enterobacter aerogenes
atgatcgataaaggacgaatgagggacgtatgttcctcactaattaatttcattattagtaatggcagcagaactgaaaaaatctatgtgcatgagaaaaagaaatatcttgctaataatctaaaaaaagacttatccatcaaagagaagaaaataaaatatagattgtga

SEQ ID NO: 112508 - DNA, 600 bp, Enterobacter aerogenes
atggtgagaaaaagcgggctggcaatgaaaaatatctttgcccgttacgactatctggatgattcaggcaaagcccaatatctgcgttctcatcagccaaggcatttgctaaacacacttgctcatctcggtgaattatctgagttagatatcgcaaaatggtcgggtagagtcagcgtgatacaaaaccgagactacaaccatgtttctcaggaagatatgttgaagaaagttcgtcatttgaagtttgaaaataatcgttattgctctccagtatcaattaactcaactttaccagcgagtatggatgagtttattaaccttaaacatggtgcgcttcaattaacgtcaaagggatattgtgtccatgactatgtaatcccgccttgccgaaggttagtagaaaataaacaacacggatgggaaaaatattttgaaatgagtgcgcatgagaaaaaaataattatcgaaaaaattacagttctacaccagatggcacaaaaagcagtgaatgatggtttctatggagcagataagtgggtttcctatcatgaggaagtgttatcagccttagatagaaaattagaaaatgcaaagtaa

SEQ ID NO: 112509 - DNA, 141 bp, Enterobacter aerogenes
atgctcgaaaataatacttttaataagatcgttgtgagtaaacattcccgtaatggaaacgttaacgaagcgaagctcttacccctgcggattttttgcattcccttcattggcagacctttacaggtcagcggtaattaa

SEQ ID NO: 112510 - DNA, 153 bp, Enterobacter aerogenes
atgcgattagccagccgctttggtcgtataaaccagatacgccgtgaccggcctctgacccatgaagagctgatgagtcatgtacccagcgtgttcgggagtgacaagcatgaatctcgttcagaccggtcgggtaatgtagtggtcaactaa

SEQ ID NO: 112511 - DNA, 393 bp, Enterobacter aerogenes
atggaaaacccagccatcctgttacgccgtttaaatccttactgcgcccgcgccctggaaggcgccgcttcgctgtgtcaggcccgcgcgcatgcgcaaatccttccagaacactggctgctaaaactactggagcagggcgagggagacctgaccgttttagcgcggcgttatgagtgggatatggacgctatctggcaggatctgctctcttttctggaaacgcttccacgttcggtacacagccggccgcagctgtccggcagcatccagagcctgatgcaggaggcgtggttaagggcttcactggcgggggagacctctctacgcagtgttcatctactgatggcgttagtcagcaacccaacgcgggtgcgctgtgacagtctgtga

SEQ ID NO: 112512 - DNA, 519 bp, Enterobacter aerogenes
atgtcctcttgtaatcacatctgttttagttccacgcactttttgagagttccggtttttcagtcatcagccggtattcctccggcatcaggttattcagggattcatgaggacgctcgctgttgtattcattcagccagccagccagcgttccgtgatttcccgagcttcattcaacgttctgaacaggtaaaagcccagaatttctgtccgatacgtctggttgaaccgttcaataaacgcattctgcgtcgacttacccgatttgataaattacagtgctacaccatgcttttcggcccgctgcgccgggatattcagatcaatttcaactgccagggcttcacggttaaagtcatccaccacgttgaaggaccggagatgcctgccgcagaccagcgcatcatgcataaagtctatcgaccaacactggttaagtgcctcaggcgtcaccagtggcgtctggttacgtaccggcagacactgctttctagttgtaatagcttgcttcagaaataa

SEQ ID NO: 112513 - DNA, 843 bp, Enterobacter aerogenes
atgaagaaggtattactagcagcggttatattaactgtcactggttcagcctttgcacatgagacagcttatacatgtagccgtgaagctaagaacggttttgtaacgccggatattgaatacgatcaattcactaataacggcaagccgtatatttacttgaaagagatcgacggctcagaggcttactatcgttacgattctttatgggatttagaaagcgggggagtgtatagctcagatcgtaaaagtgtaataagcataggcagtgataaaaattatccgcttattgttcattatcaggacgagactaaagcaattgaatatcattgcactttagacgctgaaatgaataacgtaataaccgggagagaacaaagagaagctaaagaagcagctgatgaaaaggccatgcaagatcaaataaacgctcaggcgaaagcagaagcggcggcggcccttgcagcacagcagaaagcagcagcagcggctaaagccaaagcagctaaagcacagactgaagctaatcatgaagcatcacagattacagggcaacatgttagcggctcttcagccgttgatattacctcttacgttaatcaggtaagggcagacgttcagcaaaatatctatgatgttctgcgttggcgtgataagcaatgcacagtgaagatcactattgcaagtgatggagtgttaaccagtggacgatcagaatctggcgatcctgaattctgctctgaactgctggcaacactgagcaagatgcaacgcttaccacgacctccatcacaggccgtgtacgagcaaatgaaaacaatgcatctaaattttaaattgtaa

SEQ ID NO: 112514 - DNA, 552 bp, Enterobacter aerogenes
gtgatcaatatcagcaacaactttttaagaaagcaatttaattcactcaataggaaagcactggtaatgaaaattaaatcaatttgtgtagttctgtctgctattgtcactgctgcgtctctatctggatgcgctactattatggatggcaaatcacagaaggtacaaattaaaactaatgcaccagcaatgtatacaatccgcaatgatgatggtgaaatagttagtaatggcgtagcaccgactaccgttactttaaaacgaggggatggcccttataacgtttcattacagcgtacagactctgcgcctgtagcacagggaactatcacagataatctgaacggctggctatggggcaacttgataacacctttaggtgtgatccttgactttgtacagggtagtgcatgggatttagactcagcggttacagtgaatacacaacctgaccctaacaaccctaacggcaatgcacagaatacaatgcatgtggtagcctctacacaagcacctatcactatcaacaacactgtgaataataaggcctaa

SEQ ID NO: 112515 - DNA, 636 bp, Enterobacter aerogenes
atgaaaaagttgatcattgcccttgctgtaatggcctcatttggcgcacaggctaaccgttgcgactatccagatcagttagcaaaagatggctcactgtgtggagctagggcggcttctgtgcgtcctggtggctatacgcctcctcctgaatactcagcacctatacagaatgctcagcccctgtatatgagccacgacaagctaatcccattcaatgatcagggggatatgcagatagaacagggtgaaaacacttatccggcgcactttgaatttagatgtaatggcgatatgaatattaattttgctggcggtcgctattcctccagcgttgaagattctgaagtaccggatgaatggtatgatgtttccttagtggttcataaccattacttaggtgattcacctcataccataaccccgaatgggaatgataatttaaccagcatgaaagaagctatagatgctaatggtaacggggttatcactttaggtgatttccctcatgtgtggggctttgcagatttcaccattacctttaagcgccataaagctgttagcgcgtcttttattggtgaagatcttaattaccaatgcaaacgaattgaagttagtaatccgtggaaggcttaa

SEQ ID NO: 112516 - DNA, 630 bp, Enterobacter aerogenes
atgactgaacgcatttattacaccagcgacgccaccgaagggcgcgcacagattgtcggctgcagcgccgaagccgatggccgttatgcgattgaactggatcgcacattgtttcatccgcagggcggcgggcaaccgtccgatggcggctggattgccggagagccggtgatggcggtcattacgcacggcgatagcgtgctgcatatcgttgcacagccgctgccggagggcgaggtagaggtgcgaatcgatgcgtctgcgcggcagccacatgcccgtctgcactcagccggtcacttactggggttggccggcgaacagttcggctggcggccggtgaaagcgcatcactggccgggagaggggcggattacctttgctgccggcgctggcgccacgttgccggaagccagcgcgctgttggcgcaggtgagcgcgtggcggcagcaggatttaccgcgtcgggtggccttcgccgatggcttacgcaccgtcggctttggcgagctgccggcctatccctgcggcggcacccatgtcgccagcctggcggcgctggggaatattgctatcagccagctgaaaatgaaaaaagggcagatgatcgtcagctataccctcgaataa

SEQ ID NO: 112517 - DNA, 261 bp, Enterobacter aerogenes
atgggttctaatgacttcaaataccagattgtctatcgcggcgatatgcttgagacgatcatccctggtcagtgtgttttcttccagcgtcttaaagagtatggcggtgattactggttaggacgaacttatagtgattgcttctggtttgaacttgaccgcccggtatcgttatctgatggacttgattatttaatgccactgacgaaagtcgaagcgacaagccatgaattcgacgccaattattctctttttgattag

SEQ ID NO: 112518 - DNA, 1035 bp, Enterobacter aerogenes
atggatgatgcaattcagacttatgaaatcaatggcattgatgatctagaagcaattttttcccgggtcatttctggcgaagacattcatatcgaaaatttgaagttaaacttcttagaaagcattgatttcaaattctttggtgatgaagagaagtataatggtactctgccggcaagcctagcgcagggtatctgtgaatttcagacagaaatgtacaaggtttttactttaatcaagtacaaaacctcaaacttacagaagctgactgctgaggatcgagaagctgcagaactggttttcactatcaaacctggctgcacagaaattatcacctcgattaaagagctgattgattcctttggtaacgcatttgggaaggtgacacaaggtatgagcccaagacagaaaacaacgtgtttcctgtttgcagtcgtggttttaggcggcgcatgggtcagtacgtcctatctcgaccatcagacgcaaatagaaaccaaaactattgagttgcagcaggaagaagcaaagcagcgagcggagtctgaacgtatgaccattcttagggatgggatgttgtctgcaattaaagaacacgaaggtgttgataccattgagcgagctgaaggtattcaagagcacactgcaaaagcctatactggtgttctaaaaggtgcctccgatgcagacaaagtgacaatccgtggggccagcaagattgagctttcacaaagccaagttcaagaaattataaagaacccgattgaaaaggctaaatcagagcagcaaacgctggaagttgtcattgacagcataaaacgttcagccgataagctgactttaagttgccatgaaccgacgggtgatgattcattcccaatctatgttgatacaagttttatcaatgatcctgatgaaattggcctcatttttgacgctatgaaaaataataaaactgtgaagatccttggtagttacaagattaggtctggggtgatagagcaaggtaacgcctccacaatctcaaacccttga

SEQ ID NO: 112519 - DNA, 759 bp, Enterobacter aerogenes
atgctcactgaaaaacaactttttgaacttattaaagcattacagtcttcaaatttttcaacaacagagatattggggctaagctttgccattattattgctgctctcataatgagttttattgtttctctgattacagaaaaagcaaagatctccgctactaacgctaactatgaaatactcagaaaacagctagcattaaatacaacaacaatcaaagacatagaaaaaaagatcacttctgagttgtgggtttcgcaacagatatggcaaaaaaaatacgatatgtatgagtacatttatactcagttgcttagtataaagaaatgggctgataatgaatttgaaattattgagattcacatgatgccaacatatatagccagtggttatcaaggatatttcacaaaagaacaagagaagcagttttgggaggaggttcagcaggctcacgatgaccgcgacaaagctctaaatgatgaagatttgaaattaaaaaacaaagaattacaacataaacttagtctcgccttcacagctttaactgaaatgatgataactaaagcaatccttcttaataaagatgtaactgttattttaaatgaattgattgataacataggggccaacccttccccactggaatatgaggagccagatgattatggatacagaataaagggtgcgattgataaagccttagaaaaaattagaattaatgcattagctgatttagaaattaagattcaagagcaataa

SEQ ID NO: 112520 - DNA, 474 bp, Enterobacter aerogenes
atgtgtggccgatttgctcaatcacaaacccgtgaagaatatctgacttatcttgcagaagaggccgagcgggatatcgcctttgatcccgaaccgatcggtcgctacaacgtagcccccggcaccaaagttctgttgctgagcgaacgcaatgaagaactgcacctcgatccggttcattggggttacgcacccgggtggtgggataaacctgcgctcatcaatgctcgcgtgaaaaccgcggcaaccagccggatgtttaagcccctctggcagcatggccgggcgatctgttttgcggatggctggtttgagtggaagcgtgaaggtgacaaaaaacagccctatttcatccgcaggaaggacggcaagccaatattcatggcggctatcggcagcgtacctttcgaacgcggggatggcgcgatatcgacttcatcgggaaaacagcacatgtgcagaatgcgagtgtag

SEQ ID NO: 112521 - DNA, 813 bp, Enterobacter aerogenes
atgcaaactaaattagaaataacactatcaatactgactgttttaggaactctcggttctactatcgctgcattccttgcaataaaacaaacaataaaacaaagaaaaagctcagtaacacctcaacttgtaattaacaactttccattcttaacaagagaagtctatgatgacaactacagtttatttccgatggatattgaaaaatcaatcaagaataaacctcaaatcatcaatgcaggttctggtgttgcactaaacacctcaataaagattgagtacgatttcatatctacaatgaatttttttacattaaaccaagaaaaaataaatagcaagcatttatttcaatatgcagatactagcgaaaacattgaccaaaaagcaaaattcactataagcggccttaattccagcttatccaaggaagctgaaatgaatcttaatctaggatctattcccccacagacaaataacgccaatgaaattaaattaaatttatcaactttttttcttgaggtctttataaatgaatgcctttatgagagaaaattaaacaatcagttacctgattttataaacggccctcgatttatagtttcttatagcgatattgatgggaatcactataaaacaaattacaaaagcaaaatattttttcacattaattctaaatccgaaagcaagatatcgttaaaaggaatgttagagttttatgtggagaaaagtagtaggttacaaagaggactacaaaggatccgcaaaagctacgcagatttcattaacgagcatgatttcaataaaaacagatag

SEQ ID NO: 112522 - DNA, 453 bp, Enterobacter aerogenes
atgactgaccgggtgatattgcagcgtgagttttctgagcttatgaacgggctgcacggaagcatcttaaaatatgctattgaccgagccgaacaccatcagtgtgaggtttatctgtgcgtgaacaacaaatcacactgcgatcaaatactagaacgcatctttgaaaaaaaagttgttaataaacttaagtcaaatcaggttatctccgttaacggacggaaattgagcttatattcacccctgaccctgaataagagttatctgccggaagcagtgtatttattgatgttcccaagccctgaactgctcaaatctgttgaatatcaggcgagcctcaaccccgttcatgaaattatcgtgtttactgaatcagacgggcatacggaggctacggataactggatgtcggaacatgaggtgcgcatgctgggaatcgaaaaaacagtttaa

SEQ ID NO: 112523 - DNA, 786 bp, Enterobacter aerogenes
atgaaaatcagaacgctatctcttaccttagcctttacctcttctcttgctttttcttgccagctttttgccgccgaagggctgacgccgttacagcccggtgcgaccaccggtacccatactggcgcatttccgcccgatgggctgtatatgtcaatgacatccacctatgaaaccggcgtcgtgcgaaacggtagcggcgacacggcgaaaatcgccggagggaaaaataagctctcaaacgtcgggctggtgatggccgccacctgggttcccggctgggaatttctcggtgcccgctatgcggcgatggtcgtacagccctataagtttattcaggtaaaaaataccggccagcacaccaccgaccataccagcggcctgctggggaccagtattacccccctcgctctttcctgggatttacacaacaatttccacgttggtgccgggttagccgtctatttaccggatggcaaaacggcctatacccgcaatgcggcaaccgggcgtaaagagacctccggggataacgtctcatgggaatattggtcgtttgaacccaatatcgccatcagctatctgaccgacgattgggggattacgcttaataatatttttgacttcaatacgaaaaataacgaaaccgactaccgctctggtagcacctggtatctggatgttactgccacccatcgtatcaacaatataccaatggcctggtctgcggtcagtcattcggagaagtgcgggtaccgcataaagggaatgttgttgagaaggtga

SEQ ID NO: 112524 - DNA, 252 bp, Enterobacter aerogenes
gtgattgaaggggcttacgaagtgctcggtgtgtttgaccgggtggaggagaagcgcgatgcaatgcagtcactggcactgccagaaccagcccgtaacgccctggcgaatgccgcgctgaagtatcgctttggtgaagaccaccagccggtcacggtatcgcagttgctgaccccacgtcgccgggaggactacagcgatgacctgtggaccgtctacgtatacatcgccatttatcccacacaacgctaa

SEQ ID NO: 112525 - DNA, 267 bp, Enterobacter aerogenes
atgtcacaggtcgtaagcgcggttacttcctcaacgaaagcaaaacgcagttaccgaaaaggcagtccgaggagtgctgtagaacgtcagcagagtcatcttgccagaaagaaagaaacgcataaggaaatgcgggtgtacgtcacaagcgaaattaaagatgaatttcgactgatgtgtgaaaccaaaggcgtgacccaatcagagatgattgaaaagctcataaaagaggcagttaaccagcatggttgccttgttaaggattga

SEQ ID NO: 112526 - DNA, 591 bp, Enterobacter aerogenes
atgagtgaagaaaaacgtccggtactgagcctgaaacgcaaaccagccacagataatgcaggagcgaacaacaacacgggcacccctgatgttgtggtgcgccgcaaaaaagtggtggtggtgtcgaccccgcccgcctggaaggtcaaaaaagagaagcttgagaaaaaggccgctgaagccgcagcgcgaaaaactgtgccggtcatggccaaagccttaaaggtaccgcctccggtccggtatctccgcttactgcctccggaacaggccatcatgactctgaaggcattctggccacagttgttcgacggtgactcaccccgtctgctggcgacggggatgcgtgaacagctgtttgccgatatcgcggggcgcgacctgccgctgtcgcataaacaggtgattaagtgcctgaaaagcctgacccggtcggcaggttatctgtcccggatgcgggaaggtgcctcccgctatgacctgcaggggaatgtggtggctacggtcactgctgatgaagcgcactacgccagtgagcgcatgatgaaagagctgttacgcgctgaacgaaagatgagtcagaccgtttaa

SEQ ID NO: 112527 - DNA, 2319 bp, Enterobacter aerogenes
atgagttttaatgccaaagatatgacgcaaggcggtcagattgccaatatgcgatttcgcatgtttggccagattgccaatattatattctatgtgctttttattattttctgggtgttgtgcgggttgatgttgatgtaccggctcagctggcaaactttcgttaacggctgcgtctactggtggtgtacgacactggcgcccatgcgcgatattattcgctcccagccggtctatacgattaactattatgggaaatcgctggaatataattcggagcaaatccttgccgataaatataccatctggtgcggtgagcagctctggaccagcttcgtttttgccgccatagtgtcgttgaccgtctgtattgtgacgttctttgtcgccagttgggtgctggggcgccaggggaaacagcaaagcgaagatgagaataccgggggccgccagctatccgataaaccaaaagaagtggcccgccagatgaaacgcgatggggtggcctccgatattaaaattggcgatctgcctattcttaaacactctgaaatccagaacttctgtcttcacggtacggttggctcaggtaaatccgaagtcatccgccggctgctgaattacgtgcgtgcacgcggtgatatggccattatttacgaccgctcctgtgagttcgtcaaaagctattacgacccgtcactggataaaatccttaacccactggattcccgctgtgcagcctgggatatatggcgcgaatgcctgacactaccggattttgataacgtctctaatacgctgattccgatgggcactaaagaggacccgttctggcagggctccggccgcaccatattttccgaaggtgcgtacctgatgcgcgaggataaagaccgtagctacgaaaagctggttgataccatgctgtccatcaaaatcgacaagctgcgcgcgtacctgaaaaacacgccggccgccaacctggttgaggagaaaattgagaaaacggccatctccattcgtgccgtactgaccaactacgttaaagccattcgctatctgcaggggatcgagaaaaacggtgagccgttcactatccgcgactggatgcggggcgtacgtgaggaccagcccaacggctggttgtttatctcctccaacgctgacacgcatgcgtcactgaagccggttatctcgatgtggttgtctatcgccatccgcggcctgctggggatgggtgagaaccgtaaccggcgcgtgtggatttttgcggatgagctccccacgttgcacaagctgccggacctggtcgagatcctgccggaagcgcgtaagttcggcggctgttatgtgtttggtatccagtcttatgcccagcttgaagatatttacggggtgaagcccgcggcgacgctgttcgacgtgatgaacacccgggcctttttccgctccccgagtaaagagattgctgagtttgccgccggtgaaatcggtgagaaagaaatcctcaaggccagcgagcagtattcctacggggctgacccggtacgtgacggtgtgtcgaccgggaaagaaaaagagcgggaaacgctggtcagctattctgatgtgcagacgctgcctgacctctcctgctacgttacgctgccggggccgtacccggccgtgaagctggccctcaaatacaaaccgcggccgaaaattgcggaaggctttattcagcgcaatctcgatacgcgggtggatgcaaggctcaatgctctgctggaagcccgggaggccgaaggcagtcttgcccggacgctgtttacgccagatgcaccggcgcctgagctggcggagaaagacgaaaaagtcgggaatccgcctgagcagagtcagcctgcggaaagcagcggaacgtctgcgacggtaaaagtaccgtcaacggcgaaaacgccggaagccgatgaatccggtcaatcacctgaagtttctaatcctgctgcactgctcacgaaagtggtgactgttccgttaacccgccccaggcctgctgcagcgacgggcacggctgcagtggcatccgctaccgatgttcctgctacacctgcaggagggacagagcaggcgctggagacgcagcctgcagagcagggacaggacatgctgcctcctggtgtgaacgaatacggcgaaatcgatgatatgcacgcatgggacgagtggcagtcgggagagcagacacagcgtgacatgcagcgacgtgaagaggtcaatatcaatcacagccaccgccgcgatgagcaggatgatatcgagattggagggaacttctga

SEQ ID NO: 112528 - DNA, 693 bp, Enterobacter aerogenes
atggcaacatctgaatctgccagatctgttgatacgcatgaattgatgccgagtgatttttatccgcacccctcagagggtggcgcttattcctcatcgcaacagagtgtcccgactttcgttgatgactatgttgtgtatttcggcggtgcatttgttattgtgttctttgttttgataatattattcttgtcccgaaaaaatacttctttacacacgaaaagtaagcgtgatgctttgcctgtcaatcccgataaaaagcctgaaggatggagccagccagaatatttccagctctccttatgtgtggaagggccggcagacgctgatgattccgtcttttcttctctcgcctctcgtgttgtccgcgaagctgaaaatctgtatatccccggcgtcaatcgccgcgacagctctgacggtgagtttgcctggtctgtgcagactaaatttccttctgacaagctgtgcggctcctggctttctccggggacaggctggtttgaacgtccggatatcattgaacgtcccgtgaaatggctctgcgtctgcctgcaatatacggctgaaacatcgccatccgcactccattcccttgttgatgaggccggacggcaggtagcgaaatcgtacctcaaaggcggacattgtcacggctctgagggctataccttctgcatacgtagcttctga

SEQ ID NO: 112529 - DNA, 669 bp, Enterobacter aerogenes
atgataactgagaaaattattcaaaaagaattgggcgttttagttaaagtgctaagttatagtggtttgaagtcggtatcgttttggaaaagtgtatggccagggcttatgctttgcagttggtttgttttttggccgctaatgttttttagtggtcgattatattcaccttttaatattagtgaggagcgactcggagtcgtcgtgtctataggaacttcttttgttttaggattgttatctttaatttttattggtagcgctcgttctttatatttgtctgctccgtacagctttagaattaactcgaaaatgtatttttttctctccaagaaaataaaaagatacgctgccgtgttttctttttggtatgctgtgcttgttgtcttttgtgctttatttaatctaagtacgatatgttttttgtctgcaatcattgcttcagtgattggtttctctgtgtacatgaatatagattttaatcgatataaaataaatgagttggcatatattttaacaccatgtaaacgtgttggcgaaagtataatatcaaccagtagtagttttgatggcataaaaatagatgagcataatccagcaacaggtcttccaatgaatggtggtgttgatgttgcggggaatccatatggttacagtagacatgagtaa

SEQ ID NO: 112530 - DNA, 2880 bp, Enterobacter aerogenes
atgctggaaatctacacgatagccggcggcgactggtttcggggcaacctgaatgccattgccgctttcatgagtaccggtacctggtcctccattgagaaaatgtgtatcgccttttccgtactgattgtcgccagcagctgggtgaaaaagcacaacgtcatggatctggtcggctgggtgtttgccctgacgctggtctcgatgctggtcgtcattcgcaaaccggtgcagattatcgactacagtaatgtctctcaggtctatcaggtcgacaatgtcccgataggcctggcgattcctgcctcactgacaacacgcgtcgggaatgcgctggtacagagctatgagatgattttctccctgcccgacagcgtgacgtacagcaagacagggatgctgtttggcagtaatttaatcgctaaaagcaccgactttttatcgcagaacccggagatcaccacgttgttctctgactatgtgcagaactgcgtcatgggcgatatttttctcaaccataagtattcctttgaggagctgatggaatctgctgacccgtactcgctgatattttctcagccgagtccacttcgtcaggttcctaataacagctataagtttctggagaaagactatattggcaccacgtttatcagctgtcaggtggcggcaacggagctgaagcaacggctggctctggatacccagacgggcgggaaaacctggaactactatgtgcgccagctctttggcggcaaacccaacccggacctgctgttcagccagatgatcggtgacagctataacttcttctacagctcggggcagagcgcgggacagataatccgccagaatgtcaccatgaatgcactgcgcagcggtattcagagctacgcggcccgcagtggtgatacggccagcctggtgaacatcgccaacacctcttcgctggagaaacaacgcctggcacaggcgacaatgggccaccaggcattacgctccctgccgttgatgcagacggtggtgatggggatcatgattggcctgtttccgatcatggtgatggccgccatgttcaacatgatgacaatgcaggtcatcaagggttacttttatgcgctgatgtggctgcagtcctggcctctgctgtacgccattctgaacagcgcgatggcgtattatgcgaagcaaaatggagtaccggtggtcctgtctgaactctctcaggttcagctcaagaactccgatattgcgacaactgcgggctacatctcgatgatgatcccccccttaacctgggccatgattaaaagtatgggggcagggttttccagcgcgtacagtcattttgcctcgtcgggcctcagctcgacgtcgcaggcctcttccagcgtcgtggacgggaattactcgttttcgaatatgcaaacggacaatgtcagcggaaacagctggaacaccaacagttcaacggcatttggacagatgtcccggcaactggggaacggaggcatgggtacacagacccgggatggttcgatggtctgggacagcagcggtgcgatgtcaaaactgccggtggatattaatgttggccgtcagatagccagtgcacagcagcagatggcacgtgaatctgacgtccaggcagagagctctctgcagggctataacagcagcgtgaccagtgcctggaacagcctgaagcaatttggcacaaatatggggaccagcgcgtcaaccaccacgggggcagataataccgagtcgtcgcaggattcaatggcgaaaagcaaaatgtggaacgcggttgtttcaaatgcaaaagccaacaacataagtaacgaacagtcgttccagaacttgatggatgaatcgacaaggggctcaatcacgggtgaagcttacggtggggtgaaatggagctcgggagatcagcttgccggtaaactgggtaaattggctacaggagccagtatcgatggaggtctgaaagttgcagcaagtggtactgcgggcacgggttcaactgatactgtagggcaatccggccgccactcagtagataccagacatgataccagtagccaggcggcgaaagattttaaagagggggctgactacatcaccagccataaaaccagtacatcaggtaacacgacagataataatgcaagctcccgcgtggaccagttctctgcgtcactttccagtgcgaaaaacagctacgaccaatatacaaacagccgtactcgcagccatgaatttagcgaaatggcttctcgaacagagagtatgagcggccagatgagtgagaatctgacgcagcagtttgcaaactttgtccaacaacggtctccacagaatgcagaagctatcctgacaaataccagttcgccggaagtggcagcacaacgagaatcgctggcccgtgaatttgttaaggcacaggtagagcctaaggttgatggcgcctatcaggatgcgagaggcacaatcggtcagggaatgcctactgtgtcaggaggtggaggggctggtaccgtagaagccgattataaccagcacagtggcagtattgatggaatgacgcataatgctggaatcaagggtaatgtgggtcagacagtgggatcgatggtgtctcaaaacaaacaggcacacgaggaaagccgtcagggaattcagcagcagggggatgatgtgaaaacacagcagaccggtctggaaaaccaccacaaaaaagaaggaaataattttagtgagcaatataataaagagataagttctcaacgagacacgttgataagtgatacaacggaaaaactcagggagaatgccttaaagagatcaaaagatcttgaagataagctcccttag

SEQ ID NO: 112531 - DNA, 567 bp, Enterobacter aerogenes
gtgaaaagcaacctgaagacaattagggcgggtttcacaacggctgctttgctgttggcgctttctcccgtgacctgggctggtacgctcgatgaagtaaaatccctctgggacccgcagggcataacaggcacgacgccggtgccatctgctggcgtgtccgcacccgtgaagccggtctctcaggcccgctggtaccggctcagcaacggccaacaggttaatctcagtgactggaaagtggtgctgtttatgcaggggcactgcccgtactgccataagtttgacccggttctgaagcagctgtccggacaatacggattctcggtgttctcttacacgatcgacggtcagggggacgaggcgttccctgaagccctgccggtaccgcctgacgtgatgcagacttttttcccgaatatcccggtagctaccccgaccacgtttctggtgaatgtgaatacgctggcggcctggccgattctgcagggcgccaccgatgctcagggatttatggccagaatggatacggtatttcaaatgatgggggcacctgataatggatag

SEQ ID NO: 112532 - DNA, 360 bp, Enterobacter aerogenes
atggataataaagttgaaaaaaaactgttggttatcaggaatatcatccgcgaaaccctgttggggaacgcaatcatcctgcttgcggtatacatcctgtcaaaatcattaccgcctcaaaacatcccggattatgggattatcattctgacatccgtcacaatgacaggtgcgataacatggctgttctggataacaacaatttatattaaaaaaatatttaaaaagcgcacatggattattatctttcttttatggtgtgttcttatacaactggcttgtcactataaaataaatgaactagttaacccccatgaatgtttcaacaatcaaacagcaattttaaaaaaaaccatgtaa

SEQ ID NO: 112533 - DNA, 441 bp, Enterobacter aerogenes
atgatttattttcgggctggatgtattgctctgttttttatcactattccggcgctggcctcagaagtaagggacgttccggaaggaaatcgggttttctggtttgttgtttttcctgtaacgttcctgatgttccctgttctgttcggtgcgttattttcccggaattatttctttaaagaatacgttatcattgcaatgtcagttctgattacacaacttgtttttattgcatgcctttattcatttgactatttcaaaattattatggtatccgggctggttcagtcgatagtgccttcaatgatatatgccgggatatctgttaaggatgaaacaaaaatcgcccgaacttcaaggtgcaaggtttgtatcggaggcgcgtccatagttgtgactgtgattacatggttttttttaaaattgctgtttgattgttga

SEQ ID NO: 112534 - DNA, 231 bp, Enterobacter aerogenes
atgatcctttctattgtttcaccgtctgacggcgctgtaaagccccgccgtcattcccgcatcccccgcgtcgatattcccgcaccggaaattgaccccacgctcagggcattcgggcggcatatcgcaaaaagcatacgcaaggggcgtggtgttcacatccccgcgatgaaaaacgccgattttggtcaggtgctccgcaccctcgaactgacacgcgcatttaactaa

SEQ ID NO: 112535 - DNA, 132 bp, Enterobacter aerogenes
atgaagtgccaggaaaaagaggggcgcgtcagcgctcctctctctatccgactttgtgcactttgtctgtcagatgtcgcaggctccacatcgatgcacgcctcaaccgtgcttaaccagattcaggtctga

SEQ ID NO: 112536 - DNA, 1233 bp, Enterobacter aerogenes
atgatgcgggaaaaatcccgacgtccgtcgccgctgcagcggcgggtgctgattgtgctggccgccctcggtgcaaaacgtccggggccggtggcgacgcgggatattgagcgggtgctggagcagggcggggacgccccggtgtacgggccgaacctgcgcgcctcctgccggcgcatggaagccgcgggctggctgcgcaccctgcgagccccgaacctgcagctggccgttgagctgacggacgctggccgtgcgctggccgccccgcttctcgctgacgaacaggcgcgcgtcctggcggagcagcgagcggcggcggtccgggttctgcccctggtcaggatgaaggcggtctatgagtctgactcgttcggtgacgagcggccggtggcgctggacgatcgctggcatctggcggtccggggagactacgttatccttctcgacggcaccacctgcctgcagctgtggaatgcggccgggcagttgacacgcctggaaggcgatcccctgcagatcgccacctggctgcaggcctgtcacgatgcggggattgcggtccgggtgcagatcaatgagagcgccacgccggaggagggcgctctgaacgtcaccgcgccggcggaccggaccgacacctggtaccgccagctggacgtcgcgctgcaggcggaggggatcagcggcctgaatgaggagatcaggcaggccgttatcacgcctggtgaggggctccgcgacctgccggcgccggcgcgcctgctgcaggttctgcgcgacagtgcggaggcgttcccgctcacggcggccggctatgaggaagatacggaggccgcactggctgacctgctggcccgcgcgggtttcgccggcgaccaggtgcatgagctgcagtggcaccgcatccgctggccgctgatgagtcaggaagaagctgaccgccgcgagctgaacaccctgctgaacgacctggaacgacaacagctgtactgcaaccgcgaacaactgacggagattgtgttttcgccggtacgcaaacccggcgagcgctggacggaacgtctgcagtggctcctgatgacggatggattcgggttccgcagtccgctgtcccgtgaagcgggcgccagggcgctggcaatcctggccggttacacggggcgggaggtgacggagcatctggccacggtgatggtgtggaacgacgccggaacaggagagaggccctga

SEQ ID NO: 112537 - DNA, 201 bp, Enterobacter aerogenes
atgaatagcatcaaattcaagtgccccgagtgcggtcaggcactaactttcaacgacatactacatgttgaaacaattgatgaaattaaaaatacgctttgcccttactgtaaaatgctgatcagcaaggaagaaatcacacgacaaattcagagtaatgttgcaaggcgaattgaggctatgctcggaggactaaaatag

SEQ ID NO: 112538 - DNA, 378 bp, Enterobacter aerogenes
atggacgaacagtggggatacgtcggggctaaatcgcaccagcgctggctgttttacgcgtatgacaggctccggaagacggttgtggcgcacgtattcggtgaacgcactctggccacactggagcgtcttctgagcctgctgtcggcctttgaggtcgtggtatggatgacggatggctggccgctgtatgaatcccgcctgaagggaaagctgcacgttatcagcaagcgttacactcagcgcattgagcgacataacctgaatctgagacaacatctggcaaggctgggacggaagtcactgtcgttctcaaaatcggtggagctgcatgacaaggtcatcgggcattatctgaacataaaacactatcattaa

SEQ ID NO: 112539 - DNA, 525 bp, Enterobacter aerogenes
atgagcaaatcaaaatcgatcgcgactctggttatccatgccggagatcaagttgaccggggcaataatgctatttttccaccgattactaccgccagttccttcattcagccaaatttaggcgaagaaggggagttttgttattcccgttgcagtaacccgacaagatatgcatatgaaaccgccttggctgagttggaaggaggtatctatgctacggcaaccgcttccggtatggcagcaactgcacttatattggaattgctacctaaggattcccatgtattagtaatgaaaggggtctatggcggtacttatcggttgtttgaacgtctgcgtaaacaaacttcaggtacgacattcagttatgtcgatcttaatgatctggcgtcagtagagcgccatattcaagagaatacaggtctaatctggatcgaaacgcccactaacccactgttggaattagttgatattgaagcagtatgccaggttgccaaaagcaggggcataatgagctgcgggtga

SEQ ID NO: 112540 - DNA, 1278 bp, Enterobacter aerogenes
atgcaaaaaataacacatcaacaattactcgattggttgaaaaaggaagtgaaactttcattaggttgtactgagcctattgctattgcgtatgctgccgcagtggctgctaaatatctcaacgcaccgatattaaaaataacggggaatatatcggagaatctgtataaaaatgcgatgggagtcactattccgggaacaagctattgcggagtcactcttgcggcggcaataggggctattggtggtaacgcggatgccgatttagaagtattaaaagatattactgcgacacaaattaccgaagcctatatatttaatgaatcaggtaacgtgtgtctaaacgcagtagatgctacggattttatttttatcgatattacgctatatagtcttagtgatcagtgccgggtagtgattcaaggtagccatactaatgtcactgaagtttatattaataatataaagcaaatattagtccgagacctaattgccgccaatgatagtggggtactacccgaattttcccttaacgacgcatttaaatttgtaaccgatgtcgccgctaaagacatcatgtttatgctgaaaagtgctgagattaataccgcgctttctgacgaggggcaaaggaagaactatggtttgaacgtgagtggcgcgttgtcgcaagccagaaaaaatggctttatcagcactgacttactgagtcaaatgttgatcaacaccactgcggcatcagatgcccgtatgggcggcgcacccttacccgcgatgtcaaattatggctctggtaatcaggggattaccgtgacaatgccggtagtgacacttgcccgacatcttaatacagatgatgaaacactggcccgggcattagcgttggcccatctagccgcaatctcaattcatatgcgttatacccgattgtctgcattgtgtgcggcgtcaacggcagcaatgggggcggcggcaggtatgagttggttattgacccaagattttcaaactatctcctacgcggtcagtaatatgatcagtgatattagtggcattatttgcgatggtgcatcaaatagttgtgccatgaaagtgtctaccgctaccgcctgtgcatttaagtcggtgttgatggcgcaacaaaatagtgttgcaggggagcgtgatggcattgtttcctgcgatgttgaaggttctatcaataatttatgtaaattagtgttatcgccaatgaggcaaacagataaagaaattatcagtataatgacacgtaaataa

SEQ ID NO: 112541 - DNA, 642 bp, Enterobacter aerogenes
atgctctcttttaatgtgatgcgctatgcaggccgccgcgtgtggctattgatgatatccgggggggcgatactgctctctgcctgcaccattttaccttcggcccctgtatcacaagtttatcttctgccggtgccacctgcagtcagtgtgccacacgcgcagacagtaaactggtcattacgggtttcacaaccggcgacgaaccagtttcttaatagctcacgcatagcggtgcagcctcagggccaggagattgcggtttataaaaactcccgttggagtgattcggcgccgattttggtgcgcaatcgtcttattcaggcgttccgtagcgatgggcgaatccgtgcagtcagtagcgacgatgatagcttgcaggctgatgtggagttgagtggtgatctgtccgcgttccaaggggtataccatgttggtagcagcgaagtgctgatccgttttgatgctcggctggtaagaatttcagatcgtaggattattgcgactcgccagtttgacattcgccaaccgataaaaggtaacgagatgaacgaggtggttcaggcctttggcctggccagtgaccagttagccactcaagtgctcaactggacgatgcagcaatcccctgcgcagggttga

SEQ ID NO: 112542 - DNA, 939 bp, Enterobacter aerogenes
atggaaacccgtgctcatcatgtcgttattggtttgttcactcttattgtggtgagtgccgcgctgctgttttgcctatggctgacaaattccggttctgatcgccagttcagattgtacgatatcgttttcaatgagcctgtgagtggcctgtcacagggtagcaccgttcagtacagcgggattcgagtcggtgaggtgacgcaattacgcctggaccgagacaatccgaataaggtttgggcacgtattcgcgtttctgcatctactccgatacgcgaagatacccaagctcgtctcaccgtcgcgggtattaccggcacctcaaatattcaattcagcagtggcagccagaccagcccgttgctggagggcaaagatgacgaggttcctatcattattgctaccccttcgccgatgagccagttactggctaacggtgagaatttcatgaccaatgcgaatgaagtgttggtgcgtttgaaccagttgctggcaccggataaccagcagcgcctagtaacgacactggataatctcgcgctggtcacccaaactgtggctgatcaacgtggtgatctccgtaccctgttgcagcagttggcgcaggccagtaaacaggctaatgagacactgactcaaaccaatcgcctgctgcgtaatgctaacggcttaatggatgggcaggggaaacaactggtcagtgatgccgccaaaaccatggcatcgttgcaaaataccagtaccatcctcaataaattggtgagtgaaaataaaacctcactcaataacgggatgcaagggatgaatgagctggggccggcagtagatgagctgcgcagaacattagcgacattacgtgccgccgtttctcgtttggaagaaaacccagcggccttgttgcgcggccgtgaaagaacacaggagtttacgccttaa

SEQ ID NO: 112543 - DNA, 792 bp, Enterobacter aerogenes
atgacgcaagatgcaatcattcaaattcgcgatctggttaactgctttggcgtacagtgcgtgcatcaagggttgaatcttgatgttaagcgcggcgaagttcttggcgtggttggtggctcgggtaccggtaaatctgttctgttacgcagtattgttgggttacgtcgtccgactgacgggaaaattcatgtttttggcaaggatttaatggcactgtcaggtcaatcccgcgccatggtcgagcgccgattcggcgtattatttcaacgaggcgcactgttcagttctctaaccgtgaccgagaacgtggcattaccattaatagaaaacgccggattaccccggtctgaggctgagcgattggctcaggttaaactggcactggctgggctaccgccgggcactggcagtaagtatccagcatctctgtcgggtggtatggtcaagcgtgttgcgctagcccgtgccttagcactggacccggatattctgtttcttgatgaaccgactgcgggtcttgatcccattggtgcggcggcgtttgacagtttgatccgcaccctgcgggatgccctcaatctaacggtattcttggtgacccacgatctggatacgctgtatacactgtgtgatcgtgtggcggtgctttcgcagaaaaaagtgctggtggttgatactctggataaagttgcagcgactgatgatggctggattcaggcgtattttcatggcccacgtggccgggctgcttatcaggcagcggcaattaacagtggagagaggttgtaa

SEQ ID NO: 112544 - DNA, 1146 bp, Enterobacter aerogenes
atgactgagcaaacgtcccccgcacaacttgatctcgatagcgcggctcagccccccagagtttatatccggggggactgggtgttggcgcattactgcgttttggagccgcgcgttgcgcaattgcgcgctaatatgcccagtgggggggtatttgatctcaaccaactgggggcgttagataccgccggtgcaacgttgttagctctgcttctgggtgaggaccgtgtagcaaatttacgcgaacttgcgcctaaattgccagaagagcggaggatattacttgaaacggtaagccatgtattgcctgacttaacccctgagttgtctgaaaaacccacacggttttggcttgagatgctggctaataccggccgttcggtagataacttatggcaagatattaagtcactattgggctttattggtctggcgctggaaaccttgctgggaacactttttcgcccctcccgctggcgcattacctcattaattgccaatattcaacagattggcctcaatgctgtgccgatcattatgttgctcacctttttggtgggggcagttatcgcctttctcggtgcaaccgtactcactactttcggcgcgggcatttttaccgtcgatttggtggtattttcttttctacgtgaatttgcggtactgcttaccgcgatcctgatggcagggcgaacagccagtgcttttaccgctgaaattggcttgatgaaagccaatgaagagattgatgctatccaaacactgggcttgaatccggtcgaactgttggtgctaccgcgcgtcttggcactattgatctctctgccgatgctaacctttattggcatggtttgcggtattttcggtggcatggtggtgtgtgccttaacactggatatctctcccactatgtttttgtcgattatgcaaaacagtaatgggttgcagcattttctggtgggaataagtaaagcccctatttttgctttcctgattgctattattggctgtctggaggggttcaaagtaaccggtagtgctgaatcagtcggggttcataccaccaccagtgtggtgcattcgatctttgtggtgattttgcttgatgccgtggcagcgctatttttcatggaaatggggtggtga

SEQ ID NO: 112545 - DNA, 804 bp, Enterobacter aerogenes
atggtgatatcccatcgttttcaaaataaagggggaacattgaataaaaagaaaacttttgaagtcagcattaacaacctaccagcagcattaaaacgcttagatttaccagcagaacaagtccaggttatcgaagactataagaagcaatttcccttccttttagaagagggtgaaaatgtattggttagcctcgatcagctttgggaagcactggatacaccgtattatacaccacctgcaacggcgtccgaaaatccggacggcgataaattaaccaaaacccgaacgccaaaacaagaagctgattacaaaagagccaagtttcgaaactggttaaaagaaatagtattaaaagagatagatggtgaaccttttagtcgaatggtgcctactggaaaaacaaagaaaaaagaaaccttcgttacaatagaagatgcaaaaacaattgcgatgttaacgcccggtgagcagggtagaaaaatcagacgttattttgtgacggtagaaaaggtttgtaaaatcctctggcaatataactttcagcgtcaccagatagaaaataaatctaacgaagtttacaaactcaggttagcacaaactggttataaaggttttgatgtggcggctaaagataaaattcgctttaactctttggttaaacagattgcaggtgcgaggaatgttaaagaaacagaccttgacgagtattatcacgttcaatttatcgtttttgatggaatgaaacgtggcagaacagacagcgagatcctcgcatttcatcttggtgatgaagcagcttaa

SEQ ID NO: 112546 - DNA, 360 bp, Enterobacter aerogenes
ttggcattagcaagaaacacagtgtttgaagaaacgattgaaatcggatttaacaacagaaataaaaaggttcgagtttctaaaaaactaaaaccattagccataatcaaactctacgaagaatccccatcactgacaccagacgaacaagaaataattaattcaatgactggtgtaacttggaaacctcgccaaaagtacatcggttttaaatttagcagagagccgctcaaatttgaatgtctctttgataacatcaatgagtacgagggctggttagaattcaatcgccttgagaatgaaaactttaatgggaatgatcttggattagattttgatgcaccaggcatctctgattaa

SEQ ID NO: 112547 - DNA, 633 bp, Enterobacter aerogenes
atgacccctcaagaaattactacgttaatcaaggcgattacacctaatacgccttataaagaatacattccagtagtcacaacgttgattggtgtcacagtaggtttttccttgaattatattagggagttagtaagaaatataaaatcagaaaagttaaataccatattacttagagaggaactggatattgctcttgaggatagtatagatttagcaaggcgcatatgtaaatcactagatgaagaattcgcaatcggcaaaactcctatagtttacgttagtgcaattagtaatgtatgctttaatgaattttatccaacaataattaaatgctattccagagagcaacgaagattaattcatgaatgctactctcatatatcatacatcaactcattagcaactaaagactattttgcaaaggttatatcttcgaatatcaatgatgaattcaacaaaataaacgatctatttatatcttgtctgaaattatatagagcacacagcaatctatataaaggaaccaactacaaagagattagtgtaaaaacttattttcaggatgtgaaaattgaaaatgaattttataaaaaaatgatgaccagtaaaaatgttaaaccatctcattga

SEQ ID NO: 112548 - DNA, 207 bp, Enterobacter aerogenes
atggactatcccggcgatgcgcatcgtatgagtgaggtaatcaccgtcgtcagtttttaccgttacatacgcgcctacgatgtccccacgctgctcttcggtatcaaagtcgttgtagatgtgagctggtggcttatcgattccctcgcgacggaactgatcattcctgcgaactatggccgactggcaccacttaattgcgcctga

SEQ ID NO: 112549 - DNA, 294 bp, Enterobacter aerogenes
atgcatcagacccatgtaactgatgtcgaggcatacggcgccttttctaggtaccaggtaagcaagtttttgtgccgggttaagagagataccgatggcggctacgttgataatggcgttctgcgtgcttgtctggttctggtaggcgactttggcgagataatcgttgttctggaaaacctggatggcaaactggctttctttcgcccataccatccgttcgtcagtagccgccttaacgaagagcggctcttgctgtttgacgaagtccacaagtgtgaaacccatctttaa

SEQ ID NO: 112550 - DNA, 156 bp, Enterobacter aerogenes
atgattaaatattgctttagtgaaaaaacaatcactttcaaattatctgatcttgttcatactaaaaagctgcctactaacttcaaaaatagtaaaaaatattcccagatcaaaagcaccatatcagcattagcgcctgtaagtgaagaaatatga

SEQ ID NO: 112551 - DNA, 210 bp, Enterobacter aerogenes
atgagtggattgaaaggccgccgaatcagcgcggatatgtttgctatgatgttaaaagtgccgctacaaggacaggcgctacctccttacaggatcggcggcgggaaaagctggagctcgaccgcctccatgcgcagcatgacgtttgatatgcaggaagcggtcgattttagcgagaaatttcataaaattcagtcgcctgacggctga

SEQ ID NO: 112552 - DNA, 459 bp, Enterobacter aerogenes
atgaagaaacaacttattgccggcgtcatgctggttgtggcgcacaccgccggcgctgcgcagggtgatgatacggaactgcagcagattttcacggaggcgggaattcaggggatatgcagcgccgggatgctcaccgtgcgggaagaagccagggatgaaattgtcccgcagaacgtcagacgcctcctggttcagtgtgcctatttcgatgagcagcagttgcgccggcgtgccggtctgccagtacagacatttaaccactggcgtgagcgcaatgcggtccttaatctgtcgtcagaccaggtatctgatgcgctctggctgtcagcgtggcgtgacttccgggcacagctggcatcggcttacccggccacggcggaaaaaaaggcacagggggaagaggccgtacccgccggcacgaagcccggcactgagcataggagcgcggcggattga

SEQ ID NO: 112553 - DNA, 720 bp, Enterobacter aerogenes
atgaagacgccaggcattctttatgtgttgccgttgtgcgccgggctcctgactggctgcgataacagacaggaggtgcagcagtttgaagtcgcccgcacggcggcgctgaaggccgacgacccgtttctggcgctggagagattcaatcagcaggccggcgactacggccgggactgcgactcgttgggggcatttctgtttggtaattttgattccacggttaaggcatgtcaggcgcggtatgaggccacgcgggatatggtcctgaaagccgtagaaaagggctccgtgccggcactggtctttctgtttgacccaaacataaagacgccgggtgtgtatccaggtgatattgatgccgagagggccgggcaggcggctaagcggcttgttgcactggcagagtcggcgccggtggacaggaaaaatcaggcgctgctgatgcgtgccggcgatgtgctgcaggtgggccagtacgttctgcaggattcccggagagcggcggccctgtacgtcaaagcctggcaggcgggcgatccgcgtgccgcgagcgagctggccaaggtctatcgctttctcaaggacagccggcgaacctatttctgggaggtccggagcaaagatgtgcagcagctggacagtcgggggcagctgaccggggatgagatcagtgctattcagaaacttgccgcggacagttcacggaccgacctttga

SEQ ID NO: 112554 - DNA, 273 bp, Enterobacter aerogenes
atgaacactatctggaaatatgtacttgaaccacaaatcaccctggatatgcccgccggcgcaacgatcctgagcgtgggcgcgcagggggatgatatctgtctgtgggcgcgggttgacactgacgcgccggctgtgccgcggcgcttcctggtagccggcacgggaatgccgctgtctgagagcttcaatggcgcccggttcatcggaaccgtgcagatgacgcaggccggggtaagcctggtcatgcacgtttttgaatcggaggtgtag

SEQ ID NO: 112555 - DNA, 330 bp, Enterobacter aerogenes
atgactgtaaaaacacgagaattacacgatgcgatgttccgctgtactgaagggtacgtgcagctgattgtagactctctggagtttgagcttggccgtggcctcagtgcagaggaagcgcaggcggtataccaccatgtagaggtattgattgaagtttcctgctgctttgacacttccccggtcggtcagcctgagagagttctcaacatgactggccctggtggggctgaattctgtgctgaccggcagggcgccccctttaacatggatgctgaccatgccggaacgggccatacgttgcgtttcggcaagccctctgaccgctaa

SEQ ID NO: 112556 - DNA, 195 bp, Enterobacter aerogenes
gtggctcagttaacagtaaggcagctgattaaccagctgagaaaaatgccacctgatgcgctggttatctggaaagatcacgatcacggcgccggggaatttaacaactatgtcggaaacgtttacgacgcacgcgatgagtttgtggaccgtgacgaatttgacggacgtgaagtcgtagcgatggaaccataa

SEQ ID NO: 112557 - DNA, 336 bp, Enterobacter aerogenes
atgagccacgttatttatgtcgtcagtaaaaagcccgtcagtacaaattacataccgccggcgctgaagggcgctttacctctgattagccagtatgaggttattaaaagaaccgcaaaaggctatcgcctgaaagtgagttatgccggcgataaaggctctatgtacctcgatgagcattattcattttttgaaacctatgctgaagcactggagtacatagcgacagaagcgaaccacattgccggtatgctcgaagagatgaagctgcaggccactcgtctgatgtgtgaagcgcaggatgaactgcgttcgttgacgccaggaggtgtgtga

SEQ ID NO: 112558 - DNA, 477 bp, Enterobacter aerogenes
atgaatcagctgtcaaaatcctggcttcaggcgcagatcgcacagcttgagtctgacggccggcgtgaagacgcataccgacccgatgagaacgggcatatgacactggccgccttcagggcggcgctggcgagtcttgaaagcgagccggtgtttcagtgccagttcgcctataagaatcactctggcgaaacggagtgggtctgggaggatgtcagtcaggagttttatgagcagttcaattccggcggtcgtcttggcgagcagcgggtgctttacaccggtccgctttcagcgcctggcgtacccggagccgcatcaaatgacgtggcctgcgtggaaattcaggtgaaagccattgagcaggctgtgaatgccgttctcagtgtggacaccgtggcctcaacgatggctgttcgcgcattattcatgaattacattggcgatctgcagctgcgtgcggaggtatctgaatga

SEQ ID NO: 112559 - DNA, 210 bp, Enterobacter aerogenes
atggaatatgaagcgtacaaggttcgcggctacggcttcggactgaaacaggattttacgggcctgattggccgttaccctactgaggaagaggcactgatggcggcggatgactattcgcgggcctgtctgccgaataacctgccggacagctacgatatggggctggttcggccggcgactgatgacgtatcaacagaaggggtttaa

SEQ ID NO: 112560 - DNA, 174 bp, Enterobacter aerogenes
atggatgtaattgtaaaaaacatcatggaattctttagccgattcggcataactgaagagtttttcggtaatattatttatttcattttatcccctgctgttctcataactttttttatagttactatatggtattctataaaaaaccagaaaaggagtaatgataatgaatga

SEQ ID NO: 112561 - DNA, 267 bp, Enterobacter aerogenes
atgaatgatacgaagcaattaactaacatagaaaaatcatggctaaacgaagtgcagtctattttagacaagtgcccgtcaaaacgattaggcttttacactattggtgataaagacatctttatttatgacagtagcagagataatgaaataaatattgagcatgataaaaatggtggagaattttcctctgctatacatagattaaatgcagatttttcggagtgtctaacttttcctaatcaggtacacagtgtagcaggatga

SEQ ID NO: 112562 - DNA, 177 bp, Enterobacter aerogenes
atggatagcaccatccgcgactatttagaatcggccgaaggtacggccatatcgcgcacccgcgcgttacttgaactgaagaaccacgggatcgtcgagacggatgagttttatgccgacctcggcgactgtgatatttatcgcgcccaggatgtgctgcgctggctgggttactga

SEQ ID NO: 112563 - DNA, 633 bp, Enterobacter aerogenes
atgttatatatggctttatgcagctttttgatgatcatggcgttaagtgagatgttccgcacgatgacggccattggcaatggccgttttaccggcaatcgtttcataccgctcgccttagtcctgtttacgttggcgctggtctcacctttccttgtcaaattttatacgctgagccggcctgtctcgatggatgaactctcccgtatgtctgtcggcgcgcagtgggcaggcatcgttgccgctgtgttgctgtgcatcctttatggctatcgagcctggaaaaacggccggttctggtataccggtgcggccattgcctctgtagtgatagccgttatttttgccaacagcctgctttttgtgtccagagctgatgccggcatcgtggccacgtttgtgctgggcgacgatgacagtcatgacgtgcagtgtgaccgttcggtactgctggttaattacaacaagggaacccccacggagtggcgctgtccaaccggtatcatgttcatgtctgactcatcaaaaccctttcttccctggccggattatcacagtggccagagtcagcatctgacggcggcgctggatcgactcatcgccctgcgcattgaagctgaccagaaaccgtga

SEQ ID NO: 112564 - DNA, 192 bp, Enterobacter aerogenes
atgccggtccgtaaatatgtcaccaaaactgaataccacgcctatatcagccagttcagccatatccgcgaggttgaaagcattcaccgcgacgatacggattttcacacctacggcacgatgaacggtgaggagaaactgattggctgggcggattactactggaagttctggtacatcttcacgtactga

SEQ ID NO: 112565 - DNA, 183 bp, Enterobacter aerogenes
atggcagagccctttcttaaaaaccggacgcgatttacctcatcgctggaaaataaacttgtccccctgttcgacgagctgtcgcatacgacccgtattcccaaaagccgcctgctcgatgaagcgatcgaggacctgcttaaaaagcacggtgtgacggtgccggctaaagaacggcgctga

SEQ ID NO: 112566 - DNA, 351 bp, Enterobacter aerogenes
atgaaaatgaaaacaaagattgctctggtactgactacttctctcatcagcagcagcgtctttgctcagactgttactgcacctgaaaccaacacgctattgaacaatatctatgtacagcaaagtgaggctaatcagcttctcaaacaactggttggtaaagctccggcatcagagatcacgttgacagatgcacaaaggaaaacctcctgcatgtatgaaagccattactacagcagtggcgcacgacttaccgtcggaaaagaaacactccgctgcaagctgagtggcgaaatcccgacatgggaaaatgcgaatgagggaaacattgtctcagtcgaaggcaaataa

SEQ ID NO: 112567 - DNA, 465 bp, Enterobacter aerogenes
atgtttttagcattaggattagttctttcagcgattgcttacttcattacaaatgaaggaataaactccgttatatttataatgcttaatgctttcttttggcattatttattttcgaagtcttcaagtagtcatcaggaagaaaaagaaaacccatcgtccttctcagaatatatgtttaataaatatggttacttccgcgagtcaccaaagaatcgaagaaaattaaccgatgaagaaagagtagcgttaaataacaaactgagtgaatggaatcaagttataaatgaacttgaatctaattattggctggatactgttaaattacatttgaaagaattaaatgcaactaaaggaattaatagcgagcctaattattcaatgatgtactatcaagaagtcagacaaaaaatgttgcatgaagccaaaggcaatatatataacactaacatcgctctaaaataa

SEQ ID NO: 112568 - DNA, 309 bp, Enterobacter aerogenes
atggatacgattgttgcagaacctaccactgtaggcgaaatgctctctgaagagtttttaaagccgctgaatatcacccaggctgagctggcgctggtcatgggtgtttcccgtaaagtcatcgggcagatcgtgaatggcagtcgtcggctgagtgtagcggaagcatcgcagtttgccgtgctgttccagacggatgaagatttttggataaatctgcaggcttcacatgatcgctgggagagcaggaatattattgccactcatcattttaagcctattcaggctttgctgggtgcaactggttaa

SEQ ID NO: 112569 - DNA, 300 bp, Enterobacter aerogenes
atgattggtagctttaaggacggccaggatggtgagcttgcccggttctatttgaatgggaagagaagcgcagggattccggccatgattgaaaagcctcttcgtcgtaagttgtcgcttattgaagcggccagcagtgagaaaaccctgtttgcgccgccaagtaataactatgagcgtttgcgtggcaaccttgaaggctggtcaagcattcgggttagtctccagtggcggttgattttccgctggcgtgacggccacgcttacgaggtttatctcgatccgcataaataccgttaa

SEQ ID NO: 112570 - DNA, 864 bp, Enterobacter aerogenes
atgactacacaaaaggaaatggaagaaatcaggactgtgttatcttggtttgatgtacgccgatatgatggcctgaaagacctcaccctagaacaaatctatgctgagcttgaaagacggatgcttgcttacaaaacgaggcaacaatgggaaacagcaggcaaaagtaatcaaatgcaagcgatataccatgatgccaaaatccgatgcggtgatgtgatacttacatcggactggatttcagacaatcacagactgtcacatagctatgctgtcaggccgatgaccagaggcgcattgttcaactatgggcgggctatgtatcggctggagacttcagagcaaacagaccctgttgcagtgagttcggactacatctctgagtatctgaaacagggagggatgaacccggctaacaagatgctgattgaaattgacttggaagaagccagcagtgacgatcttgcagaacatctgaaagtactgattgctctatggcaaaagcacctaaaaacgcctaagccacctaaacgaaggtttcggtttggtcataagacctttgaaaggatacttgattacaaagtcatccctttgatggatttaatctcatgggaacagctctataacgaaggtaagaacatacctttcaacatcttagctgacattctacatggtactggtggggttcgcagccgtgataacatcaaagatactgattatgattacgcgaaaagttatctcgataaggatgagtactttaaggttttaaatgatttctatattaaaaacaatatgttaaaggattggaagatctctgaaattattacatttaacgataaagttatggataaaaacaaaaagtaa

SEQ ID NO: 112571 - DNA, 1026 bp, Enterobacter aerogenes
atggattttaaatataatgattttactggtgtattcaccaaaccttttggcaataatttcctgattcaagaattaggcatcttccaagaaaaatataacgacaccccgaagatcgagacagatgaccttcgagcgggcaaaatctccgttgcggaatctgtgaataggtacggcactgagctagttggcacagagcgggatttagcaacaaatcgactcctggagatcccacattgggtattttctggggaggttgatgcaagtatgttccaggggattcgccgtcccggtacgcagcgccaacaaaatatggatgaactggttagcgatgaatccattcgccagtatatgaagttccgcaccactaaagaggatgtgcttgctagggcgctgtttgctggtattgtcaacgccccatatacacaacagcaggtggtcgatttctccgaagagttcggcgagaattattccagtgctgtgatcgatgttggttcaactggtccgctagagtctctggacaccgccgcaactgcactacgagtaaacctcggtggctgggttaaagcgcttaagggtattgtgatcctgtgtgacccgactttctataagtcagtgaaatatcacgcggagattcgtaccttagtcgctcacggcgttctgccgcagtccacgctgtttaatagtgctgtacgggcaaacctcccggcgtttagtgcgtttgaactggacggtctagtcttcgttaacgttatcggttacgaggattatctacctgctggtagcgctgtaatggttccggtatttgctgacaacattgtgccgtcagatcacacaccgctggaagttgtctccggtcctgcgtcacgtaatgcgaagattgccgctgcgggcactcgcgctgagttcttccagtacagctttgatgaccgcctgggcaataaaactgtgatgtcagaatttggcgttttgccgctcatctatgatctatcgatgattaccaaactgaccacctccactggtgagtaa

SEQ ID NO: 112572 - DNA, 138 bp, Enterobacter aerogenes
atgccactgtcgccactgtcgccgctgtcgccgctgtcgccgctgtcgccgctgtcgccgctgtcgccgctgttccaacctcttaaactggacaacaacaggagcataataaaagcggttctgacaaaaccgctttag

SEQ ID NO: 112573 - DNA, 972 bp, Enterobacter aerogenes
atgaaaaggaaattacaagttttcgtatccagcacatttactgatctaattgaggaaagacaagcagcagtaagtgcgatccttaaagctgggcacattcccgcaggcatggaactttttaccgctgctgatcgatcacaaatggatatcataaaaaactggatcgatgagtctgacgtatacatgttaatactcggcggtcgctatggctcaatcgaaccaacaaccggaaaaagttatactgaattagaatatgactatgctgtagaacaaggaaaagccctcttcgcagttgttattaaagaggaagcacttgaacagaaagttaaagaacacggtactgattttcttgaacgcgatgagccaaagtccttatctgaattcaaaaagaaggtattatcaaatatgtcttctttctttgaagatgtgaaagacattcgtttgtgcgtacatgagagcttgtctaatttcagcaccaatagaaaactaaagggttgggtttcagcagatgaaatcattgacactcatgatttagctgaagaaattaaaaaattaaatgaagaaaacagaaaattaaaatccgacattgaaaacaaagataaaaaaataaaatcactactaaataacaaagattcagaatttagggaacttgctgaggttctcaatgaaattaaaataaccatacccaagacgcaaacaaaagcagataatgatattgagacaaacctactcaatatatttgttacatgtaaagactcattcgttaacggtataaccaacgatattaacatgaaggactgggaaaactttttattttacgaagtaagccctattctcaaaatacacgggctaatggaaaatgaaaaagttacaggtgtaagataccgtagatatgttacaactgaacttggtacaaaattactagcttatgttgaaaaagaacaaattaaaaaaaataaagaaaagaaatag

SEQ ID NO: 112574 - DNA, 279 bp, Enterobacter aerogenes
atggctaataatttgtttattacctatgatctgattaaaaccaaagattatcctgccgtgcatgaagctatcaaagcattaggtagctgggctaaagttacggaatcgaattggtatgtaaattcgattttatccgctgaggaagtcgcaagaaaagtaagagccgctatggatagtgatgataaattgattgttgttaatacttcaagcaaccaattttactcatacaacttggatcctagagttttaaaatatatgcaagaccattggcgtgtataa

SEQ ID NO: 112575 - DNA, 1698 bp, Enterobacter aerogenes
ttggaagaaaaatgcaaaaaaaatggagatcgttctttacacggtcagtatggaaaaggtcgttttaaagcattttctctgggggaaatagtcctttggtcaacctgtgtagaggataaaggaaaatattatagatattcaattaaaggaagtgccaataatatcaaacgatttgaaatcagtgaaccttcagaatcaagtgataacataaaaggcactcaggttgagatatttaatttagtaaagcaagcatcatcattggcgacagattcatccaaggaatcaataacaaaagagtatgcgttatatctaacagaatatcctcataaaaagttattttatgataacgcatatattaccccttctgatgtatggcttgataaaaaagaatataatctcggggatattgagatagaatcagcccaagaaaatgtatctgtttcaataatagagtggaaatttaagacaccacgagagattcattactgtgatgaaaatggattttcacttttcaatgaaagcgcggggaaacttgttagatcatatgacgttgattttacagtatatataaagtccccatttattaagaagaaatttgaagaaaatgttctttcgcttggtagcatggaatctggcattaaagagttaaaagagaaagtcattgatctttgtagacaacattttgtcaacaaagagttcttacaaaaaacgaaaatagtagatgagtggaaagaaaaaaatatttacccgtatgaacgaaccccgcaacccggcagtgttgaagaagctgaacaaaaggtattcaatattttagctgtgaatgttgaaagctatctaacttcttttaataaatctaataacagcattaaaaagtttacgtttaaactgctatctcaagctttgaaagacaatccaaattcagtgagaaaaattctatctgaagtattagtcatgagttctgacgatcaagattcgatggcgaatttattagaaaaaacgactctccctaatataatcaaagcgtcacaggttgtatcagatcggttaaatttcttaactgggctggaacaactattatttgatgataaaacattacacaaactcctagaaaatgaagcatggctctttagggaggatttcaatttatcccgtagcgaaaataccctcaatcaagtgctacaatatcatgctgataaaataagtatcacttatgatgcagaactacctgttgttagagaagatggaacgacaggtagggtggatttgctacttagcaaagcacgtcagccaagagaaggtgagcttgaacacttagttgttgaactgaaaagaccaacacaaaaaatagatttatctgttataaatcaagttgaaagttatacttatgctgttagtaatgacagcagatttgataaacagaatacgaaatggatttttatcgccgtatctaacgagatagctcctttagttcaggatagaatttctcaggatgatcgaccttacggacaattatattctaaaggaaatgtttcaatatggatttatacttggggtgagttaataggacaagcgcgttccagactgatgttttttagtaacttattagatattgatattaatcgtgattctgctacaaattatttaaaagaaacgtacgctaagttcattcctgctgaagttaatgaactggaagtttag

SEQ ID NO: 112576 - DNA, 261 bp, Enterobacter aerogenes
atgatactcaacgaaaaagtggtcactgccagcatactcgatgccagtatgttcagaatgttatcgactgcttccgcaccaaccttcacggaaaccgactcaggtatcattgatttaaaaagaattgataaaagggccgttattatcgcgacaatggcgaataacgttgccctgaaccatagctttttaaatgtctgcttcagaatccatttccagcgtgaaatcattctgcattcctcatattgcggccgggataaataa

SEQ ID NO: 112577 - DNA, 453 bp, Enterobacter aerogenes
atgaaagaaaatcctgaagtatatttcgatttctttatatcccatgccagtgaagataaagattatttcgttagaccactggtaaatgaattatcgcaacttggtattaatgtctggttcgatgaacaaacattagaaattggtgttagtttaagaagaaatatagatgcaggcctgaaaaaagcatcttatggaattgtcgtgttgtctcatgatttttttagtaaaaaatggacgcagtatgagttagatagcttgattaatcgagcagttaatgacgagaataaagtattactaccaatctggcataatattaatgcaacagaggttgctgagtatagccattacttaacagataaacttgctttacaaacagcaatacacagtattgatgaaatagcaaaacagctatctaaaattgcatacaaacgtagaagcatcacaacgtcataa

SEQ ID NO: 112578 - DNA, 726 bp, Enterobacter aerogenes
atgagagctcgtacgaaagtacgggcttttttttcgcatgtggcagccgcaggggggatgagaacccccgaccggggttcgacaactggcgcagccagttggacagaccgcgaacgcagtaagcgggctgccccgcaggggcgagcgaagcgagtcaatccccccctcaccgccatattcgagataagagctcgtacgaaagtacgggctcttttcttttatattctccgttggggggatgagagcccccgaccgggttcgacaactggcgcagccagttggacagaccgcgaacgcagtaagcgggctgccccgcaggggcgagcgaagcgagtcaatccccccctcaccgccatattcgagataagagctcgtacgaaagtacgggctcttttcttttatattctccgttggggggatgagagcccccgaccgggttcgacaactggcgcagccagttggacagaccgcgaacgcagtaagcgggctgccccgcaggggcgagcgaagcgagtcaatccccccctcaccgccatattcgagataagagctcgtacgaaagtacgggctcttttcttttatattctccgttggggggatgagagcccccgaccgggttcgacaactggcgcagccagttggacagaccgcgaacgcagtaagcgggctgccccacaggggcgagcgaagcgagtcaatcccccctcaccgccatattcgagatga

SEQ ID NO: 112579 - DNA, 270 bp, Enterobacter aerogenes
atggaaaacataaaaataataagtatctttaaaataaacgaaaaagtacccttcataacatgtatcgtaaccgatatggaacaaaataaagacggaataaagctcatgctggaaagtggtgaaagcatctgcattaaagattacggttattacttcctgtcagaagctgacggtgatttgggcagagaacaaatgataaacagctatagaaggttattttctgaacttagcgggataggtaaagtgacagtcaattcattaatgccctaa

SEQ ID NO: 112580 - DNA, 198 bp, Enterobacter aerogenes
ttgcatcatctaaaccacaaaaatgacaaggaaaaggaaatggatcgtcaatacaacaatgaactgaccccggaactgctggcaacaatggatcaatcaccgtttacggcggaacaactgtccgggattgaaagcaaaagagcgcctactctgagctggatcgcacctgaaccacaaacagactgtttaaccaattga

SEQ ID NO: 112581 - DNA, 294 bp, Enterobacter aerogenes; identical to SEQ ID NO: 77242

SEQ ID NO: 112582 - DNA, 276 bp, Enterobacter aerogenes; identical to SEQ ID NO: 77241

SEQ ID NO: 112583 - DNA, 555 bp, Enterobacter aerogenes
atgatgacggatactattaccctgtccaacggctctaccgatgcgctggaagtgtttaacgggttcctggataaaattagcactgcaacagatggtttgtggacggatgttcgccgtgtcgtctgttttgcctctgcaagtttctataatagtttgcgtttccacgcctccatgaaaagcgcctaccagtacgttgacccgtttaacgagatgaatattgtctatcagcgtaaagagattctcccaaatgtgcagaccttcactctgccaggactgagcatcgacgtgatcaaagtgactgacccgcttctgactccgtttattgctgatggtacagcggtcatgctgccagtattccaaagcaacacgaatgtttatcaacatctgtacggtcctgcctcagttgatactaaccttgcggcgtctggcatcactcaggaatatttttcttatcagtacgagaaagagcgtggtgaggttgaaattgtatcagaggcgtcagtgttgcccgtaaaccacggtaccaatttcagtctggttattactgccaattaa

SEQ ID NO: 112584 - DNA, 273 bp, Enterobacter aerogenes; identical to SEQ ID NO: 100134

SEQ ID NO: 112585 - DNA, 222 bp, Enterobacter aerogenes
atgttcagaacagaagacatcatcaatgagataactcaatggattgattcaaacttacataaaccgctgaagatagaggatgttgctgcgcgggcaggatactccaggtggcatcttcagcggatttttgtgcaggtgaaagaagttagtcttggaaaatatattagagatcaaaacttaaacttgctgctaaagctctcatcgagactaatgagtcagtaa

SEQ ID NO: 112586 - DNA, 501 bp, Enterobacter aerogenes
atgaaaacaccccgtattcccatcgctatccagcaggccgtcaggagtagcctgcgggagcaccttgccaccgccaatctcaagctggaacgccgctatgcggaaccgacgctggtttatcagcagcgcggcacctccgcaggcaccgcgtggcttgagaaaaacgagatccgccttaatccagtgctattgctggaaaatcagcaggcgtttatcgatgaagtggtgccgcacgaactggcgcatctgctggtgtggaaacactttggccgcgtcgcgccgcacggtaaagagtggaaatggatgatggaggtcgtgctgggcgtccccgcccgccgcacccatcgctttgagcttgattcggtacgccagaacaccttcccctatcgctgccagtgccagcagcatcagctcacccttcgtcgtcataaccgcgtggtgcgcggtgaagccacctaccgctgcgttcgctgcggcgatctgctggtggcggaaaagtaa

SEQ ID NO: 112587 - DNA, 240 bp, Enterobacter aerogenes
atgaactgggcgcagcgtagcgtatcgccgacgcgggcgacgctgatttacaccggcgagccggtttgggctggcgtgtttggtcgtatcgccggcgagcgtctgccgctgttggcgctggtgggctgtctgtttattctcgccggagtgctggtcagcgagctgaagtggaagaaaaaatcgcggccgcagattgcggcagaggaagcgccagagcttgccgagcggcgcgagccctaa

SEQ ID NO: 112588 - DNA, 711 bp, Enterobacter aerogenes
atgtcttcgctcaaactctcgataacgccgcaggaactgatcctgattgtgatcaccatgttctggggcggtacctttcttgccgtacagtacgccgtgaactttagcgggccgtttttcttcgtcggcctgcgctttgccaccgccgcgctggcggtggcgctactgtcgctgcgtacgttacgcggcctgacctggcttgaggttaaggccggtgtggcgatcggcgtggcgattgcgctcggctacagcctgcaaacctggggcttacagtccatctccagcagtaaatcggcgtttattaccgccatgtatgtaccgctggtgccgctgttgcagtggctgtgtcttgggcgcatgcctggcgtcatgtcctgcgtgggcatcgtgttggcgtttatcgggctgatcctgctggcggggccggaaaacaatctgctggctttggggattggcgaaatgattaccctggcaagcgcggtggctatcgctgccgaaatcattttaatcagcgcgtgggcgcgtcaggtcgatgtgcgccgggtgacggtggtacagctggcgaccgcctcgctggtggcttttgccgcgatggcgccggctggggagtctatctatcccgccgatgcgcccggaactgctggccgtcgcgctgggactggggattttcagcgctattattcaggtcaccatgaactgggcgcagcgtag

SEQ ID NO: 112589 - DNA, 471 bp, Enterobacter aerogenes
atgtacagtccagtacaagtagccaatgagtttgttgtgcaaagcttacagcacaataagacccttactcatatgcaagtacaaaaattgacctacattgcccatggttattaccttgcattgacgggtcgcccacttctgaatgagctagtgtctgcctggaaatacgggccagtcatttcaggtatgtatgacgcgtttaagaattatggtaacaagccgataacttcgacagcaatgtcgccatacggttttacgcaacttgatcctcaggcagaaagtgtcattggtgccgtatataaattttatggtgacaaagatggtattgagctttctcagttaactcacatgccagggactccatggtcacaggcatatgatgggtttcactcaaccattatttcgaacgaagttatcaagaattactatgatagcttactaaagaatcaacaagaatgtcgcgggctttaa

SEQ ID NO: 112590 - DNA, 579 bp, Enterobacter aerogenes
atgcctgataaaattagcatttttgacttaatcggtgcagcggctggtcttgaagtccgccgcaccgaatccaataatcaatcccccaacccttcgtctactagggaaactgatagtaatcaagttaaatccccccaaagcagcggacacacggtacctgactcatctgaggacattgttgtccctgattgcaaggctcaacaagaagaagagcagttcagttcaaatacgagcgaattacatgaattcatgcaaaagaaccgcatggatagtatgcaagctcaacttgatatcgttattacacagatcagagataaaaaggctgaaacaaccggtaaagaaattgacaatgacctaagaaagaaaatggcatcatttactgtccattttatgtcttggtggtgcttgtttgttgctgcaatgtttacttcttttttaatagctcatgatggtaaacctcccgttgaagctatcgttgcattgcttggtacaagtacgattagcattgttggtctcgtcggctttgttgtaagcggtctatttaaatcacgtaaagaaaacgataaagaaaaagaatag

SEQ ID NO: 112591 - DNA, 1188 bp, Enterobacter aerogenes
atgagtgaacgtggtgataaaaaaatcaacaaacacggattgccaagatatattccagctagtacggcaaaagaaataagagaagaggctggatacggctgtgtcatttgtggcgctctttttgcagattatgaacatatagagccggagtttcatgaagcaatgaagcatgaggctagcaaaatgacacttttatgtggtacccaccatgatgatgtcagctacggcagaatgcataaagatgaagtgtgggaggcgaaggctaatccctataataagaatagaggattcatttcttccgcaatgcgtcatcaaacgaatgcttctaaaatttatcttgggagtaatgcgattggccgcgatgcagtaaataatcctgatgtaggtttagttgctattaaactaaatggtaaacctatactttggtttgaaaaaagtgatggtccatgtgcacctattaaaacatgtgctattttttatcataaagattcaattccatatgcattcatcaatagaaacatcctcagaaaggaacttgatggttatgatgtacagtcaataagctctagagttgagattagaagaggggctggggatattgcactgattttgaacttcccagggcgtggtgatattataattgaatattttaaaatggaatttgatgatttttgtgttgtggttaacaaatctggtgattttatatatacgaataattcgggatcccgtattcaattatcgagcacctcaactggtatgttgaattttggctcaataattgagagtaataaattctgtgaaggtgaacggagtaagttatctttcattgttgaaagtgctctttatggtgtaaaaataatggcttataatggtgaggttctcggatggtttagttctctaagtggctttgttattaataaaagatattcggttgttggtaatgcctcatctgatgaaggggggaaagcatatttttcaacgttaactgagatgaatgttgccaaaggggtcccttccaagacagattccggtgaaatagtgtatcttattagatgcgaggaagattcatatgatactggtgagccaatatggatttgcactaatgacagggcgtctaaaaacacaagaagtgacaatcattatgatcttagttatcgtttttttgaacttcctggtgtatatgactaa

SEQ ID NO: 112592 - DNA, 411 bp, Enterobacter aerogenes
atgtctggaatgttagctagtactgcggcggctgtagggatcattgataaagctgtaggaattgcaaagaaactcgctgatgatggcggggagcttgatagggcgactctcaaacttgagcttgcaaatcttatgagtgagcttgccagtgttaagatggaagtgatcactacacaggctttactatttcaagcggagcaaaagaatatacagcttgaagatcaattaaaagataagcacgcttttacgtttgacagtggactttactggaaagaaggagataaaacaccattttgccctgcatgtaaagaaaaagattcaaagttcatacacttgcattacttttctggaggcagtagttacagtgctggttggtactgtaaggtatgccgtaacgaatttgaagcatag

SEQ ID NO: 112593 - DNA, 555 bp, Enterobacter aerogenes
atgaaaattaagcgaaagccctttgagcaattcttaatgcacgacatagaagagttaaatggggatttggaggaggcatatctagaggcggccttccccttgattggtcagattgtgatgtatttcaatacattggaaaaggacttggatagcataatctacgaaagtttcagtgaccgctctgatcaattaggtattattgttataggtagtatgaactactcggcaaaggtagaccttttcaaaaagtactctgaccttttacatctcgctttacaagattcttatagtgagtatgactcactgataaaggatcttaaggaatgtggtcggttacggaatctcactgtacatgcagattggaataatacggaccttgaaggatatacttacttgggtgttaaaattaccaaagaaggaattaaccaagaatatattcagtttagcattgattccctgaatgatattcttactttgatacatcatacgcgcttcaaactaagtgattattgggaagctagaaatataatgcactccaaaaagttacagaaatga

SEQ ID NO: 112594 - DNA, 480 bp, Enterobacter aerogenes
atggctatcaccacaacgctttattacccctccgcttacctgcctggtccgcttaaagagagtttcggtttaactcctgtatctcctctgaaacggactcagatggtaactggccgggcgcggcagcgtcgtgcctacacctcgacaccaacccaaacagatctggcctggattttttctgacgtccaggctcaagcttttgaggcgtggtttcgggatgagttatcagatggggccgcgtggttcaacataccgttattaacgcctgtagggctgaaaaattacgtgtgtcgtttcacggatatttataaaggccccacgccagaaggtggattttactggagatataccgcgccagtagagctatgggagcgcccattgccaccgtcagggtgggggcattacccggaatggatcgtcggcagctcattgctggatattgcgctgaataaggagtggccgaagcatgacgcagattaa

SEQ ID NO: 112595 - DNA, 321 bp, Enterobacter aerogenes
atgaagccttctattcaagagcttcgctaccaatgccgtatcgacagcgatgacaacacagaggatgtgatgttaacgctttatctcaatgcctctttaaaacatgccgaaaaaataactaatcgccatctttatgacagcgatgttccagatgacgaccccgatgggctggtggtaaaggatgatatcaagctggctctgatgttgctggtgtcgcattggtatgaaaacagagagccggttagtagcgacagtgttaacactattccttttggtgttgatgccattctcaagcagtaccgtaaaattccaggaacttga

SEQ ID NO: 112596 - DNA, 204 bp, Enterobacter aerogenes
atgtttttgcgaaaagacctgaaatggtcacctgatggtattcagataagaaccattcctgccggagagtatgaggttgattccctcccagatcgtgcccttgaggttgccgcgcagatggggattcttgatggggctgaacaaccaaaaatctccggaacgattaaaccgaagaccagcaataagcgtggagtgggtaaatga

SEQ ID NO: 112597 - DNA, 210 bp, Enterobacter aerogenes
atgagcaaaatttgggtaaaagaaatatctcaccccggtggaacggcaacattaaaagcaaaagagatcccgcacgggtcttgggttgatgtttgtatcagggctggaagcagtgccgcagacataaacgattataataaacgagtaaaagactggaagaatcaaaaaacaaaagaaggttatgaaataatagatgttccggatcattaa

SEQ ID NO: 112598 - DNA, 246 bp, Enterobacter aerogenes
atgtcagaaattacacctgcagaacaaatccgcctaaacctccttttgactttgggatatgacacagccgcagcgaaagaagcaattgaatttgttcaggacagtgaactgaaatatcaaatcttcattcagcagtttgggcgagttgtcacggaaaacactgtagtggccaagaccattaaggcggttcaggagtcgattgaagcactagcactgtttgataccgacgcagagcaggcgagctaa

SEQ ID NO: 112599 - DNA, 588 bp, Enterobacter aerogenes
atggattggaatgacttaatttcaaaagctaccatcgcaattattacaggtcttgttgctgcatttttctccgctagatatgctttagggcgctattacaaagaaaagtggtgggacaaacgattggatttatatttgcaattagtagaatgtattcatttattgaaaaaatacgcagattattggaatggccgtgcacaatcaaacaagtctgaatatccaactgtatttgaaataaaatcacaagaagaagagaaaaaattagcagaaattttccatacagagttggaaaaccttagaagaattggtgacctgtcccctctgttattaaatgaaaaatgtgagcaattgatagctgacttcttcgagaatgaagaaaatctttctctagcttgggaatatgatgcaattgagtttgctgatgctacaaactcaagatatgaaaccctaaaatcaatgttaaacgatataatcacagaagcaaaaaaagaactcaaaacaaacaacggaaaattgaatataaaaattaatatttataaaacaaacaaaggtaataatgaaggtgatgatataaattattacgcctaa

SEQ ID NO: 112600 - DNA, 312 bp, Enterobacter aerogenes
atgaatagagaacgctacttcgtaagatggaagcttcagagagcaattgctgatctcaattattcccttgaatgttttggcgatcatctggcgcaagagcatggttatccctctgggattgatggttttgaggccgtatatttgtatctttgccaaaaacacaattggccaattgctcagtgccgattgatggaaaaagatgatatccgcttagctctttcacaagagatgaaagggtggagacttcctcctgaagcccgctttgggaatcagaaccctgatgatgtcgaagttgtaattgagcgcacttag

SEQ ID NO: 112601 - DNA, 315 bp, Enterobacter aerogenes
atgaatttgaccttaaaagatgcttcttttatgaatcgttccttcgacattaagagcacctttccatctttagaacgaaaaggcatcgtttttatctcagcggaaaggacgctatcattagaaatgatccttttcaactcttcttcagatacatttatttcttttgctatcccacctaaagttctcatcgaaaatttattacttgccaacgcagatattattctgcttctcattgagttttttctagcaacaacgggggttttcttaggcttattcattaccaccaccatatgttcaaaaataatgcataaataa

SEQ ID NO: 112602 - DNA, 471 bp, Enterobacter aerogenes
atgggaacagacgccacattaaatgaatattttttcagattttacaaatcatttcttttttgcacttcaatagttaacaaaaaaacaggagaggaaatccgggctactgatacaatgtgcaacatctacatttatatgttagatcaatacctctcctataaaaagctgggaaaaaccttttacgaaaatcagttagatatttgtaaaaaactccgcaaaatggatcccaaaacttttagatccaactatgaaaaactccgcgcgcttgacctcgtgagtcacgtagaacaccaatcgtgtggcagatataaatcctacgaatacacagtaacaacaccagaagaagcggaaggctggctacagttcaaatatgcatttgataccagcaaggaacaaaaaccggaagcacctacgatacagcactctgttgtatcagatgatgatggtgatatcccatcattttcaaaataa

SEQ ID NO: 112603 - DNA, 5454 bp, Enterobacter aerogenes
atgagtaacgcgttcataaagcttccacaggataaattgaatgcggcgttggcaggggtgctatgtcctcgtatcgaagcgatcttgggtgatcgtggcccaggccattgtgtacgggtcaccgaccttgatgacgcagttatggagtcagtatgtcgggaacttaggcgaatctggcctgacggaaacatatttatactcggcagtcatgaccaagaaggcatgccattccgggtaacttccaccaaattggtggaactgcgtaatcctgacgcgaacggcgatctgcgccagcctttgctggtgttcataccgacctcgctccgtactagcgccgaggattcgtttggcgtggcgaccttcgaggaacttgccttcaccggtatctacgaggatctgatcgactcgctgcttgaccggctcccggcaacgctggctggctatgttcgcgatcttttgggtatcctcaccgaggaagaatggctgtttgccgacgatgtttcgcgcgcgcggtatctactcaccgcgctcgaaaacgggattgatggagaaactcttggggcaagtctgtatgaattggcgttgatcccggatttcaagctctttgccgacccgggcatggtcattggaaaaattcgccgtaatcttggcagcgtccgcagtttgatatcctcgcacaagtcggttcgtggtcgtattgctgatctcgggctcagcgataaggcattggagtcgcgtctatttacctactttgaaaaatacgatgtccatgagtccgaatcttggacgccccccattgcgacagacaaaagttggtggagcatttctttcgataaatggatattcaaagaagagctatcactggacaaggttcttctgacagtgttggaaactgacttgcctgtcgttgcggatgatgagacggacgatcaactcagtggcctcatcgggcaacaggttctggtaccgaacgaccgtcgtaaaatgaacgtggtgtttgaggttaatcctcatcccggtaaggtcagtgggcttgaccattttatggtgcaaatcatttcgcagaatgacggcccggtagggaaatctaaaaaggtaaaagcctggacgccgaaccgcctgcaatgtactaccagcttggctaaactcaataaaatcgaattcgaggaaggatggcatttcatccgtgtaatgccctggactgccgatggcgacccgattccgctggaagcggatttcagttccgagggcgctaagcgctcttacgagagtgagcctttctatgtcctgcccggtggcaacattgaagaagagcccccccaacgtgccattcctattgagcagagcttggagcatgcacgtttccgactgcaattgacagccttgggtgatgaacgtgatcccaatgatatcgctatcagtggtgtagcttggtccgtgggcggtcgtaccaagaagacctcccgcctggaaaccttgcacgcaaaattcggtcgtgagggggccgttcagattccgctatcacgtacgctcaaaatcatcgagcaacgcatcttagcaaagcctaaacacccgtcaggctggcgaatgcagatcaacctggataccgctgagccaccctccgaggtcggactcatgctgcctacttctgccgcgatggcatctttcctggctgcccgtgaagagttttttgcagtggtgcgcaaagacactgccgaactgagcatgcaggggctgttgttccaggactctgaaaaggaatgcctcgcgtatgctgaaagctatcttgacttggtcaggaatctcatccgccaggccgagatgacttctggtgtcgagcgccagcaacacctgcaatcgctaagaaacgtactggccgttgattcaatccatgtcatcctgaccgacttccgtggaaggcatcgcgaggctgttttggtctccccaacccatccgctccgagccttgtggctgaacagttgggtcactctgggcaaggattggatcgggaagatcaagtcaggtggtaaagaatacattcctcatgtccgttctgccctattggatggccttgtgccctcagcctatcctgttggcattcccgtagaggatggtcgtatcttcacgccggtggacaatctaaatgcgttttgggcgctatacgctccaacaaccgaggataattctcgtggcctgatggcggaggtctgttcggcacttggcttggtcgagccctctgcggcgggaactgatatttccggaaaggtcattgcggataagattgagcgctatctctcccagcatccttatgtgagagagctatcgctgaatatctttaaccccggatcaggttcgttaatagctgaggctctgatagcgcttcagcagaaacgtgagtatgccgatttgcgctatgacatacggctctttacctccgagcctgactcgccggttttgggtgaggcgcttgaatccatagttcgtcccggagcgacggtgaatgaggcttcagacgcgtttgcggcctcaactggcagtcatctgttttccaagctgaacttggccaagcacgcgctgaatgaattccatgcaaattccaaggaatttccagcgcacatcagcgttcttttggatgtgttccccgccgaggagctttccatttccgagaggccgatgggggtgactccgttgtatgggttgatacagggttttgacaccgaattcgttgacgacgattcgggtaccttctggaataagcggccgattattgggcgctccttcggtgcgaataaccacgctgcgtgtttcgatttgctgtcgtcgctgagccgtcacctctgttttgcaacctcagcggttgccacttctggtgctagtttcaaggccgtacccgttgtaacccttggcctcgatgtggcccaacgagagctgatctacgaggttcaccagatcagcgattgggtgttcactatcgaccgaaatatggggattgagtttttcgaccatggaggtcggaagaacagaccggattatctgattgactatgtgccaggagccagctcccaggcgacacataatctgataatctcctcgcgctcgaacgatgagttggaggccatgctgaagccggtgctgcttgagcacggtttgtccgccgacggcgagcagtcggttcagatactcgcgaacctgcgctcgctttctggtcagcttgccctgaaactgatttccgcacgtacgcaacaggcggaggctcttggcctggctctagcgaggctctatctcgaatatcaaggcgcgttaagcaatcagatcattgtgccattagacgcacacacggacctctaccgctcaagcggtgagtcagacgatgtcaacgatgctatcagcctacaacgtaccgacttggggttgtttgatttagatttaaacaccaggacgatcacttgtaatctggttgaggtgaagtgttattcgcaggttggtgcctttgcggctttcaaccaactgaaggaacggatctccgcccagataaatcagagtgagcgcatcctccagcgtcactttgacccggccctgaaaaaaccggatcggccggataggttgctcaagagccgggagttggctcagattcttaggttctatctggagcgctcactgcgttatgggatctttgaagagaccgccgcgcaggaagcgagaggactacttgaatccattgagcagggctactcgcttcaattcaggcggtgcgctttgattttcgactttgacaagtctggtacagaatctccggacaacgaggtaggcatcgaattccatcgcatcggaaaggatctcattcatgctttgctggagaactgccgcaagcctgtgtctgttgagagtgaggaagtactgaccgctcctactctgagcgaacagttcatttcgaacgtaccgaagctcgagactgccgctttcatcgcccctaatagggtccgctcgacatcctggacggtggacgagctctgggacgatgagctggagacaccagtcacccagccaacaccttctgtctcagaggaaactatcgcacctgttcaaaaggaagcacaggcgaaacccgtcgagcaagcacctgaacctaccaccattgtgcccaaacaagaaaaagatgacgaacaacccgccaccgttgatgtggaaccggaagaagctgttcaacccgagcttgaagtgcaggagcatctgacatccgagcctcaagccgaagtcagctacgacatcatgctgggcgttaatggtagttcaccgcagtacggattgctcggagaggtttccggacgaaaaatcgcgctggacctcaatcatacccacacgatcagtctcttcggggttcaaggcggtggaaagagctacactcttggaacagcaattgagatggcctcaatgccgattcagcacattaatgtgctgccaagcccgctcgccacagtcattttccattatagcccgacgcaggattatgcgccggagtttacctcgatgattaatgccaactcggtagaggatgagatccgtatccttcgtgagcgttacaaggccaacccggaagcattgaaggatgttttgattcttacccctgccaacaaggtagatgatcgtagggccgagtacccggatattgaggttaagccgattgctttttctgccgctgaactcaaggcagcacactggaaattcctaatgggagcgattggtagccagagcatgtatatgcgccaaatcaatctcatcatgaggggactgcgggataacctgaccttggattctctgcgagcaggcatcgataactctggtttgtccgatcatctaaaggagctggcccagacgcgcttactgtttgcaagcgaatatatcgatgataaccagcgtctccaggatctgattcgccccggccggttgattatcgtggatctgcgagatgaatacatcgagaaggacgaagctctcggtttgttcgtggtgatgctacaggttttctcagaagcaacctaccaaggaagtgccttcaataagctggtggttttcgatgaagctcacaaatatatcgaaaatgatgacttggtttctggccttgtcgaggttgtccgtgagatgcggcacaagggaacaagcattatggtcgcctctcaggaccctccatcagtcccgatctctctgatcgagttgtcttcacagatcatcatgcataaattcaactcacccgcatggttgaaacacatccagaaggcgaatgccgctcttggtgagctgacttccgacaagatgagccatcttggaaccggcgaagcctatgtatggtcgagcaaggcctcggacgactcattcagccggggcgctgtgaagatcaagtgccgtcctcgtattacccagcatggtggcagtaccaaaacggccgtgggttggtag

SEQ ID NO: 112604 - DNA, 1683 bp, Enterobacter aerogenes
atgtcaattaaaggccgtgacaaagagtttcggatcccgaaagtttcttatctcgattttaaacatattgagatggatcgcgtactcaccatgttgtttccacgattgaaatacgatggttatggtagtcgcagacctcctcgcggtggcgatctttcagttgaggagtttctagaagatttccttgaacatcccgagtggtttgctggtttcgatcaaaaccctgaaattgttcgagcctggattgaaacagatcttatggatctagtgaatagaggtaaaagcaaccaagctctagctgcaccacgtcctttgcatggcaatacctataagtttcgtaacgcgaagcatacccgagattacggcgctgcagagcaaatctactggatgcttttctatgcccgcaaaggtaagggccaaacggcgcgagatgccttgaagcgtttcttcttcccggggatcgacttggtgacggaccgctacgatcccaacgcttccgtggatgtggaaacgcaggccatcttgcgcttagaccaacaggttacgcaggatatgaaggattccaaggagcccgcacgcttccaacctctatgtatcggccaggccgatattttggctgacgatattctgcgtctactcgcctatgagccttatatcccgcgctcggtgttggttgattatctcaaaactctgatggctttccatctggcactatatcacctcaaactactgcaaatgctgcccaagctggtgaagcagcgctcaggtaacgatctctgcgccgccagggaatgcccgatcaacccgggtctcgacaatgctctggaaggttgcccctaccgcttggcgttgatagtagatatgggggacgtaaacaatcctcacatggtcgagttagctcgaaaatccactgaccggctctatcgtcagatacctgcttttgtgcaggccaattttgtcgtcaagaaactcgatgaaatggcggaatacctgagcaaaaagactggtaaattggctccccccggaggcggtgtgttcaccgttagtgatctgatatccctgctgaagcccgaacacgacaccgagcgtcaagcctacttcaaattccgcttggcgagcctaattgaagaatcggcctctaggaatgaggatttagacccagagatcagggacgtcaccgccatgggcttgggtgaattcgattccttcattgagatcctgatggcctatcgaggtaagtatcaccgccaatacatcactgagtgcttggattctcttctgctgaagaataaagaaagcgggcttctggctcaagcacggactaagggaagtccgcgtcggttcgtgttgggaagcaagctgctcgaagtgctcctccaggtagccgtactcacccaagacggcgggcgtttcgtgacccacgaggttcgcatcgaagaattgttagcatttttaaggaaccgctacggtctttacatcgaccagttaccggaaggaacccaagctaacagcagcatactggacagacgggccctgcgtcttaatctcgaagccttcaagcgccgccttcgtgaaattgggttctaccaggacttgtcggatgcttatgtaacccaaaaagtatcgccccgatatgcaattgaacgatttgatggaactgataaaaatgggagacacacatga

SEQ ID NO: 112605 - DNA, 4158 bp, Enterobacter aerogenes
atggcgaaggtcatacccatcgggcaacccgcaaacgaatctgaacgccaggccattggtttccttcgggatcatctgccagatggctggttgattttccacaacttcgagatgcgccaaggggaggaggtgttcgaaatcgacattgccatcctcgcgcctcacgcgatgtacctggtggatgtcaaaggaacgcgtggcaacatcgatgtgtatggctcaaagtggtatccagaggggaggcaaaaatttcactcccctctggcaaagctgcgcaatcacgctaaggtgatgagcaccttattggctgatagcaataaaggaataatcgagttacgtaaagtgcatgtacatgcggttgtattacttacagcagatgatgcccagttgtatgatcctactggcatcgatagcccggatgtgactgactacaagcgctgcttaaaattctttactgacaagagcaaaatcccgagccaccgtctttctgatattcgtgcttatcactcacatattgacaaagccattcaaggcagagccaaaccaaaatcagcgccccctgtgtttggaagttggcaggttatagaacagctaggtggcacagatcgttataccgagtatcgggcaaagcacaatttattgggtgcgaaggcgggtcaggttcgcctaagagtttatcgcgcagacccctatttagaggaagccgcccgcaaagacgaactgaaaaaaatcagtaatgcttttgtggctgttcagcacatgagtgctcattcgaatgtattggctgtgcgtgacctgattcaatctgacgatggtaatgaaattactttggtggccgatgatatttcaggtcaagcgctgcgtcagcatttaaaaaagcctacttttgcgctcacaacagatcaaaaataccaggtgatcaaaggtgtactttctgcattggatcacgcacatcaacatcaggtcattcatcgaaacctcacaccagatgcgattctcatcactaaagggggtatagcccgcatcaccgatttcgactttgctcgagtaggtaaaaaccgaacgatttcagaaactattgctaatcaaattaccgaagatctcgattcggcttatcgcgctcccgaattagtgatatccgagcaaaagtctgagccgaaagaggcttccattgcttctgatttattctctgcaggcttagtaatttacgagttgctaactggtgagttgccctacgaaaatattgatcaaatgatcgaagccgatggtaaattccctatcaaaccctcggagcacaaacctgatttccccaaaggcattgatgagtggttgcaaaccttttgtgagttcgatcctgaagatcgttttgccagtgctgctatagctaaaaagcaatttgaagatctgatattacccgaaggcaaaagtgaaaaaaaaccttctgcactagcttctgacattcctgatgacctaaccaacctgcctgtcgattttgtattagctgagcgtttcagtgtgcaaaggaaactcggcagcggtggctttggggtggtctataaagtttttgatgctttaggcgatgtagttcgtgttatcaaacttgtgactaaagaccgccgtagcgtttatgagcgcctgcgccgcgaatataagacactcaccagcctgcctgatcatccacatgtcgttaaggttatctgggccgatcgaatggctgatgcaaatcaaactccttatatcgtctttgagtatgtggaaggcttggacgtgtccgatctgatcgatactgaagccttggcgttggatgatgctgttcgcattgttcgcgaagcagccgagggcttagcgcatctccataaacatggtatttatcatcaggacgttaaaccctctaatttgctatggactgataaaggtgttcgtatcattgattttaatgtcgcggtatccgaaagtgacgaggttcagggaggtggtggcactcgtcgctacctgccgccggattacgattacaattccgagccggatgcttctgatcgggtagaccgcgacatctatgctttgggtatcaccttctacgagtgtctgaccagcaagtatccgttcgacgatcccacgccgccgatcaagactcaacccaaggaccccaagcagttcaaaggctgtgctgacctcagctcgtcactggtcaacattctggtgaagatgatcgcgccggagcgtaaggagcgctttacgtcagtcgatgagttcttgactgccatggctgaggtcaagcgtctgcgctcggtgctgaccaccggcgagattggagctggccccaaggtggtatccaggctgggcttcgagccgaccaagcccaatagcaacccctttgtcacccatctgctgaccctctacagccagagccaagtatccaacgcgggaacccgtggcctcgatgaagttggtaaggccacctatgtgccgacatatctggacgaaaagcttaagcccgccttgctcaaaggcgagtttaagctcgtgatcattagcggtaacgcaggtgatggcaagactgcctttattcagcaggttgagtcctttgccgagagcaagggcgcgcagatgcaacgtggcgcaaatggaactgtgttccagatcaaggggcatacctacattagtaactatgacggtagccaagatgaaggcgatgagcgaaacgatgcggtgttgcggaaattctttgctcccttcgcgggtaaggatgcctctggctggcccgagaatcaaactcgcctaatagccattaacgagggacgactagtcgattttttcctggagcatgaagaggagtacccgctgctcgctaggcagatccaacagggtttggccggggccgttccggaaggcggtatagcgatcatcaacctcaatttgcgctcggtagttgctgaacccgaagaaagtgagctttcgattttggagaggctgattgcccgcatgacgcaaaaggaatactggcaagcctgcgagaagtgtgacatcaagggcaagtgttttgcctaccataatgcccggactttccaggatccggttgccggtcccaaggtgatcgagcgtctgaagatgctctacaccattacccaccttcgcgggagattgcatatcactatgcgcgacctacggtcggcgttagcctttatgttagtgggtacccaagattgtgacggtattcaccagctttatcagaccggtggtgaagaggtccaaaaccgcattttggacggattctatttcaactcgtggcttggtggggaaaaaggctccaatgaccgacttattgctctgctgcgcgagatcgacattgctgaagtcagcaaccctgatctggaccgcgagttaggctttctccatcccagggctaaggctatgagtcgtttctcgtttgcagaacgagccggatatgacaatgaattggttgaagcgctgtttgacagtctgcctcgcgattactcatcgaaaaatcgtgcccgattgatttccagacatcggaattacatttcacatatgcgacgtcgccatttcttcgaacgaagggacatggggtggaaggagatgctgccatatgaaagcatcgatcccttcttggtctccacgcagcggacaggtacaaaaagcaacgatgaggtgaccgcaattctccgagccatcaaccgaggcgaaggtttaagcgaccctgcgaggttaggtaaccagttggcactgcgtgttcgccaagtggataaaggtaccattcgcagttaccggcttttcgacggtgactatttttcgcttcgtaccgaacaggagaccgcgtttcatcctttcctcgagtgcctgtctcaggcgttggtcctgctttatgactccggcgaaggacacaaggccagcctacgtatcaatctcgatatatatgaaatgctgatgcgccttaacgacggctaccgaccaagcgtagaagagcaagaaggctttttgttgagcttgtccgtctttaagaacttgttggcctctgtaccttacaacgaagtattgttaaccaaggctggccacaaattttacgaaatccgtcgagaacaagatggacggctagtaatggaagcatctgaaaagggggccgaatacaatgtcaattaa

SEQ ID NO: 112606 - DNA, 1398 bp, Enterobacter aerogenes
atgagtagaaagtttcaatgcagagtaatccccagtaaattgcttgaaaacaatggtcgccgtttggattgtgggccttacatgtcgggagcgatcgaagcccgacaattattggctgatctaaaaacagacaaggaagtactaagcaaacttacgaatggaatttatcacgcagggagagagggccgcacatgggtagactctcctgaatatggggtgaaattctttggcagtacagacattctttctgcggacttatcggggctgccattcttatcaaaaaagcaagttgcagctaatcctaattttaccattagaagtggatggacgctgatcactcgctctggaacaacaggtcgaatagcatactgccggccagatatggacggacttgcctgctcagagcacgtcatgcgtgttatacctgatacaaacaagataaattctggatatctcttcgcttatctagcgggccgctttggtgttcccctcatcacctccgggacatacggctcgataatccaaagcattgaacctgaacatgtagctgaaattcccgtgccaagacttggcaaagttgagaatgaggttcacgagttggtgcagctcgctgctaatctaagagcagaagcttcccaaatgattgatgatgcgactaaggcgatagttgccgagctagcgttaccggacctgtatacttctgatgtcaccaagttcggaatttcctcagtatcctccatcgatctgaggcagcggcttgatgcgccatatcactcacctgctgcgctagaagcggaagccgccgtgcgtagtggtcgacatccaagtaaacggctcaaagctgtaacgaacaggttgtttaagccgccaatttttaaaagactctgggtagaaagtgaagaatatggccgccagtttgtaagcggaaacgatgcctatttatatgaggcgaatgaaagacgttacgtaagtgtccgtaccccaaattttgatgaatttattgttaaaagaggatgggtgatctttcaagcagcagggcaaatctatgggctttttgggcggcctttatttgtatctgggtggttggaaaacctcttttgtgctgacgacctttaccgaatagtaccgaattcggaagaagacggagcatatatttacctctttttaagaacacctcatgggcaagcgctaataaagcgtcaagcctctggtaacagtatcccgcgtgtctgggatccccatatggaacaattcgaattgccttggccaactgaggatattcggcagcaattagcacgccctgttattactgcgtactctaagatcgatgaagcacttatcctgcagaaacaagctattatgctcgttgagcgcaccatcgaggagggaggctgctaa

SEQ ID NO: 112607 - DNA, 2019 bp, Enterobacter aerogenes
atgagcgaccaaggcgacataattgaagcacagcaggattccaccgaagagagcggtccggataactttttcatcgacattctgaccggcaacaaggagagggcatcggccaaaaagttgttggtgcagaaaattctgcgccaactcatagaaagctacggttttgatcgaaatgacttggaagtcgattacaatccccagattcctggccaggggcgtaagcgcatcgacatcgccgttttccgccctgatgctgagcacaccaacgactacctgcagcggataatcgtctgcaagaatcagaagaagcgcgacaagctccgttccattgccgaggccgatgccgacctgcacgagctcaaggagttgctggggctgatccccagtgctacgttgggtatgtggacaaacggtcaggaggaattcctgttccatatagagcgcacccgcttcgaggtccgcgccaagccgctgggtgtctggccggcgccaggcgaacgtaccgccgatctcgatcgtgtcggaggtgtcattcaggttagcgccgaggcggaagatctggaagatgctctgctgcgctgccgccagtatctgaaccgtaacttggggctcgatcacaaggattcctttaagcagttggcagttctgatgctggccaagatctttgatgagacccaacctaccggcgatcgcaaattctggatcaggggggacgagcctttcaccgagataggtcaacaggctattgccctgcgcatcaacgaatccattgttgccgccaaggcctggcaaccgaacttgctgactcgtggctgggatctgacgttggaacctcacgaaacagcccgcgtggtgatggagttggcccgctataacttaagcgaaacccagcctcgttaccgcaccggagcctttcgagcggtcgcccgcagtgcgatggacggccgcgagggccgctaccccacgcccctaaacgtggccgaaatggtggtggagatgctcgacccacaacccggcgagcgtgtcatggattgctccagcggaaccggcactttcctagccatggccgccgcgcatatcttcaagaagaaactggctggtctcggcaccacgcctgaagaggccaccaaggaacaaatttgccaggcgcaaaacgaaaccgccgcctgggcggccagcaatgccctgggctgcgacatcgatcccttcctggccgtcgcaagtcgcatgaacctgctgttcaccaccggtaaccctggacgcgtgttccgcatcgatgcccgcacgttcccagaaggtgatctggatggtattgaaactgcccgcccggcaatgcagctgggcagcatggatatggttctgctcaacccctggttctcaacccaagacacggtgaccgatccctctattctggagcgctatgacttgggcaacaactgggagcgtgatgaagaaggtggatttcgcaacactggcaatctgagcaccggtggagtccctcctgaggtgttgtttatcgaacgtgccttgcaatgggtgaaacccggcactggtcgtgtgggcatcctgttgcctgatggcttgttgggtaaccctggtgatgaatacgtgcgctggtggattctgcaccacagcgaggtcttggcatcggttgacctgccggtggagcctttcaaggtcacggtgaaggaatatggtttatcacccgcactaccgagtttattgatcctccgccgccgcagtcaggaggaactgatcaataccgaacaccaggaatatagggtgttcatggctgtagtggatcgagccggagttgatgcccgaggtaatctcctgttccagcgggcccccaatggtgaagagctggtttttgatgacgaagtgatcgaacgggttcgtgaaggcggcgaagtggaaatccgtagagtcacgcgtcgcaaccgccgcattcatgacgagctaccactggtggcagaaaaatacaaggaattccgtgcaaccagtgaggtgacattatga

SEQ ID NO: 112608 - DNA, 2004 bp, Enterobacter aerogenes
atgagcaaaaagaacaacacacaagccgaaaacacgataccggctgggtatacgctcgactacgtttccggcaaacagatcaaggaaacgaaaaaagagctagtacggcagcggatcgttcgcgccctaatccatgaatatggattctcgccggaagatatggagctagatttttccattggcggccgcaagaaggtggacgtagctatcttccatcatggcaaggaacacatcatcgagaatctggggcgcgctgtgctctgccgtcaggaaccgaacgtcggcaaaaatgccgtacgcatccgcgattttgagcaggcagctcaagatcttgatgaaattgaagctattatgcgtgaggttgaagccgttaagtatggtttatggactaacggcttggagttcttctttgttgaaaaagagcaaaagcgattcgaaacaaagtgcaacccaatcggcgactggcctatggcggaagagtctgttggcaccaaagaggttatctctgatgctcacacgcgcgtcgctgacaatgagatgcttaaaatcacattccgtcgttgccataacttcatccatggcaacgaaggcatgccaaaggacgccgccttctggcagttcctctatctaattttctgcaaaatgcatgacgaaaatcttcggggaatccaacgtcagtcatggaagcggcagttctgggcaggccctaaagagcagtttgaagttgagggccgaaaggccattcgtgctcgtatcgaggcgctctttaccgaggtaaaaaagcagtataagaacatcttccggggcaacgaggaaatcaccctctccaaccgggcgttagcttttattgtttctgagttagccaaatacgattttacccgcacggacgttgatgccaagggcgtggcctaccaagagttggtgggcgtcaatctgcgcggcgaccgtggtcagtatttcactccacggggcgtagtcaagctggtcgtggaaatgctcgatcccaaggaaagtgagatggtgctagaccctgcttgcgggaccggcggcttcttggtcgccactttgggacacatgctgaagaaattccgtgaggagcagaacacccagagcggaaatgaggacaccaccgagtttctgaacgtccacgagcggctgaaagaatatgctgcagccaatgtgttcggagccgactttgacccgttcctgattcgcgctgctcagatgaacatggtgctggcgggtgacggtcggggtcacatttacaacatcaactctctggagttccctctgggacatttgaccgatctgtcctccgctaaaagggagattccattggggtcagtggatatcatcgccaccaatcctccattcggctccgacatcccgatcaccgacaagcatatcctagaacaatacgagttggcgcacgtttgggagccggacggtgaaggcggctttcgcaacacaggcaatgccaagggtagcgtcgcgcccgagattctctttattgagcgatgcatcaaatggctcaagccaggcacaggtcgtatggggattgttctgcccgacggtgttctcggtaaccccgcagcagaatacatccgctggtggatcatgcgcgaaacccaagttctcgcctccgtagacttgccagtggaagctttcatcgccgaggccaacgtcaacatcctcaccagcctgctattcctgcggcgtaagagtgaagaggaaaaacgcgccgaagccttggggggtatcgatgaatatccggttttcatggccgtagccgacaaggttggctacgaccgtcgtggaaacaagctctacaagcggaccccggacggtgaagaaatcattgagcccaagcagcacactgagcgcatccgcatcggcgggcgcttcctggaacggactctgatccgcggtgaaaagatcgaggacaacgatctgccggtcattgcagagaagtaccgcgaatttctcatggagcagaacggatga

SEQ ID NO: 112609 - DNA, 207 bp, Enterobacter aerogenes
atgagcaatgaagaggttctgaaaataaaggatgtcgccgccttacttaaggtcggcgagaagacggtctattccatggcccaaaccggagaacttcctgctttcaaggtccgaggccagtggcgattttcccgaaaggatatcgacgcatggatagaacaacagaaacatacaacaaaagatttcggtgagggtaatacaaaatga

SEQ ID NO: 112610 - DNA, 369 bp, Enterobacter aerogenes
atgaaaaactttggtgaaaccatccgcgaccttcgagtcgcccaagaccttgggttgcgcgagactgcgatcaaagtaggcatttcccccgcctatctaagtcgcatcgaacgtggcaaggagcgtccgccaagaccagaagtaattaaggagctggccaaggtacttgcggccgatcctgacgtgctgttccgcttgtcttcctccacagacccggaagttgtcgactaccttcatgaccaacccgaggtcatgaatttgctccgctatgtcaaggaggcctgttttaccgaggatgagatcaagagcctcgttcaagcagccgaaagcatcaagctcacacacattagtcccaccactcccggttga

SEQ ID NO: 112611 - DNA, 633 bp, Enterobacter aerogenes
atgagtgagcagcgaacgcctccatcacgcccaccacagggaccgattggctggctgctgtcgctgaccgggcggctcatcgggctggttattggcgcgctggtgctacgggtagtgctggaactggcggggctgtatttctggtggccacatgaggggagcaggcatgtttttcaggtgatgagacaagagcgggcggaactggttattgcgttacaaccgcatcccctggggaatgaaattctggtgctgctggaaaaaggggcaaatcgcgggattatggccaacatgttcctgcagaaaccgttcaccaccctggtctatacgctggtgagttttatgcagcgcctgatatggctttccgctatgctcctcctgatttgcctgtgtgttgtaatcgggctaaccgaagggctggttcaacgggacttgaggcgctttggctccgggctggaatcggtttttctccaccgctacgtcatcaggtccggcagttccgtcgccaccacgctgtgggtggtttatctggcacagccgctgtttctgcccatgactctggttttactacctgccgcgttatggtttgggataacgatttggatggctgcagggagttttaagcggtggttataa

SEQ ID NO: 112612 - DNA, 582 bp, Enterobacter aerogenes
atgaaaaataatgatgaatatgcgtcaggaaccttcctttatagccattgcactctttcagcagtaaaatcaatatacttactattcgatttcataaagtcggatgaaggacaaaaagcttggatgtctttgattgatgcttatgattatattgatgttgcaaaaatattcttaaataaatataaaatacaaagcgaaggacttgatgcctttactcatcggatagaatctttagaaaaagttattttccctacccatcatttgtttttaagcccaggagccaaagaaactctggggaattgtaatatttgtggtagtgattactttgagtgtgagcatattgaacgggaaatatataatggtatgctttgcttgcgaattaatagaaagatattagaggccaatcatatagctttagtagaaaacccaagggataggcggtgcattattttaacgattcaaaatactgatggaactaaacttgaaatattcagccgtaaaagaatgattggtgaaaagaacgctgatgaaatgactttgaatgcaattatacataattttagacagccagtgtttaattga

SEQ ID NO: 112613 - DNA, 513 bp, Enterobacter aerogenes
atgaaacaaatgatgttaagcgcgtgttttttgctggtggcgggtaacgctttagccgctgacggaaccattcattttaccggaagcattaccgatcaaacctgtaccgtcgataccggctcacaaaatctaccggttgatttaggcaacgtcgcgcagaccgctcttaacggtgcggcagggatgaaggcggcacctacgcgtttcacgctcagcctgagtgattgccctgacaccgtaacgggggcaaatgtgaaatttgacggtacctctgatggcgtaaaccagaatctgctggcgctggatagcggcaccgggatcgctaccggcgtgggtatcgaaattgccgacagaaatggcaccgcaatcccgctgcatacggcatcgacggattacccgctggcagaaggcaccaattcgctggactttatcgctcgctatgtctctaccggcaccgcggttacaaccgggacggcgaacggtacctcgcagttcaccattaactacaaataa

SEQ ID NO: 112614 - DNA, 681 bp, Enterobacter aerogenes
atgaacaggtatgcagacgttgcgctggcgctattgctggcctcctttaccgtgcaggcgcaggccggaatagtgattggcggcacacgcgtcatttatgacggagataaaaaagagacctccgcatccattcgtaatcccgagaaatccagtgtttatctggtacaaagctgggtggacagcggtgagcaaaatgcgaaagcgccgtttatcgttaccccgccgctgtttcgtattaacccgggtgaagagaatatcctgcgcattgtgcgtaccgggggaaatctgccgcaggaccgggagtcggtcttctggctgaatgtaaaatccatccccgcgactgatgacagtaaaccccgcaccaatgtgctgcaggtggtggtgaagtcgcgcctgaagctgttctaccgtcccgccgggctggacggtcggcccgagaccgcttatcaccagctctccgtcgcccgcagcggcaaccgccttaccatcagtaaccctacctcttattacgtcacgctatttaccctgaaggtggacgggcaggagattaaagacgcggacatggtgccgccaaaaggcagtgcgagtttcacgctaccttcggcatctgtctccagcgtgagctggcaggccatcagtgattacggcggcgtcagccagactgaaagccgcaggctgtga

SEQ ID NO: 112615 - DNA, 2523 bp, Enterobacter aerogenes
atgaaaaatccaacttctcggctgatggtatttctgctggcgctgctgctggtgatggttctgctgctggggtatctccgtcacgcggaggcccgtgagatcttcaaccctcatgcattggagattgacaatcccggccagccggtggcggatttatccacctttgctgaagccgacggccagctacctggcacttaccgggtcacggtttatgtgaatggtgaacggcagggacaggcgcaggatattgcgtttatctccgggccggacaaaaagctcagcgcgcaggtcacgcccgcgatgctgaaagcctggggcgtcaaaacggacgtctttcccgcactggcggtgctgccccctgagaagccgctggaaaatattggccactacatcccgatggccaccaccgatctgcgtttcagccagctgcagctgaatgtgagtatcccgcaggcggcaatggatgccagcgccagaggcgcggtggatccgtccgaatgggacgaaggggtgcctgccgcgctgctgaactataacctcagcggcagcaatacctggcgcaacggggaaaacggttctgatgacaactactacgctaacctgcaaggcggcctgaacctcggcgcgtggcggctgcgcaactattctacctggaattacgatgaagaaaacggtagccactgggattcggtgaacacctatctccaacgggatatccagcgcctgaaagggcagctcacgctcggcgacagctacaccccgtcggacatctttgacagcgtgcagtttcgcggcgcgcagcttgcctctgacgacaacatgctgccggacagcctgcgcgggttcgccccggtgatccgcggtattgcgcagtcgaacgcccaggtgaccattaagcaaaacggctacatcatctaccagagctatgttgcgccgggggcgtttaccatcaccgacctgtacccgacctcgggcagcggtgacctggaagtgaccatcaaagaagccgatggcagcgaacgtaccttcattcagcctttttctgcggtaccgattatgcagcgcgaagggcatctgaaatatgccctcaccgccgggaagtaccggagtggaaatgaggacagcgacgaaccgcagttcggccaggtgaccgcgatttacggcctgccgcatgccatcaccgtttatggcggtacgctgtattcggaggattaccagtccggagcggcggggctgggttttggtcttggcgaactgggttcgctttcggccgatattaccgccgcgcataccaccctcaacaacgacgagacccatgatggtcagtcgtaccgggtgcagtactcgaaggattttcagaccactgataccagcttcacgctcgcggcttaccgctattccacggagggtttctacacctttcaggaggcgaacgatctgcgctcggacagcgatgatggctggcggatgacatacaacaaacgccagcggcttcagctggatctcagccagagcgtaggcagctacggatcgatttttgtctccggctaccagcaggattactggaaagaggacggttatgaacgcacgctgagcaccggctggaacgggaatattaacgggatcagctacagcatcacctacagctacagcgattacccggaaagcacccagcctgccgatcagcaactggcttttaacatccaggtgccgctcagcaaattcctctccggcgaggcggcaaacaacgcctgggccagctacagcgtcaacaccgctaaacatggcgatactcgccagcaggccgggctcaacggcactctgcttgctgacaacaacttaagctacagcctccagcagagctacaccaaccatggcgtcggtggttccggcaacatcaatgccgattacaagggcgggcagggggaaatcaccggcggctacaactatgacgacgatacgcagcaggtcaactatggcctgaagggcggcgtggtggtgcatccgcacgggctcacgctttcccagccacttggcgagtcgctggcggtggtcagcgcccctggcgcggatgaagcgaaggtgcagaacaacaccggcgtttacaccgacgggcgtggctatgcggtggtgccgtacgtcaacccgtacaagaaaaaccgtattgcgctggataccagcacgctgggcgatgaggtggatatcgacaccgccgtgcagaccgtgacgccaacgcagggggcggtggtgatggcggagttcaacacgcgcgtcgggcgacgggtgctgatgacgctgctgtatcgcggactgccggtaccgttcggcgcgcaggcgaagctgaaagaggggggcagcggcattgtcggcgacgacggccaggtatatctcactggcgtgccggaagcgggcgagatcgcggtgagctggaacggggcgcagcagtgcgtggtgcattaccagctgccggagagtgccggaaacgttccggtcgtggaaatagcgcaggagtgccgggaatga

SEQ ID NO: 112616 - DNA, 957 bp, Enterobacter aerogenes
atgagtcgcttagctaaatcgggttgtgcgtttctgatcctgtggctgatgagctttggtgcccaggcggcctgcggattttcatccggcctgacttctgaagtcacgggctatctcagcttcggcaatgtggtagttcagcgggatgcaccggtgggcagtgtcctctccacggtcacaacgggggcctataacggcagtcaaacgattgccggttgctcagagccctggacctaccgctgggaactgagtaaatggggaacactgagtactcttggcagcaatatctataacactaatatttccggagtgggtatccgattaactaacaccactaccaataaagtgattccttacgaccagagcgtaggcgcgaatacttatatttacatcgggaataatggcattaaagctgagcttatcaaaacgggtgatattacaggcgggacgctgaatagcggtatgcttgcgcgagcttccgtggtgaatcagttctattttgctaatgccaccctgaatggtacgaacaccattacgtcagtagcctgtagcgtcacgacgccggatgttaacgtgaagctggaccagcataaaaaatctgaattcacgggacctggctctgccacggcgtggcaggcattcaacattgcgctggattgtaataagaattcccgcattaacgtccgaatcgatgctactcaggatccgtcaaatgttgccggtgtgataaagctggacaacgcagtaggcgatctggcggcgacggggatcggcgtccagttgtactttgtgccggataacagcgcggtgcagttcgggcaaacgaaattctattacacctcgccgaatggcggttctgaaacggtacagcttaaggcgcgttattaccagacaacgtctgcgattactgctggtgaggctaacgccacggcaaccttcacgctgacttaccagtaa

SEQ ID NO: 112617 - DNA, 990 bp, Enterobacter aerogenes
atgttatcagaagaagaaaaagaggctttgagaaatgaggacttatatgattttgaatgtatcttttatgaggaactagaatcttggttctcgcaagatattgcatgttgtgataattgtcatgatgattttattaagcattggccttatgcatatttctcagaagactgtaagttccaaacaaataacatgcccttagaatgtttttattctggtacctatttaagcgagttttattctgagtctgatttctcaaaatatattcagttaattgaatgccctcggtgtgggaattctctaactcataatctgtgggcatatgaactaccatttgatgtggtgcatgggtttgaatcaaaagtaaaggaacttagcgagctaataacagtcacgccattccttgttttaagccatccatttgctcaggaagtgtattcagctatccgttcgctatcgaataaaattggtaaagttaaaatagattctaatctatttagagcaagaacaaatcttaatgataatgaggtaagagattcttccttcgactttgctcccaaagacgtagttaaagacggacgttataatcatgctggttattcagttctatattgtagttttgatgccggtacgtgtattgaagaaatgagaaatgaatcttgtcatgttgctacaattaattgcagtgaagaaatgaaaataatggatcttacagatccatacgaagctaatcacgaattcagtgaccttttaaactcgctagtttattcttcattattaagtgctaaatgtgaagggcaggggtattataaaccagagtatctattttcaagatttttaagcgattgtgcacgccaagttgggtttgatgccatacaattcccatccacgcgtatgcacaaagacagttggaacttggtcatactaaatagagaaatatctattgggaacggtttagatgttatcgatataaagtttcatccaaagaaataa

SEQ ID NO: 112618 - DNA, 309 bp, Enterobacter aerogenes
atgcgacatagtccattatttctgttactgacttttcccatatggtctctggcctatgcctccccggaatccacccaactcgccctcgcgctgaaacaactcgacggcgtgaaaacctcgctggagcgtgcccaaaccagctccagcaccgatccacaatcgcgctatttcgtcgactacttacaggcgcagcaggacatctccgccgttgaacagggcatccgccgctaccttagcccggcgagagcgcagccgcgcgccgtccagtccctgagcgctagctaccagcgggagaactccgatgactga

SEQ ID NO: 112619 - DNA, 1119 bp, Enterobacter aerogenes
atgattaaattttctaaagagcagatttttaataatgattttattgtttcacatcaacgaaaggttaaatcattcgtcctgaacaaaaaattaggaattgatttctttaatcattcactttcatttaatgaggtgtgctcggatgaacttttaaactccatttcttttgatccatttgttcaaaaaggcttaattaagaaaaatgaggaatttctaaaagactactacgagatctcaagatttttattacatggtaatgattatctaaaaataataaaaattcaacataatgttcgaagtggctctcagtataaaaaagcattagctgatgaacggatttatattatagataaattcagacataataatatcctaaaaaaacttggcattaataatccagatattgtaaaaaacgaaaagaactatttgaactttcataaagaaataattaccgcatttaaaaaaaacaacaaaagcattgctgctatttttaactacaatgagtttttgatgtcagtaaaaaacataagaaacgatatacttaataatattagaataactatttgcccttactgtaatagacaatacattgatacatactcctataatggtgaggtaaaatctttagctcaaattgatcatcaacttccaaaatcaatctttcctttatattcactgaccttgttaaactttataccatcttgttcatattgcaattgcataataaaaaaagacaaactgttcccttgggcaaacatatactctaataaattaatagatgagaaatatttccatgtaacttattataacgtaaaaggactatatggagacatggatggatttgacttgaaagtaattcccaaggataaagatgatattaatagctcatatttctttagacatcgggagatatatgagaatcataaatcagacgtagctaaccttctcaaaaaacgtttaatcttcacagatggatatagaaaatccatagaaaaaatcctatcgacaaaaatgacagaagacgaatttaggcatgtcatatttggggttacgggaaacgaacaagattattctacgatacctttatcgaaattaaagaatgatattcttaaaagttga

SEQ ID NO: 112620 - DNA, 1056 bp, Enterobacter aerogenes
  misc_feature (731)..(740): n is a, c, g, or t
atggaagaatacatcttacacataatccataattcttttgatgaaaaaaacagaataatctgtcaagagttaattaactctaacagatataatagcgacatactagattatgataaaataaaagcattcttgttaaaaacaataaaaaatactattgaactattaacagaaaatgatgacgaaatagtttcatatttagatgatatagaatggaccgtagttataaattttttagaaaacaatgacaaattattttttattaaagaaggaaacgggctaaaggaaaatgtaacatgttccataaacctgaataattatgatgacaaggtacactcttttatttctaaagttggcgctggaaataatccaattattctcaaaatgcctaaaatgagcaccggggagtttgacataaatagcaaaatcgctggtattaataaagcgattaaactaaccttagagaacaacccagagattcatggttttattattatattagatgagtatgatgaacaccttcatccagagtggtcaagattatttttagattacctactacaatacttgagtagaggttacaataattatttcttccagatacttttatcaacacattcaccatatgtcatcagcgatctgttaaaagaaaatgttataaaaatagaatacatcccttctgaaggtaagtattatagcagtaaagcaaaccgtagttttgcaagtaatatatnnnnnnnnnntatatatgatataataaatgattcattctttttatcgcaaccaattggcgagtttgctgtacggaaattaaatgagttattaactcaaatagataatttaaacatgaataccacttcaaaaaattatactaatctgcgtaatataatacattccattgatgatgaatatattagacaaacattgattaatcaacttaacgccaattataatcatgataaaaaaatacaattagataaattagatgatgaaataaacactttaatcaaaaagaaagaaaaaatccttagcaaaatggatgaaaagaaacatgattaa

SEQ ID NO: 112621 - DNA, 801 bp, Enterobacter aerogenes
atggaattatcttcaggacatactatttttgaccgttgctatttcgcaccgaatttcaatgaatcagatgcgaaatatggaaagtatgattttatagctgatggatttgagtcaatcatagaccgccttagtccttccgttttacctgttgttgttgaaaaaagtgatggttcacatgatcttggtactagttttattgttgggaataaccacacgatatttacagccagacatgttattgaagacatgaagagtatcaggatacttagagctggtggtgaggctttaccaatacataaaatctttgtatctaacgatgaacgtattgatatcgctttagttttcacaaccattccgaataaagataatattcaaccacttaaggtctcaagcaaagcctcggtactggatgaaattttatcaataggatttccacccattccaggatttgatgctttaaagttatatgacgtttcgcatataaattcgtttgtccgactgtcaaaggggcgaattgttggttctggtcactcttacttagattcacaagactttttattattcaatgctagggttaagggggggaatagcggtggccctataattaacaaatacggctttgttactggtatgcttgtacaaataccaatatcatctgaggacagttcaaagattgataaccttggatatggtatagctgtaacaggaaaaagcctgctggatgctactacatttacagaaaatggccgcgaattaacactcatcgaccgaggaaatggagaatattcaactctagcataa

SEQ ID NO: 112622 - DNA, 390 bp, Enterobacter aerogenes
atgtttaccgttaagcagattatcaacaacgccacctcgctatatgaggtgaaagaaatcacagttgctcgccccggctcagagcagtggcgtcaggcattcgccatggctgataatctggaggttcagacccctgacatcattgagcacatcccgatgtcatacgaagacccagaaatgacaaagccaatcggtgatgagcatcaactgtcggtggaccgctacggcgtaaaccgcgctgattgcattggcatcatctgttccggcctgccttccgcatctctcccggatatcccagaggctggcggagttggttatcagttcctctacaagggggatcagatttacatcaccaacagccatggcgccaccatcgaaacggttaagtag

SEQ ID NO: 112623 - DNA, 261 bp, Enterobacter aerogenes
atgtccgttgataatcagaaagtttttcagaaaattgtcgaggagctggagtcactcaaaggtgagaccgagatcttatctatcgctataacctgcctcttcagcgagatgcaaacagatagcgccagtaatgtgagggcgaaattcacaaaagccgtgaatgaactaaacacccttaaaccagcagccgcagctagtcggaggaagtcgcgtcacgacgtatattcaaaagctctgtcaatgatgagtaagcctgaataa

SEQ ID NO: 112624 - DNA, 273 bp, Enterobacter aerogenes
atgaaagaaagaaaactcgtaattgaaattgatgacagcgccattgatttagtaatcgaaaaggtgcgtctgcttaaagatgaactgagaagcctctgcctgccaatcaacatctctggcgcagtgacggcagcatttaagccggaagaggaaaggaacacgcaggatgcccgaagcgtattccttagcaaccttgatgccgaaattattcaggcttactcatcattgacagagcttttgaatatacgtcgtgacgcgacttcctccgactag

SEQ ID NO: 112625 - DNA, 276 bp, Enterobacter aerogenes
atgggattagaagctatcgccgggctggtggttgttatcctgggtgttatttccgctgcattcgggttaggccacgcgcgcggcaccaataaagcggaggcgaaagccgagcagcaacgcattgaagataatgccgccggcagtatcgccgcggctgaacggaaagcggaagttacccaagaggccagcgatgtacagcagactgttagccatatgcctgatgacgatgttgatcgcgagctgcgcgaaaagtttacccgccccggtagtcgttga

SEQ ID NO: 112626 - DNA, 246 bp, Enterobacter aerogenes
atggaaaataaaccatcagatccgaatcaaactgaaaagatagtagcagaagcaatggctaaacatatggctccggtgtttcccccaattgcccaggtaaaggagattattgccagggttcgacgaggcggtgaagaaagcatgctggaattggatgtaaccaaaatgctgacatcatatttattggaagcgacgaaacttcgggattccatgccagaagtggttaaaaaaacacttggtaagtaa

SEQ ID NO: 112627 - DNA, 816 bp, Enterobacter aerogenes
atgaaacttgaatcctccctcaagcacttcagccctcagggcatgaacatcagcgacgacgtgaaaggaacctctcctgaccgcctgacaggaacagacgtaatggcggcgattggcaccactagcagccgtgcgcggtttggtctggctgcatttttcggcaaagcgggcatcagcaagacagatgagcaactggcggtgcaggcgctggcccgacacgcgatggagaccgcacctaagaacgtgcgtaaagctgcgggtaaggagttggggaattgctgcctgattctggcgcagtttgcctttgcagagtattcccgttctgcagcaacgacaggtaaatgccgggtctgtaacggcaccgggaaaacacagaccgcgacaaccgagcggaaagtttcttacccgtggggtaaggccccgtactggtcgaagatgtcccgtgcagtgcgtccgtctgactgggagaagtggagcgaagtaacagccatcgtcaatgggaagtgtgaaacctgcgacggcaaaggaaagactaacgcgcgctgccgctgcggcggttctggtgaggtgctggaccggaaggcgacgaaagagcagggggcgccagtttacaaggcgtgcgagcgttgttcggggaatggattctcaacggtgccatcaaccgccgcatacaaagcgattctgaccctcattcctgatctgcacgtcagaacatggacccgtaactggaagcccttctgcgatgcgctggtggacatctgccggcagggggaagagcaggccgacaaagagtttcagcgagccacggcatattaa

SEQ ID NO: 112628 - DNA, 195 bp, Enterobacter aerogenes
atgaccaataaattacctccacgcctgactgaaaaggagatggcaaaactggctgtaaaaacggttcaggaattcgttaatgcgtgtcactgcaagagtgaagacgatattttgttggctctgagattttggctgaacgtcggtattgatgctggagaattagtaaaacacggtacaaaggtggtgttgcaatga

SEQ ID NO: 112629 - DNA, 477 bp, Enterobacter aerogenes
atgaccaggcatgacattatctttgatataaattattcccattacatggaaaggatgttctgcacaataaccagcaggattgacaaattaatatcagtgatattgatgatgcttggttgtgccgtttttgcacccttcagcggtaacttcatttttggcgccttcattgccgcgctttcagcaattcaattcatctatcagttcggtaagcaatccggtttagcgcaggaacagtcaaaaaaatatcttgaactcatgacagaagctgcaagatacgatgacaacgaactgcttaaccgcctaaatgaccttcaaaaaaacgactgccctgtgtggagtgtttttgagtcggctgctcataaaaaggcaactatcaagcttggtcttgacgactcaacttccccactgagttttacagaaaagttgtttgctttatttgctggtggcttgccaaaggaacaaaaggtaactcagtga

SEQ ID NO: 112630 - DNA, 342 bp, Enterobacter aerogenes
atggatttaaaaggggttactaaagcggatctagcccgagtggctggagttagtccccagtctgttaacaattggttcgcccgaggcactctgggcaagaattcagctttaaaaattgctgatgcctacggcctttccgttgcttgggtgttaggtgaagaagtagctgaagactctggcctcaagccaaatgaaagtaagatgcttaatctatttcggcagttaccagagtctgagcaagaacgaatgatcgatactttcgagcttcgtttgaaggagattgacgattacgttgaaaaatacttgcgtagtcgcttcaaatctcatgatgagccgaattaa

SEQ ID NO: 112631 - DNA, 288 bp, Enterobacter aerogenes
atgactgatatcacccgacttttagtcagtctcaagcgccgatcagcccatgcacaagacttcggtcacgatgttctgtttgtaaagcttgaggacctcgacgcgctggtggtagcgctggatgaagcacggacgcaatcaatctctgaacttattgatgcgttcagcaagaccgttgcgcttgctggtctggacgacagcagcacggtaacaatttttgaatgcaaagacgcgctaaaacatgttgccgagcagctgcgcgagcgggccgacaaaaaagcaagctaa

SEQ ID NO: 112632 - DNA, 1149 bp, Enterobacter aerogenes
atggttgacctaaaaagcaacgcacaagttttaaacggtgttaacgacgatatttcagaaatgaaatcactgaccacgttgcgtaagcgtgtggttaccgacggtgaggtggtttctaaatcacagaacgctttccgtctggcggggggtaaaacgggagttatcctgcgcaatgacggtaatgaattttatgccctggtaactccagaaggtcaggcgcaagaaggacaatggaacactcttcgcccattatcctttaacctcaaaactggtcgtgtttctctccgtaatggcgtggacatttctggcggtgctgttgtttcaaatgacgctggtatttcggcacgtacaaccggtccagcaccactcattgatggacagatttatacagctccagcggtgcagagcgattttaccagcggcaatatcaccacccacatgatgatgggctcaagggtggttgcaggtaaggaagattacggtctgatctcgtaccgtgactggcagggtaactggaacgaactgcgtgttcgatcaaacgccgaactcgaggctgggcagtttaccaaacgcaatccggggggttggttcactgctaagggcgttgtcagtttaaacaataacgccgaccatagtacttatgggatgcatattcagggcgctggtgacctgtttgctgacatttatcactacgaacgcattaataagcatcatttcctcggaatgcatgttggaaatggtggctcgcatggctggtatgaattccgtcatgacggcagtgctttctcaaatggtgcgtggctcaccagctctgattcccgcatgaaatcagacattactcctatttccggtgcgttggataagctttcaaccctgggcggttatacctatctcaaacagggggctccggaagctggagtcatagcacaggaagttgaggcagtgttgccgcaggccgttactcagacagaattgcggatgaatgatggttctctgctggaagatgcgcgaagcgtcaatatcaatggagttgtggcacttttaattgaagcattgaaagaagagcaaatgctgagaattcgattagaggaaaaagtgacttatttggaaaaactaatctcgggaactgcggaattaaccgggagttaa

SEQ ID NO: 112633 - DNA, 2091 bp, Enterobacter aerogenes
atgtcaactgaactcaaagggcctggagaaattgcgggtgaaaatttggggggatcaaatgcaaacctgaatgagcgacctgcaaatgaacgacctgataattctactcctggaggcggttctaacggtactggtggtaatgacagtagcggttcatctgatggttatacagcagcccgccgtcagattgatgcagttgtaaacgacccagcagtaaagagtaaattatcggcgataattaaaggtgccaaagcaatcaatcccaatgctcacctttctattacagagttaaccgagacgggtactttaaaactcggcatcaccgatatttcggcagatcaggcctgggatcttggactgggtaatattattaccgtgcatgctaatgatgggtttatgtataccggtggaagtcttgaaaccggacatgtactgggtaagacccctcccgggattggcggaaccggtggcagtaacgatagtggaactatcgcagcgcagaacaaagtttcgccagatatatatctttcagtactgcaagggacaattccaaatggattttggctcagcagcgataaagtaatgacccgggtacgagttgcttacatcataaatggtgggggtaagggggacgatcgtactggttatcgcgacaaggacgtggaagttccttcacttaccgatgcctggaataccagcaagaagattaaggcggatatagaggaggccgcacgccaggctgaagcagccaagaaagccgaagaggcaaggaaggctgaggaagcgcgtaaagctgaagaggcaagaaaagcggaggaagcacgtaaagcggaagaagcgcgcaaggcgctttatgctaaggcgggaattttacccactcctgtctatactgccgaaaaagctgctgcagggagtgctgcactggcgaaggtaggaacaatggcgcttggtcgagctccaggtaccttacagcttacaacgttggctgaaggtgtgatgactgtagctagtgaaatggcaggctggatggccggcgccttgtggcggggggctgtacacttatccaatattgctctcgccagcccgtatggggctgtaattggtgcacttgctgtcggattcaccccgctgcctgctggcactggcagtggccgtgttcctggcagggatattggtatgctggcagtgcaggcccgattgatggcggctggtaaggttagtattgagccagggatgaccagtgttaacttaccagtacgtagctttattacgactgacgatgatggccgtcagtccgtacacatggttaaaactggtgttggcggcgtgtctgcagctgttccggtacttaatgctgttcgggatgaagcaactggccttgaccgtattacggttccggcagtggcaggcgctccatctcgtaccatcctgattaacccagttccaagtgggccatcagtaccagccagtaccggtaatacggggccagtaccaaagactcctgtacatacgggtacaaatatccgacaagcagatagcatcgtaacaacgacctatccagctgcggaggagctggcgatacaggactttatctactggcaaccggatgcgttattcacaggcgttgaaccgatttatgttatgctggcaggtccatatggcgatactaatgcaaaaggtaaatatagtgggcgagagtttaacaccgagaaagctggtgggcctgttaaaaacttagactggtctggggccgtgattgatagtattgggttagataaagtaaaaatacatacagctcgctttggtgtaagtccagcaaatgctgtcatgattgaacgtttggaaaaaatcatcaagggagaaataaaaccaacggatactgacaagcgattttatacccatgaactcagggaacttgagcgttatcgtaatcttggtataaaagatggtgaagttcctaagaactctgcggaagtatggaataacactcatacggcaacacttgaagattataaaattaatgaaagaactcaaccattgtatacgccagaagcaaaagaagcgtctcgcaaagcagaggaaggtaaatga

SEQ ID NO: 112634 - DNA, 258 bp, Enterobacter aerogenes
ttgagcaataaggatattactgattttaccgaagctgaattccttgagtttgtagaaaaaatatgccgggctgaaggtgcaacggaagaggaagatgacaaattagttgacgagttcgagcggttgactgagcacccagatggctctgacttaatttactatcctcgcgatgatcgtgaagatagtccggaaggtatcgtgaaggaagtaaaagaatggcgtgcaaaaaatggcaagccaggctttaaggaaagttaa

SEQ ID NO: 112635 - DNA, 180 bp, Enterobacter aerogenes
atgttcaaaaaactcttgcaaaaaaaatctactcaagtatccgaagagatgcgcgatgagttgaattctttttttgaagaaattgatgcaaaacaaaaggaagttgctgataaaaaagcaaaaataagagaggaccatgaacgtggggcacgaatcacaaaacacagattctctgtatga

SEQ ID NO: 112636 - DNA, 831 bp, Enterobacter aerogenes
atgaacgtggggcacgaatcacaaaacacagattctctgtatgattttttgtacgttgactctgatagagctagcaatttaataacacaactttatgcaccgggtgtgatgacatcaattaaaaggatttccactgaaggtgaaaaatcacttaaggggggcggctttgatgtaaaagtagccaagggtaacgtgtctgttgaagatgcaatcactcatactcaagagaaactatttgatgcatcttgggcacttccgattaatttgttagataaactatccgagttagatctaatcaatattggaattgataggcaaaaacttggaaagattgttctaataagaggaaaaattagtttttttgatatttcttttttctctaaatctatgccatttattagtcgtgttttaacagcatcttcccaacctcagaaaaaaaagattaaccccgaaaatttagaaatttccgaaggattgacctttgggatgatgaaagatctattggatattataccgaatacactccaggttgattttattgataaccaagggaataacatttggatgactatagatcgtgaaaatttcacgatcaatccagatgatatggcattaaagtatggggggggaattcccggcgaatggtttgttcttggcttagtcgatgctctgcccaattatatgtataatgatgatggtgatcttgaacttccattgaatcctatcaaggatggcctcaaagagatgctttcaggtattcaagaaatggcggggcgttctagttctgcatacggaatgactcccatcattttattccggaagatcgtctaa

SEQ ID NO: 112637 - DNA, 297 bp, Enterobacter aerogenes
atgacgtggctgctgctgaattttccatggctgttgcttcaccttaatgcactggcctgcatcatgatttcgttccgcctgatgtttttccgtaaacgcagtatgcggcgccgccgggtaatggagtttctggcctatgggctgattctggctcctgcatacatggcttttcgcatctggcacggcgattatgtgcaggtcgattacggtgaaatcctcattaatgttgttgtctgcgtcactgtctggcgtgctggcggcaatatcgctcgcattacaggagagagcacaacgtga

SEQ ID NO: 112638 - DNA, 630 bp, Enterobacter aerogenes
gtgaaccaaacacaatttcaaaaggcggcaggtatcagcgccgggctggcttcgcgctggtttccgcagattgacaaagtgatggaggaatacggcattatcgctccgcttgaccaggcaatgtttatcgcacagatgggacatgagtccacgggctttacccggctggtggaaaacctgaattacgcggctgaaaacttagtgcccacattcggcaggcaccgcatcactcctcagcaggccgctgctcttggcagaacggcaacacaaccggccaaccagaaagcgatcgccaatcttgtctacgggcgtgagtggggcaaagagaaactcgggaatcaggtcccaggtgacggctggaaatatcgtggccgtgggctgaagcaaatcaccggcttgagtaactatcgcgcctgcggccgggcgctcaagctggatctggtgacacagcctgagttgttggaaatcgatgaaaacgccgctcgttcagctgcgtggttctacgtttcccgaggttgtcttctgcattccggtgatgttgaacgcgtgacgctgcttattaacggcggtagtaacggcctggataaacgccgcgctctgtttaacctggcaaaatcggtgctggtctga

SEQ ID NO: 112639 - DNA, 279 bp, Enterobacter aerogenes
atgagcatcatcaaaatgattttaggcggtattgctgcactagtggccgttgcgctcagcggttttgttgttggcaatattcgcggaagcggaaaggcagaggaaaaagccaggcagcagcgcaccgaagagaatgcagcggcgaccgttgccgcggcggaacgaaaagcggaagtcacgaaagaggccagcaatgtacagcagagtgttaaccatatgtctggcgacgatgttgatcgcgagctgcgtgacacgtggaagcgtcccggtggtggttga

SEQ ID NO: 112640 - DNA, 189 bp, Enterobacter aerogenes
atgttgatcgcgagctgcgtgacacgtggaagcgtcccggtggtggttgataccgcctgtgactgggtaaacccaatctacctgaccgatcacgatattgacgttatggacaagcagaccaagcgcgacatcctggcgcataacaaagcgtggcaggtgaactgccagccaaccaaagacaggaaatga

SEQ ID NO: 112641 - DNA, 540 bp, Enterobacter aerogenes
atggacattaggaataaaattgacaccattctgctttgtgacattgccaaacatctcgggattgaaactgaaattgatactgaactcgtaaaatatgcaattacctcaggtaactcatggatccttgatgctaagtactcaatctttaacgcagaagaagcttgtaaacaggatcgtgagctcgttgtgaatatcttgaatatgtatcgcggtttatctgctgcaatccggaaattacctgaagatactcaacagagtctcaccgagcaatttgaattaaggatgattgacaacaacattcaaatccctgggttcgatggtaataatgaggcgcagtacttctcaatcgtagaagcattccttaaatttgatcggtacattgagcagaaagagcccatcgaaaacacacacaacgaaacaattgaagactactcaaaaatgctagcggtgtataacaaactcgatgctccgaatcgattgttcaaactcaatgcagaagaaatatcctcagttttaagacttgcacctcatggtatttaa

SEQ ID NO: 112642 - DNA, 273 bp, Enterobacter aerogenes
atgcggtcaccggcagcgcatgttgtccagccagttggtcaatttagtgtcggaaataaaccagtattaagaaacatggtatctttttatcgccaatttctccagttagccatctgctggcgttctgccatcggcgggcgcgagtggcggggatcagagcggaaggagctgattgtagcgggcaatataatcttttggcgtgatctccagttctccgccgtcgcgatggatggcgacgaaagtacgcagtaccagcccgcttttacgttctga

SEQ ID NO: 112643 - DNA, 891 bp, Enterobacter aerogenes
gtggggcaggataatgcgctgagcgccatcgcccagagactgcgggccgccaaaaccgggctcgcgtctgaacacggcccgcagggcgtatttctgctggtggggccgagcggcaccggcaaaacggaaaccgcgctggcgctggctgatgagcttttcggcggtgagaaatcgcttattaccatcaatctttccgagtaccaggaaccgcacaccgtttctcagttgaagggctcccctccgggatatgtcggttacgggcagggcggtattctcaccgaggcggtacgtaagcggccgtacagcgtggtgctgcttgatgaagtcgaaaaagcccaccgagatgtgatgaatctattctatcaggtgtttgaccgcggctttatgcgcgacggcgaaggccgggaaatcgactttcgcaatacggtgatcctgatgacttcaaacctcggtagcgatctgctaatgcaaatgctggaggaggcgccgcaagcgacggggcccgaattgcatgagctgttgcgacccgtgttgcgcgatcattttcagcccgccttactcgctcgttttcagacggtgatatatcagccgctcagccagccagcaatgcgcaggattgtcggcatgaagctcgagcaggtctgtcagcgtttgcatcgtcattacggtatgacaactgaggtagctgaaggcctctatgacgcattgacggatgcctgcctgctgcctgataccggcgcacggaacgtagatagtctgcttaatcagcaaatccttccggtcctgagtcagcaactgttaagccatatagcggcaggtcaaaaacctcagcatctgttcctgggggtcgatgaagacggcggagtggttatagagttccgcgaggcctga

SEQ ID NO: 112644 - DNA, 321 bp, Enterobacter aerogenes
atggaaaagaaacctaattggctagtcagacatataaagaaaataactttcacagtatcaatttacccgtgggttattattattgcattaattttggattgctatcagcatcccataagcggttatgcggcgataggtgaagttatggccatattctttttaagcataattttatctattcttaatttaattatatcatcaatcattatcatctctgccaagaaatcaaaacatccgctcgccaaaggctcgcctgcttattttctcgccatgaattcgatttcagtatcatggataattcttatgcttttatggcaataa

SEQ ID NO: 112645 - DNA, 1725 bp, Enterobacter aerogenes
atgactacccgtatagaaaaattaaaagcatgtaactccaaaccagatttcgcacgacttttaggaattgacccggtttttatgacccgtgtcatatatatacgaaatactgacaatctatattcacagttcgctattaaaaaaaagaatggttctgatagagtcatatcagccccagactctgagctcaaagaaatacaaagcaagctttccgatttactacaagactgtttaaataacctccgagaaaatttaaaagaaaataatcatttctctcatggctttgaacgcaaccgcagcattattacaaatgcagaaaagcataagtcaaagaagtgggttcttaatatagatctttgtaatttctttgatgaatttaattttggaagggttaggggttactttctaaaaaacaataatttttctctcaacacagagctttccacattaatcgccaaaatcgcatgtcatcaggataagttaccacaaggtagcccctgctcccccgtaataacaaacataatcctagtttctttagacaggcggctaagtaatttatgtaatagcgttggctgtacatatacacgatatgctgatgatataacaatctcaactaataaaaaagagtttcctaaggggattataaaaggccaagatgagaaatccatcaccttaaataacaaattccttaaggaaataacatcttcaggcttcaaaatcaatcataacaaattaaggcttctcgacaaaaaaagccgccaagaggttacagggttaactgttaatcggtttgtaaatgtagataggaaatatgcaaaaacagttcgtgcaatggcacatagtctatttaaaaaaggggagtacacattaatagataaaaaaacacgcaaagaaagatttggcactatcaatgagttaggtggcatgctgagcttcattgattttgtagataaatacaacaacagattaccgcacgcgatcaaatcctcacataacaagcgtgaaagattatattctgattttctttattattctgctttttgggcaaatacaaagccaacaatcttgactgaggggaaaactgacattacgtacttgagggtagctttggatgcgttgtcagaaaaccatcccaatctaattgggaataaaaaaatgggcaataaaacagtacgagattataggattaaattcttcaaaaacacatccaaaacaaaatatcttttaaacttagacggaggagctccacatctcaaagacttcattattggctttaaaaaaaagacagatgcgtttaaagtaatcgccaatcaaaagcctgtgattgttattttagacaatgattcaggcagcgctggtgctaatggaatcttccaaactttaattggaaaatctttccctaacattactcttacaagagatgaactaagaaatcagaagtggacgtgggttacaaaaaacttatatataattttcacccctcttaatggtttaaaagatagttctatggaagaccttttccacagttcagtattacaaacaacgcttggtggtaaagtatttaaccgaactaatgccaaatgcaaagaaaatgaatacggcaaagaattttttgctacaggtgttgtgttaaaaaaacgtaaaacaatcgacttttcaaattttaattgcatttttgattcggtttcagaaataattgaacataataattctaggggggaatag

SEQ ID NO: 112646 - DNA, 180 bp, Enterobacter aerogenes
atgagtgagcaaataatgaccgtcaaggatgtcgcgtcgtacctcaagctcaacgagcgaactgtttaccgtatggcaatgtcagtgaaaatacctgccttcaaagttggcacatcctggcgtttcaagcgtgaagacatcgaaaagtggatagaagaacaaaagaatgacagacaataa

SEQ ID NO: 112647 - DNA, 3267 bp, Enterobacter aerogenes
gtgttactggataacaaaaccagcggccacgttggtatcgaactgaaaaaatataccttttctggttccaggctctctgttctgtccagcctgtttaccttatacggttttgcctcgctgaagcacgagttgaagcagctggagtctgcaaggattattttcagcgaatgggattcgctcaatctgcagaacctagttggttctgattcggacgttctcctgctgaatcagctgcaacaaaaacgcatcgccagtgagttctcgcaatggctggcaaacaaggctgaagtgaaagccagtgtgcggcctcagccgggtcagaatattattcatcttggggctaccgagcaaagttttgccatcagcggcagtgccacgctcagtccaaccgggctcggtgacgtgcgctccgactccctgcacatgaacatgggcttgtctgaccctgagagcacccggcagcttttgacgtggtttgataatgtctgggctgacgcacagaattttcgtgatattaaggataatctgattgccaaactggatgcaatcgcagtcgatcaaccggccagttttatctatttcctcacgctatttcatttgttcaaagacttccttgaagacatcgacgaagacaacatcatccgcagtaaaactggctttaaagataccctagtctggaacaaactctacaaattccagaaagacggagtgctgggtgcaatagacaagctcgaaaagcacaacggctgcatcattgccgacagcgtgggtttgggtaaaacctttgaagccttggctgtgatcaaatactacgaactgcgtaacgatcgggtgcttgttctatgcccgaaaaagcttcgtgacaactggaccatgtacacggtcaacgataagcgcaatctgctcgcaactgaccgctttaattacgatgtactgaaccataccgatctgacccgaccgaaaggctactcgggcgaaatcaatctggagacactgaactgggccaattacgacctggtggtcatcgacgaatcccataacttccgtaacacaccgagcaaggcggaaggtaaaagccgctatgaacgcctgatgaacgacattatccgctcaggcgtgaaaaccaaagtgctgatgttgtcggcaacgccggtcaacaatcgcatgaacgatctgaaaaatcaggtcgccttcattactgaaggtcgggatgatgcctttgccgaacagggtatcaaaaatattgaaaacaccctgcggcttgcccagaagcaatttaatcagtgggtcagtgagccggtcgaaaagcgtaccacggcgtctttactcgacatcatgagctttgactacttcaaacttctcgatatcgtgaccattgcccgttcccgcaaacacatcgaaaagtactatggcaccgaagatatcggccgcttcccaactcgcttgccaccaaaaaacatctatgccaacatcgacgcctcaagcgagtttccgccgttaaaagacgtcaataaaaccatccggcggctatccctggcgggttattcgccgttgaaattcgtgcgcgaagccaaaaaagccgaatacgcccgtcgttatgataaagccgtgggaggtggtaaaggtgtattcaaacaagtagaccgtgaagaaagcctgattcacctcatgcgcgtcaacttgctcaagcgaatggaaagctcaattcactcgttcacgctgacggccaccaagcttgctcagcaggttgaccgactgctggccaaaattgatgcccacgaatcagaagatctgacggagctgaatatcgaggatatccacgactttgaactggagtccaccgaactggaaagttacatggtgggcaacaagaccaaagtgttgctgcaggatatggatctgattcgcttccggcaggaactggaggccgaccgcgagtttctgacttacattgctgatactgcacaacgagtgagtgctgctcgtgatgcaaagctggctcagcttaaacaagctattgccagcaaggtggctaacccgctaaatcccggcaataaaaaggtgatcgtgtttaccgcgttcgccgataccgcccaatacctgtatgcccatctggcgcaatgggcacattccgaactgggcattcatactgcattggtaacgggcggcggtaccaataaaactaccatggcgggcttaggctctgacctcaacaatattcttaccgccttctcgccggtatccaaagagcgcagcaaagtagacccaactgccacgaccgaactggatttactgatagccaccgactgcatcagtgagggtcagaacctgcaggattgcgatacgctcatcaactacgatattcactggaatccggtacgtatcattcagcgttttggccgtatcgaccgtcttggcagtaaaaacacgcaaatccagctcatcaacttctggcccaacatggagctggatgaatacatcaatctggaagcgcgtgtctcggggcgtatggtgttgctggatatatctgcaactggcgaagagaacgtcatcgatgaaaacgccaaagacatgaatgaccttgaataccggcgcagacaactacagcaactcaaagacgcagtagtcgatctggaggacatgagcggtggtgtatccattaccgaccttaccctcaatgacttccgcatggatctgtcagactacatgaacgacaaggcccgtctcgcaacgctggagcaagcaccgctagggatgtatgccgccgtcagtattgaccaagatctggctgccgatggcatcaaaccgggcgtcatcttctgtctgaagaatatccgcagcggtaaagaagccgttcaggtcgatgagaactacccactggcaccgtacttcctggtctacgtgaccggtgatgccgaaggcagtatcgcggttgagctgaactttacccaaagtaaaaaaatacttgatctgctcaagcgtgaagcctttaagcacaaaacgccggatcaccccgccatcaccgaagtgaatcgcatgacacgccacggacgtgatatgagccacttccagcatctgctggccgttgccgtcgacagcattgctggcaagagcgaagaaaaaggcattgaaagcctgttcaccaaaggggggacagtgctgactgcgacctccagtcagggcatagaagactttatggtggtgtcatacctgattttgacaacagctactgagggagcagaaggtcaaggagagcgtgatgcctga

SEQ ID NO: 112648 - DNA, 867 bp, Enterobacter aerogenes
atgcctgatctgggtttaggattaccacaattcgaagccttcctggcaggcttgagcgtgcccaatggctgtgtgctcaataaaaccctgttcaaaaagatgtttcaggagcacgccgacctagacgccaaagacaaaaaggcattgaaagacgatgttgataaaatccgctggctctacaccttaaagcccagcaccatcaatatcgcgccttttagtgacgacctgcgcgattatggcgagctgacttttctggtagtggaactcagtagcgctaaaaatgcgggaagactcggccaactgatcaatcgggcgataccttacccgacggtcattttcttcgtgctctctgaaagcaaaatcatagaagaaggcacagaagcaaatgacgaaccgggtgtaacaggtagggaatatgagccagaaaataaaaacgccaaggaacaactggctatctgcctggcggataaacgcataaacaaggccgataaagagaagtgggttattgagcaacttatgatatccccttggctgagattaagtggtgttaccgatagcgagcaggagtttctagacagcctgatctttaccggcttgccacacagcaacttctggcagttttatcaagccatcatggcccgtgtacaagcccttcagtgtgctgaaatcagcgggcactttcatttggccagcggtgaagtcacacaacagcaagctgaccagcttaaccgttatcgcagtatcgagaatgatattaaaaaactacgtgcccagatcaagcaggccgagttcagccagcaggttgtgttgaatacccagattaaacagcaggaacagcggctcaagcagatcgctgaaaccttgtaa

SEQ ID NO: 112649 - DNA, 1929 bp, Enterobacter aerogenes
gtgaaaaacgttatcccagaagtggactcaaaaagcatggacatcgtcgccgacaacatcagcaaactcaaagagcttttcccggaagcctttaccgaaggcaaagtggattttgatgctttaaaagaagtgcttggtgactatatcgatggccgcgaagaacgctacagcttcacctggaatggcaaaagcaaagcccgcatgttggcacaaacaccaagcactggcaccctgcgcccctgcaaggaagagtcggtggactgggacagtacgcagaatctctttattgaaggagacaacctggaagtgctgaagctcctgcaaaagagctatcacaaaaaagtcaaaatgatctatatcgacccgccgtataacaccggcaaggattttgtttataaggacaactttaaagacaatattcggaactacaaagagattactggacagcttgatggtgagggtcgaaacttatcaagtaatcctgaaaccagtgggcgctatcataccgactggttaaatatgatgtatccccgcctaaagcttgcacgaaatctgcttaaggataatggggttatctttataagcattgatgaatctgaaaccgcaaatttgcagaagatttctgatgaaatattcggcgaagaaaatctactgggaagaatatcagttgtaagtaatttaaaaggccggagtgatgataagcactttgcaacagctcataacgatttattggcttatcaaaaggtgaatttcataacaaatggtgttccattacctgaagaatatctcgaggactatgatcagctagacgatcaaggaaggagatttaggcttcagggactcagaaaacggggcaccggtgcaaaacgagaagatcgtccgaatatgtattatccattttatgtggatataaaaacgggtgctgtatcccttgaaaaatctgaattattttcggaagttgtgctaccagtactttccgatggagctgatggccggtggcgatggggatttgatacttcatctgaaagaattagtgaattgactgctaaaactgtcggtaaagaaaatcgttgggatgtctttcaaatagattacgcagagactgacgatggagaaaaaagaataaagcctaaatcaatttggatggggtcagaattcgcaaatgaaactggtacgctagaggttaagaagctattgagtagcggagttttcgatactccgaaacctataggtcttgttaaatatataatggaacaagcgcttgatatctccagtccggaaattgttttagatttctttgcaggttctgcaacaactgctcatgcattgttagagtttaatatagagtctaaatctaaatttagatttatcactgtacagcttcctgaattatgtgatgagaaatcagctgcttttaaggctggctataaaacaattgctgaaattagtaaggagagaatacgccaggctgcgattaaactcggagctgaaaatccagattaccaaggcgatcttggctttaaagtcttcaaacttgattccaccaatattaagccttgggagttggactttgatctgactgagcaggatctggaagatcagatatccaatatcaagcatgatcgtaaagaagaagacgtgctctacgaagttctgttgaagtacggcctggacctgactttaccgattaccgagcatagtgtggcgggccataaggtatttgatatcggcatgggcgcgctaatgatttgcctgtcggacgatattaccctcgacgtggtggaaggcattgccacgcttaaagacgaactgaagccagaaattatgcgcgtggttttcaaagatgctggctttgctaatgacgtggtaaaaactaacgcggtacagattctcaagcaggcgggtattgaagacataaggagcctgtaa

SEQ ID NO: 112650 - DNA, 3039 bp, Enterobacter aerogenes
atgagcatgaagattcagtttgatgccaatttagattatcagcgtgatgccattgagtctgtaacgggcgtattcgctggtcaggaaatctgccagaccaacttcaccgttgcgcctttgcaatcctgggaggaagggtcactgtttcatggcactcaggaagatactctgggtattggtaaccgcctgcgcctgctggatgaggacatccatgccaatatccgtaagatccagctgaaaaatggcctggcaccttcggagtcctttgactcgaaagacggtattcacttaaccgtagaaatggaaacaggaacaggtaaaacctatgtttacctgcgtaccgtatttgagatgaaccgtctctacggcttcaccaaattcatcatcgttgtgccgtccattgccatcaaagaaggtgtgcagaagtcactggagattacggcgactcattttaaagagctgtacgaaaacgttgcctttgactatttcacttacgattccagtaagctgtcggatgtgcgtaactttgcgaccagccctgacattcagattatggtgatcaatatcgatgcattccggaaaagctttaccgacccagagcaagagaacaaagccaacatcattcaccgcgcacacgaccgcatgaccggtgccaagccgattgaatttatccagcaaaccaacccgattgtgattgtcgatgaacctcaaagcgttgacaccaccgataagagtaaagaagccatcgcctcacttaaccccatgtgcacactgcgttattcggcgacccatgtggaaaagcaccatatgctctacaagctggactcggtcgatgcctacgagcaaaaactggttaagcagattgaagtggcaggcattgaggttaaggacggccacaataaggcttatatcaaactgctcagtgtgaacaacaaaaaaagcccgatcagtgccaaaatcgagattgatgctcgcctaaagaatggcagcattaaacgcaaggaagtcacggtaaccagcggcgcggatttgctggatgctaagtacagcggtggccgcgacgtatacgacggctacatcattgaagacatctactgcggacagggtaatgaatacattagctttaccagtaagcccaatattctgaagctgggccaggcgctgggcgaagtagacccggacgagtttaaacgtctgcagatccgcaagaccattgaagaacatctcgataaagaaatacgcctgcgcccacagggcattaaggtactgagcctgttttttatcgacaaggtcgccaattaccgctggtacgacgaagacggtaacccgcaaaagggtaaattggccctgatgtttgaagaagaatacgatcgcgccattcgtaaacccaagtatagccagctatttgaaggtgccgatctggatacggctgcacaaggcgtgcataacggttattttgcgatcgataagaaaaaagattcgtcaggcaaggaaatgctcaaagaatctaaaattggaaaagatggcaaggcggcaagcagcgaatctgatggcagtgcttacaacaccattatgaaagacaaggaatggttgttgagttttgattgcaaactgaaattcattttttcccattcagcgctcaaggaaggctgggacaaccccaacgtgttccagatttgcaccctgaacgaaactacatcggtcattaaaaaacgtcaggagatcggtcgtggcttgcgcatttgtgtgaatcaggatggtgagcgggtgcatggctttgcggtgaataccctcactgtgatggctaatgaatcctacgagcaatttgcagagcaattgcagaaggaaattgaaaacgaggaaggcatcaagtttggcgtggtcgagaagcacctgtttgccaatatcgtggtaccggttgacgaccacaatcacgaatacttaggtgccgaggcgtcgaagcagttgtgggaacacttgcagagcgaaggccacattgacagcaagggtaaagtgcaggatagccttaaggcgtcattgaagaacggtactctggagttgcctgaggcattccagccccatacagcacagattgtgtcggtgctgaaaaaggtatccggtaacctgaacatcaagaaccatgatgacaaagccaaggtttcgctgaacaaagcggtgtatctgagtcccgagtttcaggcgctgtgggatcgtattaaatacaaaactacgttccgcgtgaactttgataccagggcattgatcgagaagtgcgccgaagagatcaaaataaaccttcaggtgggtaaggctcgcttcacttaccgcaaggcgaagactgaaattgatcggggtggcgtgcacacagagaagaccgttgaagcaaccagcgtgtacgaatcccgctcgtacgatttacccgatttgatcacttacttacagaacgaaaccaacctgacgcgccgcaccattgtttccattatcaacaaaagtggtcgcctggagtcgttcaagaacaacccacaaaagtttatcgaacaggcaggtaatataatcaaaagccaaatgcgtctgtttatcgtcgatggaatcaagtaccacaaaattggtgatgatcagttctatgctcaggaattattccaacaaaacgaattgtttggctacctgaaagacaacatggttaaagctgagaagtccgtttttgactatgtagtttacgactccgatattgagccggaatttgcctcggccttcgagcgaaatgaggatatcaaactttacgccaaactacccggttggttcaaaatcgatacgccattaggcggctataaccccgactgggcggttctaatcgaaaaggatggcaaggaaaaactctacttcgttgtcgaaaccaaaagcacgctcttctccgtggaaagacgtccggaggaaaatgccaaaatcaaatgtggttatgcacactttgaagcattgggtgatgaggtgaagtttacggtatctaattcgatggatgagttctcaagcaggtatgcgtga

SEQ ID NO: 112651 - DNA, 456 bp, Enterobacter aerogenes
atgaattataagaaaatattatctatgatgtcaatcattcttttattggcattttttggttcgagactaatgctcggctttatccaaggcgataaaagcgtaagagagttagcaattgagaaggttaatagagtccaagtaaattataacaaaggtgatttgttagagatttataatgaagggaccgatgattttaaaaaaataatgttacaagatagctttattttattaatggaaagaaaaaaagagatgctaggtgattttgtaagttcagaattattggcaagtaatgtaataaatgcaaacgtcgtcatgcttacatatcgctctaaatataaaaaatattcattaatagaagagtttaagtttattcgaacacaaaaaaacgatgatttaaaattagggacttattttattgatgatggaggtaaacgaggtgaggtgatcagacagtga

SEQ ID NO: 112652 - DNA, 336 bp, Enterobacter aerogenes
atgaataaatataatattcttaatgatattgagtggcatgatggagtctttttagactctcggatgatttgtaacgctgggagcgtcaacttgatggtatccgtcagtgtttacaatgataataaacgcaatgaattgaatgtagaatttataaatgttgaaagttttaccatgactatggatacaacagaacttaatgataatcgtaatgcaggaaatattagcaatggttatgtgaaaaaaattagcaacaaatcaaaatataaattctttctttattttactgatggatatctgaatgtcgtatttaaaagcattagggtgacgtataagtaa

SEQ ID NO: 112653 - DNA, 531 bp, Enterobacter aerogenes
atgagtggtaaagatttcaatattaagtcaacactagaggctatcttacaaaatgatgccattgggaaaaatctaaaaatatattttgagaatacaccagaaaaagataccagaagagttatttcaattttgtcaatgatttatccagataaaataaatatgtcagacaatgaatttgaatttattgtttatatgttttcaagtgaaaaaaacatacgccaggaaaatttttttgaatttgttcgagcagtaagtttaattaattttacggataagcaaaaaaatatttttattgatgcaataaaaaaacacatggaattattgtgtgagaaatgtacatttgagttagatatccttttaatgaaaatatttgaaccaccagaattaattaaatatatttatacattgattggtaatagtgctcaacctgttatgcgacatgttgaatatatattaaaagatgagttattttgtcacaacgcaaatacaacaaatatactcgaattgttaaagcagcagtcatataaatga

SEQ ID NO: 112654 - DNA, 252 bp, Enterobacter aerogenes
atgaataatacaacggaaaaactgaggagccaatctatcattgcgcttaaagaaaatgactacaaacacgctattttcttacgtaaacaggtaatcgatgagggagatgctaatattggtgattattctatgatcggggagtggagtttagaattaaatctttatgagcaggctgtagatatgtttaccttatgcattctattgggtaagaagaaaaaaactcctggtttgaggatagtgcttatctgttaa

SEQ ID NO: 112655 - DNA, 396 bp, Enterobacter aerogenes
atgcgttatttttatttgttatttattctggttctttgtggctgctctccattagatgtcaactcagctcaagaagaagttagcagatttcatgatttttaccagagtgggaaatatatcgaattgtataacggggcatctaaaactctacaagaaagtatatctgagagtgattttgtaaatgtcttaaaaagagctgaagtaacagaccttggaaagtttcagaagacaacgttaaaatcccaaaaaaaagtcaagcatttaattgggagtgatgaagtcgttttaatatatgcgtcagtatattctaaaagaatagttcaggagatttttgtttttgaaaagataaagggaaatatgaaactaaagggttataaatatgattccattaactaa

SEQ ID NO: 112656 - DNA, 396 bp, Enterobacter aerogenes
atgtggcgggataaccgcatcggcgaagacgtgcagtatttttaccaccacgatgaacatggaaggctggtggaaaaagatgagcgtctgagacgcgatggtggcggttacgtacactgttatcactacgataaccagcaccggttggtacactacctctgtgagcaacagggcatcacgcttctggaaagccgctatctgtatgacgcgctgggccgtcgggttagcaagcgggtgtggaaaaaccgccggtatgaggacggcagcagaacccggccagagataacggaaagtgtctggtacggctgggacggcgacaggctgaccaccaccgaaactgacacacagcgcatacggaccatttacctgccgggcagcttcacccctctgctgtag

SEQ ID NO: 112657 - DNA, 258 bp, Enterobacter aerogenes
atgaagataaagaacctttgccttacgctctgcgcctcatcgctccttctcgccagcatggcgggtatggctaaagaagttaagattgggatggccatcgacgatcttcgtctggaacgttggcaaaaagatcgcgatattttcgttaataaagcggaatccttaggcgccaaagtatttgtgcagtccgccaatggcaacgaagaaacgcaaatgtcgcaaattgaaaatatgatcaaccgcgggtcgatgttttag

SEQ ID NO: 112658 - DNA, 738 bp, Enterobacter aerogenes
gtgattattccttacaacggccaggtgctcagcaacgttattaaagaagcgaaacaagaaggaattaaagttctcgcctacgatcgcatgattaataatgctgacatcgatttttatatttctttcgataatgaaaaagtcggtgaaatgcaggccaaaagcctggtcgacaaagtgccgcagggaaattatttcctgatgggtggctcgccggtggataataacgccaaattgttccgcgccggtcagatgaaggtgctcaaaccttatgttgatgacggcaaaattaagatcgtcggcgatcagtgggtcgacggctggctgccggaaaacgcgttaaaaatcatggaaaacgcgctgacggcgaataacaacaaaattgatgcggtagtggcttccaatgatgcgaccgccggcggcgctatccaggcgcttagcgcccaggggctggcgggtaaagtcgccatttccgggcaggatgccgatctggctggcgtgaaacgtattatttccggcacccagacgatgaccgtttataaaccgattaccacgcttgccactaacgctgccgaaatcgccgttgaattaggtaatgaccagcaacccaaggccgacgccacgttgaataacggcttaaaagatgtcccttcgcgcctgttaacgccaattgaagtcaataaagagaatattgacgccacggtgattaaagacggtttccacaaaaagagtgaactgtaa

SEQ ID NO: 112659 - DNA, 261 bp, Enterobacter aerogenes
atgcctgtttacagtacggaacggccgcagaataaacaccagcccgccatcagccgggcagacctcgaatgtctggaacatatgcgcaacgtcggcctgctcgtcggcgatctgatgcaggtgcaggactgcgccaccgttcgccgtgacccggtgcagcagttacagctcacctccgtgatttaccttatgaccgcccagctcgacggcgtggtcgagcgctgcaatcagcactggctgaccggggagggcaatgtatga

SEQ ID NO: 112660 - DNA, 450 bp, Enterobacter aerogenes
atgtttgattttcctcagcccggtgagatttatcgctgcacaggcttccctgatgtggtcgtggtcggcgttctggccgctggcattccatgggatatgccgtaccgttgcccggcgctggcctggaatccgtaccgccggacgtacagcattcttgtccgtacagaaaatgatgaccattttacggaaataccgctcggtcgttttttgcaggaatttacctgtgtgaaaccagatctgtttaaacgctgccgcgaaaatcgttatgccgtactgaaagaagtcactttcgaccctgaattacagaagtggcgggcgaaaaatatcgatatttaccagaaagatataacgactcccaagcgaacagtaccagcggcgcgtaaatggcgggatattccgcgagcggatccagaaataaaaccggataacagttaccgccattatctgtaa

SEQ ID NO: 112661 - DNA, 300 bp, Enterobacter aerogenes
atgcacactgaaaacagcattcagaccgtctcagcgcgtcgtgatgaccttaacactcttcgcgagcacctcagcattgaggcataccataaactcaaccgcgccagcactataacgcagtttgtcgggcttgatttggggcaacgtgaattaaccggcctgcatcagctttgtatgccacatattttcagctatctgcacgatgacatcagttttgttctggaggaactgaaaggcaaaggcctgtgccgtgactttctcactcagcaaggcctgcgggaggaagaagaccatgtttga

SEQ ID NO: 112662 - DNA, 417 bp, Enterobacter aerogenes
atggtgtggtgtgcggacattcgtgcaggtgtgactttccgtcgcctgcccgtattcgtacattatgtcatcatgtcaatggtagctcaggcggggcagccctcgggctggccggtattcgatggagccggtattctcacccccgtctgggctatcgccactgagcgtgagaactccggcgatagcaattatcagctatccatcggaggttgccttatggctacaaccctcaccccgtctcaccctgaatttatttttgtgtttgcggccgttcgccgcactgagcgtaaaccacatatctgcatgctccgcaccgttgccggtgacgagcgcaccgcacgcagttcccttgtccgcgactatgtcctttctctttccgcccgtctgccgcttgcggaggtgtcacatgcacactga

SEQ ID NO: 112663 - DNA, 267 bp, Enterobacter aerogenes
atgcaaactgctttttcttctccgtcttctgctccagcggctcccctgatgccggtatctgatgccactcaggagcgatttttacgcctgcctgaagtgatgcatctgtgcggtctgtcccgctccacgctttacgatctcattaagaaaaatgcctttccgcagcagataaccctcggtggtaaaaatgttgcttggctgcaatccgaagtcaccgcatggatggccgaccgtattgcacaacgcaagcggggatatgacgcatga

SEQ ID NO: 112664 - DNA, 1686 bp, Enterobacter aerogenes
atgaaaaataatataaaacaccacattaaaaatacactgacatctattaattggttgaattttacttttctttttctgagcttttcatattcaatttatttactgttaatctttggtgctcttgctcaaggctatataagctcattcggaatttattcatgtgaaaactgctttactgaagttgaggatttcacaaagattattagcaataaacctgacatttattacctcaccatgtcgatgattattttcatattttcattggcatttaaacaaaggattaaaatacttattacaacttggctggcggcagcatttactattacagtatttgacgtcaccttagcaaaggaaaatataagtttaattccttacaccattgaaaacttgatgtttaatagttttggtggattttttctttccctattcgttttattaaaccttgcgagcattagttatttattgaaaaataccaaaactagcattggtattgctacaatcattccactatcctcctccttcgtacttagctttatgatttatgggtttttatatctaatttatgaaagaagtcctgttcatatagatgcgcttttcaatgaaaaattattaggttcgatacatactgcggatgatgagggttttggtttcctcactgcctcaaaaacgataaatgatgagataaccatacagtcctatttaaataacaattttacatggaggtctggcgatcaaagttatgatgtcgaagcttatctattctctgattgtattttaaactcaacatcactcaataagtacaaacaacaacctgtgaaattaactgatgtaaaaacattagagttttcatctgacagaccagtgatctatttcatcaagggagaaaaactttcaacatcaattcaaaactcaaaagaggtcaactatagcaacaaagacaaaataagaagtcaaattgaggatggttcagctaaatttaaaagtacttatttgccatttacattaatggttaacatagcaccatttgatgaaaaatcatttttagaaaaaacagaatacaaattaaccatcaacaagcaagaaaatttaatcaccaatatagtgcaacagtacaatataataaataaaaaagaattaaaatgtcgtcaaatagttacaccagataatagaattcctactaagaataacattactggtgttgcatcaattgcttttagattcattcctaaaggtcacctcactttatctaacgtcccacttttgacaattaatataaaaaacggtgacttcacgaaaacaaaggacagtaaagtccctctttcggatattagtaatggctatctaaaacacattaatttgatcgggcttgaagaactaaaggttaacaataagaagatagatgtttctgactccgacctcctatatgcaaccggaaataaccttgttggatttgtcaccaaaaataacaaaattaaaatttttggtactgcggaaaaactagcccttaacactaagattatgaatttaaagcccatatccactttaaacagcaaactatcttattttaacacctctttaatagatgttttaaaagtgatatttggaatgggggttgttatattcatttccaactattttgttaagttcataaaaagaaaggaagaaattagagtattacgaaagtag

SEQ ID NO: 112665 - DNA, 1521 bp, Enterobacter aerogenes
atgcggcaggcaaaatggattttgaggagcttagggttagcgttaattggcatcccggttatcgcgcagatcgtctcttatttactcctggctggcggaatattgtggtctgcggcttacgacgccctgccgctgcccgaattatcgttaagcaaacttccattagcattattttacatcgcctttgcctgggccatgtttttctgcggccggtattgggcgaggaaaacaaacaccggcctgaatcgtacgctccgtcaatgcttgctcttattgccggcgctcgtgattgctggatgctggattgtgatactgcatctatcaaattacagcttcgaaagcgatcgttatatctggttactgctggtgtcgttgttgtggtatcccaataccattggggcaatcttatctggcaatttctggctgatgatgacggtaccggttatcgcgcatctctttttcgtcttaggcgattatttacactgccggcgctttgccaacagcggcggtgcgaccaaatggcgtaatgggatgctgatgttgctgacgatactaggcatcgtggtgttttggcaggcaatgttacgcgccgagaaatttgccagtgtggacaaggcaaatagcgtgagcgaagttctggataccagtttatatcagccgcaaatccaacatagccgcttgacccccctcgaaggaaacgcgccacttcaatttaaagatagccagccgcgtcttgatggcgcgacagccttatacccactttatgcttcggcattttgggcgctttataccttccctgccgaaatggccgattatgaaaaggtaatgtgctgcctggccaactcgcgaacgccgacggcttatcaaaatattatttccggtaaggcggatgtgatttttgtcgcccggccttctgaggggcaaaccaaacgcgcagaggaagcgggcgttaaattggtgtatacgcccattgcccgcgaagcttttgtgtttattacgcatgcggataatccggttaacgggctgagtcaacagcaggttctcgatatatttagtggtaaaattagccgctggaatatggttggcggcgatgatcggcaaatatcggtctggcagcgtccggtggattctggtagccagaccatgatgttgaagcaggtgatgaagaatacgccgatgttgactgcgcaggagagcgaaacggcggcgggaatgggcggcgttatccgtaaggtagcggagtaccagaatacgcggaccgctattggttatacttttcgctactacgccacccaaatgaatggcgacaagcgtattaaattgctggcgattgatggaatcgcgccgacagtggaaaacattgctcaggggagctacccatatattgcggatgtgtatatggtcacgcgtgaaaacccatctgcccaaacgcaacaactggtgacatggtttctcagcccgcaagggcagcgcctggttaaggatgtcggttatgtgcccttatacccgacaaggaaataa

SEQ ID NO: 112666 - DNA, 714 bp, Enterobacter aerogenes
atgcgaacagcggagaagattgaactttttgttgaattggttggcgtagatcctgacagcggcgcaaatatccgtatggcgcgatgcgcctccacgcgttggtatgaaaatgtggttgccgatcttatcaatcaggcgctagatgaaggcatgaagtttgcgggcatggacagcgtagaagggttgctcacttatgatgtgaccctcgatgtctggctatactccagcggtatatggccagggttcgctctggatgctgataccctctatcgtattaacgcctgtggcgcggcgctgggtttcgatccctatatttatgatgtccctccccacgcctgcgatcttcaaacatgggatgatttcacagtcatcttctctgctctgggcgttcatcaacaacggaacatcatcgcaaaacgagggttgagagagcgtggaagtatagaagatattttcatctttcaggtgtttaaggatgctttgaaatatcacaacgacaatagcctgcgcatattcagggaaaagcagtcaaggttgacgctttacgttcgctattacgagaataacactcacattttggacggtggtaacgcttgcgaggagggtattctcaggcctggttttttcttagatcgcaatgtatttacccgcctgaatgcctccagggctattttacaatattggccttttgaggaacggcggcccagtgcgtga

SEQ ID NO: 112667 - DNA, 510 bp, Enterobacter aerogenes
atgtcttcccgcaataatccggcgcgtatcgccatcgtgatggggtccaaaagcgactgggctaccatgcagttcgccgcagaaatccttgataccctgaacgttccgcaccatgttgaagtggtctccgcccaccgtacgcccgataaactgtttagcttcgccgaaggcgcggaaaacaacggttatcaggtgatcatcgccggtgcgggcggcgcggcgcatttgccgggcatgattgcagcgaaaaccctggtgccggtgctcggcgtgccggttcagagcgcagcgttaagcggcgttgacagcctctactctatcgttcaaatgccgcgcggcatcccggtcggcacgctggccatcggtaaagccggcgccgctaacgccgccctgctcgccgcgcaaattatcgcccagcatgatgccgaactgtaccagcgcctgagcgcctggcgtcaggcgcagaccgatgaagtgctggataacccggacccgcgaggtgcggcatga

SEQ ID NO: 112668 - DNA, 1164 bp, Enterobacter aerogenes
atgcgcttccgccacttcatcaaagatctccgtgacgatacgtcccagaccccagcttttctctacctgaataccgatagattccgccagcgctttcgccgcgtcgaaattatccagatccgccatgttggtttccggacggtgtttcttgatggcttcacgcatggtcagtttttcaaacggtttgccgaagtcaaacacctggtcgccatacggcacttcggttttgcccagcaccgtctgcgccagagtgcggaacagcgactcggtcagttcgatcaggtctttgtaatccgcatacgccatatacagttccatcatggtgaactctgggttatgacgtacggagatcccttcgttacggaagttacggttgatttcgaagacgcgttcgaagccgccaaccaccagacgtttcagatacagttccggcgcgatacgcaggtacatatccagatccagcgcgttgtgatgggtgatgaacggacgggcggaagcgccgcctgggatcacctgcatcatcggggtttcgacttccataaagccgcgggcaaccatgaactgacgcatggtggcgaggatctgcgaacggatacggaacgtatgacgcgactcttcgttggcgatcagatccagataacgctggcgatagcggacttcctgatcctgcaggccgtggaatttatccggcagcgggcgcagggctttggtcagcagacgcagctcggtgcagtgaatggagagttcgccggtttgcgttttgaacagcttgccgcgggcggcgatgatatcgccgagatcccattttttaaactgttcgttgtagacgccttccggcaggtcatcgcgcgcgacgtacagctgaatgcggccgccgacgtcctgaagggtaacgaaagaggctttacccatgatgcggcgggtcatcatacggccagcaacagagacttcaacgttcagggaagcgagttcatcgttatccttcgcatcgaattcagcgtgcaattggtcagagatatgatcgcgacggaaatcgttcgggaaagcgacgccctgctcacgcagcgcagccaatttttcgcgacgagttttcagttcattattaaggtcaattgcctcatcggcaccttgtgcttgttgttcagacatgttggttcctcataa

SEQ ID NO: 112669 - DNA, 2526 bp, Enterobacter aerogenes
atgcctttacgacggatcacccctggactgaacgcgctgcttgcctccggcatggttcttttgctggcgccttatagcgacagcatggccgccgagcgcgtgcagcaaatcggcggcgtgattatcccgcaggctttcagccaggctttgcaggacggcatgagcatccctctgtttattcatcttgaaggcagccgcgataatcagaacgatcagcgtatcggtgccgcgtatatctggcttgatggcgatgtgctgcgggttcggcaaatcaccctcgaagagggcgatgacaacgctcgcgtcagcgacgagacacgtcaacagctcagccgtttatccaatgaggctttcaacgatgcgctgaagatccccttaaccgatgccgcgcagctgcaacttagtctgcgccagttgctgctacaactggtggtgaaacgtgaggcgctgggaaccgtgctgcggtcgcgcagcgaggatattggccagtcgagcgttaaaaccttcagtaataaccttacctacaacctcggggtctacaacaaccagatgcgtagcggcggcagtaatacctccagctatttgtcactcaatagcgttagcgcgctgcgcgagcatcacgtggtgctcgacggctcgctgtacggcatcggcaccagccaccaggacaacgaactgtataaagcgatgtacgagcgcgacttcgccgggcaccgttttgccggcgggatgctggatacctggaacttacaatcgctggggccgatgaccgcgatttcggccggtaaaatctacggcgcgtcgtggggcaaccaggccagctcgacggtatttgacaacagccagtcggcaacgccagtggtggcattcttaccggcggcaggcgaggttcacctgatgcgcgacgggcgcctgttaagcgtgcagaactttgtcatgggtaatcatgaagttgatacccgaggcctgccgtacggtatttacgacgttgacgtcgaagttatcgttaacggaagagtggtcagcaaacgcacccaacgcgtcaacaaactgttcagccgtggacgcggcgcgggcgcgccgctggcctggcaaatctggggcggtagtttccacatggaccgctggtcggaaagcggtaaaaagacgcagccggcgaaagagagctggctggcgggggcgtcggcttccggatcgttgagtacgctcagttgggcggccaccggctacggctacgatagcaacgccgtcggcgaaacgcgcattacgctgccgctaaccgaggcggtgaatattaacctgcaaaacatgctggccagcgacagctcctggagcagcatcggcagcgtcagcgccaccttacccggcggctttagctcgttgtggattaaccaggagaagaccgtcatcggcgataagctgcgccgcagcgatgccgataaccgggcgatcggcggcacgctgaacctgaacgccctgtggtcaaaactaggtacttttagcatcagctacaacgatgatcgccgctacaacagccattactacacggcggattattaccagacgatttatagcggctcttttggctcgctaggcctgcgcgcgggcttacagcgctataacaacggcgatagcaacgccaacaccgggaaatatatcgccctcgatttatcactgccgctgggcaactggttcagcgccggaatgacccaccagaacggctataccatggccaacatttcggcgcgtaagcagtttgatgaaggagcgattcgaaccgtcggcgccaatatttcgcgggcgatttccggcgataccggcgacgacaaaaccttaagcggcggcgcttatacgcagtttgaaacgcgctataccaacggcacgttgaacgtcaacagcggcgccgacggctacgtgaacaccaacctgaccgccagcggcagcgtcggctggcaggggaaaaatatcgccgccagcggaagaaccgacggcaacgccggggtgatcttcaataccgggctggaagacgacggcaagctcagcgctaaggttaacgggcgcatcgtgcagctcagcggtaaacgcaattatctgccgctgtcgccgtacagccgctatgaagtcgaactgcagaacagtaaaaactcgatcgacagctacgacattgtcagcggccgtaagagccacctgacgctttatcccggtaacgtggcggtgatcgagccggaagtgaagcagatggtcaccgtctccgggcgcatccgcgccgaagacggcacgctgctggcgaacgcgcgcattaataaccatatcgggcgcacccgtaccgatgagaacggtgaatttgtcatggatgtcgataaaaaatatcccaccatcgattttagctacggcggaaataaaacctgtgaagtggcgctggagctcagccaggcgcgcggcgcggtgtgggtaggggacgtggtatgcagcggtctctcttcatgggcggcggtgcagcagacaggagaaggtaatgaaagctaa

SEQ ID NO: 112670 - DNA, 756 bp, Enterobacter aerogenes
atgacaactatttacgaattgattaaagatccttatgaaaggaaggcaaggttaattcccggtttgttagttgccttgccattgatcattcctcttgttgctgtttatggggcaaaaaatcctatacttacctgcgtagtaggattgttaagtagctgtggtgccgtttttgctttagcgaacatatctcgtgggatgggaaagagtcttgaagctaagcttgttagtcgatggggggggatgccaacgactattgcactaaggcatcgtgataccttctttgattttgtaacgaaaaaacgtattcataaaaaaataacacaaaaaacaggtattgagatgccttcagaagaagaagagagccttaatccatctagggcagatgaaatttatattggtgcgactcgtttattaagagagatgacacgtgataatagagaaatgctttttcaggaaaatgtagtctatgggtttcatagaaatatgacagcaatgagatgggttggtttagtttcaagttttttagggtttatatatggattggttattgccaaggtgcttatattaatgcctccacatgtaaacattataaatatatctaatccaagtttgccagcatcactaactttgtttatatctttattactgttacttgcatggttgttttatttcaatgaatcttctttgaagagaatgggcttttcatatgctgaaaggttatttgagtgtttaaataatataatccctttaagttaa

SEQ ID NO: 112671 - DNA, 900 bp, Enterobacter aerogenes
atgtccatagtaaagagtttttctgttggtaatggagatatgtgttacattgttcataattcggataatttcacaataatagattgtgatatatcattagataataaggatagaataattaaagaaataaagaatgtatcttcaaaaaaagggattagtagatttatatgtactcatccagatgatgatcactttggtgggttggaatttttagacgaagaaataagaatatctaatttttatgtggttaaaaacaatgcgaccaaggaacatgaaactgaatcatttaaacgatattgtagtctacgtgatgatagtaaaaaatctttttatgtttataaaaactgtaaaagaaaatgggcgaatgatcaggatgaaactcgcggaagttctgggttgagttttttatggcctgatatcgataatatacatttccaaaaggctttaaaggataccgaaaatggacataacttcaataatatatcaacagttattaggtatcaaataaagaatggagctagttttttgtggatcggtgatctagaaaatgaatttatgaatttgattgttgatgatattgaattagaaaaaacaacgatagtttttgcatcgcatcatggtagggattcaggtaaaattccagattcatggctgaaaaaactagatccacaaataataataatcggcgaagcaccctcacgacatcttaattattacaccggctacaaaaccataacgcagaataaatgtaaagatatcacgatggattgtgttgggaataaagttcatttttattcatctaatccaagttataaaagtgaacatcttcttaatgaaaaaatggatgccttccctaattatatcggctcaattactgtagaaaaagaatatacattgtaa

SEQ ID NO: 112672 - DNA, 690 bp, Enterobacter aerogenes
atgtgtgcgaaggatcgtagtcaaaatcagtttgccagtcaaactgattccattcattctctatgtgaaatgcttaatatttcatcgtctttggcttttattcgtaattcccgaggtgagttaattcacaccagtccactttttaacaaagttttcttaacatgtacggatgttgactcatggttttcctccctaccacttgaaactggtatggagttggtacagtcagagattaatgttttatcagaacgttctgcttgcattgttagagatgttcgcatcaatagcttcgtatgggatgtttttatagaaagcttattagttaataatgagttctacagtaaatgggtctttgtcagagaaacccacgatgttggatttatttctaatccatatactaatatgagccataatgttgaaaaatatatctcccgtatgtcttccaggaaggatgaaaaatggaaaatactcaatttgtatgccataggtttaacacactcaaaaatttctgctatcacaggcgtatccgaaaaaacatcaagaaacgttgtgagtgcttttaataaaaagtttgcttttgatagcagagataatcttatactttcgctattttattctgtaagttatcaccggctggctataaatgtcatggatatattaaagctctgtgttgctgatttgttaaagtga

SEQ ID NO: 112673 - DNA, 555 bp, Enterobacter aerogenes
atgaatactgtattaactgtgcagagtagcgctgtagctgttgaaaacaaaaatcctgttctttcgcgcatctttaataaaaagaatgtgctgaaagctgctaaaggaattttgccgcttgccgttctggcagctgtattcccggaagctgccatggccaccaccaccggatcggatttaatgaagaccggtgatggcactgtaaaagcgacttttggtaaaggttccagtgtcgtgaaatgggtaagcagtattgacaatatgactgcacacgcaggcattaaacaggatgttggtaagagcgtgggtacgttggtttcggagaacagacaggctcaccaaaatactcgacaggaaataatcaaccaagaaaatgacgttaaaaaacagcatgcagatctggaacacaaccataaaacagagggaaataacttccataatacatataatgagaggaaggaaaaggtaagtaatatgcccggagcagcctcttccaaagagcttgaggaaagggctactaaacttcaaaaggattatcttgatgggaagaaatga

SEQ ID NO: 112674 - DNA, 240 bp, Enterobacter aerogenes
ttgacaaaggataaaaaggatttttacgctcattgcgctcagtatatatcctatttcagcattgaggagaaaggcaatggggatcagtatttatgttatacctttgatatcagaaccgctggcaggattgaaggcacgtcaggacgcttcttcagcggtgagcccggtgacgagaagctcaatattgatgaccttacgccttatgaatttggcgataccccggtgccagagatggaataa

SEQ ID NO: 112675 - DNA, 543 bp, Enterobacter aerogenes
ttgaagactgaagaagttcagaaatggaaagcctttgaacaccctgacggcgtgttgagggatctatcgtttctcgatgcccatgaggtgacttatacacattcagtggaaggcaagcctgataaagtgtatagattctttgtaacctactcgtttcactgcttcagcaaagactatgctcaccagacggaagaacaaaaagcatcattgatgtatttcgcgcccaaagataagcgtccattttgtgagagacgctatgaactagccaggcaacatttacgctggatagttgcaaacttgggaagttgtaaggtcatacatgcaggatatgggagttatgctgtagtagagatcgagctcggtggaggtgaaaaagagttttattttgtggtatttagcgctttcaaagaaaagaaaaaaatgcgcctccatatcaccagtgcctatccggtgagtgagagaccacgaggtaaaaaggtgagttttttcactatcgcgaataacttgttaaatggtaaaccacttccattccctccaaaataa

SEQ ID NO: 112676 - DNA, 1248 bp, Enterobacter aerogenes
atgaacacgttactgtttgcgcttattggtgcgcttcgcagccatcgctggcttcgtttccttggggttgcctatatcctgtcatcgctgggcaatgggcttactcaggtcattattttcggtcagcttttacactggcatgcttctcctgcgacacttaccatcgtgtacatgttgtcgatgctgcccagctttattggcagcatctggggcgagaaactgtgtaagaagacatcactacttcgaatcctgatttttaccgagatatctggtctgcttgcgcttgtttttcccttgtatggttcgctgtatcataacgtgccggcgctactggtcgtgcagtgtatcgaagcgctactcagcggcataagttacccggcgctgacgttgttgttcaaacgtggattgcgccacgatgaactcccagctgcaacggctatggaaaccatcatttttgcctcacaggtgttgttggggaccggactgggtgttcttctgtttgaccggattgctgcgcagcatctgcttgccattgatgcccttagttttacggcatctacgattctgcttatgatgtctgccgctgctttttgcggagcagaacgttggccaacagaggctacgccggtcagacagaaatccctctggcgcgtcatttcacccttgcaaaaaagaagcattttgttgttacctgcgcttgccgctgtgggatctcccgcgatggcgcttttacctgcactggcacaagaaataagacctgaagattctgccgggctggccttgccgctactatttgcacgaagtcttggacagctttgcgggccgctgatgctggatgccagtaaattgcagcagtatgccgttaataacaggttgttgctgacctgtctgagtttatttattggaagctattttttattaccgctatctgccggatatccatacaccggactggttcttatcttcagtgcgcatatggcatcgaatattgtatttgctttgggtacgtttggtattttgaggaacttcccgcagacacaggttgcaaaagccagtgcgatgtcatggcgtgtgcaggtaatgaccgccactgttttcaccggtataaccagtacagtggcgcaatacttcggcgcattttatgcactttattgtatgtcgctgttcagtctcggagctgtcggagttttgctctggttaaacagggcgagggcactaaataaagtgaacctgcgccttcgagagtaa

SEQ ID NO: 112677 - DNA, 1248 bp, Enterobacter aerogenes
atgaacacgttactgtttgcgcttattggtgcgcttcgcagccatcactggcttcgtttccttggggttgcctatatcctgtcatcgctgggcaatggatttactcaggtcattattttcggtcagcttttacactggcatgcttctcctgcgacacttaccatcgtgtacatattgtcgatgctgcccagctttattggcagcatctggggcgagagactgtgtaagaagacatcaccacttcgaatcctgatttttaccgagatatctggtctgcttgcgcttgtttttcccttgtatggttcgctgtatcataacgtgccggcgctactggtcgtgcagtgtattgaagcgctactcagcggcataagttacccggcgctgacgttgttgttcaaacgtggattgcgccacgatgaactcccagctgcaacggctatggaaaccatcatttttgcctcacaggtattgttggggaccggactgggtgttcttctgtttgaccggattgctgcgcagcatctgcttgccattgatgcccttagttttacggcatctacgattctgcttatgatgtctgctgctgctttttgcggagcagaacgttggccaactgaggctacgccggtcagacagaaatccctctggtgcgtcatttcacccttgcaaaaaagaagcattttgttgttacctgcgcttgccgctgtgggatctcccgcgatggcgcttttacctgcactggcacaagaaataagacctgaagattctgccgggctggccttgccgctactatttgcacgaagtcttggacagctttgcgggccgatgatgctggatgccagtaaattgcagcagtatgccgctaataacaggttgttgctgacctgtctgagtttatttattggaagctattttctattaccgctatctgccggatatccatacaccggactggttcttatcttcagtgcgcatatggcatcgaatattgtatttgctttgggtacgtttggtattttgaggaacttcccgcagacacaggttgcaaaagccagtgcgatgtcatggcgtgtgcaggtaatgaccgccactgttttcaccggtataaccagtacagtggcgcaatacttcggcgcattttatgcactttattgtatgtcgctgttcagtctcggagctgtcggagttttgctctggttaaacagggcgagggcactaaataaagtgaacctgcgccttcgagagtaa

SEQ ID NO: 112678 - DNA, 180 bp, Enterobacter aerogenes
atgtgcggacttttttccctgtcgatgacccgcgaagattatctatcactgatttccaatgaatccgaacgagatattgcctacgaccccgaacctattggtcgcttcaacgtagcgccaggcacccaggttttattgctgagcgaatgtgacgacagctacaccttgatcggggtctga

SEQ ID NO: 112679 - DNA, 147 bp, Enterobacter aerogenes
atgcggctttacaatgccatggcgtggtgtcgttgcgttagcggggtaggcaacaaaaagtcatttgaggctgaaacattgtttaatgcgggctttcatttcactacgataaataatatcaattataacaatgagttatttccttaa

SEQ ID NO: 112680 - DNA, 312 bp, Enterobacter aerogenes
atggatcagactttaggcgtgcgctttatttatggtgacaacaggatgttcaataagactcactcccccacaaacagaaggaaagtccttggtggtgcgataaaaataccgaaaatctcgccgattgaagcgcgtttacattgtgaaattacaggaatgccgaaaaatatcacgttgagtcgcagcgcaaccgggaaatactatgcgtcgttattctgtgacgacgggatggaagcgccggcgaagcccgaactgatatcaaacgtggcagggctggttatccgcaatgagtttgaccagctcatcgcatga

SEQ ID NO: 112681 - DNA, 633 bp, Enterobacter aerogenes
atgaacacgactaatgaccttccgctggttgccattctgcggggcgtgacgcctgatgaagttctggcgcacattgaggccatcgcccgggcgggttttactaccgttgaaatcccgctgaactccccggactggcaacagagcattgccctagcggtaaaacactatggcgggaagatgcgcgtgggtgctggtacggtgaccgatgtgagcaacatccccatattggctgcgctgggatgtcagtttattttgacacccaataccgacccggcggtgatcactgcagcacgcgcttacggcatggaggtttgcgttggttgccagacggcgagcgaagcctttagcgcattgcgttcgggggcatcatcactcaaaattttcccagcgggagaggtgggggccgggtatattcgcgccttgcgagcggtattacccgctgatgccgtcctttatgctgttggcgggatcacgaccgataatctggtgcactacctgcgagcgggatgtgaaggagtgggattaggtagcgacctgtattgtgccgggcaaccggtggcgaaaacgcacaagcaggcacaggcctttatgttgagctggcagaccgcacagcgtccaccagccctaagttaa

SEQ ID NO: 112682 - DNA, 903 bp, Enterobacter aerogenes
atgttcagtgctgataattatattgctgtcgactggggatcgagtaacttacgcctgtgggtctggcaggacggtgaatgcgtctggcaatacgccagcgctcaaggggtgatgcggcaaaagcctggtgggttcagtgatctttggcaaactctgttagccacctgcccggttccgctcgctgcaagtacgcaggtcatcatgagcggtatgatcggcagcaatatgggctgggtgaacgcaccttatctgacctgcccgacagccatcgcgtctctggccgaccatttgaccgttgtggaagaggttaggcccttcccggtctttatcgttccaggattgcagctacctgggccggatacgtttaacgttatgcgcggtgaggagacacagctttacggcgcactgggcgatgaacactggtatgtctttcccggcactcacagcaaatgggtgagcgtagaaaatggcatagtacgtgattttcaaaccatcatgaccggtgaattattccatcttctgtcaacgcaatccgtactgcggttgccgcacactccccaacaggaatgcgatgctctgtttttgcagggcgcacagtggggggctcaggagacctgcctgtcacggggagcatttttgctgcgttcacgcatgctgtgcaacgcacttgaccccacctgtctgcacagcgcgttgtcaggctttttgatcggtcatgaaatcgcccgtatgcagaatcattaccatattacaccaaaggatacacttgtgatcatcggcagcgacagcctgctggtacgctatcaaacgctttttcatcaattcgggctcacctgccgtgtggtcaagggtgatgccgcctttcttgctggtattaggagcattttgcatgaacacgactaa

SEQ ID NO: 112683 - DNA, 1518 bp, Enterobacter aerogenes
atgaatatcaaccctgtactaaagcttaatccaaaagatgatgtagtaattgcccggcaagccgtgccgctgggaacttggctggcagaagaacatgtggaggttctgagcgatattcccgccgggcataagattgctatccgcgatattcagcctggtgacgcggtaaaacgctacggccagattatcggttttgccacccagctcatccgcctaggcgagcatattcacatgcacaatctcagcatgggtgattttgaacgcgactacgcctggggcgaagattgccagccgctcaccctcgcgcaacatcaggatacctttatggggatccgtcgcgcggacggtcgtatcgccacacgtaactatattggtgtgctgagctcggtgaactgtagcgccaccgtggttcgcgccattgaagaccatttccgccagcacggtctgggtgattacccgaatgttgatggtgttgtcgcgctaccgcaaagcttcggatgcgccattggttcgaaaagcgaatccatggaagtgatgcgccgtaccatggccggctatgccacacacgccaactttgcgggggtgctgataattggtttgggctgcgaatccagccagattcaggacatgatgaacgcgcacgggctgagcgatggccctatgctgcataccttcacgattcaggagtccggcggcacccggcagactatcgaaaaaggcatcgccctgattaatagcatgttgccgcaggcaaatcaggtgacacgcgaacccattccggcctctgaaatcatcctcgcgctggagtgcggcggctctgatagctattccggaatttccgctaacccagcgctcggctatgcggttgataaacttgtggcacaaggcggtacagcaatcctttctgaaacctcagaaatctacggtgccgaacatttactgacgcgccgcgccgtcactcgcgaggtgggcgaaaaactgatcgcgcgcatccattggtgggaagattattgccgccgtaccggcagtgaaatgaacaataacccttctgcagggaataaagtcggcgggctgaccaccgttctggaaaaatcgctgggcgggattgccaaagcaggaacaaccaatctcaccgccgtgtatgagtatgcggaacccgttaccgccaagggcttcgtgtttatggacaccccaggctacgacccgattgcggtcacagggcagatagctggcggggcgaacctgctctgtttcaccaccgggcgcggttcagcatttggctccaaacccacgccgagcctgaaactggccaccaacaacgcactctgggcgcggcagcaagaagatatggacattaactgcggcaccatcgtggaaggagaagagactattgccgaagtgggcgaaaggctctatcagatgatccttgagatggcatccggcaaaaaaactaaaagcgaagagtttggatacggcagccaggaattcgtgccctggactatcggctccattatgtaa

SEQ ID NO: 112684 - DNA, 900 bp, Enterobacter aerogenes
atgtcagagaaatttcgtggtatttttccccccgtccctaccatagttaatgcacagggtgagtttgatgccgagggcatggcacgcctgatcgagcatgttatcgcaagcggtgccaacggcatgctgattttgggtagcggtggcgagttcccgcatctctccaccacagaccgtaagcgtattgccgaattctgcctgcagcaggttaaccagcgtgtgcctgtgctgattggcatcgcctgtgcgggcacgaaagaaaccatcgaagtaggcctgcacgcccagcaacacggcgcagatggcctgcttgtggtcaatccttactacgccaaattaagcgaagaagctcgctttacccactataaacgggttgccgaagccctcgacacgccggtgtttctctacaactttccggaactgaccgggcaggatataggcatcgaggtcattacccggctggcactagaagtgccaaatatagtcggaattaaagacaccattgacaatattagccacacccgggaaatcattaaccgcgtccatgtgttccgtcctgattttattatttttagcggatatgatgaatatatgctggatacactgctactgggcggccatggcggtattccggcaacctttaacttcgccccgcaaatcacgcgcggcatttacgaggcctttttggcgaaagacatgaatgccgcgcaggctttccaacaacaactggcgaaattgtcgccactctatgctctggagcagccgttttttggagttatcaaaaccgccatcaaactcagcgggctggatatatccgctgccgttatccctccagcattacccctcaatgacgaaaaaacggcacaagttaaaaatattctcgcccgtatcagtcagtaa

SEQ ID NO: 112685 - DNA, 780 bp, Enterobacter aerogenes
atgaataacaagattaatctgctcatgaatcaggacatcacaacccccgttccggcgctcgataagacagtgaaaatctgtaattaccttttcaattcgccgggggctacattcagccaaatccagcaggatttaagactgccgaaaagcagtacatcgtctctgctgaatgcgctggtcgatcatcatctgctacgtctggaaaatgggcgttttttccttggcctcaaactctacgagtggggcaaccggtcgctggaacagtttgatatccgtaatgtggcacagtcggtactggaaaagctgcgcgatcagactgatctcacctgccatctcggtatcctggatgaagttgcgcctatttatgtgctgaaactcgaaaatacccaggcgattggcatacgttcatgggtcggaaagaagctaccactgcacagttccggagtgggtaaagcgctatgcgcctggctcccgaaggaaaaaattgacgaactgttaccaaatgaaaagctggagcgttacaccgataccaccatcaccagcaagacgatattaatgcaggagcttgccaaaatccgcgaacagggttgggcttacgataatgcggaagattctcccggcattttctgtattgccgcaccggtgtttaatcacaaaaacgaagttattgcggcggtgagcattagtggcgtcgatttgcagatgccaaaagaccgtattccgctgtattcgcaactggttcgtgaggcttgtcagacgctggccgcaaaactggtatga

SEQ ID NO: 112686 - DNA, 315 bp, Enterobacter aerogenes
atgacttctgtacaaatgaatattcatatagctaaattgcaagcagtttccgacggaatattgacactcgagagcaaggtccaagcggctaagcaaatggcagaaaacgttagcatgattgttctgatttcagttcagtccgcggagaattttattggaacaaacattgaagagattgcggtatacgatggtgataaaattagggaaagcattgcaaggctgattcgtacatataatgaacgtattcaaaaaatcgaaagtgataagtcattaatgattgaagagccaaaatggattattaaaataatatcatag

SEQ ID NO: 112687 - DNA, 693 bp, Enterobacter aerogenes
atgaacgagctgaacatcaccggtatctgtgccaataccagttctgccaagggccgtgttaagctggcccaccttacgttgcaggatcgcctcgtcaaggagctgcggctccgcggtatcagtacacccgaggctgcaaacgcctttgccgaagagttcatggctgactacaaccaccggtttgagaagccaccacgtcacgatttcgatgttcaccgtccgctcgagaataatgaaaatctggcagcaacattcacctggcgtgaacaacgtaaggtctcaagaaacctgacattacagtatgataaaaatctctatctgattgaatataataaagaaaatagactttttcaggggaggtatattgatgtctggcagtatcccgacggtaccatcgaactccgggctaacggtacttccctgcccttcataacctacgaccggctggaagaactggaccagggcgctatcgttgacaacaagcgactgggacgtgctcttgagatgataaagctggttcaggacaaacgtgacaacacccgctcacaggccctgccattacgggacagccagacctcacgcagaaagaagcaacccggaaagaaatcccaacgaagtctgaatcagaacgacattctggaagccctgcaacaactccagacaaggagccaggaaatctttggcaaaagctga

SEQ ID NO: 112688 - DNA, 537 bp, Enterobacter aerogenes
atgccgggcctcgctgaacgagcactacgtattatccgcgaacgctacgctgattttggccagactttagcctgtgagaagctcgccgaggttcatgggctgcatctggccaaagagacagtacgcaagctgatgacacaggctggtttatggatcccccgcaagttacggccgcctcgtgtgcatcagccacgaccgcgtcgggcccgcaccggagaactcatccagattgatggcagtgagcatcgctggttcgaggatcgtggcccggcctgcacgttactcgtttacgttgatgatgcgaccagccggctgatgcagcttttgctcgtcagtttcacctattttgaagccacccggggctatctggaacgttacggtaagcctctggcattctacagcggcaaggccagtgtcttcaggatcaacaacaagcaggccatcggtggagatggccagactcagtggccgtgccatgaacgagctgaacatcaccggtatctgtgccaataccagttctgccaagggccgtgttaa

SEQ ID NO: 112689 - DNA, 372 bp, Enterobacter aerogenes
atgaagaatcaaatttataaccgtcatggcatatatgaaataatcagaaatcactatataaaaaactttccttatacggttcagtttgaagctcttaatgcaataaatgagcatattagtcttattattgatgatgcatcaatacaaaagaatgaagataacaaatacatatttataaataataacactaataaagaaactgatgacccatttgaaagtacagaaagaaatcttgctgcttacctgtcaagatcaagtggtatcgaagcactgttccaagatgtgaatgcattacaaaaatggttgctccaatctggttttatcagtggtggtatagcgactgaaaaaatgctgattacaaataaattgtaa

SEQ ID NO: 112690 - DNA, 468 bp, Enterobacter aerogenes
atgacggtatctctgggtgatgtgtttggtggtttagcatttcttctctcaatatatgcaacaataaaaaccatcaagttcaatgaaagacaaaaggcattaattgaagcgcaagaaaaattaacaaaccttcagcttactaaagaagcaaatgaactggaaagctctaaaaaagctgatgtaagcgcaaatatagtcaacattggaaataacaaatataaacttaaagtatttaataaaggtaaaagtccagcgaaaaacgtaagaatcgaattccctgacaataactcaccagtttcaatgagtgacgttgaaagtaaattcccttttgaatctcttgttgcatatcaatcagttgacctcattgcatcaggggagttaggtagagcaagtaagtttaccgtaaggctaatatgggatgacgactttcaagatgggaatgaaaacgtcgttcatgtaacatattga

SEQ ID NO: 112691 - DNA, 1050 bp, Enterobacter aerogenes
atgataaaagccgggctctggattccccgtagacaacgcgcaccgaaaattcatcagccccgttaccggcggccatgtactggcgagctgatacaaattgatggctgtgaccatcactggtttgaaaaccggggtcggccatgtacggcactggtctatgtcgacgatgccaccagtcgtctgatgcacctgctgtttgtgaaatctgagtccacttttacctattttgaagcgacgcgcggctatatcgagaaatacggtaaacccatcatcctttacagcgataaagccagcgtattcagagtcaataataagcacgccaccacgggtcctggtgaaacccaatttgcccgagccatgcgctgcctcaatattaccccactatgcgcggagaccagtcaggcaaaggggcgcgttgaacgtgcccacctgacacttcaggaccggctagttaaggaactcaggctaaaaggaatcagtacgatagatgcagcaaatgcgtttgctgaagaatacgtggccgattacaaccagcgatttgccaaagccccacgacatgactttaatgcgcaccggccactggcattaaccgatgatcttgatgcggaatttacctggcgtgagccccggcgggtttcaaaaaaccttactgtacagtacgataaggtgctttatctgattgaggacagcgaatacagccgacgggctatcgggaagtatatcgatgtctggcactatcctgacgggcataaggaactgcgcctgaatgatgtgctgctcccctattccacctatgatcggttgtcggaagttgaccccgtcgcgattgttgataataaaagactgggtcatgtgctggacgttgcccgccaggtccagaaaaaaagggataataatcgatcccagtcgataccttcaggagatgagccttcccgcagacggcatgctccgagcatcaacaaacctcagcgatcgctgaacgaagaagacctgcttgaagccatgatacagcttcagggtagctcggaggccatttttggtaaaaggtga

SEQ ID NO: 112692 - DNA, 318 bp, Enterobacter aerogenes
atggctatacatgacgccgggatgtttaccgtgaaagaaatcaatcgcctcaaaatacttcaggatgtcattgaacgtaacctgcgtcctggccaagctgccgagatgctcggcatcacgccacgtcattgcagccgtctgctgaaacgttatcgtcagtccgggccgcttggtatgaataaccagagtcgcggtcgcactggcaaccgcctgttgcctgcgtcactaactgacgaggcactgagtatcatacgagaacgctaccgcgattttggccccacgctggcacgggaaaaccagaggaagctcacggtctga

SEQ ID NO: 112693 - DNA, 159 bp, Enterobacter aerogenes
ttgcatgatagaagcctggctagctttattctgaaaagaaccaaaatgtcgcgcagctacctttttaaaatccttgccgagctaaaggagggaggatatatcaaaatggaaaacggcgaactggtcgatattgtgcacgagctgccggagaaattttaa

SEQ ID NO: 112694 - DNA, 1089 bp, Enterobacter aerogenes
atggctagaacaaacgtactaaatcgcgcgtccaggactccgggggtttttagatctggcggaggttacaagggcgtttcgcgttgcggttcctcttacggttggaaatgggtttcgaacaacggtcagcacttccaaaaaggcggctacgagacccccgaagaggcggcctatgcctatgatgaatttgtaaccgccagcacggaagggcgcggcgaaacaaatcaaatgcttggctacctaaaagaaaaaaccatactcaagataagagagaaggtcacaaaagccgagaagcacaccccgaaatatcataaatcctcgaaagtcggaaagaccggatttaaaggcgtatacgaaactaaaagtaagaaaaaaccatatacgagccaaattgctcacgatggtaaattaatatccttggggtcatttgtcaccgctgaagatgccgcgagagcgtatgatgctgcagtattaaaatataaagggctaaccgccgatacaaatttatctcgtgggttattaccgccgttatcggaacataaattcgatccaaataaaaaacggcaagatttatcgctttcagataataaccaacgaaataatattttgagctctaataacactgcgaatgtaatttcgctcgacccttacgacgtcgagcgacaacgccaaattgaagcggcgcggatgatggcagccgacgaggaagaggacgatcagcccacaccgcggtcctctgtttcgttaactcaggccgcgcccccaccggcgcaagctgaaaagccgcaagcctccgcagctgcagccgctgccgcttcaatctctcccgcaccggtgccccaggacattacagcaccggagccggagctcctcgtcgccgaggacccctttgcgggggttattgcgacgatgcgccgcgcactcgccgaagatgaggcgcgccgcatgggcgctatgcgcctgctgttagaccgcatctctgccgaggttgagggctaccagaaagccgcgatggaacttatagatcgcggggcagccattgagacggcgatctcaagcctgcgcaacatgttgaatcctgaaaaataa

SEQ ID NO: 112695 - DNA, 432 bp, Enterobacter aerogenes
atgttcggatttggtaaaaacgcacgccgcgcaaaggatgctgtaactaaagcagctaataaagatttcatggaagcgatggtcgcgggcatggtttggatcgcctccgccgacggcgaactcgaagccgaggagctggaccgcatcgaggccgcttgtcagactaatgaccgcctcgcgcatttcagcgcggaaatcaccacgcaggtcgcgaagtacaaagagaaattcgagcgcatgggcgcggcggttatccgcttcgacgcaaagcgcgagctcgccgatctgaagcacgacccggatctggccgccgaggtgttcgtaaacatggtcgccatcgcccaggcggacggggaaatcgaaccggccgagcgcaaggcgctggatgaagtcggccgcatttacggcctgcgcgttgaagatttcgaataa

SEQ ID NO: 112696 - DNA, 168 bp, Enterobacter aerogenes
atgcgctttgtgtgggcgctgttcggcgcgtacctcgtcgccctcgtcgctgccgcgctggcgcatcaggtaatgttatttatcatcgatgcgctgatcctgctggctgttggcctctttatctggcaccgcagccgccggaaggcagcaaagaaaaagccccaataa

SEQ ID NO: 112697 - DNA, 219 bp, Enterobacter aerogenes
atggcagataaaaaagagagtaacccgcgaggcggccaccgagtcggcagcggggcaccgcaggggaaccaaaacgggcgcaaagagacccccgcgactgcgcagctacagctacgcgtaacaccggaagaaaaatccagttggcaggcggcggcgtcagcggcggggcttaccctctccgaatgggcgcggcaacacctcaacaaagcaacaaaatag

SEQ ID NO: 112698 - DNA, 303 bp, Enterobacter aerogenes
atgaacgcgatcactatgaatactgaaaaaaccaccgttaaagcactgctgcagcgcatgaccgaccgttgcttaaccggcagcgcagagttccgcgaagcgctgaaagtgttcggggttacgacgacttactcgttttacaccgaggcccacttcgaggagctggagccggaggggaccgcgcattactttgttgatgtgttcgcacctgataccatcgacgccgaaccgcacggcaggcgctacggcttcgcgaaggcatccgacgcggtgcgcttcgagctagagcaccgcaacgcgtga

SEQ ID NO: 112699 - DNA, 201 bp, Enterobacter aerogenes
atgagaaacgcaaaagaggcactacgcgcagacgtttatcactggttcgcgcgctgtggattcaacaaagaccgggtagtccgaaacgttgaaagctggggaaattggggattcagttttgccgagcaggacgaagcgaaagcagcagttttagccgagctcaaggacccgcagtacgtagcaccgaaaagcatctactag

SEQ ID NO: 112700 - DNA, 384 bp, Enterobacter aerogenes
gtgaatccactgttagccgatattttccgcgactttgcgcgcgtcatcgcggcggaagtcgctaaaaacctggcgaaagatacggtcgataaattaacgaccgaagtgaaagagaaaaagggcagaaagaaagccaccccggcaccggcggccaatgacgacgacggcgcaaccggcgcgggctcaatgtccgccgttgcgagcctgccgccgtccgtgatccgcgaggagtgtctcgccattatcaacaagctagccccgactcacggcccgcagctgcgcgccgcgctggccgctgtaggcggtgcccgtctgcgggatatcgccgacgatcgcctcgtggagctattcgacgagctgacggggttacaaaatgccagctag

SEQ ID NO: 112701 - DNA, 1182 bp, Enterobacter aerogenes
atggggtgcccggcaagcctggcagcagaacggggcaccccttccagtgagtccaaatacgcgcaagagggcaccgccgcgcatgcggttagcgagatgctcctccgcacacacaacccgtcatgggccgaaactcgcccccctttttcacggttggccgccgtggattacataggcgagatcgtcgaggactggcggatctctgaggatatggccgcccctatacaggaatacgtaaacacggtgctagcgatggcgcaaggtaagaccctgcacgtcgagcaacgcgtcgatttttcccatgtagtaggggtggcgggttcgtttgggaccgccgatgccgtcatcgtcgacggcgacgagctccaggtccacgacctgaaattcgggcagggcgtcaaagtcgacgcagcgaacaacccccaattgatgatctacgcgttaggcgctctccgagtatttgaaatcggcgcggattttaacaccgtgcgcctgtttattcatcaaccccgtttgaaccacgtcagcgagtgggcgatcaccgtggccgagctggaagcgttcgccgaggaagcccgcgcggctgccgaggaggctgtcgcgcattacgaggcggcggagcgcggcgtcatgccaccggccagcgcataccggccgagcgagaaggcgtgcaaatggtgccgccgtgcgcctacctgcgcagcctacgcgcaacacgtctacaacgaggtcgcgggcgagttcgtggacctcgatgcggccgagttcgacgcctgccgaccgcagcacctcaccgaagatcagctcgtgcaggctcaccgcaacatcacgctgatcgaggcctggtgcgacaaggtgcgcaaagaggtttacgcgcgcctgctcaatggcggcggcctgcccggcctgaagatggtcaaaggccgcgacggtgcccgcaagtggaccgacgagcgggaagccgaggcggcgctgctgcagctggaggagtccggcgacgtctacacccgcaagctacttagcccgacccaggctgaaaagctgttcaagtcataccccgcatgggagcaagtgcaggcacttatcgtgcgccccgccggtgcccccgtcgttgtatccgaagaggacccgcgccctgcggtttctcttaatcccgttgatgatttttccgttgttgaataa

SEQ ID NO: 112702 - DNA, 537 bp, Enterobacter aerogenes
atgctgttaactaacgttcgcctgtccttccctgatctgttcgtagcccgtaagcaaggcgagagcgccaccgaagaaaaattcgcggggaccttcctgatcccggcgggctccgagcaggagaaggccatcgaggcggaaatcctgcgcgctgcggagcgtaaatggccgggcaaaggcgcgcagattatcaaacagatcgccggtaacaatatgcgcttctgtttccgcccggaaggcgagaaggattacgccggttacgagggtatgcgcttctttaaggcgactaactcccagcgcccaaccatcattgaccgcgataaaaccccgctagtgcaggccgacggcaagccgtacagcggttgttatgtaaacgtgtccgtcgagttctacggctacgagaacaacggcaaaggcattgccgcgagccttaagggcgtccagttcttcaaagacggcgacgcgttcgcaggcggcggcgtagccagcccggacgagttcgaagacctggcagtggatgcgaacgagttcgcgtaa

SEQ ID NO: 112703 - DNA, 321 bp, Enterobacter aerogenes
atgatcggacgtatgaaaaaccccccccatccgggggggattatcgcggaaacgctagaggacaccgggatcagcctgcgggaactggcaaagcgcctagaggttgccccctctacgctctcccgcctaatcaacaaggatgcggcggtctccgctgagatggccgtcaagttggccgccgtgttaggcatcgccgcacatatctggttaggtatgcagagcgattatgacctcgcccaggctgagaaggcgctcgatgtgagccacctcaagcggctggagttccccgcagagcctgacgctaccgcgatgcaccactaa

SEQ ID NO: 112704 - DNA, 279 bp, Enterobacter aerogenes
atgattaaaagttttaagcacaaaggattagaaaggctttggacgttaggagaagaaaaagcctttaataaacaagatgtagagagaataaaaactaggcttgcggtgattgataaggtggaaagggtagaagatattacgaaccccggttacaaactccacccactcaaaggaaatagaaaagggctttactcaataactgttagagcaaattaccgaatcacttttgagtttatcgacggaaacgcctacatactgaattacgaggactatcactga

SEQ ID NO: 112705 - DNA, 2100 bp, Enterobacter aerogenes
atgagaaatattttctgcgatctggagacattcagcccgacgccgatcagctgcggctcgcaccgctacgccgaggacgccgaggtcatgctctttgcatttgccatcgacgacgaccccgtcgaggtatgggacttaacaaccggcgaaccgatgcccgcgcggctgcgcgatgcgctaaaagattccgatacgcgcctgatctggcataacggcggtaatttcgaccttgtcgtcttgcatcacgcctttggatgggatttcccgctcgaacgcgtacacgacacaatgatccaggcgtatcagcacggcctccccggtagtctggggcagctctgcgagatattcggcatcgagggcgacgaggcaaaagacaaagaaggcaagcgccttatacagctattttgtaagccgcgccctaaatcaatgaagctacgccgcgccacccgcgagacgcacccgcaagactggcagcgcttcgtaaaatacgccgggagcgatattaaggcgatgcgccagatccaccgcaagatcccgcgctggaattgcaccgctaaagagttggctcactggcgcttagatcagcgcatcaaccggcacggcgtagccgtagacctggagctggcacgcggtgcccttgatgcggtagctaacgagcaggcgtatctcgccacccgcgcgcagcagctgacggacggcgaagtcgagagcgcaacaaagcgcaacaagctactcgcccacatccttaaatgttacggcgtcacgttaccagatatgcaagcggcgacgattgagcgccgcgtaaacgacccggatctgccgcagccgttgcgcgacttgctggccgttcgcctgtcggcgacaacgagcagcaccgccaaatataaaaccctcctcaagtcggcaagctccgacggtcgcctccgggggctgctgcaattctgcggcgctgccaggaccggccgctgggcggggcgcatctggcagccgcaaaacctgccacgcccgacgcttacgcaagaggctatcgagctggcgatcatcgcctttaagcagcattacgccgacctcgtctgccccgacgtcatggcggcggcatcgtctgcgctgcgtgggtgcatcgtcgccccggagggcatgaagctaaacgtatctgacctttctaacatcgagggccgcgtcctcgcctggctcgccggtgaggcatggaagattgaagccttcgaagcggccgacaatggcaccggcgcggatctctacatcctcgcctatgcgcgcgccttcaacctcaccccggaggaagtcgagaaggcccagcgccagatcggcaaggtgctagagctctcgatgggctacgcgggcggcgttggcgcgttcgcggctatggcgctggcctacggcatggatctagacgagctggccgcagcggcgcgcccgactatcccggcggctacatgggccgaggcggtgagcctgggcgagtggctgcgcgagaagtccgaagccgatctcgcagctaaaaagccgggcgcgttcgccttcgaatacaacggcctcaagccggaaacatgggccgcgtgcgactccttaaagcgcctatggcgcggctcacaccctgcggtcgttaagctctggcaggacgtcgagaacgccgcacgcaaagcgatcgccggggtgccgtctaccgtgcgcggcttggccttcgacaaggtcggcgcatggctccgcatccgcttaccgtccggccgttatctctgttacccgtcgccgcgtgtcgatgcttccgggcaaatcacttacatgggcgttaacccgtacagccgcaaatggtgccgcctgaaaacgttcggcgggaagctggtcgagaacatcgtccaggccatcgcgcgcgacgtactggcggatgcaatgccggggatcatggccgccggttatttcatcgtgctgaccgtacatgacgaggtgatcaccgaaacgccggatcgcccggatttcaacccgcaggcgctttccgccctgctcgccaccgtcccggaatgggcccaggggctcccccttaaggccgcaggattcgaggcggttcgataccgtaaggattaa

SEQ ID NO: 112706 - DNA, 312 bp, Enterobacter aerogenes
atggtttacattcgcgaggtcgccgtcgaaaagccgctcgtaaaagcggtcgaacggcgcggcggcctatgcctcaaatttacctcaccggggcggcgtgccgtccccgatcgcctggttctgctgcctggcggcgttgtgttttttgtcgagtgcaaagccccagggcaaaagcccaccgccgcgcagctgcgcgagcatgcccgactccgtgggctcggctttcgcgtagaggtacacgataacccggacccctccggtctgtttgccacccccgcccccctttataaatacaaggacccgattttatga

SEQ ID NO: 112707 - DNA, 222 bp, Enterobacter aerogenes
atgaagctctgcaccgttgaaggctgcaccggcaagcatgcagcaaaaggctactgccgcaaacattacgacgcgcaccgccgcgacacgccggagggggcggagcggctacgcgcggctaatcggcgctatttcagccgcccggaaattaaggaacgcgaacgcctgcgccatatcggctatcgagagcagcggaaacaggcggccgcgcatgaagtttaa

SEQ ID NO: 112708 - DNA, 1392 bp, Enterobacter aerogenes
atgaagtttaatccgcgcccttatcaaaccctgatcatcgatgcgatcacaactacgccccgcgtgaatgtgttcgcctcgatggggaccggcaaaacctgcgccaccttgtcggccatccatcaaatgtacttagaagggccggtgttggtgctggccccgctgcgcgtcgccgtgtccacctggccggacgaggcgcgcaagtgggaccatctggaggatttgaacgtcgtcgccatcaccggcacccccgcgcagcgccgccaggcgctcgccacccctgcggccgtgtacaccctgaattatgaaaatattccgtggttagtagccgagtgcggcaacgagtggcccttctctatgatcgtggccgacgagtcgacgcgccttaaatcctttcggctgaggggtggcagcaagcgcgcggcccagctggcgaaagtggcgcacgcaaagaccgcccggttcgttaacctcaccggcacacccgcccccaacgggctgatcgatttgtggggtcaatcctggttcatagacaagggccagcggctcggccgcacgttctccgcgttcgtctcgcgctggttcatgcagcagcgctacgggaactttttcaagctggagccgatgccccacgcgcaaaaggaaatacaaacagcgttgagcggcatcacgatcagcattgacgctcgcgactatttcgacatcaaagacccgatcgtgtcgccggtggccgtgcagctgccgccgaaggcccgaaaactttataagcaaatggaaaaggaaatgtttttcgagctgcgcggcctcgaagtcgaggcgatgaacgcggcaagcaaaacaatcaagtgtttgcagctggctagcggggcggtctatggcgaggacggcgaagcttgggccgaagtccacgacgagaaaatcaaagcgcttgagagcattgtcgaggaggcgaacggcgcgccggtgttggtggcttatcactggcggcatgatctggagcgcctgcgcaaagcgtttccgcaaggccgcgcgctggatgcagacccgcaaactctccgcgactggaacaaaggcaagatcccgctcttgttcgcgcaccctgcgagcgccgggcatggattgaacttgcaggacggcggaaacatcctggtctttttctccctctggtgggacctcgaacaacatcagcaaatcatcgagcgcataggccctacgcggcaagcgcaggccgggcacgaccgcccggtgttcatttactacctgatcgccggtggcaccgttgacgcgctcgcgctgcagcggctgcgaacaaaagccagcgtgcaggaaatcctactaaacgccatgaaacgcggcgcagctaatgacgatttatacaaggtgacggcatga

SEQ ID NO: 112709 - DNA, 360 bp, Enterobacter aerogenes
atgaaacaattcaacgcagaagaaacgcagatcctgatcgaaatgatgttcggtgatgcccggcaaggcacggcggcgcagctgcacgagcgctttatgagtgtttgcctgtctggcagcgagccccgcctgccgggcttcgagctgttccaactggaggaggagccggaagcaggcgacccggatgacttcgaacgcgaggagctgcgcgatcgccagctgcaggtctacgcgatgttgttcacctacggcatgatctggctactggaaaaaggcatcgtgatcgcgccggtaatcgagagccggggcgcatacaccttgaaccgcccggccttgttcgcggagtggcgcgccgtatga

SEQ ID NO: 112710 - DNA, 777 bp, Enterobacter aerogenes
atgaaataccaattacaaaaaggggattgcctcgaagtaatggagggcatccccgatgcctcaatcgatttaattctctgcgatctgccttatggcgttaccggcttaaagtgggattctataatccctctcgataaattatggcagcagtacgaccgcatcattaacggaaacggcgcgatcgtattatttggaacgcagccattcacaaccgcccttattaattcccgcccggataaatttaaatattgctggatatgggagaaaacaagaaaaggggatgtattcaacgccaaaaataaaccgatgcgcgcgcatgaggaaattttagtatttagcgcaggcaccacggcgaacaaaagcccgcgccggatgccgtactacccgcaggggctgacggactgcagcgtcaaacgggcaaacaaagagacggcgcgcgctttcttcgcaccccgccccagccacggcgcgacatacgagcaaaaacagaccggctacccgtcgagcgtgcttaagttcccgaacgaggccaaaacggtccacccgacacaaaagcccgtagcgttgcttgaatacctgatccgcacctatacgcaggaaggcgagacggtgctcgatcattgtatggggagcggctcgaccggcgtcgcctgcgtaaatacaaaacgtaatttcgtaggcattgaactagaagaaaaatattatttagcagcaaaagcgcgagtagctcacgccgttaacgatgatatttatcagccgttcgagggtgtcgcgtga

SEQ ID NO: 112711 - DNA, 213 bp, Enterobacter aerogenes
gtgaaactattaattaccggtgctttcctcttctgtttaatttcaagcggcgttaaattcgcaagttatgacgcgccgcagcgcgagcccgtccggcagctgcacaccgaaaaaaataaaactattcccgagccaacaaatagaggcggggctgagggcgaggatattttccccggctcaccctcccccgctgccgcgctcatatttggataa

SEQ ID NO: 112712 - DNA, 402 bp, Enterobacter aerogenes
atgttcagaaatagcaacgtaacaacccggcggaagctcccgaagctcaccgccgccgagcagcgcgcgctacgccgcccgaaaacggacgccgacctcattgaggatgcaaaagaggcgtacatgttcctaaccgatatgctgatcggggcgatgattgaaccgggccgcgaccccgagtcctggtgccgccgtgtcatgcgcgacgccctggcggccgggacggtgatccgcatctctacccgccaggtcctatggaacgcccagcgccaggaaagcgcctttgaatggtgccgccgccagtggcaaacgttcgatttgtgcaaggatgacggcgcagcccgccagggctgcaaagtctccattattgatttcgacgagccggtccggggggatttatga

SEQ ID NO: 112713 - DNA, 165 bp, Enterobacter aerogenes
atgatacccgatcgccctcctgccagcctcccgccgcacctcttcgcccagctcgttaacgatctacggcttgaggccgagctatacaccggcacacagcaattacgcgcccgccttgctcgcgccctatatcgctatgtcatcccggaagccccgaaaaaatga

SEQ ID NO: 112714 - DNA, 1053 bp, Enterobacter aerogenes
atgactgcttattacaacgagttcgacccttacgcggcgcaatggctgcgtaaccttatcagcgccgggcacatcgcgccgggcgttgtcgatcaacgttcaatcacggaagtaacccccgatgacctcaaaggctttaaacaagtgcatttctttgcaggcgttggcgtctggtcctacgccctccggcgtgcaggatggccggacgatcgccccgtctggaccggctcttgcccctgccagccattcagcgccgccgggcgacgtaaaggaaaagcagacgaccgccacctctggccggtgttctaccggctcgttaaagagtgccgccctgtcgcggtctttggtgagcaagttgctagcaatgacggcctcgactggctcgacaatgtactctttgacctggaaagtgcggactacgccgcagcagcggtcgatctatgcgctgcgggcgtcggcgcgccgcacatccggcagcgcctcttttgggtggccgacgccatcggcaacggatcacaaagggggctaccaggggggcaggatgcgcaacgggaagctgtcgaccgatcggctcgacgtagcggcgcagatcaccggctggccgacgccgatcgcgaacgatgcgaagttgagcgcgtacagcacctcgcgcggaaagaaggtgatcaagctgccgggagctgcgcagatcaccggctggctcactcccacggtgacgagtgtctccaatcgttccccggagggcgcggagaagagagccgcaaagcgcctagcgagtgggcggagttccttagcgccggggtgcctggccgagcaggtaacgctctacgtgtacccggaaccgccccaacaatcggagcatggggggctgtcgagtggctgctctgtaaagacaacaaataccggccagttaaacccggacttatcccgttggttgatggggctcccggaagaatgggacgcttgcgcgcctacggtaacgcgctagccgctcccgtcgctgaaactttcattagggcttatttggaggccgcgaacgatgaatattactaa

SEQ ID NO: 112715 - DNA, 261 bp, Enterobacter aerogenes
atgaatattactaaacccacctttacaatcaccggcgcggacgcgcccgtcgatatggtgaaccgcccgccacattaccaaagcgagagcgggatcgagtgcatcgaggccatcgaggcggcgctctccccggaggagttcaggggctacctgaaaggcaacgcgcttaaatacatttggcgcgagggcaagaaagggaaccgcgcgcaggatatcaacaaagcggtctggtatatggggcgcatgggtaaaacgctataa

SEQ ID NO: 112716 - DNA, 648 bp, Enterobacter aerogenes
atgaaaaagatagcttttttaggcggtaagggcggtataacaaaatcaagtcttgcgcgtgccgttacggttcgcctagttgaaatgaaacactcttgtaatgtcgtagactttgacgaggggcaagagacctttttcgagtgggcggagctgcggcagtccgccgggcggccgctaggctttgacgtaatcggcggcgcgaagctggccgacctgcgtgcggtaatcaaagagggggcgaccgactactgcgtcgtagatgcgggggcctataactcgaaggatattcccgcgatcgcccagctcgttgacctggttgtcgtgccgtcccggttctcccgcgacgatatgcggccagcggcgcgaaccattaacggcctgttagaaatgggcgtacctgcggagcgcttcgcggtggcgttcagcggtgcattagagagcgcggcggactaccgcagcgcgcaggcgtttttcgagggcgtaccctatcacgtattacccggctatatccccgctttaacgagctatagccaggcgcaggatcgagggctggcaatcatcgagaccccctacgcggggccttcatacacagcccggcaaatgattaacggaataattgaacgattgaacgaggtggcaaatggctag

SEQ ID NO: 112717 - DNA, 237 bp, Enterobacter aerogenes
atggctagaacattaaaaggcagtgcagcggacgttaaaccaactccaggagcggacgcgctcaagcgcccggagccgtccagctccgtgacgtggtcggtcgtcaccccggcaaaaactaaagccgcgttgatgcacatgaaagcgctcacccaccgcagccaaaaagacataatcgacgaggccctccggcagtggatcattgctaacggcggcgagcagtttctcgaagagtaa

SEQ ID NO: 112718 - DNA, 279 bp, Enterobacter aerogenes
atgaatctaaattacatcggctttactgaatcggtgatcaagattgtttttgaatcgctgcgcgatgcgcggcgctaccgggcggagggaaacgaggcggaggagctccgcgcgtttaccgccgccgatacggcgtacaccgtatgggtgcaggccgtagagcagatcgcgaagcccggccgcaatgaggacatgatcgccattgaccgtaaggcgatggcgggcgcgtttagggatttcgcgcacgattggcgggacgctatgcccgagggaaaatga

SEQ ID NO: 112719 - DNA, 249 bp, Enterobacter aerogenes
atggcggacgtgaaacaggcgtatataaccctaagcgaggaggccctgcagcatatccgcgtatgcttggtcggcgctatggtggctaacgcggaaggcaacgaggtcgagtataacgcctcgacgttcggaggctggaccctgtttcgctattggctggagtcagtcgcccctcacctccccttaaaagagtctgacgctttccggttggaaatggaaaacgccttcaaacaggccgagcgtgattaa

SEQ ID NO: 112720 - DNA, 843 bp, Enterobacter aerogenes
gtgacgcaaccgaaaaagcatgcgccaagatacgaggcaaagcagatcaaaaagctacccggctttttgcgtcgcctctatgcgcgcgcttcggcagatgtggacctgctcgtccgtaagctccaggatgcgtccctctcatggccggggcgaaagcaaaagctacgccgcccgcgtgcgcaggcgatggccgccgccgtcctcgccctgctccagaccgctaaccttgccaccggctacgcacatttaaccgtcaccgaggcggccagccggtgcggtctccgcacccgtagcaaggccggaaattactctaacagccgatttagccgcccattaaagcagctgtgcaggctggccggttttgtcgactacaaggccccgccgttcaacccggagcgccacgcctgcgatcctgcgctgatcgttgttctcgatgacctgtatttgttcctcggcgcgaagcctgacgagctcaagcgcgagcaagagaaggccgtccgccgcctgctggccgagcgtaagcgcaaagcggaggaggggcgcggggtgccggtacgggaaatcgagctgcccgccgatccagtagaggccgcttttaagctccgggtcgagcagtgggcgaagtacaccaaaaccaccgccgaacgtgcggcgaagaaaataaaccgcatgcgtaaagagcacgccgagcagctgcaccggcgtagcaatccgctatcctccatgctgcgcgcgctggccgccgctatgcgtccgcgtcgtagtcagaaggcgcaagccgccgcctataccgaacgcctgcaggcagcccgccagggcttgctatttgaccccccgatatag

SEQ ID NO: 112721 - DNA, 231 bp, Enterobacter aerogenes
atgatccagattttcatattgtcggatctatctttgatcgtgtatgttagtccgcagaaacgaaaaaaccgccttgcagggcggttttattcggaaaaatttttaagctgtggcggcttaaagaaccaacaaacacctcgaaaggggcggcccttttacgttctcctgccggggggcggggtgacgcatgcgtctaagatatgcaaaaccgatcggctttgcaatacctga

SEQ ID NO: 112722 - DNA, 378 bp, Enterobacter aerogenes
atgaaaaaaatcaaatacatcgccgcgctttccgccctgcttttcgccggtggcgcagcagctgcaggcgcgcccgcaaagagcatgcaagagatcatcgagttcgcatgcgccccgaaggcggcgcaggatgcggggcgggcggttcccgcagcggagaaggatctccggcaaagacgatgcgaggcgttttttagccttgaggtcaaaagggcgtatacctccggcgatcgtgatgggcgctgcatagcggcgcgggataccgcagcggatagccccaactatcgggagtgggccctcaaaacgtgcgaaggctacgacaacgacccggcccgacaagagatccgggagtacggcaaagcgccgctgcataaatag

SEQ ID NO: 112723 - DNA, 1224 bp, Enterobacter aerogenes
atggccacaattagcgatcagcttgcggcagacattcacaacgccttttcgcggtactacacggacctagcaaatcaggatcaaattttcttcggtgccggtaacgtcaccattaccaagcaggacggcaccaccgcgacggtggcgtcgtgggccaaagtgcaagccgacaacgcggcggccacggcaagcactaacgccaccgtctcggcggtggctggccgagtcgctacactggagacgaacgcggcgcgcaaggataccgcgaacaccttcgcgcaggcgcagacgtttaccaagatcgcgacgtttaacgccggtatcacggcggtcggcgagcccatcacggtaacgaagtccccaggctcgacgaactggtcccggctggaattcgggagcattgagctctcccatgctacgccgtttattgatttccattacggcggcagcacggcggattttacgcatcgaatcatcgccagcggtgcggaaacgctcgaatgttcatcacatttcaagatcgaccgtaaccttgtggttaacggcaccgcccagctagacggggcggtccattctttttcaaccttcacgacgcggcagcaagacggatttatcggggagccatacaccgatccgggcgggaataccggcgacattgtaatcgcgccaatgtggcaaagccgctttcctacgcgagggacggacacgaacgggcgcgcgatgtgcagtctttggttcgaggagcacgtcggcaacaaccaccgggcggtcgtgcgggtgaaaggcttcggcgcggcggttcaatactggcacatgcgcaacgacgggcagatctggaacgtctcacgcggggatgttgcctgggcggcaacatcggatctcaagctaaaaaccgccatcgagcacaccgacggcgcggactccctggcgaacgtcaaggcactggagctcgtgaaatttgtctacaaagacgacgagcaggcacggcagcgccggggcgttatcgcccagcaggcgcagctcgtcgatccgtgttacgtcaaagtgagcaagggctcgtattcggtgccagcagcgaacggagagccggagcgcgtcgagacggtagaaaagctcgtactcgatacaaacccgcttttaatggacaccctcagcgcggttaaataccttgccggtaaggtggagcagctggaagccgagatcgccgcccttaaggccgcgtga

SEQ ID NO: 112724 - DNA, 8481 bp, Enterobacter aerogenes
atggcaacgatcaagggaagcaaaggcggcagcagcaacccgcgcacgccgaaagaggccgacgactcgctgcactcggtcgcgaccgctaaaatcctcctcgcgctgggcgagggtgagtgcgtcaatgaaatctcggataaggacatctacctcgacggcaccccgatccgcagccaggacgggaccctcaactttgagggcgtaacgtgggaataccgccccggcacgcaggcgcaggagtacatcgccggtcttccgtccgttgaaaatgaaatcaacgtcaacaccgaattaaaacacggcaccgcctggactcgcgcgatctctaatacgtcgctttcggccgtgcgcgtgcgcttcggcgtcccggcattgttggagcagaaagataacggcgacaccgtaggctatcgcgtagagtaccggatcgagctctccaccgacggcggcgcatatcagacggtcctcaatggcgcttttgacggcaagacgaccaccctgtacgaacgttcacaccgtatcgacttaccgacggcgcgcaccggctggcaaattcgcgttacccgcttaaccgagaacagcccgaccgcccgaattcagagcacgacgaacatcgaggccattgtcgaggtcatcgatgcaaagctgcgctacccgaacaccgaactgcttttcgttacctttaacgcaaagctattccagaacatcccggcgatctcggtcctcaagaaagcccgaattatccgcatcccgtccaactacgatccgaacctgcgcgagtacgtcggcgcatgggatgggtcatttaaatggggctattccaacaacccggcgtgggtgttttatgacattctgctaaacccgcgttttgcgttcggtgatcgcctcgatgcgtcgcaggtggataaatgggagctctaccggattgcgcagtattgcgatcagcccgtcccggacgggtacggcggcaccggcaccgagccgcgcttcctgtgcgatgtgaacatccaggagcaggccgaggcgtttacgctattgcgtgacctcgctgccattttccgaggtatgacatattgggccaacaaccaagcggtcgccttgtccgatatgccgcgcgatatgtcctacgtgtacacccgcgcgaatgtcattgacggcaaattcagctacacgagcggcagcgaaaaagaccgctactcaaccgcccttgttaacttctcgaacccggagaaccactacaacgacgagccggagccggtatacgagcaggacctcgtaaaacgctacggcgtgcggcagctctctatcactgcgatcggctgtactcgccggacggaagcgaaccggcgcggccgctgggccctgctgacgaatgccaaagaccggaccgtgacattctccaccggttacgagggcatgatcccgctaccgggctatattatcggcgttgcggacccgttgctcgctggccgtgtgaacggcggccgcatttctgcggttaatggccgtgtactcaccctcgatcgtgaggctagcgtcgctgccggtgatcgccttgtggttaacctgccgaccggagtatccgagggccgcaccgtggcgagcgtcgacggcgcagccgtcaccctggcgacagcgttctcaaccgcgccggaagtgggcgcagtgtggaccgtggacgcggtagacgttgcgatccagcagtaccgcgtaacccgtatcgcggataatgacaacggcacattttcgattacagcggtttaccacaacccggaaaaatacgctgcgatcgatacaggcgcgcgcattgacgagcgcccgatctccgcactgccaaccggcacgcaaaaagccccggagcgtgtcgacgtcacaagctacagctacgtagagcagggcctgagcgtgcagaacatgcgcgccacctgggcacccgccgccggtgcggtggcttatgagtgtgaatggcgtcgagacaataacgattgggtgagcgctccgcgcaccggcagcacctcttttgaggttccgggtatctactccgggcgctacatcgtgcgcgtgcgcgcggttagtgtcgacggggtggcgtcgcagtggacaacctccgacgaggtgcgcttgaccggcaaaatcggcgagcccctcgcgccggtgaatttccgcacctccccgatcgtgtggggtgtgcaacttgattgggaattccccgattacgcagaggacaccctgcacaccgagatccagtacgccaaagatggcgcaggcgtcggcgcgcagctgctcacctcggccgcttatccggtgcgcacgtatcagcagctcggcctacagccgaccgcgctgttttactaccgtgcgcgccttgtcgaccgcctcggcaacctctcaccgtggaccgagtggacacgcggcgagccgaacgacaacgccgccgactacctcgtcgatctggacaaccaaatcaaggagaccgacacctgggcggagcttgagaagggcgtctcggatctgaccgatgacgtcgccagcgcgcaggaagccatcgacgccgccaacgcagccgccgcagagaacgcgcaggccatcgccgatcaggctaacgcgattgcaggcaataccgccgccattgcagacaacaccgacgccatcaagcaggaagcggcagcgcgcagcgccgccgacagcgccgaggctgtggcgcgtgccgaggctgtggcgggggaagccaaccagcgcgcgaccgagattgcagccgcagcgaaaaaggccgccgacgagctgctcgtcgagacgaaagcccgcgaggcggacatcgcaacaaccaacctcacgatccagcatgttaacgactcgctagcgcagcagattagccaggtagcggcgggcactggcgagcagtttgatagcctgcggatctggtacttcgacgacgacaacgaagggtggaccgaggacgacgcggcgctcgtgcctatgcaaatcacggacgacggctggctcaagtcggcgaactcgtccaacagctgcagatcgccgaactggatttcgattaatgctctttcttaccgcttcctcaaactccgcattaagaaggtcggctcgccgagctgggcgggtaaattgtggtggattggtgagacggaaaccggctggaccgctgggcgctcgatggcgctcgacgagccggagtacaacgagaacaacgtcggcacgctcaccatttcggatattgaatggcgtgcttccgaatcggtgcgacgcttgcgcctggatctcgccaccggtgccaacgctgacaactatttcctgatcgactggatcgccgtaggccgcccaactccgggggccagtaccgccgccctgcaggacgagagcgtcgcgcgcacctccggtgactccgcagaggcggccgcgcgtcagacactcgccgcgcagctgcgcggcgggtacgaaggcaccgacgcggcccaggtatcgagcggccttatctactctgagcggcaagcccgcgtaacggcagagcaggccctcgcgtccgatgtgaccgcgctggaaacggaattcaacgacaacaaagccagcgtgcagcagtctctcgacaccctgacggacgcgcagaactcgcaggccaacgcgatcaccggccttgagacgagcgtcgccaatatcaggatcggcgctgaaaactggcttttgagctccgaccgcacggcaaacccggtcgttatgcgctcaccggcgaccaacttcagcagctacgattttgcgccgctggaatcgctgcgcggtgttgtcgtcgagcaggccacaccgatcacgctctctatgtggtttatgccgcctgatgattacgaaatgcgccagccgtttaccagcgttgtgatcggtgctgcggcggagaccggcgactcctgggcggtgcgcgtctacccgtatcacggcacgatcaccaaaacgccgaccgggatgtcccgctttacggggaccatcacctttccggcgggcggggtgctgtttaaaaacccgcagcggatgcgcattatctgcgaggacaaaacccgccttaccggctgtacgttgtaccgtgtccagctggaagagggcactaggggcaccgattggggcccggcggccgaggaggtgcagggcggcatcaacaccgccaccgcgaacgcctcggcactcacggcgctaacgtcccgcgttactactgcagagggggccatcacctcgcaaagtagtaacgtaacggagctacagaacaacatcaccgccggggcgaacctggttaaaaaccccggcatgctggcaggcggccagaactggacaaaggccgggattgagacgatcgacggctaccaggcggtctacgctacagcggcatatcacccggcaagcggtaaatttaacgtaaccgccggggacgtgctcgacttcgccgcatcggtgaaagtgggtaccgccgggtcctacgctatcggcctgcgcttcgatggtccgaacgtgtccaacgtggtgcgtaactccacggcgcatacgttcgaggccggggaggtgttccgcttcgaaatgtacggcgtaaccgtcccggatggctgcacgaccgcgtatatccagtccagcaaccgcaccagcggtcagaaagtcagcttgtttaacccggttgttacctgccgcgacgcggccaccatggcgaacgccaaggcggtcgaatcgctggactcacgcgtcaccctggcggagggcaccctcaccagccagggcagcgcggtcacgcagctggagaacaacatccgggggatcgtcgtcggcgctgataacctcatgccgaacacggacacgcttaccggctatccgagcgtacacgcgaccgaaacgtacaaaggcgcaaaggttatctacctcacccgtgcggcgaactcttccagctactcgcagatctccgatcgcctttacgatgttacggggtataccgatttggtctactcgttctatgcacgcggcggcgtcgacgggcaaaaggttacagcctttttctacagcccaacgaacaccacccgcgcggagacgaatcaagggcagatcgttacctggagcggcaacggtggcgacggtaaaatcacatgggagttaacaaccagctggcaacgctattgggtacgctggacgcaaaaagaggttatcgggacgaaacgcctgatcatggctcgccttgatcaggcatccacggagctacaagagctttatttgtgcctgccgcagctggagccggggaccgtggcgtcgaactggcacccaagcagcgcggacaccgccaaggcgatcgaagccaacgcgtcagcgctgaccaccctgacgacgaaggtcgagcagcaggggagcaacatcacaagccaggggagtagcatcacccagctacaaaacgacgtagcactcgcgaaagcggacgccgacgccgcgacccggctggcgggtaacttgttggtaaacccgtcattcgagcgtaacttcgaggggtacaccggcgcagcggcgtttatgtcagtaattgacgcgcaatcaccgcactacggtaaaaaaattctctcctgtggcgcaggatctggcaccctgacccaaaacctggacgttacccaggggcgcacctaccggatcggggtgttccttcgccgcaacactgaggcggtaatcgccaacgccagcaataacaagttacgcattggtaacgccgctagcggcgcgctgcttagagacgtaccgatcaccctagcggcgacgcccaccggcagcagctggggcgagctctccgggatctggaaagcgacgctaaccggcaaaattagcgcggcgatttgctcctcgctttcggcgggtaatcaatactttgatgatttttattttattgacgtaaccgacgaaatcgagatttcggccaactcttcggcgctcacgtcgctaacgtcccgcgttgcggcgaccgaggcggggctcgtcagccaggggagcagcatcaccaagctagaaaacgggctgcaggcggcgaacggcgagatcgccaaaaaggcgaatcaatccgcgctcaccgcgctggagagcaccgtcacccagcagggcaacacgttaacgagccaggggagcagcatcacctcgctgagtagctcgctaaacacgatgcgctatatgggctctaacccctgggtcgatggctctttcgagtcatacagcgacggccagcagatcggcggcagcagcgcaacggcaagcgcgctttatgcgcattccggcacgaagtcgctacgcctgcggcgtgccgccggtgatggcggcaacagcgacaagcagctcggcccggtgattgcagtccgggaaaacgcggtttaccgtttcgaattctgggccatgatggcaggcgaggaggcaccgccgaacggctggatcactatcgtagggctccaggccactaacgcggcgggcgttaaccaatggctaaccgctagcgcggtgagcgaaagcaccctcggcggccgtgataagtgggtcaagttcaccggcaaatgtacgttaaccggcggcaaaactcgcgccgtgctgtggatctccacccgaggcaccaacggccccggcacgccaggctatacgctgtttattgatgacctcgtaattactgatatcaccgacgccgccgccgcgcagggcgcagcagacgcgaacgcctcggcgctcacgtcgctaacgtctcgcgttacggatgcggagggcgagatcagcagccagagccaggcgcttacgtcgcttaaaaacgagctgacgctcggcaacttgattgccaacgggccgatctcgtccagcgtagaggcgtgggtaaactccggcagcggttccggcttcaacttcaacgccgccgatccggggcttatcacgacgaactcgtcgatccgcgttgcgaacgaaacccgcatcccggtagagccggggctcaaggtgacgattacgcttgatttgcgcgtgaccgaggtgctcacaacgtactcggtcgacacgatcgggctagttccggcgctctcggcgaccccgcaatggatggcctcggctacgaactacctttcggagctgaccaccacctggcaaacaaaaacatttgttgtcacggtgccgacgacgttcaccggtaattacgctttcctgcgcatcgcgtgcgggggctggacgccgggcagctcgcggctattggtgcgtaacgtgcaggtgtacaccgccaccggcctaatcaccaaggcggacacgtccgcgctcacggcgctaacgtcccgcgttgaaacggtagaggggaaagttacctcgcaggccagccagttaacgaccctaacttcgcgcgtcgatgacgcggaggcggcgtataccaacctcaacgaaacggtcgcagctagcgggctggcgatggcaaacggctttcagcagctgcgcacgcagatcggcgacaacagcgccgcgattactcagattaacaaggtagtcacggatctggagagctcgacggcggagcagattagccaggtaaacgccaccgtcggcgatatgtcggcaacggtgcaggagtcggctagcgctgtggcggacttgaacgggaaactatcggcgcaatggggcgtaaaagtccagacggataacaacggcgtttcgagcgtcgcgggcattcagttagggattaacgcctccggctcgtcggagttcctggtcaatgccgacacgttcggggtgtacaacaacgctgccagcggcggcaaggtgttagccttcgccatttctggcgcgaccgcgtacctccgctcggcgatgattcaggacgcctcgatcaccaacgcgaaaatcgcaaacgccactattagcactgcaaaattcacgcagtggctacagtccgacaactttgtctccgggaaagctggcgcgggctggggcatcgattgccgtaaaggcaacatggaactaaacaatgttgtcgtgcgcgggcacgtcgaggcaagtagcggctcgtttagcggtacggtttacgcgaacgcaggcacgtttaacaacgtgacaatcgcggaaaactgcaacgtgaggggcactatctacgccgagcgcatcgtcggggatgtgacgaaatcggtcatggtggctaacggccagcgcgtcgaaattggggcgcagccgtttaacaggatcatttgtattccgacgctaaccgcatcaatccgaccgaacaactccgctcacacgtcgaccgccggtgcctcgttgcaatgtatcagcaacggcggccaaagcgggaccctgagcgttgcggtgaacgaccacgcgttgctttcgcaaaccacctcgatcgcatggtcgttgcccgcaggggctaacgcggcgttgatttactcgacgtacaactccgcgaacactggttcggtcccggccgcttgcctggctcttatcatgaaggcataa

SEQ ID NO: 112725 - DNA, 588 bp, Enterobacter aerogenes
atgatgaacgaatataaaaccgtgcggctgtatggccgcctcggcgcgttgttcgggcgcgttcaccggctcgtaattgactcaccggcggaggctatccgggcgctttgcgctaccgtgccgggctttgaaatgtacctgcagacggcgaaccagcgcgggatgcgtttcaccgtttttaaggggcgggagaacgtcagccgcgacgagctggcgcacggctgcggcggctcggaaatccgcatcgccccggtccttgctggtagtaagcgcggcggcatgtttcaaatgattttaggtgcagtcctgatcgtggcgtcgatctggatgccgggcctgagtattgccgctagtaacctgatgttttccgccggtgcggctatgtcgatcggcggcgtggtgcaaatgctcgccccgcaaatgcccggccttgcctcgcgacaggatgccgataacaagccctcttacgcgttcggcggccccgtcaacacgaccgcgatggggaacccggttccggtgggttacggattgcgagagcgcggcggcgcgattgttagcgccggaatctatacggacgattaccgataa

SEQ ID NO: 112726 - DNA, 708 bp, Enterobacter aerogenes
atgaacctaacaaaaggaaccatcgaggccattttcaagcaaggccgggcggagtacccgcgcgaggcttgcggcctcgttgtgatggccgggcgtaagcagctctatatcgcctgcgctaacgttgcggctaacccgctggagcacttcgagatcgcaccgcaggactacgccgcagccgaggagcggggcatcgtgaccgcctgcgtgcatacccattgcggcgacggggccaccacgcagcccagcgccgccgacattgccggatgcaatgagagcgggcttacgtgggtgatcgcttcgctgcccgagggcgacgtccgggagctgcagccggaggagccgccgctcgttgggcgggcattcgcgctcggctcttatgattgctggggcctgatcatggcgtggcataagcaacaggggatcgagctctacgactggcgcaagccgtatgcgtggtgggagcagggcgagaacctctacgccgagaactggtacggcgaaggctttcgcgaagtcgacgagccgaggccgggcgatatggtcatgatgcaagtctccgccgatgtcgtgaaccacggcgggatcttgctcgaaaacaacatgctgttacatcacctttacggccagctctcggccgtcaccccttacggcggctactggcgcgaccgcacctttaagatcgtgcgacataaggacctcccatga

SEQ ID NO: 112727 - DNA, 732 bp, Enterobacter aerogenes
atgattacaagtgatctgcagaaactggagccgggcgcaaaggtccggctttttatcgtcgatggatcggcgttcggtgccgagccgttgtacttccacccttacgccctcgcgcacaccccggaagaaatcgccgccgccggtggcgacgagagcaagctgcaggccaaaccgctgttttttggcggccaggagtttagcgcctggccttgccagatcaccggtcttgagtcgagcagcgacggggccgccgctgagccggtactctcggtcggcaatatttacggctctattacggcgctgtgccttcgcttcgaggatatggcgcaagcgaaagttaccattatcgacactttcgcccgctacctcgacgacggagccaccccggacaccgcgcaggcgtaccgccaaacctggtatatcgacagcaaaaccggggaggacggcgaggtcgtcggcttcaaactctccagcccgatcgacttgcagggacgccgagcgccaacccgtcagatcaccgccctttgcacctgggcggtgcgcggccagtaccgcagcggcgacggctgcggctacaccgggaccgtgtacctaaacctcaaaggcgagcccgtcagcgatcccgcgctggataagtgttccgggtgcctcgtcgactgtaaaaaacgttttggtgagttcgcgccgctggacttcggcggcttccctggcgctgcgctgctgcggaggtag

SEQ ID NO: 112728 - DNA, 333 bp, Enterobacter aerogenes
atggaaactttcgattggtgcgtccgggccaacgcctcggcccaggtagagcaccgcatccgctcggcgaagttcggcgacggctacgcgcaggtctcccccgatggcctcaacgaacggggcgaggcctgggacgtatctctcaccgttaacgagaacgtagcccgcgaggtgcgccggttcctggacaggcacaaaggcgcgcaggcgttcacatggaccccgccgttgggcgtggcgtccctgtggcgttgccaaaagtaccagatcaccgccctgggcggtaagtggtacaccctctcggccaacttcgaacaggcgttcgcaccatga

SEQ ID NO: 112729 - DNA, 3177 bp, Enterobacter aerogenes
atggcatctttacgcgagctgatcatcaaaatctcggcgaattcgcagagcttccagactgagatcgcgcgcgcgtcccgcatgggcgcggactattacaaaaccatgcagaacgggggccgagctgccaccgctgcaagccgtgagagtcaaagggcattacaggcgcttaacgggcaaatgaccgacgtgctcacgtcggcaaaggctctcaccggcgtaatggctggcgcgttcgcggcgtccaacctggtccagatggcggaccgttacgcgacgctatccgctcaaatcaagttagcgacaacggactcgctagacttcgccaaagcgcagaaaggcttgatggatatcagccagcgcaccggctccgccctggcggacaactcggcgctgtttagccgtgcgtcgtcgtccttgcgagagtggggctacggcaccgaggacattttaaaacttactgacacgctcgcgaatggccttgcagtgtcgggcgctaccgctgaggaaacctcttctctgatcgtgcagctctcgcaggcgctggggcgcggtgtgttgcgcggccaagattttaattccgtggctcaatcaggcggccgcatcatgaaagcccttgctgatgggctcggcgttgcgcagaaagagctaaaaggcatggccgatgccgggcagctgacgaccgacaagatcgtcccggcgctgattagccagctggaaacgctcaaggaagagtacaaccagatccctacgagcgttagccaggcaacaacccgcgtacaaaatgctttgatggaatgggtcggcggcactaaccaggccaccggcgcgacctccgcgctggccggtgtgctctccggggcggcgaacaacatcgacacgctcgccaccggcgcaatggcgttggtcggcgtcgggctggcgcgttacctcggcaacaccgcgaccgaggccgtgcgctcggctgcagggctggcgacggccgttaaaggcgaggtcgccgtcgctgcggcgcaggtgcgcggggcctctatcgcgcgccaacgcgccacggctgcagtttaccgcgcgcagcaggccgtaagggcggccaccacggccgacgcgcaagccgccgccgaggttcgcctcgcggcagcccagcaggcggcagcgcgtgccactgaagcgcgagcagcggcgcaggcgcgcttaaacgggctcacctcgatcagctcccggctaatgaccggcgcgctgggccttgttgggggcatccctgggctactgatgatcgccgccggtgcctggtacgcggtacaccagaaaaccgaggcggcgcggcaatcggcgctcgactacatcaaaacgctcgacgagatcaaacccaagattaaaagcatggggatctctgagtcagccgagaccgaaacgaaaatcggcgcaggggtgcaggctctcaagcagcagtacgacgcccagctcggggtcgtgcaagactatgcgcggcgagtcgctaccctggaggaggccgccgctagcgcacaatatacggcctacggcttacgcgaggacatcgagaggggccttgcacgcgcgcggcgcgagctcgtcatcgagagtgacaagctagcccagaagcaaaaagaagttaccgacgcgcagaacgtaggcgcgcaagcggcagatcgtaccgcgaccgcgatggccgaggccgccggggcggtgggctcgctggcgcagcaatacgaaatcctcaaccgcgtaacccgtcaaaccaccttcccggctccgcctaagttcggcggcatggtccttacagggctgaacaccgaacaacagaacgctatggacaaactcgcgcgtgagaaggtgctcgccaccctcaagggcgcagagaaggccaagcagcaggcgatctacgcagcggatgacctcggcctccctgctggcttccgcgagcagtacatcgccgggagcgtgcaggcgtacaacgacaacgaggcgacgaactacaaggccccgaaaaccccgaaagggccgaaaacggaagggcaaaaggccgaggatcagtacacccgcttaatcaagcaacagcgcgaacaaatcgcgctggcgggcacctccggcgaactggcgcgcatgaagtaccagatcgccgagggggagctgcagacgctcaccgcccaacaaaagcaggtgctcttaaaaaatgccgcgctgatcgatcagaagcggacagcggagcagctggtcaacctggaaaaccaactcgccgacagcaacgccaacgcgcgagcggccaatgacgcgcaggcgtcgggctggggcctcggctcccgcgttcgcgagcgtgcgcaggagctggccgacatcaaacgcgagtttgaagaacgcgagcgcgacttgctgcgccagcgcaccgccggggatatcaccgaggagcagtacacggcctcgctttcgctttcccgccggtatcaagccgagcgcgagaaggaccaaaaggcgcattacaaacggctagacgccatgcgcgacgattgggcggccggtgcttcggagggcctcgctaattgggtggatacggccagcgactacacgacgcaggtcgccgaaaccaccgagaacgcgatcggcggctttgtcgacaccctagccgacgccctgaacgataacgaggccagctggaaagattggtcaatcagcgttctaaaaagcattgaaaaggtcctgatcaatgcggcgatcgtcaactccctgaaatccctttcgagctccggcggggcgttcggctcgttcctctccgccatcgtcccgaacgccgacggcggcgtttaccgctccgccaacctgagcgcctatagcggccagatcgtcagctcgccgaccctgtttgccttcgccaatggcgcggggctgatgggtgaggccgggccagaagcgatcatgccgctgacgcgagcagcaaacggcaaattgggcgttgcatcggtaggaggcggcgggggcggccattacgagacgaacatcgaggtccacgtcgaccgcagcggcaacaccgatgcgcagacgggcggcaacgctgacgccgtagggcaggctttcgcgcagaccgttagccaaagcgtgcaggacgggatcaggcgtgaactgagacccggcggcatgatttgggccgcgcagcaatcgcgataa

SEQ ID NO: 112730 - DNA, 294 bp, Enterobacter aerogenes
atgcgctttttgatgtcgcttgcgctccgcatgggccgaacccttgcggagctgcgcgcgactatgagcgcgggcgagctgcagctgtgggccgagtacgaccggacctctccgctttctgatgtgcgcggcgactttcgcacggcgcagatcgtggcggccgtctacggcgcgcagggcgtaaaagtccccctgagcgacgcgctcctccggtgggacgaagaagataaaccgcagaaaagcggcgacccattcgcagggctcgaagccgctctcgcgaaggctgcacggtaa

SEQ ID NO: 112731 - DNA, 396 bp, Enterobacter aerogenes
atggcgaacatcaaaaagtcactccgcgatcgtgcgctttcgccgttgtccggctttcgccacgtatcgaccgaggtgccggagtgggacggcgtgaccgtcctgctgcgtgaaccgtcggccggtgcctggctccgctggcaggaaatcatcaagccgagcgatctggagcccgtagacggcgacgccgatctcgaaatggccgagcgcgtaaagcgcagcctacgcgcgaacgtcacgctgtttattgatgtgctttgcgacaccgacgagaccccggtctttacggtggaggacgcggaggccatcgaggctatcttcggcccggtacataaccgcctcttaaagcaagcgctcgatctgatcaactcccccgatgacgcgaaaaaaaagtaa

SEQ ID NO: 112732 - DNA, 453 bp, Enterobacter aerogenes
atgaccgcaatgtatgaaaagtcccaaaacacggagatctccatcacctccaccgaaaccaccccggcagccgttgcgaccgcgcagtttttaaagctggagtgcgcgatcaaagaggtatctttcaccggcggccaaaaaactgatatcgacgtgaccaccctgtgcagcaccgaacaggaaaacgttaacggcctcccgtccccgtccgagatctccctctccggtaacttttatcgcggcgaagcgcaggacgtactacgcgcggcctatgacaacgataagacctacggcttcaaagtggttttcccgtccggcaatggcttctcgttcctggccgaggttcgccagcatacgtggagcgctgctactaacggcgttgtcgctgcgaccttctcgctgcgcctgaaaggtaagccggagtatatcaacgcggccaccggcgaggagtaa

SEQ ID NO: 112733 - DNA, 348 bp, Enterobacter aerogenes
atgactgaggccgacgtctacacccttttagcggatttggccgacggccagatcttcccctatgttgtccccctcgacaacaaaggccgcccggccatccccccgccctgggcggtgttctcttttgtctctcaagtctccgccgacgtgttcgccggtgaatctgagacggcaaaccggctacaaatcgacgtttacgcgcgcacgctggcggaggcgcgggagatccgcaccgctgcagccgtcgcgcttgcacctttagcccctggcgatttcatgcgcctgcagggctacgacagcgaaacggcgctctaccgcgccacccttgaggtcttgctcgtcgactaa

SEQ ID NO: 112734 - DNA, 450 bp, Enterobacter aerogenes
atgcttgaccttaccctcgatttttcgggcttaaacgatctcgccaaagagctggacgtactgagcagagccgaaaacaacaaagtattacgagacgctacgcgcgccggtgctgatgtgctagcggcggccgtgggcgaccgcgcgccggtggacaccggcaagttaaaaaataacatcgtcgtcgttacccagcgcggccgcaaacgcggggaaatcgcttccggggtacatattcgcggcgtgaacccgcgaacgggaaacagcgacaacaaaatgaaggccagtaacccccgcaacgcgttttattggcgctttgtggagctgggcaccgttcgacagcccgccgcgccattcctgcgcccggcgttcgatgaacaccaagaggaggccgtcgccgcagcactggcgcggatgaactccgcgatcgatgaggtgctcgctaaatga

SEQ ID NO: 112735 - DNA, 327 bp, Enterobacter aerogenes
atgcgggaccgcgtcatcattcagaacaacaccgccagccgcgacgcgttcggccagccggtaacaggctgggcggatgccgccgaggtgtgggccacggtgagcgccgtctcttcgcgcgaacgcatggccgccggtgccgaaaccgccgaaacagagatccgagtgtgggtgcgttaccgcaacgacgttacgagcgcgagccgcttctatgtgctcaccggtgcttttgccggtgaatacctggaggtcaccgcgccgccggtgccggacgccaagcgaacccgcatcgaggtcccatgcgcggtaggggtgaaacatgcttga

SEQ ID NO: 112736 - DNA, 315 bp, Enterobacter aerogenes
atgatcccgagcctggacgagattaaggcgcagtgtcgactagatgacaccggcgaggattcactcctcacgatgtatgcagaggccgccagagaacgcgctgaaaactatctaaaccgccgtttatacgacgaagaagtcccggaagaggacgaaaacggcctcgtgatcactcccgccatcaaattagcgttgctcctgataatcggccattggtacgagaaccgcgaaggctctttgatcgggggtatgagcgaaatcccgttcggatttaccggattacttcgcgactatcgacgggggccgggaacatga

SEQ ID NO: 112737 - DNA, 198 bp, Enterobacter aerogenes
atgcacacgatcaccaaaaaaatcaaatggtccccggacggcttacgcgtgcaaaccgtagagccgggcgaatacgccacccttccggcccgcttcctcgaaatcgcggcgatgtatggcgctatcgagacgaaaccggccaaaaaaccggcctcaaaggggaaaaaaaccaatgatcccgagcctggacgagattaa

SEQ ID NO: 112738 - DNA, 1203 bp, Enterobacter aerogenes
atggccgtagaactgaagcaggtcgaggaagtcgcgcaggagcttaacgctcgtttcaccgaatttaaggccgcgaacgatgcgcgcttcgcagctgcagagaccgaaaaattgaaattagtcggccaggtcgacaccctgaacggcaaactatccgatctggataacctgaaatccgagcttgagaaagagctcaaagcggccaagcgtccgcagggcggtttaagcaaagaagccgccgaccacaaaagcgcgtttattaacttcatgcgcaaaggcgacgaaaacggcctgcgcgatctggagcaaaaagcgttgcagaccggcgttgatgccgatggcggctacgcggtgccggaagatctggaccgctccctgcttaacatgctgaaagacgcaaacgttatgcgccaggtgtgcaacaccatcaccctgagcacgccggattatcgccgcgtggtgaacctgaacggcaccaactccggctgggtcggcgaaaccgacgcgcgcccgaacactgatacctccaaactcacccagatccgcccgttcatgggtgaaatctacggctacccggaagcaacgcagactatgctcgatgacgcatttttcaacgtcgagcagtggatgcagtccgagctcgccgacgagttcgcggagcaggaagaaatcgcctttaccctgggcgatggcgtgaacaagccgaaaggcttcatggcgtatgaaaccaccgcagaaagcgacaagacccgcgcgttcggcaagctgcagcacattttaagcggctccgctggcgttgatggcgatgcgctgctgagtctgatctatggcacccgtaaggtccaccgcaacggcgctacgttcatgatgaacaacaattcgctgtttgctatccgcctgctgaaagatgccgagggaaattatctgtggcgtccgggcctggagttgggccagccgtcctccctgctgggctacagcatcgtagagaacgagcaaatgccggatatcgcggcggatgccaacgcgatcgcgttcggtaacttcaaacgcggctacaccatcgtagatcgcatcgggacccgcgtcctgcgcgacccgtacactcataagccgtttgtgggcttctacaccactaaacgagtgggcggcatgctggtcgatagccaggcgatcaagctgctgaaaatcggcgcggctgcgtaa

SEQ ID NO: 112739 - DNA, 651 bp, Enterobacter aerogenes
atgattttgacaaagcagcggctcgacgtaccgctccagattaaggccgtgagcgattccggggagtttgagggctacggctcggtcttcggcgtcaaagactcttacagtgacatcgtaacggcgggggcgttctctaaatcgctcgacgcctggggccagaaaggcggcttgcctgcgctgctgtggcagcacaagcaggacgagccgatcggcgtttacaccgagatgcgggaggacgcaaacggcctctttgttaaagggcgtctacttatcgacgacgacccactcgccaaacgagcacatgcgcatatgaaggccggatcattatccggcctttctattgggtattccctcaaggactacgaatacgacaaagcgaaagacgcttttatgttgaaggagatcgacttgtgggaagtctccctcgttacgttcccggccaatgacgaggcccggatcagcaacgtgaaatccgctatcgcggccggtgaactaccgcgcccgcgtgagtttgaaagagtcctgcgcgacgccggactatcccgaacccaggcaaaagcattcatggccgagggttatagcgccctgaatccgcgagacgcggacgctgaggcagctttaaacgtactgaaatcaatcacattttaa

SEQ ID NO: 112740 - DNA, 1242 bp, Enterobacter aerogenes
atgttcccttttaacttattcaaccgtaaagcgcggcgggttacttctgcgcccgagctgcaggagctgatcggcgcatcttacgacagctacaccggcaagcgagtaaacggtgagcaggctatgcgcatggccgccgttttcggctgcgtgcgcgtgctcgccgagtccgtcggcatgctgccttgccgtctctactcggagacggagaagggcagcacaccggcaacgcgcgagcgcctgcacaagctgctatacaccgcgccaaatgactacatgacaccgcaggaatttttcgagctcgtcgtcgtgtgtttgtgcctgcgcggtaacttctacgcctacaaaaacgtagttttgggcgaggtggcggagctgctgccgctcgatcctggcaacgtccagccggaattaaattccaaatgggagccggtataccgggtcacgttcccggatggctcttgcgatgtgctatcgcaggacgagatctggcacgttcgcggcctgacgctggacggcctcgtcgggctctcccctatttcctacgcgcgccaggcgatcggcctggggctggcgacggaggaacacggaagccgcctattcagtaacggcgcggtaacttccggcgtgctgcgcaccgagcaaacgctgaccgatgatgcgtataaacgccttcgcgatgacttcgccgagcgccatagcgggctaatcaacgcgcaccggccaatgattctggaaatgggcctcgattggaaatcgatgtcactcaccgccgaggatgcgcaattcctggaaacgcgaaagtttcagttagaggaaatttgccgcgtgttccgcgtaccgatgcaccttgtgcagaacaccgaccgcgcgacgttctcgaacatcgagcagctcggcctcggctttatcaattacagccttgttccctacctgacgcgcatcgaacagcggatcaacatcgggctagttcgccccagcaagcgcggcaagctctatgcgaagtttaacgccggtgcgctgctgcgtggcgatctgaaatcgcgcatggagagctacgccaccggcatcaactgggggatttatagccccaacgagtgccgcgcgttcgaggagctgaacccccgcgaaggcggcgaggtttacctgacccccatgaacatgacgacgaagccgatcgacggtacggaaaagcccagcgccgaaccggcgcagccggataacggagacgaaaacccatga

SEQ ID NO: 112741 - DNA, 1728 bp, Enterobacter aerogenes
atggcgcaagtatccgacggcatcaagtacgcggagcgcgtgctatccggcgagatcgtggcgtgcgaactggttcgccttgcgtgccaacgcttttttgatgatctggaggatggccccgcacgcggcatctactttaacgaggcccgcgcgcagcacattttaaacttttataagtttatcccccacgttaaaggcgcgttagcaggcaagccgatcgacctgatgggctggcatgttttcatcctgattaaccttttcggctttgtccgcgtcctgattaacgaggagacgggcgaggccgtcgtcgagaacggcgagaccgtatacgtccgccggttccgcaccggctacgaggaagtagcgcgtaaaaacgctaaatcgacgctttcctccggcatcgggctttacatgacgggagccgacaacgagggcggggcggaggtttacagcgccgcgacaacccgcgatcaggcgcgcatcgtctttgatgacgccaaaacgatgatcaagcactcccggtcaacgctggggcggctgtttgacgtcaacaagctggcgatctaccaggagggcagcgcgtcgaagttcgaaccgctatcaagcgacgcaaacaacctcgacggcctaaacattcattgcggcattgtcgacgagctgcacgcgcacaaaacccgcgacgtgtgggacgttctcgaaaccgccaccggcgcgcgcctgcagtcgctcctcttcgccattaccacggcgggctttaacaaagaggggatttgctacgagctgcgcgattatgccgttaaggtgctgcgcggccaggtggatgacgattcattcttcgccctgatctacacgttggacccggacgatgatccctttgatgaaaccgtgtggcagaaagcaaaccccggtctaggggtgtgtaagcgctgggatgacctccgccgtctcgctaagaaggcaaaagagcaggtatcagcgcgcgttaacttcctcactaagcatatgaacatttgggtcactgcggaaagtgcctggatggacatgatcaagtatgacgcgtgcgcgggcctgccgccccctcacgagcttaaaacctatccgctgtgggtaggtgtggacctcgcccataaaatcgatatatgcgccgctgtgaaagcctggcgggggcctgacggggacgtctacgccgattttaaattctggctacccgagggacgcctcgatcggtgttcgcggcagatggcagagctttatcgaaagtgggccgacctgggcgtcctgacgctgacggacggcgacgtcatcgatcatcacgagattaaagaggatttggtcgcatgggtggcgggggagaacctgcaggaaatcggctttgatccctggtctgcgctgcaattctcgctggcgctggccgaggagggcctcccgctcgtcgaagtgccccaaacggtgcgcaacttctccgaggccatgaaggaggtcgagagcctcgtctatggcgagcgcttccaccatagcggtcacccggttatgtcctggatgatgtcgaacgttacggtcaagccggacaaaaacgacaacattttcccgaacaaatccacaccggaggccaagatcgacggcccggccgccctctttaccgctatgaaccgcctgatcgttaacggcggggagcaagaggaaagcctatccgatcaccttttatcccacggcctgcgcgccctgtga

SEQ ID NO: 112742 - DNA, 474 bp, Enterobacter aerogenes
atggctggaagaccaaaaaaaccgaccgcgctcaaggtgattcaagggaacccagggaaacgggctttacctgaacacgaacccaaacccgaacgcgggacgccttgcgccccggcgcatttcggcggcaccgctcgggactggttcgccgaggctgcggccgaattagacaagatcggggtcctcaccctcctggacggaaacgccctggagctgctgatcgaagcatacgccgagtaccggcagcattgcgaggagctcgacgccgagggctacacctaccgcaccacctccaccaccggcgagacggtgatcaaagcgcatccggcggcggccatgaagtcggacgcctggaagcgggtccgcgccatgctcggcgagttcggcatgacaccggccagccgcgcgaaggtatccaccaagcacggcggcgaagaggaccccctgcaggcgtttttaaattccaagaggtaa

SEQ ID NO: 112743 - DNA, 360 bp, Enterobacter aerogenes
atgcccgcagctatcccccgcgtatgccgcgcccacggctgcccccgcaagacgaccgatcgtagcggctactgcacgcagcacatcggtctagggtggcagcagtaccaacgaggccaaagccgacaggcgcgcggctatgggggcgcgtgggatatccgccgagctcggatactcgaccgagataagcacctgtgccaagcgtgcttactggaggggcgcgccgtcgtagcgcgcaccgtggaccatatcgtagccaaggcacacggcggcacggatgccgattccaatctgcaaagcctttgctggccgtgccaccacgccaagacctcacgcgagcgtttcaacacgacgcgataa

SEQ ID NO: 112744 - DNA, 186 bp, Enterobacter aerogenes
atggaccacaaacgactaaccgagattaccttcctcactccactggacagcgcgcccggcctcgacgaggtgcggcgcatggcgcaggccctgctcgaagcggaggcagcttgcgcacacctggcggaggagctgggccgcctgcgtgaggagctggcagcggatgaggcatggctcgccctgtga

SEQ ID NO: 112745 - DNA, 255 bp, Enterobacter aerogenes
atggcgcgccagcgggaactattgcgacaaggtgcgaccaagaccctacgctcgcgccaccttaccggccacgccgtcgacgtgatggcctgcgttaagggcgaggagtgggaatggaagcactaccacaagatcgccgatgcctttaaacaggcggccgccgagttagatgtccctatcgtatggggcggagactggcagacattcaaggacgggccgcacttcgagctagatagcaaggtataccccgcataa

SEQ ID NO: 112746 - DNA, 405 bp, Enterobacter aerogenes
gtgcgcgaccctattagctggcaagagttttacctcctataccgcaacgagctgggcttctctttcattgcctgcgtggtggcagcgtgccgccactggcagcaaaagcaccctttccgcgagatctgcaccaacgcgctgttatgcgcggcggtggcgttcggtgcgaataacttacttgatttgttcggtatcgacagcggcaagtggggctatctggcgagcgtggcgatcggctacatgggcctagaaacgaccctcggcgtcatctcggatcgaatcccgttcatcaaaaggaagggtgagtatgtaccgactaagcaacacgagcctgaagaacctaagcggagtaaatcccgaactcgtaaaggtagtaaaaagggcgatcgaactaacgcagattga

SEQ ID NO: 112747 - DNA, 372 bp, Enterobacter aerogenes
atgaagggtatcgaagcggatttattacgttggggtgcatgggctcgggagcgcctgccgggcaaaatcaaagcgctgttaatctatcgcgagggcgaggcgctccgccaaagctggatcgcgcctatgggggacgacgaggcggccatcttcgacccggccgtcgcaacgctgcgcgacgtcgccccggagctatacgaggttgtgcgcttgcattacatctacggcctgagcttctacgctattgcgaaggccaagcagtgcaacagcaaagacgtactaaccaaggggcgcaaggccgaggcgttcatcgcgggctttatcagcggggccacgttgtcgagcgcatgggataaaaaagcgctagcatag

SEQ ID NO: 112748 - DNA, 2295 bp, Enterobacter aerogenes
atggatattatttcaccctggcgggagttcgccgagcaggtcggcgtctctaaccttgtacccattgcgcgcttgcaggacggcatcgagacaaaactcgcgccgggcgtcgtcgggaaagtgccctcggtctacaaccgaaagggcgagttagtcggctttaaggactggcaaaaatgccgcgtcacggagagtgcgctctcacggtggcagtgtgacagccggtacggcttcggcgttatcctcggccagccggtgcccgccggtggcgtcgcggtgtgcatcgatgtagacaccgaaaacaaagccgaacaggcgacggtcgaggccgtgatccgtgagtgggtaggcgctggcacgcttccccgccgcgtgcgcgagaactcggcccgccaggcgtatttgctacgcgtcaccggcgcagaacaaccgataacaaagcgcgtgctcaagctacgggagcacccggtcaccaaaaagccggaggctatcgagatcctcggatacgggcagcagttcgccgcctggggcgttcacccttccggcgctgatctgcaatggctggacggcgacgtcgagagcctgaccgcgtcctattgttggccgaatttgtcggcgccagagctcaccatcacggtcgacgagctcggcgccatgattggcgccctggctaaggcgttcggcgtcgacgaggcgacccagctggccgcccggcgtcgcgcagctggcagcgtagacgctccggccgatgacgtcgcccgcttcctggatgaaaacgggtggaccctgagcgtcggcattgagggcgagcgccgcatccgatcccccttcgctgacgagtacaccaacgagcaggacgataacgactcttcggtcgtctactactccgcaggctccggcaaaaacgcagccaccggcgaggcgttcgatcaggggcatttcgtcagcctgcacgcctccgacgcgaaccggggcgatcaggacttcctcgacgctgtgggctatatcgctgcgcagttcgacgacttgccagccatcccggaggatgtacccctcgcgccatccctgaaccgcgacaagggcggcaaagcctttgccagcctgaccaacgtgcttgcggggctcggctcgtttgagtggctcgggtacgaggtgcgcttcgacaccttccggggcgaaatggtgatccgccgcgccggtaaggatgccgcctggcggccactggaggaaacggactacacctggctacgcgtagcgcttgaggctcgcggttttcatgccgtcggaaaagagatgatccgcgatgcggttcacgccatcggccgacagctgcagatcgacacggcgcgggactggctcaccgggctggagtgggacggcgagccacgcgtcgagcgctttttcgagcactatttccgcgtaacggcacccgatacggccagcgacaccgagcgggagcagctgcagcaatacgcggccgcctgctcgctttacgcatggtccgccctggcggggcgcgtcatggagccgggcgtcaaagccgacatgatgccgatccttgttggcccgcagggctgcgggaaatcgaccggcgtgctcgctatcgctcccgatcaggcgcgtttcgctgaactctcattcagtgaccgcgatgacgacatcgcccgccgtatgcgcggcaaattggtcgtagagctgggcgaaatgaacgggctacgctcgcgccaggtggagagcatcaaagcgcaggtgagccgaacccatgatcagtgggtgccgaaatatcaggagctagccacacaatacgcccgccggtgcatcatgttcggcacgtctaacgagcatgagctgctcgacgatatgacaggaaaccggcgctttttgccgatggactgcggcgtcgtcgatgttgaaggcatcaagcgcgaccgcgatcagctgtgggcggaggcgcgcgagcttttcgcccttcggggggtagttcacgccgacgttatgccgtttgcagagaagcagcgcgaagcgttcaacgtgatcgaggcgctgaccgaggttgtcgggagctggctcacttgcccggatgatttaaccggcgagacgccacaagagcgcccctacgtcacgacgaccgagatcatcgtcgcattggcaggggcgcacggcttgcggctcgatgatggcacacaaaagcgcattgctaaggcgctgcgcgcgctgggctttgttaaatcgcgcgtgcgtcgcgacggtcggcagatccaggcgtataaaaaagcgccatgtgttctatcgtag

SEQ ID NO: 112749 - DNA, 378 bp, Enterobacter aerogenes
atgagaatgaccagccataagaaaaagatcctgagctattacgaacctgaatcccgggaatgggttaaaggcgagataggcgcgccgccgttcgatgtttccggcgtggcttacttactccaccagatgagcagcttcgataaaaagtaccaggttgaatcaacccgccgcacgctggaaagcatggttagagatggcttgctggaaaaggtgacggtgtacgaacacagacaaaacaggatgcagtatggcggaagcgcccccggcattcattgcatggtttcacgctacggcttgccaggggaatgctgtgttacccatgatgatggtgatgataggcgcccccatattgagggcgaaagcatacgaatcgattaa

SEQ ID NO: 112750 - DNA, 195 bp, Enterobacter aerogenes
atgtatccgctgtttcgccagtttattcagagctggagcctggaagaaaaactcaccgataacttgcttgcaacctttatagttgcatactcagggacagcggatgctattttttatggctggtcagaatatatgaaaggctttttggctgaatgtcagagcgagttaagttttacgccgactactgtaaattaa

SEQ ID NO: 112751 - DNA, 192 bp, Enterobacter aerogenes
atggataacgacaacgatagcctcaacctgggtgaaccgaagggctgttcagtgcacattgatgcggccactaacctgcggcttaagcagtaccgtattcgcttcatcaaagaaaacccgggcaagccagtgccggggatcgcgcaaattattcgccatgccgtgaatcagtggctggatggtgccgaatga

SEQ ID NO: 112752 - DNA, 1371 bp, Enterobacter aerogenes
atgaccgatacagtagtaacgccggaggttgcttctgatgctctgttttcctgcgtgtatagctggtctcatggtaagccgctgaaagccgacgaggtgcagcaggcaatccaccagcacaaggagccgacaacacgttacggcgcactggctaccagattaggtgaattgcagacgctgacctatgaagaaatgtgtgatgccgggtatctggataccgctcgtgatagggagattattacccgccggctggtggtgtctgaactgattggagaggaagagcttaacgactggttgcgagatgttgatcgcgtcaggcgtatctttccaaatgcggtagggaaagagaagaaaactcgcctgccgttgtcccgaggctctgagggttatgacgtacagcaggattatgtgatcaagcacatcctgccgtcgcagtccctttgctcgatatatggccccagcggctcatataagagcttcctggcggtttcgtgggcgtgtcatatcgccgctggcgtgtcgtggtctgatcgtaacgtcacacagggagcggtgctgtatatcgtgggagagggtggtgtaggcgttccccggcgcattaaggcgtgggaactggttcataagcaatccgctgataatctctttctggtcaaccgtcctgtgtttccggtccgccgcccggaggttaacgaagtgctgatggcggcgcgtgaggtcgaagctgaatgtggcttgcccgtccggctggtagtgatcgatacgctggcgcgatgctttggcggcaatgacgagaacgacgcgcgggatatgggggcattcatcgaagggtgcgacacaattaaacaggccacaggcgctaccgtgctggtggtgcatcattccggcaaagatgaggctaaaggggctcgcggctcaagttcattccgggcggctcttgatgctgaatttaatgtcaaacgtgagggggagggaaaggcgctgatcctgtcatgtacgaagatgaaagacgccgaagaactggaacggaaagcctacgatctgcgtactgctgagctgtttaccgataatgatggcgataaggttcattcgctggtggtcagggatgaagcgcgcgaaacgagagaggttgaaccagaactggctggtgtgtcgaagttgtcaggtaatcatatggcactatggcaggccatacgcagccgcacggcgcagggggaatcatgcacaagatcggttattcgtgatgatctgaaagccacaggcatggaaaccagacatttcgccaggtgggtacaaaaactggtggatgatggcttaattattcagtctggagaggtgctaatacctcagtcattgcgggaagtgggtaaataa

SEQ ID NO: 112753 - DNA, 846 bp, Enterobacter aerogenes
atgttgtataaagaaaaggcgactctgccgggccgccatttgtctcagatgttgatttctatttataataccttatacatccataatgagaggggctcaattatttttatataccctccatatgcccaaacaaatgttccgaatattgttaagccaacgccgataacttccacttttatttcttctcgtacttcgatgcgggctcttgctatattttcatctctaatcctctttgattcctcagggctcaaaggagggccggtaaccccactacgcgagttaatctcggcttcgcggttagatagtttttttaaagttgtgaattttattgtgtacagcaatccgaacactgaaataattgcgccagagcttgcaaataaattcatatcattaagatattgtccaaataaaaaacttgcaccgcagaataaaattaataggataagtgatgtttttgcaccaagtatcttgaaaaatacgagcctgaattttttcattgctaattatctcattattctagctgtgattcaattttggggctcaataccccgttgctgtagctctttgcgaattattcgctttatccaggctgctagagactcatctccatcttgctgttgggcctgttccatcaatacgcgtaactcaggatccaatctgaattggaatggaggattgccacgtctttcatttttgtgtgttgacacgtcaattacacccgatgtaatgtgtttatgtgtagttacacattacatacatatttcacaaatagcaacgccccggagtgcgggaacacagccgaggcgtttaaccacaaaagttatcagaggtaacaatcatggctga

SEQ ID NO: 112754 - DNA, 612 bp, Enterobacter aerogenes
atgaaatttaagaaagctaacgccttaatgcgggataaaaaatcttactctgaagatgaaatatattctcatgtttcagaggaagcaattcaaacggcgatgaaatttgccagtcgtagtattagtggactagagtcgttaaatgatgctcagaggctcgaattggtcaggaaaatggattcatgggattattcagaagccttaaagggcggcagaactaatgaagctctaaacagaatagcctttatgtttcaaatgttagggctaaaagaaagtgcattttttttgggcgtcatagcatgtcatgcggttggattacgtcaatttgaagatgtgctcgaagaattaaaaggcaaaaagtttgtttcccaagaaaataaaaagaaagccagtaagcctaggaataaatattattctgaggtgatggaggtcattcggttgacttgggagaagtatcccgcagccagcccaacaggaatgcaggaaaaattgtccgtccattaccacggaaaggtaagtcgtggagcgttgggtaactgggtgaccgggcatgaagcgcgaccaccaaagcctgaaaagtatcagcgtttcgacctagttttcccccaatag

SEQ ID NO: 112755 - DNA, 1506 bp, Enterobacter aerogenes
atggcaccccccacgcacccccagcgggaggtttttggaccaaacgatcttttttgcgcaacaaatatgactgaaaaaacattcaaatttaccaaagcaaaagttgaggatttaccgccggcgccaaagggtgggagggcggaataccgcgattcagaggttcacggcttaatcgtgcgcgtgtctgctggtggtgtgaaaaccttcagtgtttcccggaagcagcgcggggagcattttcgcgtgacgcttggccgctttcccgatctcagtgtggaaaatgccagggcaatggcggttcgtgctctcagtgaaatgagcatgaccaagaaaaacccgaatgaccgccgcaagcaggatgaaaagcgccagataaccttgctgaaagcattcgaggaacgcttgagaatccgggcacaccggataagtgagacgacagcagaacagtaccgagggcttctcaccaactattccggtgactggctaaagcagccaatgattaatatcagccgtgagcgcatcgagcagcgccataaagcgataactgatggcactgtatggtttggtgaggaccgctctaaattacgtgctggtgttggccaggggagtaaatcgcaggctgatgcatgggggagagctatccgggctgttttccggttcgcctgggatcattatcgcgatgatgaaggacgaagcttgttacctgagccgcctacaatggtgctgagcaccaaaggccactggcatgggttggtcagaaagactgaacgcgtcagaaataacgatctgggccgttggtttgctgcaattgagcaagtccgcctacaggccgctgaaagccgtgacgattttgcgcatgcagtctgtgacgctatctatatggcgatgtttaccggtttacggaagtccgaaatcctgcaacttgaatggactcgagtaaatattcctggcctgtatttctggatcgacaagacgaagaacggcgatccgctggagctgccgattaccccttcattgttgaaaatgttccgccggcgcctcacgcttagaaaaggcgaggaatcgtatgtttttcccggcaaagatggcggtgttatcggtgagtctcgaaacgttatcgaccgggttgtagctgctactgttcctgcacctaaccctgattccttacccccagtcaattttaaataccatgatgccaggcgcactttcgcttcagcagctgctttggctggaatcgatggaaagcttctaaaacgcctgctgaatcaccggacgctgcgtagtgctgatgttaccgatggataccttcattttggcgctgatgagttgctggagcatgctgagaaggcggagcgctacatactggagaaggccgggttggtggagagtaaaaagggattagattcacatcttcttgctgtactcggaacattgagtgatgaagaaaaacgaaaattaatattttcaatattgcaaagcgataaaggtgaagccaatgaaatttaa

SEQ ID NO: 112756 - DNA, 195 bp, Enterobacter aerogenes
atgaccattgagaagaaacagcctgagtatcttagcccatttaggctcaggtccattacggtccgtttttttcacggccttgccatccgctacttctccagggcgttcatctttcgacaactcactaatccgtctacgagctttttcagcatcaggatcgtcaatccaaaaatcaccacctttcatcacatctaa

SEQ ID NO: 112757 - DNA, 1038 bp, Enterobacter aerogenes
atggcaaaggaaactataacgtcgtccccagcaggtgaattcattatgtttgccagcgatgatgggaaagtgcgcgttgaatgccgctttgagcaagaaacactatggctccctcaggcaactatcgccagcctttatcaagtctccccacaagcagttacacagcatattaaagctatatatgaggaaggtgagcttgaacaaaacgcaacctgtaagtcttacttacaagttcaacaggaaggcagccgtcaggtaacccgcaaccggcttcactacagcctgcctgtcatactcgctgttggctatcgcgttcgctcctctcgcggcacgcagttccgccagtgggcgacccagacgctccaggaatacctgatcaaaggttttgtgatggacgatgagcggctgaagaatccgcctgtgggctcatcggctgtacccgactatttcgatgagatgctggagcgtattcgcgatattcgcgccagcgaacgccgcgtttatttacgggtgcgagagatttttgcattagcggctgactatcaaccgtcattaaaagaaaccacgcagttttttcaaactatccagaacaagttacattttgcctgtaccggacataccgccgctgagctcattcatcaacgtgctgacgccagtcagccgcatatggggctgaccagctatagaggcgaagaggtgcataagggcgacgtgacggtagcaaaaaattatctcactcaggatgaagtcaatgagcttaaccgcgtagttaacatgtggctggattttgccgaggatcaggcccgtcgtcgtcagcaggtctttttacgcgactggcaggataagctggatcagttcctgcaatttaacgaccgtgaggttttgcaaggcgcaggtaaaatcagtaagaaaatggccgatgaaaaagcgcaggcggaatatagtcagtttgctgaacaacagcggcgcttaaaggaagccgaaggtgaaaaggatatcgccggtttgctacagtggaaaacagagcctaaaaagtag

SEQ ID NO: 112758 - DNA, 462 bp, Enterobacter aerogenes
atgctggatgagcgggtcgcccggcatgacaggcggcttgagcagtcggcacgggatgatatccggataaaaaggctgctggcgatagagggtatgggaccggtggtggccagtgcgctggtggcggcagtcggggatggaagacagttcaaaagtggccgggagatggcggcgtatctgggtctggtcccgcgtcagcactccagtggcgggaaagcgcggctggggtctatcagcaaacggggagacagctacctgcggacgctgataatccacggtgcgcgtgcggtgctgaacgcgtgtcagaataaaaccgacagacgcagccagtggctgaaggcgttatcggaaaggcgaaaccggaatatcgcgacggtggcgctggcgaacaagaatgcgcgaatagcgtgggcgatactgagccgcgaagaagattaccatgggttacagacggccggttaa

SEQ ID NO: 112759 - DNA, 363 bp, Enterobacter aerogenes
atgcccgaggtgccagctgacctcagtcaacacaagctgattggctatcgttttatcactaacaaccgcatccttccgttgattctgaacgatcgcggagagcagttgacggttgagatgcccgggcagttaatcagcaacgatattgacgttatggcagacgggatccgtaacgggctgggaattggacgcctgtttgaacccatctggcagttacagcccgacagggagcactttatccccgtgatggagagttactggaaaacctacccgccagtctatctctattaccccaaaaacgcgggtaaaacgaaaagagtgaaggccctgattgattttctgatatccgctacggggcgataa

SEQ ID NO: 112760 - DNA, 306 bp, Enterobacter aerogenes
atggaatatgaagcgtacaaggttcgcggctacggcttcggactgaagaaagagatcaccggcgtgctgggtcgttaccccacgcaggaagaggcgcagaaggtcgcggacgactacacgcaggcctgcctgccggataacctgccggacagctacgatatgggcatggtccggccggtcgctgccggcgaacctgccgccctcgatacggacgtttttcgcggtccgggcgcgccgttcactatcgatgctggccatgccccgacaggccatacgctgcgctccggcaaaccctctgaccggtaa

SEQ ID NO: 112761 - DNA, 720 bp, Enterobacter aerogenes
atgaacatgcgaggcattctttttgtactgccattgtgcgccgggctcctggcgggctgtgataacaaacaggaagcgctgaagtttgaagccgcccgcatggcggcgctgaaggccgacgatccgtttctggcgctggactcgttcgaacagcagtccggcgactacggccgggactgcgactcgctgggggcatttctgtttggtaattttgcttccacggataaagcatgtcgggcgcgggatgaggccacgcgggatatggtcctgaaagccgttgaaaagggttccgtaccggcactggtgttcctgtttgacccaggcagcaagacgccggatgtgtatccgcgcgatattgatccacagaaggccgggcaggcggctgagcggcttgttgcactggcagagtcggcgccggtggacagcaaaaatcaggcgttgctgatgcgtgccggcgatgtactgcaggcgggccagtacgttctgcaggattcccggagagcggcgaccctgtacgtcaaagcctggcaggcgggcgatcagcgtgccgcgggcgagctggtcaacgtctatcgttttctcaaggacagccggcgtacctacttctgggaggtacggagcaaagacgtgctgcagctggacagtcgggaccatctgaccggggatgagatcagtgcaattcagaaacttgccgcggacagttctcggaccgacatttga

SEQ ID NO: 112762 - DNA, 786 bp, Enterobacter aerogenes
atgaaagccgccgtggtgtttgatcttaacgaaggtccgatatgggccgattttaccgaaccgcagcctgcagccggatacacgctgatcgacgttcgcgccgccgctattagccacgtagttaagggccgggcatcgggacgtcattatagttttgacggcacgctgccgtttgtcgtcggtatcgatggcgtcggtatgacctctgacggtcagcgcgtctattttgctttccccagtgcgccgttcggcagtatggcgcaacgcgcgccggtcgcgctgcagaattgcctgccgctgccggatgcacttgatgacatcagcgctgcggccatggccaatccgggcatgtctgcctgggctgcgcttgtcaaacgggcgcagtttcaggccggagaaacggtactgattaacggcgccaccggcagcgccgggcagttggcagtacaaattgcccgctacctcggcgcaaaaaaaatcattgctaccgggcgtaatacgcaggcgctggctgccctcgcagccgatgagtgtattgatttaaccgccgatgagcagacgctaaacgcgcagtttgccgccgccagcgccgggcaaatagatgtggttgtggattatttgtggggccgcagcgcagagttgctgctgcctatgctggcgaaatacacccctggcgataagccggtacgttatgtgcaggtgggttcccttgccggggcggatatcgcgttaaatggcgcggtgcttcgcgccgctccgcgatgtcgctgcggcatggccgcgtga

SEQ ID NO: 112763 - DNA, 423 bp, Enterobacter aerogenes
atgccgattttcgatgacgccactcgtgaggcgtttcaaagcatcagccagaaagtcatggaaaacacgccgaccgaaatgtttgccaacgcgattatttccggctggctggtggcgacaatggtctggatgttcccggccgccggctcggcgaaagtcatcgtcatcatcctgatgacctggctgattgcgctggcggacaccacgcatatcgtcgtcggcagtgtggaaattttctatctgattttcagcggagccctgccctggcaggagttcatctggcccttcgcgctgccgacgctcgccggcaacatctgcggcggcacctttatcttcgccctgctaagccacgcccagattcgcaacgacatgacccaggaacagaaagccaaagcgaaggccgaagcagataaaaagggctaa

SEQ ID NO: 112764 - DNA, 126 bp, Enterobacter aerogenes
atgattccctccaattcgctatccgttttaatgcagattcagccaacgattcaacgttttgcccgcatgctctccagcgtgttacaactcgaagtggctttgttgaataaatcagatttcgggtaa

SEQ ID NO: 112765 - DNA, 294 bp, Enterobacter aerogenes
ttgagagttctacacgtctataagacctactatcccgatacctacggcggtattgagcaggtcatttatcagctaagtcaaggctgcgcccgccggggaatcgcagccgatgtttttacttttagcccggacaaagagacaggtcccgtcgactacgaagaccatcgggtcatttataataagcagctttttgaaattgcctccacgccgttttcgttgaaagcgttaaagcgttttaagcagattaaagatgactacgacatggctttgttgaataaatcagatttcgggtaa

SEQ ID NO: 112766 - DNA, 312 bp, Enterobacter aerogenes; identical to SEQ ID NO: 92512

SEQ ID NO: 112767 - DNA, 1059 bp, Enterobacter aerogenes
atgaaaaataaatattttagtaaaaaatgggagcaattcaagaaagaattaccccatcaatcaggtgaaatggtaaagagaaattggggccataactggcactctatgtgttcataccaagggaaacttaaaccatcaatagctagatctttaattgatacattcatgccatcaagtaagggacgtatattagatgtcttctcaggtgttggcaccattcctttcgaagcaagattacttggtcatactgcatatggatttgatattagtccagcagcagttaatatttcacgcgcaaaactagaagttataagtaaaaatgaaatccaagaggtaattaataaattatctgattttattgagcaaaacaaaaattcaatatgtgctcgtaaattctttttaataaaaggtgaattaaatgcatctgaatcgttagtacagtcatgtttattacatattttacatggtaatcgtccgtatgcattgagtagaaagtcccatcctattacacctttcgcgcctactggagattttatatacagtaatttagttataaagttaatcaaaaaagttgaaagagtcttgcaaaattctgatggtatcccagatactggcagcaaagtattttatcaggactctacaaaaagttggcctgaagaagtaaataatttagatgcaattataacatcacctccattttatgatagtacccgtttctattcagcaaattggatgcgattatggttttctggttgggaaaaagatgacttccaaacgaagccaaaagattttgtggacgaaactcagaaaaaaagctttgaaatatatgataatatattcaaacaatctcaacaatgcttaaaaaaagatggcgtttttttaatgcacgttggcaaaagtaaaaaaagtgatatggcaggacaaattgctaaaattggtagtaattatcttagccttatagatatatttgacgaaagtgttgaacattgcgaaagtcacggaattaaagacaaaggcacgacaacccatcatcagtaccttgtctttacgaaagattag

SEQ ID NO: 112768 - DNA, 897 bp, Enterobacter aerogenes
atgatgaacgtctatatggttaccaaaaccaccagttatatgttctttaccgccatggcgggtaatatcctggcgctcaaaatgattgaggatatttgccatatcaaattgagctggggtggatgggcattggctggcatattgccaggcttaatcatgctgttactgacaccgcttataacctataagctatacccgcccgaattaaaaaaagtagataataaagccattgccaaagaaggtcttgagtctttagggccgatgaccttgcgtgagaaaatgctctcctgcttgtttgtgatggcgttagcgggttgggtatttagcacttcgcttggggttaatgaatcaacggtggcgatttgcgtcatggcgttgatgctgatattaaaaattgttacctgggatgatgtcattaaaaataaaggtggctggaacacactaatttggtacggcggtatcattggtttgagttctttgctttccaaagttggttttttcttgtggttggccgagttactgaaaaataacatttcatttggcagtcatagtacgctggcattcgttgtcatcgtcgcgttgagtatactggttcgttatttctttgcctcgggcagcgcctatattgtggcgatggttccggtctttgccatgctggcgaatgtttccggtgcgccagttatgttaaccgcgttagcgctgctgtttagtaattcctatggcggtatggtcacccattatggtggcgcggctggcccggttatatttggggttggttataatgatattaaatcctggtggattgttggcggtatattagcgctgttaacttttattctgcatatcaccgttggggtatggtggtgggaattattaatgtactggaaagtgatttaa

SEQ ID NO: 112769 - DNA, 894 bp, Enterobacter aerogenes; identical to SEQ ID NO: 92966

SEQ ID NO: 112770 - DNA, 135 bp, Enterobacter aerogenes; identical to SEQ ID NO: 92465

SEQ ID NO: 112771 - DNA, 408 bp, Enterobacter aerogenes
gtgatcgattggcttaccgggattttcccttgcacacacaaaccgcttccggcggggagtgttgtcagcgttgatgctgacggtgcaattgagtgggaaaccgttaagcgactgactgttcgcggctcgcatgaagcaacgatgaaagtacgatcgataggatctaatggcgaaggtaaagcgacacatttgtacattgatggtaatccttccaagtttctgcaggggcattctgttgttgggtcggatgatatacaagggctcatgttgacggtctatgccaggattttatccttattgaatattcctcatgatttagcgtcttataaagccgttatggcaggtcagtataaaatttcacgtgttgacattaattacatgtattcattatctacgcggctttgttga

SEQ ID NO: 112772 - DNA, 945 bp, Enterobacter aerogenes
atgccagatattacctccgagataaatgcggttctctccgatcattcccggtttgacgcagagcagctggatattattatttcattcgtcaatgaactggataaaggaactttgagtcagtttgagaacgctccggatcgcacgattatggatacctatgagcgcttgctttctgccagtaaagagcctgccagaagacaacgcgacgaagaatacgaactggaatctctgacgggggccagtcgtcgtactaccaccatgagcaatcatgccgcgttttttgatcgcttcagaacaacgcccgcgcatatgtatggttacggcggcaacgtctaccgggatcagacaaaaagctattacgatgtggccggtaaaatactggcaggcattggcggtctcgcttcttttggcgcaggtaccgccgccatcgccgcctcgcaggcgggttcgtcgctttcgggtatagcggcgcgttatgcgttatcttctgtcggcgcgaccggcctggccgctggcgcgatggcgttgctccgtaataatttttccgatgttcaggtggcgacgaataaagatttcctcgaaaccatcaagtctatcgccaagctaagaaacaaactgaatgatttcttccagggcctcaacaacaaggtctattcggataagacaaaagcagaaacggcgctcaacaatgaaatgaagtcacatccgttacgttttggcgtcggttcaggaagtcaggtagtacatgcaaacctggccccgattcaacgtttggtcactcaggactttgttaccgtaaaccacgagatcagagccaaaattttgccgaagggtacaaattcagcctggagtgttgctgtttcgagctcagaaatgggttgggatgaacgggtattggaccaggctaacatgggtattctgcagcaggtcgttcatcagctttaa

SEQ ID NO: 112773 - DNA, 474 bp, Enterobacter aerogenes
atgctgcataaaattcattgtcccgaattatctgaagaaattgttgcatcgctcgataatgccgcgctttgggcttacaaagttggtaaggaagcactagagcaggcagaactggccgccaatcgcgagtgtctggaagagatggggatgattgtgggcgtttcttctgcgggtacagaagcgtttctccctctcttcgagcagcgtattcaggacttttcattaagaaaggctctgttttcaggcagtttttcatcatgttgctccagcgcttcaacgctactgggcttgaagggcggagtggaactcgttgcgacggcttgcaccgcaagcccgaatgctgtcggtatggcttttgattatatccaaaatggcaaaagtaaggctatgttggcggtaggtacagaacccatctatttacccactttcgcgggtttttatgcggctttgttgaataaatcgaacttttgctga

SEQ ID NO: 112774 - DNA, 231 bp, Enterobacter aerogenes; identical to SEQ ID NO: 111882

SEQ ID NO: 112775 - DNA, 1077 bp, Enterobacter aerogenes; identical to SEQ ID NO: 86362

SEQ ID NO: 112776 - DNA, 759 bp, Enterobacter aerogenes; identical to SEQ ID NO: 89699

SEQ ID NO: 112777 - DNA, 330 bp, Enterobacter aerogenes
atgactgcacaaacctggcgggctcattacgagcaaaaatatcagtattccttacgactttttttattacttaattgtgtttctgccgctctgtcgctgctcagtccgctgtttaccattgtcaccgtcacgctgccgagttcgctgatctgtgccgccagcctggggttcttgttatggaattggaaatttccaaaacagaaaataaatattcctgttatttctctgttatttggcatgctatgggcctggcacatcgtaataaaagcttcattgttaccacctccacattttaactttctggttattgccttattaagcatccggtga

SEQ ID NO: 112778 - DNA, 255 bp, Enterobacter aerogenes
atgaaaaaaagaaatttcagcgcagagtttaaacgcgaatccgctcaactggtccttgatcagaactacacagttgcagctgcggccagtgctatggacgtggggctttctaccatgacgcgatgggtaaagcagttacgggatgaacgacagggcaaaatacctaaagcctctcctataaccccagaacagattgaaatacaggtcctgttctggctgatggggttattgatgacactttccgtatcgaattaa

SEQ ID NO: 112779 - DNA, 2445 bp, Enterobacter aerogenes
atgttaaagggctttgatataacaaaagcaaaaacacaagaagtcgatacagaactgcttaagcgcagaatttccacaggaaaagcaatcgcatttacgggggcaggtttttcatttggaactaaaaatgtattgggctctgccccaccaatggctagagaacttgcaaaaaaactctgcttattatcaaatttagaagaatctgaggatttgatgttcgcagctgatgttgcagttgagtatgcagatcgtatttcaataatagatttacttaaagataattacactcttacatttgtatctagcagccataaaaacatatgcaaactcccatggagaaagttttttacaactaactatgataactctatagaacttgcaagtttgaacgttggtaaacgtatagaatctattgacttatctcacaaacccacaacctaccttaaaaaaaataatgtttgtcttcatattaacggaaaaatagaaggtgcggaacctgaagacttagtatctaaaataaaattatctgattcctcatatctttctccagactctttcgtgagttctgattggtactatcattttaagaaagaccttgaaactgcaagtgctattatattcatgggatactctatgtatgacatggatgtaaaaaaatttctgtttgaaaatccagagttacaagaaaaaacttattttgttgttagggacggtgctgattttaaagaagtgttcactctcaggaagtatggacatgttttacccataggaattgatgggttttcgacactagtgaaggatattcaaaaacaatcacaagaagatggtgttatttttactgaatccttagtgaaacatgaagtttttgacacacagcctgagtttcgagatattgatagcgagcgactttttctttatggtgattatgagatagaaaaacttcatgattccattaggcgaattaactcgataccttattttatcaagcgtgatgtagtatccacctgccttcaaaatataaaggacaataataatttaattattacaggggacttaggcaatggaaaatctataattttagatatgcttgcttttgagttgactgtaaatggttatcacacatatgtgatgcgtaacaatgatggtgattatgtatctgatctcgatcaaatttatagacatgaggactctgctgtagttattgttgataattgctctaattatcctagtttgattagacatgccgataaaattaaagctgagaatgtgatttatatttttgcagacagaaattcaaacaatatcaaagaaaatatatctcttgactttattgagcacaatattgatttactatctggcaatgaaattgaaagtgcagtaaaaatcatagataacttatctacatggcaaaagttctctgcattatctcctgacagaaaaaagaaattagtatcagacaaatacgcttctcaattatctcttttgcttttaggactcatgaatagtccaaatattaaaataaagataaaacagcaaactgatttgatatacattaaccctgaccataagaaaactattttttgcatttgcatctgtgaaatagctaacgtcgaacccacatctagtcttgtatctgaaatttctggcataaacgctatttataatacttcacttagaaactctccggcattcaaacaactctttaaactcgatggcacaacgataaaatcaaaatcaagtattatggcattatccttactaaacaatacatttagcgatatatatacaagagatgctctcttggagattgttgagagaaccgatgcaataaaagaccaagacattgagataaaaaaaatatttaaatccctattaaggtttcatatcattgaaagaatattgccgcaaaatcaatctgctttagatagatattacgaggagttaaagtttaggtgtacatggttaatggatagcccacattattgggtgcagtatgcaatgtgtaggctatcttttttagattataacagagcacaaaactacctaactaatgcttatcaaaaagctgaagcaaaaaaaggaacttaccacactgataatattgatacacagcaggcccgcttatatctcaatcagtgcttagataataataactcttcagaagcttataagctctttgaaaaagctcacgatcttcttaaaaaactacctaatgaaggtcggaaatttaggcagatattactatacaagaaggtttttgactcaaaatatcaggcatttagcaagaaaaataaagttgattttgagcagtcatgtaaaaatgtattagaacaagcgaaatctaatgacattcactcaatgaacactagtatggccaggtttattttatcagcagaagatgtattaatggatataataaatgccatcttgaatgaaagaaaataa

SEQ ID NO: 112780 - DNA, 1311 bp, Enterobacter aerogenes
gtgactcggactctgacagtgactctgactcggatagcgattcggatagcgacagcgactcggactccgacagtgattcggactccgatagcgattctgactccgactccgactcggactccgacagtgactccgactctgacagcgactcggactccgacagcgactcggattctgacagtgactcggactctgacagcgattccgactctgacagtgattctgactctgacagtgattccgactctgacagcgactcggattcggacagcgattcggactccgatagcgattccgactctgacagcgactcggattccgacagcgactcggattctgacagcgactcggattccgacagcgactcggactctgacagtgactcggattctgacagcgattcggactccgatagcgattctgactctgactccgactctgacagtgactcggattctgacagcgactcggattctgacagcgattcggactccgacagtgactcggactctgacagtgactctgactcggatagcgattcggatagcgacagcgactcggactccgacagtgattcggactccgatagcgattctgactccgactccgactcggactccgacagtgactccgactctgacagcgactcggactccgacagcgactcggattctgacagtgactcggactctgacagcgattccgactctgacagtgattctgactctgacagtgattccgactctgacagcgactcggattcggacagcgattcggactccgatagcgattccgactctgacagcgactcggattccgacagcgactcggattctgacagcgactcggattccgacagcgactcggactctgacagtgactcggattctgacagcgattcggactccgatagcgattctgactctgactccgactctgacagtgactcggattctgacagcgattcggactccgacagtgactctgactctgacagtgactcggactctgacagcgattcggattctgacagcgactccgattcggacagcgactccgattcggacagcgactcggactctgacagtgactcggattccgacagcgattcggatagcgacagcgactcggactccgacagcgattcggactccgatagcgattctgactccgactccgactcggactccgacagtgactccgactctgacagcgattcggactcggatagcgattcggactcggatagcgattcagattccgaaccgcaggcaaatgatgatacgcatacggcagctatcgataccgtag

SEQ ID NO: 112781 - DNA, 192 bp, Enterobacter aerogenes
atgggtcgaaagacacgtaaaaaatgccaggctagtgttcagcaaacgttttgtgtgagtgaagagttaaagaaaaaccttaaaggcttaggcatgtttttcttgagctgtgttgccaacgaggctttcacagcgattattcactctgatactgttgccttcatcttagcttccatcaagggattcctgtaa

SEQ ID NO: 112782 - DNA, 189 bp, Enterobacter aerogenes
atgaagatttttttctccggttccagtgctcaattatgcatcgaagcagagtcagaagaagaaaaggcgatgctcattatgtggcaccggctgaacatttcagatcagacaatgtactgcgacatggttgatactggttgcttcgctgggttgcgcctttgtggaatcactgatctcgagaaagagtag

SEQ ID NO: 112783 - DNA, 204 bp, Enterobacter aerogenes
atgaagcgattaactcagcgtgaagctctcgaaatgggcctcaccaggttctacaccggcaagaagtgcattcacgggcatgacagtgagcgctacaccatcagtggtgaatgcgttaagtgcaacaacgagcgggctcgacgccagcagcagttgcgttcagataaattaaaggcagccagaaaggcgcgggaggcagcatga

SEQ ID NO: 112784 - DNA, 360 bp, Enterobacter aerogenes
atggtcggtctcgtctacgcgctggaccgttaccggacggcggcgccggcgcctgacgccgccgcgctgcgtccattcgccgaggcgatttccgcgctacccggcctgtgcgccgatatcgagcaggatgaagccggtcgcgccatctggcgcattcgggtcagcgtcgacgccaatgaactgggactcagcgcccgtgaggttgaagctcagctacgcggcggcgatatcgctatttacgcccgccgctactatctgcatgagggccattttagccttgacccccgcaccgtcggcgaaggagaaatgtcgctcatcgtcgcgcgcttacaggagattacgcagcatgcagcggattaa

SEQ ID NO: 112785 - DNA, 948 bp, Enterobacter aerogenes
atgtcgttggcaaaagcatcactgtggaccgcggcgtccaccttagtcaaaataggcgccggtctgctggtggtaaagctgctggcggtctcatttggtccggcgggcgtaggccaggccggtaacttccggcaactggtcaccgttctgggcgtcctggcgggcgccgggatttttaatggcgtcactaagctagttgcccaacatcacgacgatccgctacgcctgaagctggtggttggaacctcgtcttcaatggtgctcggtttttccaccctgctggcgctggtctttttgctggcggcggcgcccataagccaggcgctgttcggccattcgcactatcagaatctggtacgtttggtggcgctggtgcagatgggaattgcgtgggccaactatctgctggcgctgatgaaaggttttcgcgatgcggcgggtaacgctttttcgctgattgccggtagcctgattggcgtggcggcctactacgcctgttactactttggtggttatcagggggcgctgttagggctggccttagttcccgcgctggtggtggttccggccgccattatgctatggcggcgcggcgcgatcccgctgaacgcgctacgtccgcgttgggataacgggcttgcggggcagttatcgaaatttaccctgatggcgttgattacctcggtgacgctgccggtggcctatgtgatgatgcgtaatctgctggcggcgctgattaactggctgaaagaggcagaaattctggcggtgttccattatattccgctccatagctgcccggctggcgaacagttcggcgagttctgcggcgaagatcgttataccacccaggagagcgaacgcctgctgcgtttgccgctgttctacaacctgtctgcggtaaaccaacggacggtgattaattcactgctgagctacttctcctga

SEQ ID NO: 112786 - DNA, 2952 bp, Enterobacter aerogenes
atggatcttagtattcgcgttgcgttcagcgccattgataaactcacccgtccggtcaacgccgccagtaaagctattggcggcctttctgactccctcaagaaaacgcaatcgtcgatcaaggatctggagaaaagcgcagcggcattcgacaagctacgctcgcaggccaatgaaacggcgcagaaactaaaaactacccaacgagcctttgacggactcaaccagaaacagcgcgaaggcggccagcttaccgaagcccaggcggctcgtcttgaatcgctgcgcggcaagctctcgcggctgacggatacctataacaaacagaccacgcagctgcgcacggcggcacaggcggtgcgccagcacggtgttaacctgtcatccggcagcggtgcaattcagagcgcaatccggcgcacagagcaatataaccagacgctggagcgcgaacgtcgccagctggcggccacgacgcgcgcccaggcaagctatgagcgcgccaaagaaaccgcagggaaactccgtggcgctggcatggggatgacactcggtgcagcggctacaggttatgcggcggggtcgttcctggcgcctgcggtgggttttgataccgacatgtcacgggtcatggcgctgacgcgcatggacaaaaatgattcccgttttaccgatctacgggagcaggcgaaaaagcttggtgcagaaacggcattttcaagcagtgatgccgcccagggtcaggcatttctcgcgatggccggctttacgcccgaggccattcaagctgcgttgcctggcgttctagacactgcgattgcgggtggcgcgctgagcggtgatatctcacttagcgaaactgctgatattggcgccagcgttctgaaacagttcggattacaggctaccgacatgggtcgtgttggcgacgttctggccggtacattcacccgttccagtacaaatctccgcgcccttggtgaaacaatgaaatacgcagggccggtcgcctccgctctgggtattagtctggaagaggcctccgcaatggccggagtgctcgctaacaacggtttgcgtggaagtgatgctggtaccgcaatgcgtgcatcgctaacccggttgtcggcccccaccggggctgctgcaaaggctcttaaagagcttggggttagcgttgcggacagtcgaggaaagctccgccccgtagagcaaattctcggagatttatacaaggctactaaaaagtttggcgataccgatcaaatcagtttcttcaaggatattgctggcgaggaggcaatggttggattgcagactctcgttaaatcagtgggtagtggcgatttgcagaagcttatcaccgagctaaaaaaggcgcagggtgaatctgccgctaccgcaaaaaaaatgtctgacaatctcggcggcgacttatccaacctcagtagcgcctgggaaggcctacaaatccagatctctgataccgtcaaaggcccgctgcgcagtctggtgcaatggcttgatgaaacgatttcccgcgtaacggtctgggttaaggctaacccccaacttgcgcaaacgctcttgcttgttgggggtggagcgctggctcttactgccgcgcttggcgcggtctcccttgcggcaggcattctgattgggccactggcaaaactacagctcggcttcacgctgctaactggtggtcgcggcattctcggcaccgttgccgcattccgcaccctgggtactgccgctggcccggtgatggcaagcatgcgcggctggcccgtcgttatatctggtatcgcatccagttttgggaggctctccgccatcatgcccgcgattcgagctggattaatgggtgtgtttctggcgccgggtgcagcgctggcgtcttttggtaaaagtcttggcatgctgatgctcaggctgaccggcctccctgcggtctggggcatgatcaccggcgcggtatctgttctgggtggggctctatccttcctgcttagtccgatcgggctgattgctgcgtcgtttgtcgcggcgggtctgctcatctggcgttattgggagccgatcaaagcattcttcaccgggttcttttccggcatctggcaggcgttaacaccgttaaggagtgcattcgcaccgcttatccctgtcttttctgctattggagacggaataaaatcagtctgggagtggttcaaaaacctgcttagcccgatggagaccagcaaggaaaccctggataagtgcgcttctgctggtgagacttttgggcgtgtaatgggaacggctctcagcatattactttggccgctccagcaactgatgaacggagtcagctggttgcttgaaaaactggatcttatccctgatgggatcgacagagccaggcagcaagccgacaaggcccagcgggatctggaagcttcggcgacagctttagctgggcaccaacttcccctggcgcaagcaaccgtatctggcacgagtggtagcgggaaaccacctaaattgaccggagacaatggcacccttcgccgtctgaataacatcgtggataacacgaaggcgaccgcggacaacacgaaggaagcgcgcaaaaagattggccctggcgacattatttttaaaaacctgcctcgcgcgctggccttgcgcggcgcctatcaggaggcgcggatctcaccgcaggcaataccgcgcgttgcagctccggcggcaggcggcattttctccgttccttcagcgaaacaaggcccgctgtcagcgcccgtttccgccccgacaaatgatgcgccagtgtttaacctgatctttaacgaggtcggccagcactcgacgcgggatctggaaagaatggtcaggaatgccgttcgcgatgcaatggccagcacaaccagaagtaaccgtggctcgttccgcgacagagattag

SEQ ID NO: 112787 - DNA, 999 bp, Enterobacter aerogenes
atgacagcaattaagccaatgagtcgcatatatcaaaagattagtaacgctggttttaaccaagcgtatattaataaattgcttcctgagtggtgggacgaacgtttagctgagactgcggttggtaggcagtatgcaagcttgttcttggcgcgcgccttcagtctatccccggaaagcctgaaagatgaatcacatgttgcaagcttcagctttgacgggcgtcatcgcttcaaacatcgtgtcaatgtaggtgaagatgacctaacggtggctacagccgttgcctattctgctgcgagagttgccgctaacaattttggcattgattacgatcctgctgttagcttggaatggtctgatattcgtaatcaactgctcaaagatgcaccctatgtaactttgccagcgctagtccggttttgtcacatggccgggatccctgtggtctacgtaaaaaacttcccagcaaaagcttgcaaaatggcaggattagcactgttgtgttctggtagaccggtgattgttcttactcaggtcaaaaagcatgggatgatgctttttgacttagcacatgagttggggcatatagcaaaaggccatctaaaagatagccaagatggtgtttttgttgataaaaaaatcgattccaaagatacagccaagcttgaaggtgaagcgaataggttcgcttttggcgtgatcgcggggaaagaagcattgaatattaaaccggtaagcagatttctaactgcggaacaactcgcccacgctgctttgacgtttggtaaggcaaatgcaatagatccgacccacgtcgctttaaactacggatacagcatggggcattggggagttgcaaccaatgctcttaagattttatgcgaaaatgctccgtcagatcaggatatcgtgcgcaccatgttaatgaacgatcttgatgaagataatatcaatgatgatgatctggagttgttaacagcactttgcggggcgtaa

SEQ ID NO: 112788 - DNA, 693 bp, Enterobacter aerogenes
gtgtgccactacactgtccgaatccgagtcgctgtccgaatccgagtcgctgtccgaatccgagtcgctgtcggagtcggaatcgctgtccgaatccgagtcgctgtcggagtcggaatcgctgtcggaatccgagtcgctgtcggagtccgaatcgctgtccgaatcggaatcgctgtcactatccgaatcgctgtccgaatcggagtcgctgtcagaatccgaatcgctgtcagaatccgaatcgctgtcggagtccgagtcgctgtcagagtccgagtcgctgtcggagtccgaatcactgtcagagtcggagtcgctgtcggagtccgagtcgctgtcggaatcggagtcactgtcggaatccgagtcgctgtcggagtcggaatcgctgtcactatccgaatcgctatccgagtcagagtcgctgtcagaatccgagtcgctgtccgaatccgagtcgctgtcagaatccgaatcgctatccgagtcagagtcactgtcagagtccgaatcgctgtcagagtcggaatcgctgtcggaatcggagtcactgtcggaatccgagtcgctgtcggagtccgagtcgctgtcggagtcggaatcgctgtccgaatccgaatcgctgtccgaatccgagtcgctgtcagagtccgagtcgctgtcggagtcggaatcactgtcggaatctga

SEQ ID NO: 112789 - DNA, 318 bp, Enterobacter aerogenes
gtgttccgccgtatcagcaaaaagcttgaggccatggggataaaaaccgtcctgcagctagctgatacggatatccgctttatccgcaaacactttaacgtggtgcttgagagaactgtccgggagcttcgcggcgagccgtgtcttgaactggaagagtttgcgccagtgaaacaggaaattgtctgcagccggtcgttcggggagcgcattaccacctatgaacaaatgcgccaggctatctgttcatatgcggccagaggcgcagagaaacttcgtggtgagcatcagtactgtcgttatatctcccctttgtga

SEQ ID NO: 112790 - DNA, 732 bp, Enterobacter aerogenes
gtgctaaaactgtatcgatatcttttctccaatgttgactgtaaaatcatatttgagcatcgggaagataaaaggaaaattctgtctcttctggacatcaaagaagataaagcaaaggtcattgacggtgctggcgttaacaccagttattttgcttacaaagaggaacctgaagaaactcatggggtagtactatttgccagccgaatgttacatagtaaaggcttacttgacctcattaaagcgaaaaggattttaaagttagaagggatagattgcactattcaggttgcggggataattgtcgaaaatgacgaggatagaattactttaggacagatagagaaatggcatgacagcggagatattgtctggttaggtactcgcgatgatattaaagaattaattgccggttccaatattgttgttcttccttctatatatcccgaaggtgtgccacgaattctccttgaggctggtgctgtggggagggcttgtgttgtatatgataatggtggatgtaattctctgattaaagatggctataatggctatatcgttgagcgtaaaaacgtcaaagaactcgccgccagaattaaaatgttgataagttctgatactgccaggaaagaaatgggtatcaatgcacgtgagatcattgttaatcattacacatcagaaatcgttattgacaaaacattgcaagtatatgaagaacttttccagcgctga

SEQ ID NO: 112791 - DNA, 171 bp, Enterobacter aerogenes
atgggagacacgccctacgtgccagagctgggcaaaaattttgcctcccgcctggtgtaccgcagcggtgacttttttccagccggcgatctgcgcttcattatagatgcccggcgtctaggcataaccctgtccctgttggctaatctgtgtgccttcgctgataattaa

SEQ ID NO: 112792 - DNA, 1152 bp, Enterobacter aerogenes; identical to SEQ ID NO: 93504

SEQ ID NO: 112793 - DNA, 669 bp, Enterobacter aerogenes
atgctgcccggtatcgctggggatttgtaccatgcgcacgtccatcccggcgtagaggcgctctccggcgcgttcggtatgttccgccagcgacagctccccggtggagaacagcagcagcgtccagtgcctgcggttacgcacttcgccgtcggtgcgggcgcgccccttgccctggccgttcgccagcatataggcaatcattccggcctcacgcggatccacttcgcgcagttcatcgagcggcagcagggcatcgttgtgtcggctggcaattccctccagcgcattcccggtggcccgccaggagtgccagtaatccgtgccgccacagacggaggcggccaccttcatcaccgtggtcttgccgtcggtggactcaccgcgcaggtggaaacccccaccgcccgttccggtcaggcgcagcagcggggcggccagtgcacagcagacggcaaagaccagccgcgagttgcctgcacagagtgcggcgacctgctcctgccactccgccagagtaccgccctgcgcaaagccgccagtcaggtagtggctgccctgaaggatgacattgtcgccacccggaccaataacctcatccggcagcacgtacacgccgttgtgccagccggttttctccacgcaggcgacccggcgtccggggagtga

SEQ ID NO: 112794 - DNA, 246 bp, Enterobacter aerogenes
atggcaggctttcgccgggtggaaaaagatccgctgacgggtgaagaatacacactgtttcacatcctgccggagggctggcgggagatgtgccggggattcagtcccgccagagcggccagattatgtctggaagcggaatgcctgctgcccggcagtgacgggaaatatcagtcgcaggtccgcctgccggagatcggcaaagccagggtctaccggctcacctcccgcatcctcagtatctga

SEQ ID NO: 112795 - DNA, 1110 bp, Enterobacter aerogenes
gtggctaaaaataaagcggtaaatgctggggtagatgccttaactggtttcgagtttcaaagaaactgtgcattatatcttttgttagataattttaattctttcattgacaaaaacttctttatttgtattgaacatcatgatgattttcttttttgctataaaactgactgtttagcttatattaacgagatatatgcctaccaagcaaaaaaacttagcggaaaaatatggactatcgatgctagattttctgagatggtatctaaaattctattagttggggataatcttaaaaatgactctttcgaaaaaagtgaggattataggcatcagttaacatttatatcaaatacagaaatagagttaaaatactcgcctctgaagaagttaaaagctgaaggtgctactgagcagatagtaaagataaatgagcaaaactccacctgtgtttataatgatttacatgaaagtattaaagttaaaatcgaaaatagaataacagaagtttgcaatgaagaatcttcggtttttcatcggcaagagttagataacttacatattcagtgggtcgatttcccaagaactgctgcgaaacaaaaagaatctcttattggactcatggttagaaaattccctcatatagctgatccgaaagcagctattgatgtaatacttactctatttagggatgtagagactgtatataaccaagggcaggaaatatgcctgcttgatccaacaaaaagggttgaaggcgaagatataaaaaaagtcatgaatattattgattcacagcaaaaggcattcgactattggcgtgccgaagcaaagcaattctcaatgaaatttagaataccacttagcatacagaaaaatcatgaaaactatatacttaactcttttgaactactcaaggatatgagtaattacgattatcaaattattaaagactttgttagaaataatgattacacaactcaatatatttctctgcaagatgcattaactgcatatgttgataatattagaaaatctcattctataaacctggataatattgatacattttttgcagttctgtgttcttacgttgagtgctacgattaa

SEQ ID NO: 112796 - DNA, 348 bp, Enterobacter aerogenes
atgtttgacccggcaatgtgctactgtacctgcgtatgtggctcagatgtcgatcaggttctggttgatttttctgcagatgtgcagtggctgaaaggacgtgtcgtacaggttgagcgttacaacctggcgcagcagcccatgagctttattcagaatgagaaagcgaaagcattactcgaagcatctcgagcagaagggcttcggctactgctgttgggcggcgaaacggtgatggcagggcggtatccaaaacgcgctgagctggctcgctggttcggcattctgctggagaaagtgggattagctcccaccaactgctgtggtggcaatacttcctgttgctga

SEQ ID NO: 112797 - DNA, 171 bp, Enterobacter aerogenes
atggtttttgtttgccttttttttgataattatagtttcaatactaatgtgaactttaatcagtttaattatctttttctgacaatctcggtctcaggtctcgcaggaaatagaagtttttcctacacctcccttaccgataaaaaacaggtaatgcgggatattctgtaa

SEQ ID NO: 112798 - DNA, 636 bp, Enterobacter aerogenes
atgaaactgcaacttgcactggacggactgggattgtcagaatcccttattcttcttgataaagtaaaagattcaatcgatatcattgaaattggcacctctttcattattcgtgaggggcttagggcagtttccgagataaagagatgttttccacacttcgaaattctggcagacctaaaaatcatggatgacggttatttcaaagcgggaaaagcgtatcgcgccggcgctgattatgtcacggtactcggtgtcaccgatccgctgacgatcaaaggctgccttgacattgcgggtcaattagggaaaaaagtggtggcaaatctgatgtgtgttaacgacctgccgacacgtatcacagaacttgaaaatatgggagttcatgtcctgtccgttcataccggtgttgatcaacaggccgtcggtcgggagccaatagaagatttacagttgttggtcgcccacacgaagagggctgagattgctgtcgcgggagggatcaacagtcgtcgcgtctggaagtacattgatctgcgtccggaaatcatcattgtcggcgcaggtctgattcatcacccggcccccgcagacgaagcggcagccatcaaacaacaaatgcgtgaagcccgttaa

SEQ ID NO: 112799 - DNA, 525 bp, Enterobacter aerogenes
atgaaaagaattgccatcgacatggatgaagttatcgccgatttcaactgcaagtttattgcttcctttaatgcccgtttctgtgaaaacattacggtcaccgatctggccggcaaaacggttgaggagttccgtccacaactgctggcggagatgcgggcaatgatttgtgaggacggttttttccgcgatatgccggtgatcccggacagtcagagggtggtggaagctctgcataacaggtacgaaatctttattaccagtgccgccatggactggccgggttcttttaatgccaagtatcactggctccaggaaaatttccccttcatcagccctaaaaacgtggtgttttgtggcaacaagagcattgttcatgctgattacctgatcgatgacacaccgcgacattttctaaccttccagggagaagggatcctgttttctgccccccataaccttgatacggaaggataccggagggttaatagctggcaggatgtggaaacgctcttcctctcatga

SEQ ID NO: 112800 - DNA, 1146 bp, Enterobacter aerogenes
atgccgtctctcttttctgttttcagcgccggtgaaattcgcttcgggcgtgggcagcttgatactgttgccggatgggttgctcagcgttcggagcgggtgatgctggttcacggctcttcttctgcacgcgcggctgtgctgctcgaacaattagccggggccgggctcgatgtccatacattctccgtagcccgggaacccagtctggaagatatccggaatggtgttgaacaggctcgcgaagccagtattgaagtgatcgtcagtttaggaggcggtgccgtcattgatgcaggcaaagctattgcggctctggtgccagccaacggcagcatcattgaatatctggaagtggtcgggaacggacgtttactggaatctgctcccctgcccttcgtggccattccgaccacggcaggcaccggggcggaagtcaccaaaaacgcggtcattaatgttcctgaacaacgccggaaggtaagtcttagggataaacgcatgctgcccgatctggccgtggtcgatccgtcattaacagacagaacaccacgatcagtgaccctggcctcggggctggacgccctcacccaggtgatcgaaccatatgtatgtaaccgggctaatacattcaccgatatgctgtgccgtgatgctattccccgcgcgatgaatgccctgagaacactgatggagaaagaatgtgccgccagtcgggatgaaatggcctgggtcagcctgtgtggtggtctggcactggctaacgccgggctgggagtgatccacggtctggccggtccgctcggggggttatgtgatgctccccacggagcgctatgcggtacgctgctgccctatggcctggaattgaatctggaaaatgtcgcgtcagaagaaagccttagccgcctcgaagaaattcgtgacgccctggcgctcagctttagtgtccctaccacacaggctttcacagcccttgcggactggagccatcgccacggactgggtaccctcagggaactcggtgtaccttatgaggcacttgaggcggcagcggaagcggcactcaatgcctcatccatgcgcgccaatccggcgaaactaagtcagtcgcagctgctcagtctgctgcataaggcctggtaa

SEQ ID NO: 112801 - DNA, 279 bp, Enterobacter aerogenes
atgaatcctgagtcagccgaatttgtcattcacaacaaaagtggtttgcatactcgccccggggctgtgctggttaatatagccaaacagttcagcagcgatattcagattgccaacgtcacctccgccgggaagccggttaatgccaagagcctgatgaagctgatgggaataggtgtacgtagtggtcacacaattcgtgtggaggcaacaggtgaagatgccagaaaggcaattgaagctatttccgaaggaattgcttcaggactgggagaataa

SEQ ID NO: 112802 - DNA, 327 bp, Enterobacter aerogenes
atgcctggcgcagcgaagaaggtatgtcttatttgcggtagcggagcttccagcgcatttctggcgattaatgtcagaaaagcggctgcaaaaattggcctggatgtgattgtggaaaatcgtccggagtctgattttaagaaagccctcagtgaatatgattcagtcttaattgcgcctcacctggaatttcttttgaaagactttcatctgtccgcagatgattattgccgggatgtgcagattattcctttttatatctacggcactctggacggtagtttgatattaagcatgctacaggacgtacaaaataaacccaaatga

SEQ ID NO: 112803 - DNA, 1446 bp, Enterobacter aerogenes
atgagcaaagaacaagtttctctgcaagttaaaatacagagaatggggaatttcctcagtggaatggttatgccaaatattggtgtcttcattgcctggggtctcattactgcactgtttattccgaccggttggttcccgaatgaatatctggccaaactggtaggaccgaccatcacctatttattacctgcgctgattggctataccggcgggtataacgtctatggtaaacgcggaggtgttattggtgccgcagccaccatgggcgttgtgattggctccgacattaccatgctggttggtgggatggtgatggggccactggcggcctggataatcaagaaagtggataagctgtttgaaggaaaggtgaagcctggctttgaaatgcttatcgacaacttcagtatcggtattgttgccgcgctgctgatggtggcgggttatgcggttgttgaacccatcttctctgtcattttgtccacgctagcacagggcgtgtactgggcgctgaataaaggtctgattccgtttaccgcgatctttgttcaacctgcctgtgttctgttcctgaacaacgcgattaaccacggcatcatggcgccgctgggtatacagcaggtggtagaacacggcaagtcgattctgttcctcgtggaagcgaacggtggcccgcaactgggtgtcctgctggcatacatgttctttggtcgcggcatggcgagaaaatcagccgcacctgctgcgcttatccacttcattggcggtatcggtgagatttacttcccgttcgtcctgatgaaaccaaaactgatcatcgcgccaatcgtcggcagcatggtttccctgttcatcttccagacgatggacggcggtgtggtaggtatcccatccccgggcagtatcatcgctttcctgatgatgacaccgaaagggtccttcatcgccaacattcttggttacggaattggctgcctggtgtccatggccattgccggtgccctgttgaaaatggatgctcgccgtgatgcggagctggaagcacaggaactggccgccgcagcgacagctgagaatgttgtggaagtttctgaaaacacgcctgctgctgcagcagtagatgcgcagaatacggtagtgcctggtgtgaagatcaagaaaatcatcgtggcctgtgatgccggaatgggctccagtgcgatgggggcatccgtactccgtaaccgcctcaaaaaggcgcagattgaaggtgtcgaagtcaaaaatgcttccatcagtaatctgcctgacgacgtggatctcatcattacgcacttcgacttaatgaagcgggcgaaatccaatgtcagcagaccgaatgtttctttcatgggtatccgtaactttgtggaagcaacacagtacgacgaaattattcaccaggtaaaagaaaacaacgcataa

SEQ ID NO: 112804 - DNA, 435 bp, Enterobacter aerogenes
atggaaatcttaaaacttgacaatattacgttatccgcctcattccaggatcgtgatgaagcgataaaggcagccggacgtattcttgtagaaaatggctatgttgctccggaatatgtcgattgtatgttacagcgcgaagcggttatttcgacttacgtaggaaataatgttgctgtgccacacgggatttccggaagcgaaggtttcatcaaagaatcagggatttctgtggtcgtggtgcctgaaggtgttcagtactccgaacacgatgtcgccaaactgattattggtattgctggccgggatggccagcacatggacatcctgggtcagattgcaatgatttgttcagagcaggagaacgttgacgagatcctgcaggcgaaaagtgctcaagaaattctcgaaatatttcagaaggagttggtatga

SEQ ID NO: 112805 - DNA, 1158 bp, Enterobacter aerogenes
atgaaagctgtccattttggtgcaggtaacatcggtcgcggttttatcggtgatctgctgaataactcaggctatttcattacgttcctcgacgttaataagccgatgattgacgcgattaacaagaacggaagctattacttttactggatcgataaaggctattcaaaacgtgaagtcaccaacgtcgccggtatttacctggtagacgaacaggatgcagctattaaggccattgaagagtgcgatattctcaccacctccgtgtgggcagataacctgccgaaaatcgcagccgtggtggctaaaggtctgaaacagcgtctggtttccggtcagccgaaaatcaacgtcctggcctgtgaaaacgccctgtttgcctccgatcgcctgcgtcgtgaagtggttaacaccggcatcattactgacgcagagctgcatcaggtcagtaactttgtgaacacctccgttgaccgtctggcgctgaccaacgttcgtaacggtgaaacctgtcttgatatcgattccaactgtgagctgatgatcgaaagcagcgcgctggttgatccgaaaagccagcctatccagggtgcagactatgtggaaaccctgaagccgttcattgaacgcaaactgtatgtcgtgaactgcggacatgctgcagctggttacctcagctacctgaaaggctacccgtatgttcaggacggtttcgccgatgccgaaatcgttaagcaggtggaagatctgatgtgggaatcggcacaggtcatgatcaaagaatatggctttggtgaagatgagatgaagcactacatcaaaaagaccattgccatctggacttccggtaccgtgaaagatgatacccgtcgcgtttgccgctctccgattcgtaaggtgaacgacaccgaccgtctggtagccccagcgaaagcatactggaatttgttcggtgaagaacagctgtacccgaaagtgatcgctgccgcttatgccttcgtcaacgaagaagatgaacaggcggttgaattgcagcgagctattgcgcagaacggcattgaagccgcaatcgagaaatattcaaacatccctgccacagcgccgctggcaaaacagattgttaaaaatttcctgacttttaaagaactgcagaaataa

SEQ ID NO: 112806 - DNA, 636 bp, Enterobacter aerogenes
atgaaacttcaattagcactggacgaaatgccgttatccgaagcgctgttattcctggacaaagtaaaagagtccgttgacatcgtagaagttggtaccccgtttattatccacgaaggtttgaaggcggttaccgaaattaaacgctgtttcccgcaactggaagtgctggccgacctgaaaatcatggatgccggttactacgaatctgaaatggcattcaaggcgggtgcggactacgccaccgttctgggcgtcaccgatatcctgaccgtgaaaggttgtgtagatattgcaaacaaaatgggcaaaaaagtcgttgttgacatgatttgcgtaccaaacatgccagaacgtatccgccagctggaagaagtcaaagcccatattctgtctgttcacaccggtgctgaccaacaggccgcaggacgcgagcccatcgaagatctgcgtgtaatggttgagcacactcgtgaagctggaatttctgttgccggcggtatcaactctaagtcggtcgcaaaatatgtagctctgaatcccgacatcatcattgtaggctcaggcatcactcacaaccctgatcctgcaaaagaagctgctgctatcaaagcggcaatgcgtaagggagcttga

SEQ ID NO: 112807 - DNA, 558 bp, Enterobacter aerogenes
atgcaggcgaaagaattacgtgaaattctgcaggagctgactggtctggctgaacatgttaatcaggctgacgtcgacaagctgattgctgaaattgaaggagcaaacaaactgtttctggcaggtgctggccgctcagggtttatgatccgcgcctttgcaaaccgtctgatgcacctcggttatgagacctatcttgttggcgaaaccatcacgccgccggcgaaagaaggtgacctgctgatcatcggttctggttcgggtgaaaccggtagcctggtctccatggcgcagaaagcggttgcccagaaagcgaagattgctctgatctccatctatgatgactcaagcattggcaagctggccagcgccgtcatcaaactgcctggctcgacccgtaaaagtggtgaagggaaggggatcccaactatccagcctctggggtcgtcgtttgaacagttactgttcctgacctgcgacagcatcgtgctcaccatcatgcgtcgcaaaggcatcgagtatgaagacatgtttgctcgtcatgccaatctggaataa

SEQ ID NO: 112808 - DNA, 705 bp, Enterobacter aerogenes
atgctggatacctttgaatcacaaaccaccgaccagttaggtcatttcgcctggtgtgccctggtggcattgggcttggccagacaggaaggtaaagcaacaaatcaggtgagtgaacacgtttttatttcaaactggctgaacaaagcctggaaagataaacgttttcctaaaagtatcgcaccagaattaaccggattaataaaaagagcccgggcggaagggatagcagccaatctggaaaaagtgctgtatgccctctttaaaaaatgcaccagaagcattatcgagcagtcggaattgtttcgccttaattttgccattgatggctttaagcgttatggctggaacaccattctgaccacggcgcgagactggaaagtgctgacgaaatgcgacccatccatggtcgaaggaaacgcactgattattgacaataaatccctgtattcatccttcaatgattccgggtatttactgaagccgctggaactcaaagtgtttggtgacaaggctttttttattaatttactcaaacggttttatctgccggttgtggcgacaggggatgattcagtttttctgctgacaccagaaagaacggaatatatccgtaacacaattatcaggtccaagttgagtgattttcactcggcgaaaattcattcgaacacgacgcttagtctgtcttctggtataaggtga

SEQ ID NO: 112809 - DNA, 1152 bp, Enterobacter aerogenes
atgatcaacagaatgatcctcaacgaaacctcttactttggtaaaggtgccatccgttcaattgtggacgaaatcaaaaagcgtggttttactaaagcgctgattgtgacagataaagatctgattaaattcaatgtggcgaccaaaattaccgcgctactggaagaaaacggtctggcctatgcgatttatgatgaagtcgtaccaaatccgaccgtaaacgtggtgcacaaaggagtggaggctttcaaacaggccagtgcggattacctgattgccgtaggtggtggttcgccacaggatacctgtaaagcgattgggatgatgatggctaacccggaatataccgatgtccgcatgctggaaggtggtgcccccacccgtaatccatccattccgatcattgccattcctactacctccggcactgcagcggaagtgactatcaactacgtgatcaccgacgaagaaaaacgtcgtaaatttgtctgctttgacccgcacgatatcccggtgatcgccgtcattgacccggatatgatgtccagcatgccagcaggtttgaaagcggcaacgggtgtcgatgccctgactcacgctattgaaggttacattacccgcggtgcctgggaactgacagatatgttccatatcaaggccatcgaaattattggccgttccctgcgtgattcggttaaagggctcgcctccggtgtggaaggtatggcgctgggccagtacattgctggaatgggcttctcgaacgtgggtctcggtctggtgcatggtatggcacacccgctgggcgctttctacggcaccccacacggggtggctaacgcggtattactcccgcatatcatggcatttaacgctgaacataccggtgagaaatatcgcgatatcgccttcgctctgggggttaaaaacgcttatgacctgacgctgccggatgcgcgtaacgccgcagtggatgcggtggtgaagctgaataaagacattggcatcccggaacgtctgcgtgatgtgggcatgaaggaagaagatgcagatgcactggcaaaagccgcctttgccgatgtctgtaccccgggcaacccgagagactgcgacgaagcaaccgtgaaagcgctgtatctccagttgtactaa

SEQ ID NO: 112810 - DNA, 2670 bp, Enterobacter aerogenes
atgcgaatagatgatgtttatgcgaaactgaaacagttagccggcgaaaatggcgtgagcgccaaagagatcgccgacgccatgaacattggtcgttcaaatgtcagccatgaactgaacaagctggtacagcagggaaaagcccggaaaaaaagtggaaaaccggttctgtttcaacctgtggtacagcaggttgtgctgaacgaatcccgcaaagatatcctgggtgcccaccttaagcttaaccccagcctgaagctggccatcgagcaggctcgcgcggccgttctgtatccgccagacggcatgaatatgttgatcctcggcgaaaccggtgtaggtaagtccctctttgccgagttaatcgtgtcgtatgcacagcacaacaacatcatccctgctgaagcagagctaatcatctttaactgtgcggactattcgaataacccacagttgcttatcgcccagttgttcggcacgcgaaagggggcctatacggggattgacgagaaccgaatcggcctgattgagaaggcgaataatagcttcctgttcctcgatgaggtccatcgtttgccacatgaaggacaggaaatgctgtttacctttatggataagggagtctatcggcgtcttggagaggctgatgcccttcgtactgccaacgtcaaaatcattgcggcgacgacggaaacccctgagtcacaccttctccgtacgtttacccgccgttttcccataaccatccgtttgccggcattgagggagcggacactgcaggagcggattaaactggtccattcattcctgcagaccgaatcaaaatcgatacaatgcagcatcagcatctccggtaatgccctgcgggccttttacatttatgactgcccgaacaatatcggccagctgcgcgccgatttgtgttctgcctgcgccaaagcgtacgtcgattacgtcactggtattcgcgaaatcatcaccatcaccagtgactatcttcctcagcacgtcagcgcctttctgctcaatgaaaccgaacaccgtaagctgtggaacgaactgttagggggcaaaaccaaattcaccgtttttcatcccagtggggatattgaaaacgaaaatatgttctttctggatgagcagcagaaagggacaacactgcagaaaatggagctcagtacactctttggtgccgggccggaaagctcctacctgcagagcctgtatgcgaccaaactcagtctgatcaagagtaaggacgatatcaaaaccattcaggattacgttaccggtacaatttctgaactcaccgatgagatcatacagctcagccagaaacggctggagaaaacctttgatatcaatttccagtatgccctcagtatccatcttgagaaaaccctaaaccggctgaagtttgaccagttgatcactcatcctcgactgaatgacatcaggataaaacataaccgtgaatttaacgtggctctggattgcctgcgcattatcgagaaaaaggtggacatctccatgcctatcgatgaagcggcatttctgaccatgctcttcatccattatgaagatagtgaagtgctgcgcgcgaagcaggtgagggttatgctcattatgcatggagaaagtgcagcaacttctatggccgatacggtcaatgagttactggacgtggaatatgttaaagggtttaatctttcgctgaaagtccagccgcaaattatccttgaacagattattgcctatatcaaaacctgggaggtcaagtctgaccttttcctgttggtggatatggggtcactgtcgaattttggtgcagtgatcctgcgtgagtgtggggtcaggactaagaccatgcagttggtcagtaccatgcatgttattgaagccgttcagaaagcgatgctaggcctaccacttgaggaaatttataacgaagtcctgggggtgaactatcttctggatcaatcctaccgcgccaagagtgaatttaaccgacagacgaagaaactggctattgtaatggtctcttcctcagaagaggatctgccggaaaccctgaccagcttgtcaaaccgcctgacatacaaacccaatattctcgaaattattccgattatctcttccgacaaacaagatatcgctcagcggctgaagtccacatcgtatgtgtttgatattgtttctgttattaccaatattccaatcccgagtcagtggcgtaccctgcgtctcgatgaaatattgtgggaagaaaacattaccactcttcaggcgattatcgacattgaaaccacctatgtcctgctggttgaacccctcaacgggttactgaaaaacatcagtgcttcccgggttgttactgaagtgcgtaaagccgtactgaaaatttcggaagcgcaggggcttaacctgacggctaacgctcatatcgggattgccatgcatctgtcctgtcttatcgataaaaagttgactgatggacctgcttccgctcccattcgtcaaacaagggccggaaatcaggccttctccaaggatccggtactgaagattttctcaaaagagctacatgctctggagactaagtttcagatagaattcagtgatgatgaaatcgtgtacctgaaatcactgtttgaacagaatactttttaa

SEQ ID NO: 112811 - DNA, 171 bp, Enterobacter aerogenes
atgagaatgctgaaatacgatctcgccgcagattatcagggtcattacaccactcctcgcaatgcactaactagcgggcttcaggtctggagctgtatatcatgcggctccagattgatcctgcatgcggagtcacaattagtccccctgattcgtacattatcaacgtaa

SEQ ID NO: 112812 - DNA, 2589 bp, Enterobacter aerogenes
atggcttctctagcaaatcaaactattgcagcttcgatttattatgctgttatggggtccagccctagcgatactgagtttaaaagtatggggcagaagatcgaatcagggcaactgactaatgaaggttatgtagcatctctccttaactcttcagcaggacaaaacatctatcaaggattaactgacgagcaagcaataagtaaagtttatactcttatttatggtagtacgccaagctcaacggttgttacggaacttttggcttctggtagcctttcatctgctattagttctgccattactagtttattagactataaaggcttcgattcgtcggttttatcagaacaatctgtatttgaccagcatattgattcgatcctctatgcctcaactgcaagcattggctcattggaagtccaggaacaagttgcagcatcttatcttgccatgcttgggcgtgacagatgggttgactctgcggggttgaaatattggagtgcagatcttaatagtgggactagctatgagaacatgatcaaaaagcaactgcttacctctgaatatcaaaaaagagtaggtcaactggatggtgatgattttattgccaaagtctataagatcacccatggtgcggtagcgacatctgagcagatagcttcgtttgcggcgctaggaactaacaaatctgttattgcagcagccattattaatgaccttcgctcctcaacagcgaccgataatgtgtcagtttctcagcaacattcattcgagaacttgattggcaccagcctggactacaaaacatcagccgtcttaaatgcgacatctagtggtggcaatgctacaggtactgtcaactcctataccagtcatcaattgtcaaacgcagaaactgccgttttaacagatgtacaactacatgctaatgtagcaactacaatcgatttaaaatttgccgatcagttggctaatcttgaaattgatggaaataatgcagcaactgttaatctctcggataatggcgttaatactggtgttaatatcaccgtcaataacggaggtataactttaaacgccagttctggtgcggataaggtgtttttgaccactgatgctgctgttgcttcgtctacagggacttttaaccttggtgacggaaatgattccttgaagtggttaggtaatggagtatctaatgctcaaaatactgtatcaactaacatcacagctgacggtggttctggtattgatactatctccgccaatctaataaccaaaaatgtcgttatgtcaggtaatgcaatagcccgtacagcgacagtcagtaccaatacttcacagttcactaactttgaaaaactggacttggctggttatatcggtaaggcgacagtcagttcaggctctactgccgcagatcacacttttgacttcggtattctgaccggtaatgcggtttctgaatcaagtactacaggtctgacaaataatgtggttcaggcggcaacttcaactattggctcccagggttttgtcctgtctggctttgcggatgaggtgaaagtaattaacgccgcgggtggaaattcagcgcaactggaagttactggtgatgcaacatcagaaagtagtgtggatatcaccttcctacaaaatgctactaatcattttgatgttaactttactgcaactagcgatactgatattaatgcaggggcattatctttaaatagcagcagcagcgcactttttggcacggcactaactgacataaatatttcttcaggtggtgcaggtgaatttggaaacatcctttctcttattggtaccaatacgcaggtccagaatattgatataaccggtgatcatgttcttaatcttaacctgggctctggctatagtaacgttcggaccatagatgcctcaagtaatactgcggggatatcattggattctgagcatggaggtacaggcgatggtatcattgttcagttgctaaatgctctaccgttgagtgcggttactacaggattgctaactccagttttaaatgcacttggtcttaatggttatcaattagatgttacaggtacctccgcaaacgatactttcagtattatcggaaatacaaccattacaggtggggcgggacagaatacctacgagctaaaaataagtaattcccaggctggggttacaattacggattttgacaactctaaagataccattgtggattcgtcgagtgggttgacgatatctggtaattcatcaggtgaagcggtcgcagattatggcacacgtcctgctgatatattagattctttactgggttcgttactcgggggtattacaaccggtgttgtcggattactgggcggtatcttgggtctggataacagtaatgcactgacatcgaaggtcggaattgcatcagtagtattcagtggctcaggtgataatgctgattcatatgttattattgacaataacgacaaccatactctggacgcaaatgatactgtagtgttacttacagggcagaatcatcagcaactggttgatgcattacattatgcttaa

SEQ ID NO: 112813 - DNA, 234 bp, Enterobacter aerogenes
atggacaacatcatcatttctggcgtaaggatctactttccaaagcccggagaaaaattgccattacctccattcaatatgccaaattttgcaatcagaggaacagttgatgaccgttgctgccttctcggctacctgcagaattcatggatggtgttgtcattaccggaatacgaacattcaggcaaagccattatgtccgcagtcagacagaggaagcggatatggcgataa

SEQ ID NO: 112814 - DNA, 279 bp, Enterobacter aerogenes
atgaatacagttatagttatcattccaattgtaatatcattagttgcattagtatattcaattgtccgagataaggcgaatgatactgctgatttaattgataagattaccaaattggaaactgataaatcattaatggtaaaagatatcgattatcttaaagaagggatgaaaactcacaattcggtactgaattcgttaacggacaatgttaatgatattaaggttaaacttgagagagtattgggtatactcacacaaaaggccgaggcagcataa

SEQ ID NO: 112815 - DNA, 315 bp, Enterobacter aerogenes
atgagtaatatttttacgggtgcagggcttcatatcttttataatgaagatgtacaaaatacacagctttattcgaaaaataatgtagaaattaatgaagtagccgaattccctcaaattaatacaaataatggtatcgtagatgtcgatacatatgattcagaatataatagtaaactaccgggagaaattagtgtagaaccatacaatattgtggttaactacctaccagatgatcctacacatcaatacctaatggaacgtacaaaggatcaatccgaatttcaaatgattgttcagtaccggacaggatga

SEQ ID NO: 112816 - DNA, 318 bp, Enterobacter aerogenes
atgaccaaatcaaccataaccagagagcgcctggaactcatagctaactttcatcgggcaatggtgctgccaccctctcacgatgaaattgaagaactggcccgcatggcgctggacgcaatggatagagaccaggtacgcaacgagcacgccaagtggtcacaggctacgttcggcgatgtcggcccggtaggtccgctgaagcacctcagcaaagaagcgctggaagctgccgccgaacccgatgatctcagcaagtgggctgatatgcaattcctgttgtgggatgcacagcgccgtaccggtatcgctgactag

SEQ ID NO: 112817 - DNA, 513 bp, Enterobacter aerogenes
atgactgagcaatctgaactatacgatgcgctaaaaggaatgactggtgtttcaagtataacggaacataaattcaaggcgaatagcgagtctgattattacgcgtttgggtcattttcgtttacctcggatgaaaatgaggctccctattcaatagtttattcaattttcaggaagccattgtctgtggctatcggttttagcatcaattttttatacgagaagttcgaaagaaagttattgcatcctgaggtggtggagcttgttgataaatataatagatattcaataggaataaaagctcatactttagaacaggaacgtgatgacgaactaaaagtgtccttaaatacagagttttaccttgcgggttcaacaaatctgcttgaggaacaaattaataatatttatgtaacccttcgttttttggaaaatgccccgcttgtttttagcgattatctaaaagataatggaataaatcacgattatctatctagtgaaattaaaagttaa

SEQ ID NO: 112818 - DNA, 777 bp, Enterobacter aerogenes
atgaattttactacttttataatatttgtatttactggtgctactactttctttgcaagtcgtatcattaggcatttcggtggtggtgatgatgttgctcagttagtctacccaattatagctttgttttttctatggatttcatctttcgttgaaagtaaagaaagaaaaaaagaagtatcgaacgccagggaagcagaaagggaaaactgggtttcattatttaaaaattttaagcgctcaaaagatgaactgtatgagaaaataatacaggcatacacaagtgaacgtaaatacaatgattctttttatgcaaataaaattgatgaggcaataaaaaatgagtttccttataaaaaacaagtaactcagttatctgctaaactactggcgatctcttctagaaacgcagagttagttgaagagtcaacacaaaaagatgagcacattgaggctattttaatttcaaaaagttctcttgatagaaagatatctgattttattaggcagctaaggctttttcatcaggaaataaaccgcgaacttaaagatacaacgtcaaaaaactcatctatttggaaaactattgatgagctagcagggaaaatatttgatgaaattaatcgatttgatgcttatatttctcagtcattaattgaagagaaggagcaattgagtcccattaatagaaaaaccacacgacttgaaccgcaaaaagagtttgattctcaagtcgatatttttcaggtggaaattggtaataataggaaaagatag

SEQ ID NO: 112819 - DNA, 1047 bp, Enterobacter aerogenes
atgaaaagtgagatgcttaatgcctttgatgcacttgcgcctcattgcgaggtaagtgctgctttatgtgatgctgcttctaaaggtttacttgatatacctttagatttgcactctatttgtacccgcattggtctaccacaagctagagctgccgatattgagcgctcgttgattgcagggcaagcacacggagtgttcaaacagtcaacgcccctcacatggatgataaatgactctaatcttgcatttcgtctggctcctttattattaggtgttcgtttgtaccgctcacgtgcaaggcatattcatgatgctcgccaacagatgattgtgcaagtccatgatgaattaccgatactggctgctgagcaaccccgtgaattaatggaactgcatgctgagattgaacgagtatcactcaagcaaatgattgataaatatcgtaatatgctgagcaaaaatctaacagagaatgcttggcagaaatttttcgatcaaaatatatttattttgaccatactgttttgcggacccgtacaacttgtatgcagtcagtttcacgcgcagcctagtgggatcacaggcaaaggagcacaaataggcgactatctttttcgtgggatggggcaggcactagctatcgtcgagatcaaaaaaccagatacccctctgattcaaaagagagagtaccgacgtggtggtggtgttcatgctcctgattcagagttaagtggcgctgtaagccaagtattataccaactccattcacttcaatctgcatggagtatccatcgtgataatggtgagctttcaaattcaagaccagacaatacccggtgtgtcatcattgctggtactcttcctgttgaggcaaatatactacgctcattcgaaacattcagatgtgctcatacaaatgtcgaaatagttaccttcgatgaactactacaaaaacttgagctattactcgatattctaaccccaaagaaaaatgtagggtctgaatgcgaagttaaatctgatgatttcaatgcggtactataa

SEQ ID NO: 112820 - DNA, 2220 bp, Enterobacter aerogenes
atgtcaaaacatagggggatgctggcgaatgatgatgaaagcaaaacactacacgctcccacaatggcacgctcaagaggacaattgggggcagcctatgctcctggagcgttctttacttttgaaggcggattaggagcatgtatttccattccagatttatctgcaacggtagatgatgcgcctatccaaccggaaacgaagtcacaaattattctgagattgcaggagatttggcagagttggttcgctcgtgcatatgagattggaactggagaacgtgaaatcgatcctcgtctttgcttggatgagtctctcctcaaagggagtgttgtagttccactggggggagatagcttgtcatttttaaaccccctaagaatggggtattctccagcaccgctgacttttgtttgtaacaaatgcaggcttttcaagagatttgaatcagttcaccagttagcggagagtatgcgggagctgcgcaaggctcgttgtactgctgctgaggctaaaggtggatgcgaatggcgccaagtcgacgttatattcgtgcattggtccggtgagtggatgcctgtgactccaggcagatgggagtgggatgaacgtaataatgccataaggctttatggtgaagagtgtaaagtatgtggtggaagagatttcaaactcaacaccgattcaccacgcatcggccagtggcatttttattgtgctaacccaaagtgtgggcataaagggagcagttcgtggcgacaaaatgaccatttcacaacgggaatcttcaggaatcaacctggtatacctgttgccagacgccgtatggagccaatttcgtatcgtgcatcgtcagcgtattacgcacaatcagaacaattcgtactgtttcctgagtctgaacatcatctcatcacaatgttagaaccacaatacgaggctgaacttgctaccttcatcagtactcagttccgatttgagggcgctaaactttcgactgaagagatgaaatcgactctattagctgctggtgaagagagtgaatggttatcgtatgaacatctgatgcaaataagggaacttcaaaaagataatcccatcattttgaagattgcagatgatgaaattaataaactaattactagatggactactagtacacctccacttctgcggccaaatgtcgaactcccatcggctgtaaaagagcggcttagacgacgtagtgaatataccagtcgttttgacccttttattcttgcggttgaacatgaagccttgaatcgagggaaactttctgcccctagtgatgctggacgggcaaagtttgtacgttttaaccatctggataaagatcttgcgccaaaggatgtaaatgttaagactttacaggaatctgagactaatcgtctaatgagtaaactcggaatcgttgatattggattaatccgggagttcgatctgtgccgatttactcatggatacacccgtgtatcggcaactccagttctcaacaggcataatcaagatatgcctgtacgtttgaaattattcgaaccgttacgtaatggtaagcgacccatttatgttgtgacgcaagcaaatgaggcattgtacgttcgtcttgatccagtagttgtctataagtggctccagactatcggtgtgttagaccttcctgaatggaatgaaagtaattctattaaattaggagggaagattctggaagtaactcagccttttggtcgttatttttctctcttaaaagaagatgatgcatcaacttatcgatatatttatacacttctgcatacctacgcgcatacactcatgaaaaatgtagcagagttatctggcttggatttagggtctatgggggagtatatatttccgctagattttgcattcgtggtatatcgaaacggtaccactatggatcttggtaatttatcctctttgtggcgtaatgaaaataacagattccttgcacgattgcttgagaactcgacacatcgttgcaattctggacgactatgtgatagcactgggggagcatgtcctgactgtattatgattccagagacgtcttgccttgctcagaatcagttactgtctcgtgcagtgttaaaaggagggcatccacctcgtgaggatgcaactcataaggggcaacgtatcaaaggtttccttgaaatagcgaatgatgtttatgaaaagtga

SEQ ID NO: 112821 - DNA, 4188 bp, Enterobacter aerogenes
atgagccagcccactcttcgtgctaaccctgccgaaattagttcaacactcaaggaggctgttgttgacagtctattaaatcttacgtacgcgcagctcagtgggcagggagaggcaggagagtatctttatggtgctcgaccaaggacacttttgaactctggttttctattaccacagcgtaacccattaggagacgatgaggtaacatctcccatctgggtttcgtcacatggactgcagatgcagctcaatctttccgaatcttcaataataacggtccagcctaatctgtgtgtctatgttagagttctaccccaagaagaagatctcacgaggccgaattgctgcccagtatttatgttgcgcagagctattgttgacgaaattactgcagagcgtaaccgccgattggaaaaagcatgggaagaggttaaaggagcttatacttcaaaatggaaacatccagagtggggtactattcgctctcagattgtggaagaaatctataccgctagaggtatacctagacacttattaacatctgatttttcacaagattccgtagaagttgaagtggaatcatctagtgaaaaggatattctaggagaaggggctaaagaaggtatatttgtcaaagtaggggaagctttaccaataaaagatgaacattttgaaccgctaagtgttcctcataaatggatgaggttggatgttaatcttccgcctctaaagattgatacatctaagtcttatgagactctcaaaagcaatattgctgaacatgcgatattaatgaatgcaactctatctgcgagactgcaggaatgggcggaaagtgatgatcctaatgtaggtggaaaaaattggggatataggcatttggtaaatattcccgcgagccaatacactaaatgggaagatttcctcaatattgttcgcaattcaaagttacatatcgctttaccaagcattcaacttagttggaactttgagttgaacgaagattggctgtcttcttccaaacgtagtttctttcttgcccttgagaatactagtagtataccgagtcagtatgaagatgagacggacgaagctatttttcttgtatcccttcaatttaaagttcccacttcgcttcaccatcccctcaagcttgagcgtatcgatccatcttaccgttataacaagtacctaactcaccccgcaataggccacaactgcggtattgttcaggtgaagtctgatgaagatttcaaaatattcgagacaagctggactcctcgttacatacagccgcgcatcgttcctactagtgcgaatggggttctgcgtcatgtgcgttcgctcgcaaagcctgagggattgaatggtttagagcctcttataccagcaatgcgtgaatggattagcagtcttccctcgcaagtgaatcctgctgaaggattagatacttctgatagagaaggaattgctcgagaaggtgaagctttcaggcaagatttgcagaaatggacctttgaaatggatgcgatagccgtgggtttgaaatgtttggcggaatcgcatgcatcttggaaaatgagaggcttgcagtctgatcctaaagctatcgtctatgaagcgtggctagctacgaatgaaacaatggctgactttatgaagtcccgtttcggtaacgataaaggcgagtggcgtcttttccaactggcttttattatcgctaatatccccgcgttagcttcacgcatccctgagttttcgcatttctatgatgagcgtagagatgatgctgttacattgctctattttgccaccggtggtggtaaatccgaggcattctttggacttttagttttcaatctcatgcttgatagactgagaggtaaacgtcgtggtgtgacagccttaattcgctaccctttaaggttactgacgatccagcaagcacaaagatgcgcaggtgtacttgcacatggtgaacggattcgtaatcgctataggtatgggggagattcattagccataggtttttgggttgggagtggaggatctccaaattatcatcgtgaaaaaggagttaaaagtatccctattgtgtcgtcggttcctcctgatttagctaatgagcagcttcttcgagctaaggactctaagtattcagcggcaatgcgtgcatggcgaaaattatcaaactgcccattttgtggtagtgaaactgcattgagattgtttgttgctcacggttgtcagactttggggcacgtttgtactgatattcgttgtgatttcaatagtggagattggaagccgttgccattttatatcgtcgatgaagatatctatgatttagcaccatcagtcttattaggtacagttgataaattagctcttattggtcattcaaaaaaaactattcggcgtatctatgctatgtttggggccgctccttgggttaatccccataatggacgattgcatgttccaaccaataatgatctagccgcagggccagcagcaaaaggcatggagggagtatttcccgcctacagaaatggtaggcatatttttcacgatccgtttccaagcttgattattcaagatgaagctcacttgcttgatgagtcgctagggacttttgcaggcttatttgaatctaccctggatgcagtttttgaatatcttggtgactcccttaaagatcttgtggctgtgtgcgaccaagggcgtcggcgtcgttccaaggttattgcagcttcagccaccgtatcctctccagaaaggcagctagaacatctctatcaacgttcaattccagcagtgcagtttccagaacctggaccatctctgtatgagtctttctatgcaaaacctgcattggcagaagaagagctccgaaaaaaacatcccgacattgaggtcgcaagtcgacaggcacgtatatatacggcttttatgaccaatggtaagccacacacatcgacaagtgttgcggtgctatcagggtttcatttaactattagtcggctatttgacaatcttacctctggtgatgagctgcaattccaaattgctcgtcagatgttagctgggcatgtatctaagggattacttcaaaaactgcataagcaggtgttatccgaggctaatgcttctgaattagctacacttatcgacttgcaccgcattgcgctgacctatgtcactaataagaagggtggtgatcaaattatggcagcagaaactgaggagacgcgcaaacggcacattaacgaaggcattgagcttgggggactggacactcgtcttattaccggctcggtagagcaaggtgagattcaaagcgtggtggatactgcacaacgacgtgttgctccagaagaaccacttcctccgttaagagaacagctacgttccgttatcgcgacttcagctatctcacatggtgtcgacgtagatgagtttaactcaatgttctttgccggaatgccttctgacattgccgagtatattcaggcttcctctcgagttgggcgtacacatataggttttattgtccttgtcccgacgcctcaacgtcgcagggataggcacatcgtgcatatattcgatatttttcatcgatttcttgaacgaatggtgcaacccgctgctattgatcgttgggcagaacgtgctatcgatcgtgtatatcctagcctattccaggcatatttgttgggcgttcgtcctagtagtgaattaattcagctgcctgaaggggagaaggccagaacccctgatttcagttttattccaaatgtacgcaaagagtttatttctcgaggtgattcatttattgatgaaataaacaagtttgtagagttagcagtggggttgaacggtgcctttgtacctgaaggtgaggagtactatcgtgatcgcattaatcaaaggacccgtaatctcattgtaaacgcctggagtagtccgatgtgggggaatggtaatatcgatgcgtacttcaacggccaaacagatcccatgattaagccaatgacgtcgctacgcgatgttgatcaaacaggcattatccaggcatcatccctagatgtaaatggcagaaaacaatcacttgatgaggtacagttagtgatggatttccttcgtcatggtgtggctggcaacgatggttcggataatgcatag

SEQ ID NO: 112822 - DNA, 2790 bp, Enterobacter aerogenes
atggcctcagtaaagcaacgtacagatccatgggatgcattaaggcgcaggcgtgaggaattggcaaagcgcttagctcatatgcgtagaatttcacctaaacctgcaaaatctcgtattaaacctttatctgagcctgtatctgtagctgaatcgatatcaccaccagcgcctgttgttcctcgtactcatgatgccctaatcccactattcagagatgactgtccccagccaagttctccatcaagagcaatggtgaaacttgctgatctatatttgcatgcagctcagcatcgctcacgccatattacgttagtttggcccgcatcacttaaaacgttaactatgattcacgctcttgctactcttgttcgctggcaacaaggtgataagcaaggcatccgcggattactttttccagtaaaaactaatgtattcaattgccttaaccacatttattatgatcgaactagtatcatgcgtatcgccaaagagttagctgaggccactacaaatgcccgtgtcacccgctccatgccagacaaggatgcttttttcttttctcttaatgatcataacctgcctcttatttctgaaaaacaggtcaacccgacgattggtgagttgttaccgctgtttctggcaacgcctaattttaagagttggacgtcctgccattcacgtctacttgcactcattcgaaagaaacttttaaagcgagctcacgctaatgctttaaagcagtcaaactgttccatcctaggtgatccccagactgcacctgatgctatttttgcactggatgggcgcatgacaaagatagaacttcgtaaagcttgtgaggctttagctaagtttggccctcctgaggttgtgatggtgcatgtttctcgctcccttcgtttcgaggctccagattggaaagcacaagttgctcgtttttgccttatgctggaggaggtttttcgtagttccccaccaggtgtgatagtcgttgcggatgaaccacatgtcgcttaccaactaaaagacaaactttgggaattaaattataaacgcgagaaagcgaatcagtggcatacacctcacgagtacattatttcaggtattccgagcacaataagtggtgatggcttgggcatggatgatacttatgaacctgagcatcctacatcacgtgaatttatcatccatatagtagacgctgatattgcgaaagtcgcagataaactcctacatattgctagcactataccgggtggaaaaaagataggtaaacctctcattgaggcatcttcattcctttgtcgtttagccgcattaccctgtggtattcgacatatgtcagagtatctatctggttctgaaatatctgacaggacgcgtactgcctttgactggcttcattacttaggtgctgttaatgagtttgagcgtaatattggggttggagataaacgaccacttcttaatgattgcttggcgcgaggaactcagttatttggtaaatactatgaggctactccttttgctcgtaaactggctgatcttgtctcaagtatttcaatgcgtaagaaaaatagagtagccatagtatttacaaatgtattatatcggcggttggctgagcgttttcttgctgaatatgatgattatcctgaaggagtaacttataaatccttttatgaacgaatagatttattgtcagcagttcatctagaggaaaacctaaatggcctaaatggagccacacttatatttgcagggttaaatgaaaattgcttacgtttagtcctgacggatgatcgaattcctcatcattcagtaattctcttgactcagcaagctggcaagtttctacgtgctacactcaaacctattattgagcgaatgcctgagtttaaatcttacaaacccagaatggagtctatcgtacgacagttacatgacttacccggagatgcttcggttctttctactggcagttatacgttgcccacttttcgtgtcgagttgtcatcagatgtgccgattaacgatcaagaaattactcctggttcttgggcaatccagctcgataatggagagagacaatatcgttatgaaacatctgacgtatatgtatatgagcctacttcaacatatgcatcggatgcgggatttagagtatgtcaagttcgttcgcttcaggtcggagacaaagtttttatcatgtcggtcgaaatgcgtgagatggttgaacaagttttatcagacgcagggatatcaatcaactctgacaagaccttcgaatcagcgctgagaagttatcacgaacagatacaaaagcgtcttaatctgcgcttcgggcaggtcaaacatacagataagattcgtaccattcgagaagaaatgcttgtgcttgctcctcaattgaaaagttatttgccaagtttacaggctatgcgtcattggattgatcttgatcattcgtccgaaacacctttcgatcagcttcgtccacaagccccgatgcgtgaagacgtttttaaagcatttgcacaagtgcttggatttacatcactggagatcgcttaccagtggcagcgggttatcatacctatacgcaacactcgcaggctggatggtcgccatttatctgatatatatgcatacatgcttttacaaccagaatcagctatgtgtaacgcaaatattaaacggcaaactttggctagattgtttaatcaggcgcgcgagaatgtagccactattgagcgtgtttaccctattaaggaatttcaaaaatga

SEQ ID NO: 112823 - DNA, 1737 bp, Enterobacter aerogenes
atgcttctaccagataagacccgatttcatcgtttagttcgtggcctccatgccgtcatgaagaaatatcagctagaagctgatttggttcttggcagtgcgctcgataagtggtgcaattattgcttccccggacttcctcagtccggtttaccggtagtggatacattagataatgaggagagcgtgtgtgcatttgtagattttgtgaaggatcaagaactgcttgagtccacttactggttctcctctgcttatgctcaacttttggaaaaagattgtcgtaagcagttggcaatgttctttactccacctaccttgacaaggcgattgcttgacgacttgtcggataaaggtgtggattttgccgattgtagtttctgtgatccggcttgcggtggcggagcatttttagcaccaattgcaatgcgtatgagagatgaacttttacgtagagaagcaagtgcttttcaaataattaatcatataaaagagaaattgctgggatttgataaagacgccacattatgtaaattgtcgaggcacttcttattaatggcactatatgaagaggtcatgtccacaggggtttaccctattttccaaatttatcatggtgattcacttttaaagggcatgagtttcttgggtaaactcgatgtagtagtttgtaatcctccatttagaaaaatgtctaaattagaagttaaagaatatattgataaatattctaacgtgattgaagcacaaccgaacttgtattcacttttctttgccctatgcgtcaatttattgaaacacaaaggtatttgtgcattgatcactccaaccagttttttatctggtcaatatttctcaaagttgcgtcgattcttgttagctcagactaagatgctctgcattggaatagtgagagaccgtctcggcatttttatcaatgtttctcaagaaacgacgttgaccttggcatgtcgtgaaatttctgggtatacgccgacgaatgacacaagagtatcggtagtttcacgtgatggtagttatattgacatagggttatgtactttaccagattctggggcagcatggccgatccctcgtacaaaaagcgatgttgcgttgcttaagagagtgagtaaatctccgataaccttggcagattatggatatgtggctcgtataggggcttttgtttggaatcgagatactcgtatgacctacgcatcggcaaagagtgcttctaatgagcatcgcggtgcagtcgttccattactttggtccagcgatattactcaggatggtagtgtacagtttactggtgctctaaaaacaaacaacgaacattgttttgtgaacatggaaaaaaaagatcatccctcgattgtgcaaaatccttgcgtgatattgcagcgtgtaacttccaacagccagtcgcgacggttaattgcagccgctgttccaaaagcaatttttgacacctatggtggatttgtaggtgaaaatcatacagttattattgaacagacggtagatgagcctgcactgcagccaaatcagttagctgaattgctaggaacacctacggtggacagatactttcgttgtatctcaggcgcaaccaatgtatcaattttcgaacttaatcaattacacctccctgaaccagccaagctcaagcatcacctttcccatgggaacaatatggccgatgcagctcgtaaagctatggacgacatgtga

SEQ ID NO: 112824 - DNA, 453 bp, Enterobacter aerogenes
ttgaccacaacagaaggctggctttatctggccgtggttatcgatctgtggtcgcggtcagtcattggctggtcgatgtcctcacggatgacagcacagcttgcctgcgatgcgttacagatggcgttgtggcggcgtaaacgtccggaaaacgtcatcgtgcatacagacagaggcggtcagtactgttcaacggattaccagagcttactgaaacgccataatctgcgggggagtatgagcgccagaagttgttgttacgacaatgcctgtgcggaaagcttcttccatacgccgaaggtggaatgtatccacggagaggactttgtcagccgggaaatcatgcggacagcagtgtttaattatattgagtgtgattacaatcggtggcgtcgtcacagtgcctgtgacggtctcagtccggaacaatttgaaaaccagaacctcgcttag

SEQ ID NO: 112825 - DNA, 864 bp, Enterobacter aerogenes; identical to SEQ ID NO: 86783

SEQ ID NO: 112826 - DNA, 1635 bp, Enterobacter aerogenes
atgaacaaaaatgataactacgagataatatttggcagttctgcttatgtggtaaatatcaataaatcatctaagtatattaatatttacccagataaaaataacttcaatgatttcggacttgatagtaaggtttttatagacattgtagataaagaaataaataaaaacatatcgctccccgggtttataggattcattgaagattataaagatttaaatggaaagtatgccctcgatgctatcagtaaaaatattgaacagttatctcttttaaatgaaaaaccatatttcttctttacaatgcttagagagttaaaagattatagggaattggttgaaaattatggtgttgaagaagcgaataaaattctattcgctataaatgatattacactaactgtacgtgattctgagtctcaacgatataaaaatgttgcgctaggtactgatatttttaacaaatcctttatcagaaacgctgagtcatattttgcttataaaaactcatcgtccgtgttaaaaggactaaattatgagagcgtggggcttttatctaaaaatattactctttcatctaaagaagttcaacatccaatcttaagctttaattttgaccatcatagtgagttacctaaaagagtcagtattctaattggtgaaaacggagttggtaaaagccagttgttaagaaagattgccttagcagctattaaagggactgatgaaatttcagagtgcgatgaggcagagaatacaattaatagggttttgataaatcggttgcttgcattttctcctacaaatgaaagtaagtcagttttcccttccgacaaaataataaaatcaaaaatatggtatagacgtttttctttgaatagaacaccaagcagaaggaatgatattaataccaatgatataataattgaattagccagaagcaatgaaaatattagagagttaagtcgttttgaaatatttgaaaaagcaatttcaaatttaagaaattatttcgaattggctttacctttaaaggattctaatcgacaaccattatatatcagagatctaaacgattatagtgaagagcgaagattacaaaattttcgagctgttgatctttcaaaggatccagtgagatatattcagggaaaatcacatcctttaagtagtggtgaaatttcatttataagattttgctcacaaatttgtgcaaatatcgaaaatggtaccttagtactcttagatgaacctgaaactcatttgcatccggcttttataaataaattctttgctatattggataccttattgagtttaactggctcttccgcaattattgctactcactctgtatattttattcgtgaagtgtttaaggagcaggtaacagttctgagaaagggagaaaatgggattttacaattggagaaacccagactcagcacatttggagccaatattggtaatatatcttattttgttttcggggaaagtgaaccaacagatgttttgctgagggttaaacgaaagatattaaaagagaaaatgtcatggtctgaggtttataataaatataaagatgatttttctataaatgtattaactcagttgagaaatgaaatagaaggataa

SEQ ID NO: 112827 - DNA, 327 bp, Enterobacter aerogenes
atgttaaaacttgaagtggttaaagagcactgtcgcattgagcctgattttaccgttgacgactcaatattgaccctctacatcggagctgcttctcgttacgtcgaaacatggactcgtcgcaaaatgtatgagtccgaaaccagcgaggggtatgcagatgatcctgattcaattctccctggcgatgatgtgaaagcagcgatgcttctgcttatcggtcactggtatgaacatcgtgaaaccgttgttgtaggccaaacagcgatagaagtcccatttgcggtcgaggctcttttacaaccataccgaatctatggactgtag

SEQ ID NO: 112828 - DNA, 243 bp, Enterobacter aerogenes
atgaaacttatcgcggtgaaaccgatttattttggtggggtagtggtgacggaaggcgagtcactggagaccctggagcagcatggtcgtgagctggttctaaaaggttatgcacggctggtggatgttgataatcctgcgcagccggaacagccggaacagccggaacagccggaacagccggaacagccggaacagccggaacagccggaaaccgtgccagagaagaaggctaaaaaataa

SEQ ID NO: 112829 - DNA, 1218 bp, Enterobacter aerogenes
atgtctgaagtaaacgagattctgaaaaaagtcaccgcctccattgaagaagcaacaggcaaattcaacgccaaagcggaagaggctctgactgaggcgaagaagaacggtaaattgtcagcggaaactaaagaaaccgtagacaaaatggcgaccgagtttaatgcactcaaagaagccgaaaaaaccttgaaggctgcgcttggcgaactggagcagcatgttgcgcagatgccactggcaaacgcaaaaacggttgttgagactgtcggccagcaggttatttctgcagaagccattaaagttctttcgtccagtatcgaagggaacaagcgtatttctgttcctgtaaaagctgcgttgatctccagtgacgttcctgaaggtattgttgagccacaaagactgccaggtattgatgtagcgccaaagcagcggttatttattcgagatttaatcgcgcctgggcgaactggatcaccggctattttctgggtgcagcagaccggctttaccaatgctgcaaaagtggttccggagaatacggccaagccgtacagcaatattgagttcacgccgaaaatcacccctgtgacaaccatcgcgcacatgttcaaggcatccaagcagattctggacgacttcgctcagttgcagtccatgattgatgctgaaatgcgttacggcctcaagtatgtcgaagagcaggagattttgttcggtgatggcactggcgcacaccttcatggcatcgtgccgcaggcaacggcttacagcgcggcatttgccgttgaacagcagaatggtattgacgatctgcgcctggcaatgcttcaggctcaacttgcccgcttccctgcatccggacatgttctgcacttcatggactgggcgaaaatcgaactgactaaagacaccctggggcgctatatcctggcgaacccggcggcattgacgggcccgacgctgtgggggcttccggttgttgccaccgaagcagctgctttccaggggaaattcctgacaggtgcatttaatgctgcggcacagcttttcgaccgcgaagacgcaaacgttgtgatctcgacggagaacggcgacgacttcgagaaaaacatgatctctattcgctgtgaagagcgtctggcgttagcagtaaaacgccctgaagcatttatttacggctcctttactgtaccggcttccggcggtcagtaa

SEQ ID NO: 112830 - DNA, 849 bp, Enterobacter aerogenes
atgacaattagacaacttccggttgctccggcggggcgcccgtgcgcgggtgttaccagtgagccccagccctcagcgcttgaacgctggaatggtgggatcagggctgcatccgataatgacaactcgatttctatttttgatgttgttggacgtgattactgggatgagggtgtcacggcaaaacgcatatcaggcgctctacgttcgatgaacggtgcagatgttacggtaaacatcaactctcctggcggcgatatgtttgaaggacttgcaatttacaaccttctccgcgagtaccaggggaaagtcactgtaaaagtgctgggtatcgctgccagcgccgcttcaattatcgctatggccggggacgatatacaaatcggacgcggtgcctttctgatgatccacaactgctgggtagtagcgatgggcaaccgccatgattttgcggaattatcgatttctcttgagccatttgataccgctatggccgatatctattcagcgcgttcagggcttgatatcgcgaccgtacagcagcttatggatgctgaaagttatatcggaggcagtgatgccgtagaaaaagggctggccgacagtctgctttcggctgatgccgtaagcgatggtgatgactccccgtctgcagcgctgcgaaaacttgatgcgctactggcgaaaacaaataccccccggtctgagcgccggaaattaatcaaagcgttaacaggtaacacgccgggcgctgttaccgattcccatggtaagcctggcgctgccgaagaaatcaaacctgaaacactcaattcacttgaaagcgctcttgcggcgttagtcaaataa

SEQ ID NO: 112831 - DNA, 1308 bp, Enterobacter aerogenes
atggctaagaataaacagcaaccagggcgtgttaagagcgctcttttaaactggcttggtgttcccataagcctgacgaacggtgaattctggcaggagtggttcggaaccagcagtagtggaaaagtggtcaccgctgacaaagttatccggctttctgccgtctgggcgtgtgtgaggctccttagtgagtcggtctccacgctaccgctaaaaatttacgagaggcaggcagatggatcgcgaaagctggcccagaacaatcccgcctatcagatattatgcaggcgtcctaacccggaaatgacaccttcccgcttcatgctgatgattgtggccagtgtttgtctgcgcggaaatgcgtttgtcgaaaagctgtatatcggtagcaagctggtatcgttggttccgttacttccccagaatatggttgtaaagcgacttgataatggaaaattacagtacacctatacggatagcggcgttccgaggatcatttctgtagaccggatgatgcatatccgcggatttggtcttgatggtgtgtgcgggatgatgccgacaatggccggggttgacgttttcggcgcggccatgtcggttgatgaagccgcggcgaaaatcttcgaaaatggcctgcaaagtaccgggttcctgtcttcaaaaacggcgcttaataaggaacagcgagaaagattacgtaaaaaccttcagtcttttattggttctaaaaacgccgggaaactgatggttctggaaaatgaactgacataccagaacgtcaccatgaacccggaagccgcacagcttcttgaaagccgttcattcagcattgaggaaatttgtcgctggtttcgcgtgccgccatttatggtcggccatacgacaaaacaatcaagctgggcgtcgagtcttgaggggatgaacatgctgttcctgacacatactctgcgccccctgctggtgaatattgagcaggaaatctcgcgttgccttctgaacagtgatgaggatttgtttgctgagttctccgttgagggtctgctgcgagccgatagcgcaggacgtgccgcgtactataccagcgccctgcagaatggctggatgtcgcgcaacgatgtgcgaaggctggaaaatatgccaccaattgaaggcggggatatttatacagttcagctcaacctgactcagttgaagaatcttgaaaacagcaacccggcggttcaggcgctggctgtaagagagcttcataaccacatattccctgatattcctttcgagcaatcgccacttaaacaggctgcttag

SEQ ID NO: 112832 - DNA, 1743 bp, Enterobacter aerogenes
atggtggagaaaaagaagaagacccgctcaaccagttcttcggttgatcccgccacgcaatatgcgcgggatgtagactccggcaaagaaatcgccgggcctgatatcagaaactcctgcaaacgacatctcaaagatttggaatcctgccatgcacgcgggttggtatgggatgttgcagcggcgcagcgtgctatcgacttttttgccaaagtactgaagctaaacggcggtgagcatgaaggtaaacccttcaacctcctgccgtggcagtgctttattgtaggttcgatattcggatggaaaaactcagacgactatcggcggtaccgtatggcttacgtcgagtctggtaaaggctctggtaaatctccacttgcagcgggtattgctctttactgtctggttgccgacaaagaaccgcgcgcagaagtctacgcagcggcgacgaaaaaagaccaggccatgatcctttttcgtgatgctgtcgcgatggtagatcagtcccctgcgttagcacagcgaataaataaatcaggcggcgcggggaaagagtggaaccttgcgtttcttcagtccggctcatttttccggcctatcagttcggatgatgggcagtcagggccgcgcccacactgtgcgttgattgacgaaattcacgagcacaaaaacaaccaggttgtggaaatgatgcgcgccgggacgaaaggtcgtcgccaggcgttgattttcatgatcactaacagcggtcacgacaaaaccagtgtctgctacgactatcacgagtatgggcggaaagttgccgaaggctcgattgaggatgatagtttcttttctttcatttgctcccttgacgaaggagaagaccccttcaaggatgagtcctgctggaaaaaagcaaacccctcacttggtcacacttttaccgatcgttacctgcgtgagcaggttacgcaggctcgggggatgccgtcgaaggaaagtattgttcggcggttaaacttctgtcagtgggtggatgccgataacccctggatgagcagcgatgtgtggatggggtgtgaagaggactttgacttgcaggagatgcagggagaagaatgctatggcggcctggacctttcaggaactcgtgaccttacgtctctggcgctctttttccccaaaaaaagaaagctgctggtggagttctggacaccaaaagatactttgctggatagagcgaaaacagaccgcgtaccttatgacgcatgggaacggggaggccatatacatactacgcccggaaaggcggtgaaatatggctttgttgctgaacgcattgctgatctttccatgtttttcgatataaaggcgatcgccttcgaccagtaccgcatcaaatatcttgaaccggaactggagagcgcttctgtgtcggtaccgcttattcctcacggacagggatattacaaggcgcaggattctggactgtggatgcctcattccatcgagctctttgaacagatgctggatgatggcgtaatcattattaaaacaaacccctgcctacgatggaacgctgcttccgccgtaaccgaagccgaccaaaaagaaaaccgcatattcgccaagaaaaagagtactggtcgaatagatggtgtagttgcgtcagcgatggcaattggtgctgcagaaggttatgagcctgatgatggcgatattgagggcttttttgacgatccgatcatagtgggtatctga

SEQ ID NO: 112833 - DNA, 465 bp, Enterobacter aerogenes
atggcaggaagacgcccgaaaccgacccatctcaaagtggtaaccggtaatccgggaaaacgaaaactcaacgataaagaacccacgccagcgcgagaaatacccagccctccggcgcatctcaccgactggggaaaagtagcctggggaaaactcacaatgctactcgacggaatggggattctgaccgttgcagatacgctggcgctggagcgtctttgcgatatttatgccgacattttgcagctgcgcctcactatcgccgatgagggtcgaacatatacggtgaagaccgatggcggctttttgattaaggcaaacccggctgtggccatgctggccgacgctgatcgccgtttcaaaagttatctggttgaattcggtcttacacctgcagccaggacgaaggtgaaagtagatggtggagaaaaagaagaagacccgctcaaccagttcttcggttga

SEQ ID NO: 112834 - DNA, 237 bp, Enterobacter aerogenes
atgcgcctgacagttctcgacgacgatcccggtgaacgcatagtgccgggacatgaacgcgtcacagtataccttgatggtaatgaggtgaagcacgtcttctcggccgacgatgataaaggcgaggtgattgccgccgtgcttgatcgccggggttacctcattgccgagaacggcgaggttaaacggcagacgctgttcggtcaggtgaggatcgtacgcccatccgagcaatag

SEQ ID NO: 112835 - DNA, 465 bp, Enterobacter aerogenes
atgttgctggtggatttagcccaaccccctcacgtggaaggggctggaataaatttgttcatgccacattcacgcagtggccgcgctcatgcccttgagtcgtatgccgccctatggccgcccataaccagttcaggattggcgttcctgatgcttccccggcgctacttatattcattaaccctaaccagatgcgaagctggctcacgacgagagactcgggcgcaggttatgcccctgcgattgccgccattcggctgctgcggtctatccgctttacttgcacataatgatttcctccattggttgatttttactacaccgtattgccgacatcctgtcccgccacggttccgacgcatggttttaagtcgcgccgttcgacttcactactcagcgaatcatcccagtcttcatatgccctgggcggctacttcgtgggcgttctgcctgttcactgcttag

SEQ ID NO: 112836 - DNA, 546 bp, Enterobacter aerogenes
atggatgatcagcgggtattaacaattagcgcctgtcttttcaccacatcaggctcggtggtatcttggttgctctcacacacccaagaaggaaaaaacatgaacggatatgaaaacctttactcagcaataattcccgaccttgctaagcactatcaaattactgaatttgactttagaaataatcctcacacgacaagcgtagctctttgcaggagtcatctttataagctgattcttatagaactttacctgcatgaacatcgccttaaatataaaaactctttaatttcgcttgatggacttaactcgttgcatcacttggtgtttcaaaagacgaactggagctttgagcaaattaacagcttgagtctttatgcaaagctgtttgttcttcttgatgagattgtgccgagcaaattgagcgataaagctcagagttacttagaagtaatttcaaagagtcagaatcttttgccagttgatctagcgagttacgcaggttgggtgataggttcaggggaccagtttttaaaatataattaa

SEQ ID NO: 112837 - DNA, 477 bp, Enterobacter aerogenes
atgactgatctcacacgacttttagccagcctcaagcgccgttcagcccacgtaaaagagtttggtgacgacattacgtttgtaaagctcgaagacctcgacgcgctggtagaggtggtggagttggcacgaaccaaagccgcggaatgggaggaaaaagcagccatcaactatgcagagcgcacggccatgattcagcatatagacgagctggagtcccgcgctgtcaccttgaagctgccgccactgaatgatgacctgatatctatccttggccgacctaacttcatgtgcgcccacttggctgaactcctgcgtaaatccggagaggatattaagcgaaaatcagaacatgaacaggcggcggttattcattggttcctgggcctttatcttgaccacggcaataaatgggaaatcgttgcaaaatctgacattcagactcgcgccgctggaattaagtgggagtcagaataa

SEQ ID NO: 112838 - DNA, 234 bp, Enterobacter aerogenes
atggctgttgcaaaaatgctttgcgttagctcgaccaaacctgactggtttactccgggtgccatatacgactcagaaccacgctgtgccgatatttgcatttgtggcgacaacctcgtgtctgaccttaacaaagaggactggtacgaaatgagccagcgtgccgatgggctgtggttcttaatcggttttcagcaatcaattttgttccgggaggagccaaccaatgactaa

SEQ ID NO: 112839 - DNA, 483 bp, Enterobacter aerogenes
atggataataatatacgaaaaatagtgcatgcttttcgaaacgcattagttatagctgctgaaacccgttcatatcaatgttttcatatgcatagatggtcagaattgaataattttccatatggatgttgtgacttggcaagtaactttcttggtaaatatttagaagaaaatggttacactccggaaattatatttgtggattgtcctgatgaagtaagtcaatttattggtgcacatgtatttgtaaggttgggggactattatattgatatcacaagaaatcaatttaatgattttaatggaagggttttaattgaggataaatatggaacgctagcaggtttaatgaaaagaataaaacgaatagatccatcagatgttattgagcgtaaagttgatatcagtgatgcacgcatgccagcatatgaattatacaactttattaaaaatattgcagacgaactcatgaaagagagttaa

SEQ ID NO: 112840 - DNA, 723 bp, Enterobacter aerogenes
atggacttagaaaatatctttcgtgacgtgaagttgagtaaaaccgaaatgaccgtgctgcgttttattcaaaatgacccgcagctatgtatccgcgaagggatccgcaccgtcgcggagcgctgctacagtaatccttcttcgctggtgcggctggcgaagaagcttaagttcagcggctggctggagctggtctatttcatcaagttcaatatcaccatgccaaagctcgatgtcaccaacgatatcgattatatgagcattcagccggcagaagcgctgacgccgctgctggcaggccttgagcagcagcgtattttgatccacggcagcggcttttcgcagctgatcgcccagtatatttataataagtttctcgttaccggcgtgaacgccagcctggcattgtggcccgattacgaaatccttgagcaaaaaaacgctgcccgctttgattccatctggatcatttctaaatccggacgcagcagttcggcgttaaattgggttaaggcgctggaaggcaaggagataaacctggtttgctttaccggcgattatcaaagcccgctggcgcaggccgcgaatacggcgtttattattcatgacccgcagaagttcgacgatgatatttactggagcaacccgttttttggctactgcatattgggctttgagcggttgttaaaaatgtggtttaccagcgtacgtagcaataggtag

SEQ ID NO: 112841 - DNA, 504 bp, Enterobacter aerogenes
atgacaatacaagaaaataacgcatatcataatatgcactatagagtaaaaaaagaaaaatcatacgtaggtagcagtatatgtaatgactggtatgatcgaggtactttcattgaatggcgtaataattcaaatacaccatataaggatggatatagtttggacaaggatattaaagtatatgggaatatggtttattcgccagatacttgtatgtatgttccacatggattaaatctattattccgtgaactaccaaataaaaatactggtattaagggtgtatatcatcaagataattgcattaatccatatcgagtaatattgagtttcgatggtaagcattccacacatccacttaataggaaatgctttccaacattagaagatgcacagaatgccgcaatttcaatttggaaatggcatgtatcaatctggtatgatcgtatgatggcaagtggtgaggatgatattgcagtacatctaataaaatatttgtactaa

SEQ ID NO: 112842 - DNA, 474 bp, Enterobacter aerogenes
atggctgaactattttatccgcatgactatctccctatgcctttacaggaaggctatggattccagccagtcagccctttgaaacgaactcaactcaccacaggccgggcgagacaacgcagggcgtatacctcgactcccacggaagcgactgtatcctggtttatggagagcgatgttcaggggctaacgtttgaatcgtggtaccgcgatgcgctctttgatggtgcggcctggttcatgatgaagttgcaaacccccgcaggcataaaattctacaaatgtcgttttacggatatctatcaggggccagtgctggtagctcccatctactggcggtattcggcgacgctggagttatgggagcgtccactattgcctccgccgtggggtaactaccccgagtggatagcaggtagttcactgcttgatatcgcattaaacagggagtggccaaagcatgacggtgcttaa

SEQ ID NO: 112843 - DNA, 141 bp, Enterobacter aerogenes
atggccctcgttacccggcacagtgctgccgtcatccgcttcaaattcggggatgcaggcctaagtgatcgtataagcgggctgaccatcctgttcggcgaagtctgccagagctttgatttgctctgcggtaagaattaa

SEQ ID NO: 112844 - DNA, 525 bp, Enterobacter aerogenes
atgaatcgcggaatttttgcatcaaagttcatgatgaacgaagcaacttggcaacgacttgaaaggctagtaaacactgaagatgatattggtttggttttaagaatgcacctgattacagaagcaatgattgaggcattctgttgcgcagctgtagataaccaaaatctctttgatggttttggtgaaaacttaaccatgacctatgccgcaaaaattcagctagctgccaacctcggcctaaatgaacactctgtcgcagaacttaagcgtctaaacagaataagaaatgttcgttctcatcaaatagacaacccggaaataactgacgcagaaattgaatcattacgaacatttatttcccgtggtggtcaggaagatctcgttaactcagcaagattcggcataagagttggggatattgatctgaatcttaaccgcccagacgcgaataatcgtgaaaaactaatagctattcttggcggcatcattcttagactaactaaacaagttgctggacaatag

SEQ ID NO: 112845 - DNA, 192 bp, Enterobacter aerogenes
atgtccgaaatctaccaaatcatgctaaccacccagacaggcgaaaccttcaggggcaagatgtcacgacgtcagcctgaactggttaacggctttgtgccactggcgaccgagacgggagggtatctgtacttccctcgggccgatgtaaagcgcgtgcagttcacgccaacattgaaggatgaagcatga

SEQ ID NO: 112846 - DNA, 435 bp, Enterobacter aerogenes
atgtcaagctacaggataaaagccgctggaagccatagtggtaacttgagcgcagtgatagacaaagtgattcaggttgcatcagcaaaagaaaacaaggatgtgttggttttagtgtcgcaaattaacttagcgaaggatgacgatagaattgagcaaatctttggcgagcttatgtttgatctcttggtgaaaaaaagagaaaacattgttggtgttggggatgttaactttgaggtgcagccttattcctatctcaaaaacaatactcaccgagcatttggccgaactgtcgttgttttgaaccctagcacgcaagacttggatgcttttttgcagaaaggtaattctacggttgattggatcgctgttgaaatgcatttggacggagagctcgatagttgggtacaggcaaaccaagcctccgacatttaa

SEQ ID NO: 112847 - DNA, 135 bp, Enterobacter aerogenes
atgagcaaaccggactgggaggccatcgagacggcgtaccgagccggagtgatgcttcctgcctccagcttactggcgtcgcagaacgggattatttcatcctcagagagcgaatcgaaaccagcgggaaaatga

SEQ ID NO: 112848 - DNA, 747 bp, Enterobacter aerogenes
atgagtattgcacaatacctactagttaaccgtccggcaaataccatcattggtatgggggcattagacctactacgaaagtttcgtaagggtaaatgggaaaacagtattaactattcccccatcatgcaatcaatcatgtcatccaaatcggataagaatagtactaactccgaagtacagcaaaagttaaaggatggtacagacatcttctttactaacctgaatgccccaagtggttcccgttctgtatatgccaaatatttgatattggatgaagttgcacccctaaaggccgatgaaagggaaggtgatcccattgcactaatcagcgaacgtagtaagaccgataacgcctcattgatggtgatcaccagtacgcccctggaaccagacgacaccataatgaaacaatgggctatctctaaccagtctaaatttcacgtcccatgcccccattgtgaaaccttccatgaattggtatgggagaatgtacgattccagtttaaagaggttgagggttcacgtgggagagccaaggcagatcccgaaactgccgaattacattgtcctcattgtgacggcattatcaatgaaatccaacgtgcaaagatgattacattgggtaaatgggtaccaacacgccccgaaattaaggatgtggttcggatatcatataagcgagttgtattcaccgttcagtactatcaaaaagattgtgggtgtatttgccgagaaacattataa

SEQ ID NO: 112849 - DNA, 402 bp, Enterobacter aerogenes
atgaaagaagtcgaaaagaatgaaatcaagcgtttgagcgaccgtctcgacgccatccgccaccagcaggccgacctgtcgctggtcgaagccgccgataaatacgcggagctggaaaaagaaaaggcgaccctggaaacggaaatcgaacgcctgcgttccgttcagtcgcagaagctgagcaaagaagcgcagaaactgatgagcatgccgcaccgtcgcgccatcaccaaaaaagagcaggccgatatgggcaagctgaagaaaagcgtgcgcggactggttgtcgtccatccgatgaccgcgctgggccgtgaaatgggccttaaagagatgaccggcttcgcgaagagcgagtttttatcttttgccgctgtgagtttgtcgtcttttacccggtag

SEQ ID NO: 112850 - DNA, 177 bp, Enterobacter aerogenes
atgctaatcgccaaagtacttaataataacgtggtggtagtggtcaacgagcagcagcgcgaacaggtggtgatggggcgagggctggcctttcaaaagcgcgtgggcgactcgttggacgaaagaaaattgaaaaagtcttcgccttacaaagcgatgaactggttggccgcttag

SEQ ID NO: 112851 - DNA, 1137 bp, Enterobacter aerogenes
atgaaaatgaacgtaacagaaacggtaaaacaggcgtgcggccactggccgcgcattctccctgcgctgggtgtgaaagtgattaaaaaccgccatcagtcctgcccggtatgcggcggctctgaccgtttccgctttgacgataaagaagggcgcgggacgtggttctgcaatcaatgcggcgcgggtgacgggcttaagctggtagaaaaagtgtttggcgtgactccctcagaggccgccgggaaggtgaacgccgtgaccggcaatctgtcgccggttgccccggaagtgattgcggccgcagaggccgaaactgtggccgaccgcaaagcggcggccgcgctggccgtcaggctcatggagaaaacccgaccggccaccggcaacgcctacctcacccgcaagggtttccctgctctggaatgtctgacgctcaccgtcatgcataaaaccggcggcgtgacgttccgcgccggggatgtggttgtcccgctgtatgaggataccggcacactggttaaccttcagcttatcaatgctgacggcctcaaacgcaccctgaaaggcggtcaggtcaaaggggcatgtcatgtcatcgaagggaaaaaacaggccggaaaacgtctgtggattgcagagggttatgcgaccgcactcaccgtgcatcacctgaccggggaaaccgtcatggtggcgctgtcctccgtgaacctcctttctctggcgagccttgcccgtcagaaatatccggcctgtcagattgtcctcgccgccgaccgtgacctgaacggcgacggccagaataaagccgcagaggccgcagacgcctgtgagggcgttgttgccctgccgccggtgttcggtgactggaatgatgcgtttatacagtacggcgaggaagccacgcgcaaagccatttatgacgccatccggccaccggcgcaaagtccgttcgataccatgagcgaggcagaatttaccgccatgagcgccagcgacaaggctttgcgggtccatgagcattacggcgaagcgctggcggtggatgcgaacggccagctcctgtcccgctatgaaaacggcatctggaaaaatatccctgccgccactttttcacggaatgtggctgattga

SEQ ID NO: 112852 - DNA, 174 bp, Enterobacter aerogenes
atggcatgggtttcagttcagcaacgccatccgcggtcattcgtccgtgtctgggtgatgactgataccgggaagcaaaccacagcctacgtcaaatccaacggcgagtggtacatcaactgtgaccgcatacgcgccacaggcgcgaaggtgctgaggtggaaagatggctga

SEQ ID NO: 112853 - DNA, 396 bp, Enterobacter aerogenes
atgacaccgatgattggcgagtggaaagggtggcggcattgtgtcgtctatcgccccggacaaatgccgaagaacgatatcatcgtgctggctcaacacctcatgcagcacggagttgtcggcaaggctaagattagacagctacagcgccatgaaacaggggaacgcacgacagaatttaaagccttcgactatattagcgctgcacgtagccactttggcatgagtcgctccgaagcatcgcaactgacgatgaccgaattccagatgctgctggcggcgaaatacccggaccagaaaggatttacacgcgaagagtatgatgcaattgctgatgacttcttggcaaagcaggcggcgagaagggctgcaaaaataaaatctgaaaatgtttaa

SEQ ID NO: 112854 - DNA, 1425 bp, Enterobacter aerogenes
atgaaagaacttgagctaatcgacaacgttagacttttggcgtcaatgaatgttcgcaacaagcgacaaaaactcaacgagcaatactttactccgggttttgtcacgaactttgtcgcacataacttgatcgatttggcaagggaatctcataaaattcttgatgttgcagctggagtgggcaacattggtgctgccgttgggatagttgtttcgcaacttacagcctcagtagacaatgagttacatgcagtagaaatcgattctgaattagtaaaagaatgtgaaacgctgttaggttcaattctcagtgacacttcagttgaacataaagtttataattgtgattttcttgaattatttttggaatttaagtcaaataaaattgagttcacgtcaatcgtaatgaatccgccttataaaaaatttcaaaggaaagattttaatgcattaaaattgactgactacgatatagaatattctccaaatttatattctatcatgatgtcatgtgcattagacttactcgctgacaacggcgaattaattgccattgttccaagaagtttttgcagcgggactcttttccatgccttcagaaagaaaattgtaaataatttcgaaataaacttcattcatctttttgaatcaaggagtaaagttttcgcttttgatggagtgcagcaagaaacaatagttattaaaatatcaaaaaaaacactgcgtaaaaaaaacatcacaattagttatggcgacgattttgagaatgccgttatttctaatcgtgactacaataccgttattttcccaaatgattctcagcatgtaattcatattccttacagcaaaaccgatgaatacttacttagtaaaatattgtccttcaaatcctcattagatgatttaggattaaaaatatcaaccggaaaaatcgtggattttcgcaatgaacctcatctgacgaaagacaagaaagatagcgctttgcttttttgtaaagaaaatctaggccgtgattgcttcaattttgcaaatgataagattaacaattacattaaacttaataaattcacggaaaataaaatgcttgatcaccaatgtcatgttgtaatgaatagaatgttttttaaagaaagcgagaatgttatcacggcacaaattgttgaatgtggcttaaatgagaatataaaaatagcagttgaaaaccatttgaattacatttcaggcttgaataataaccctttggactataatttagctatggggattaaaatatatttagaatcaaaaattgttagtgattactttaaaagattcctaggcagtacacagattaatgcagcagatattaagtcattaccatttccttgtaaagagcaactaattcaattgggtcaaaaaggagtatttgaatatgatgagtga

SEQ ID NO: 112855 - DNA, 1038 bp, Enterobacter aerogenes
atgatgagtgaacgtagaactactacacaagatattacgtggtttttagatctctttgattcacaaaaaatagatctagatcctccttatcaacgacgtagtgtatggacaaggaaagataagcaatacttcctcgataccatcttcaagaaatatccttgcccagcagttttccttcataaaactcaagatgaacgaggaagagcaacttatcatgttgtggatggtaaacagcgtctacagactattattgaatttttccaaaataaaatccctcttgggcaagatattggggatgaacgtctaaacggcaagcgctggaaacaaattgaagatcctgaactgaaaaaagggttttgggattatgtaattccagtagacttgttgacaacgattgataaaactatagttgatgaaatatttgacagattgaaccgcaactcaagaaaacttgagcgacaagagttaagacatgctaaatatgatggatggtttatagaattagttgagcgcacagcagaaataccttggcttaaagatatggggattgtgacaacaggtcgcgcgaaaagaatgaaggatgttcaatttatatctgagttggcattatcgttgattaaaaatgatgtttgtggttttgatcaagatgatttggatgaggtctatgccaagtatgacaatccagaagatgaatattttaactttgattcagaagagtttgaagaaaaatttctcgagctattttcagtgctaaaaagcatgaatgaagttaataatgtcattcgtgaaaattcaaagttaaatattttatatagtgtttttaactatctcagcttaacaaaaattgacagcgttatggataaaacattcccatatgaggccaaggcaataaaattaaaagagtttttagatgctgtaaatggtgattctcaggaggacaatgttattcaattccgtaataatttggtgggagctaacactgagtatcagcaaagagcgaataggcttggagcattggtaaaatttatggacaactaa

SEQ ID NO: 112856 - DNA, 966 bp, Enterobacter aerogenes
atgaagatccctctctcaatcaaggaactttatgcctcgaaggttcagctttttgaagcattaaaagaatttgttgatacctgggttgaaggcgaaaaacaatcaaaatggcattatgagagcagaattaaagagttagaaagttttgctctgaaatttgaaacaggcagatttaattctgcctccatttttgatgatttttttggcggcatgattgttgtgccaacccattctgagatcacaatagttgaaaatatattgcgtgataaatttacattagtcagtaaaaaacctagtgataaatcatttgcgacatattctcctgaacatttcgtatttgacgatttaagattgtatctgaggtttgataaagagagttttttgtcaccaaaagttgaaattttggatcagttagtttttgaagttcagattaaaaccttcttacagcatgcttgggctttatctacacatgatttagtatataagagcgaaaacatatcttggtctaagcatcgtgtagcataccaagtaaaagccatgttggaaaatatagagctctcaatctcgagcgcagagactttatcctgtaatgaaataattcataaagaggataagaagtttaagaaacttggtaagattgtgactttagtcgattctaaatgggataaagatagcctcccgagagataaaaaaagactagctgaaaatatattttcatgtattgataaactagatgtcaccgtaccagaactttcttctcttattgatgaaagtagctgtaatactcttaaaagtatatctccctatcaatcaattttgatggctttaattaatgagaagatagatttatttttaaagggtaatcctcgaaagctgaagctattaataagcgaggagctagaggaaatcttgaaagaagaaaatttaaaatatttgcgcgataatcagtacgtaataaacatgtaa

SEQ ID NO: 112857 - DNA, 921 bp, Enterobacter aerogenes
atggatcttcatccaaaactactagtaacatctagcttatgtgatttcttgagccctaaaaaagaagttcattcaccgcattatgaaaatttcatatcccaatacagtgaaattacagtttctgcgattgtgtcacaagggaatttagatgagaaaatgttccaggaaccattagaattccttgaaacccatatcgatgagtttattgatggaataactacacatgcaatgcagttacggaggaaattcccttcctatagtatacttcttggctttaatcaaggcgaatttattcagaatatggaggaaagaacatttgtcactgaatattttaaaaataaatcaaaaaaactagaaattagcaataggattcatgtaatgcgcacattaaatgccagcgcatttcattcatacttcagtttatttggaagcgttctcgaggatatttatcgagaagttaaaccaacctcgttagtaaaaaatattacaggaggagttcttattgaacattgtttaaaagaaatattaaaaataaaaaaaataacaactgccttctatgatgttctgggaaagagaagtaagtttttcctaagcaaggaaattctaatttcatcttggggttttctgaatttgatacgaaacagacaggcacactataacaattattatgatgataacgcaaataaggagcttaataaaaattatactaatattataaatagcctatcaaaaattgagaattcagatgtattggtagatgtttttaaaatgaattttggtgatatcgttgctcaggtaaaagatgatggtttccttgtctttaataatacgctggaaaactttgttcgtaacactacacttattattatggaatcactctacatttgcgaattagaaaaatgcaaaatctcgaaggaataa

SEQ ID NO: 112858 - DNA, 555 bp, Enterobacter aerogenes
atggtatggtcggcggcgggttatacctacctggtgatcatgccctcataccttcagtccgcgctgcacaccggttttaatcaggcactgctgattgcggtgatctccaatattggcttcgccatcaccatcttgcctgccgggatactcagcgataagtgggggcgtcggcgggtgatggtcgcggctgcggtattgctgctggtactggcgctaccgctgctgaaaatattgcaggcggaaagcagtacgctgctggtgaaaggtatcgtggtgctgattgcgggtggcctggtggggattctggccgggcctgggccggcgatgctggcggagatgttcccaaccagagtgcgttataccgggctgggtttagcctattcgctttcgaatgctgtcttctccggctgtgccgggttgattattaccggcctgattaaacagaccggtaatctggatattccggcgtactacgtgatggcgacggccgtcgtcagtattgccgcgctgatgacgctcaataagaacgatcatttgcgggcgctggacgactaa

SEQ ID NO: 112859 - DNA, 1212 bp, Enterobacter aerogenes
atgaaaaaatacagcgttaattcttttgtttttgaaagtggagaaaggttttgccatgtaatagataaattatcaggagagccagtttactatccaaatctttatatattaactcaggttagaaatcgttcaaactctattaacaccatgctctctattgcaggcattctggttctcttgcatagatggttttctgctaatgatattgatatagaagaaagagttcttaaactcagatttttgaactgtaatgaaatagattccttgtgtgattatatgtcgatgaactttaaaattaagaagataaaccctgctcacaaaatgatttgcactgagaatccaacaaagtattttagattaagtgtcgtctgcgattatttggaatggttttgtcagattcatttatctcaatcaaatgggaaaggaactcgaagcaaaatagataaattcatcagagaattgaaaagtaaaaaaccattgaaaaaagatagatataaaaaagagatatctgataaggccctaagccgaaaacagctcgatctactattctccattattaaacctggttcagaacttaatccctttactgatttagttcaggctcgaaatcgattgatgatattgatgcttttttcatttggtgtcagggcaggagagcttttaaatctcagggtaagcgatatcgatttttttggatctacgatttcaataaaacgaagagctaatgataagtccgatccaagaagaaaccagcctctggtgaaaacgggtgaaagaataattccagttggagaagcattgatgggggaaatctataattatataacgatggatagaaatagaataaataagtcccaaaaaaatgactttgtatttattacgtataaagccggtgatactaatggaatgccactatcaatttcggcttaccacaagattattgatctcataagcaagtctcatcctgagttatctgagttatgtggacatcaactgagacatacatggaattatgagttctccatgaatatggatgaaatgaatgaatgcgtctctcaggaaagggaggaacaaattagatcttacctgatgggatggagtattgggtcggggacagcaaggatatataacagaagacatattataaaagaagctcataagacttctcttataatgcagcaagggttaatgagaggttgtttttatgaataa

SEQ ID NO: 112860 - DNA, 1344 bp, Enterobacter aerogenes
atgaataagaaagaatttaattctgaaagattaagcatacaggcaaaacaacgcggatactatgttaacatctatgatgataagtggaagttagataacaataataatattaatgttggtacagtgtctcgaattattaacccagaacttattgatggttatctaaatacactttctttttatgccagaaattatagttcagcttatgtacgtaaaattaatggtattatgaaggactttctcaaaaaaacggcatctacttttatttctgaatcggatattttgaattacaggtcgctacttacagaggttaatatacaaaggttaattctgttaaggtgtttctttaaaaagtggcattcattagggtattacggaattgatgataatgctataactctgatggaagcaatgagattaaaggcaaagtcagcaggaactattgttaaacaagaagatccagagaaaggggcattaactaataatgaacataaagctttaaacgagtccatgtttaacgcttataaaaataaaaagataactttacaggaattatcatcagcgctattagtgagttttacaggacgtagagcatcacagattgtagcattaaagtttaaagatatagttagagaaaaaaattctgatgggaatgattttttctttataaatatccccaggattaagcaaggaattgagttcagaaaggagttcagaatgctgagtattgatggttttatttataaactcttgatgcagcaggtaaatttttctatatctcttattgaaggacatattggcagaactcttttttctgaagaaaaaaatgaggtggctgtttttcttgataagaaaaattataagatgctaaatgaaatcaatggcttctatgacgttttggtttctgacagacttcatgcatcaaaaaataccgttagcttatcacttaaaaaaatcgttgaaaaagaaaatgtgatgtcagaaagaacgggggagcgtatgaaaatcaatgcatataggcttcgttataccctcggaacaaaacttgcgagagaaggatatagttcacagattattgctgagctattggaccattcttcaactgcaactgtaggtatttatactgaaaacttgcctgataactcaataaaaattaacgaagctgtttctcataacctcggttttcttgcgggtgttttccttgggaaaattaaactgaatgagatcacatctaatgatgtcttcacaatgaattcatattcatcttgtactgagtactcaacaatatcatgtcatggatgtatccatttcaaaagatttaaagatggaggtgtaaatgagtaa

SEQ ID NO: 112861 - DNA, 396 bp, Enterobacter aerogenes
atggcaaagcatctaacaaaaaaagatataagtagaattataatcaccatccagaaatggaatggtaagttaacatgggatttattatgtgaatcagtaaaaccccatattggaaagaaacccacacgacagtcattgagtatgcaccaagagatagttaatgcatatttgttgaaaaaggaaaggctaaaaattgataataaacctcttaaaaaacctgctaacctgaggatcgcagcgcaaaggataaaaaatctggaagcggaaaacgaagttctgaagaagcaaaataccagatataaagagcagtttacattgtggcaatacaattcatataaatatggacttaaaccataccagttaaatgagccattacgtgtaaaaaacgaccattaa

SEQ ID NO: 112862 - DNA, 216 bp, Enterobacter aerogenes
atgaagaaaatattatttagttctttttttatttttatattaaatgtcgttggtggattctacatatatagccttggtggaattaacttagctataaggagtggatttttaggaaacttggcgacctttttcttatttatatccataggtatatttttaccattgttttattgggtattacctgatatttgttataaaaacaaaggccaccattaa

SEQ ID NO: 112863 - DNA, 549 bp, Enterobacter aerogenes
atgttaaaaaaacacttagttggcaactttatattttcgattgtaatcatgactattttctgcttcctgtatttttatggttcttattacaagtggacattaaacttattagttttcattctccctgtaacggcaggcttaataacattcttttatcttcaccaacgttatcacgaagtattaaaaaagtttttcgaatccctaatttctttttttactctttgtggctatggatattatctctatatgataacaaatattgattcaaaattaacttttgcccaaattttttcaagtcttattggatatttgttcctgacattaatcacctcgtcaggagtgataaagtgttcaataagcataaaagaattctttcaagaaaaaaacaaattacatagtgaaaacaataatactcaaaatgatcttacatccaaaatcagcataaatgataacaatacttttatatccataagggcgactcataacaatgacatatatgcttcggtacaaaaggaaaacaaaatcgtggtatctctgaaaaacaaatga

SEQ ID NO: 112864 - DNA, 1095 bp, Enterobacter aerogenes
atgagaaaaaatatcggttcaattattactactaattatgacacattgattgaacagttttttgaattcgaaccactaataggtaatagcatacttttaagtaatccttatggttctgtctataaaatacatggttgtgtctctgccccttctgaactaacgattacagaagaagattatgactatttcgataacaagtatgaactaattagagcacaattactctcattattcattcataatccggttatctttattgggtatagcataagtgatagaaatatacagcagattttaaagactattttttcctatgtacctactaactcagatatagctaataaaattagaagtaattttttacttgtcgaatatgaaaaagattcacgatctaataccatatctgaacatgatatatatataggtaatgctaccactataagaattaataaaatcaagactgacgattacgcttctatatataaaagtttatcagatttaatcttaccggtttcagcaatggatattagaaaagttcaaaaagtctggaatgaaataaaaagcggtggggatatagaagtaaaaatcacagaagatttagaccagttaaaaaatggacagatggtattagccgttggatctcataaacgagtcaagtatgagttccaaaccaagcctgagatgatgcaagattatttcaagattgttgaggaagcaaataagcaattaattatattgttaaacaaacaaaaaatacaaagttcccagttctttccaatctttgcattcagtgaaatctgtcctgaactcgataatgtagaaatttataagaaacagcaaataagcaaactggaagatcattttgcaagaactaaatccagcaactgcaaaaatgagcataatacaattacaaatatattatgcgatcataatatctcaacatccaggaaagatgattgcatatttaatagctactacgaaaaccgcataaattcggatgaaatgaaaacatatttaattaattataccgataaaaacaacacttcttatagaaggcttttatgcttatatgattaccagaattactcactgtga

SEQ ID NO: 112865 - DNA, 801 bp, Enterobacter aerogenes
atgcttcatgggagtgaaattctaaacttgaaaaatggaagagcatcaattttccctaaatttttagacatatttgatggcgtggaaaatatttacacaaatagtaactatacaaaagaaatattatataaatgccataacgttccttcgtcgataccagttgaagtgacatatctaggagtttcacaagatgacaatatttctaacgttggatatatagaaaatgttagaaatgaccagtttgagttgttatcggtaggtcggctagatgatagaaaaggatttgataatgtcatcaaagctataggtttattagacgaaggtgtaaaggctaacataaaattcaccatcgttggtaatggcaatgatgagtatatcgagacattaaacacaatagctagaaataatcaggtgaatttaaatattctatctggcctaaatgattctgagctaaatgaatgctataaaaaaaccaatttatttgttttagctgctcgtaataataataaaaaaattgaaggttttggtctcgtttttttagaggcggctaagtttggtgtgccttccattgcaactgatgttggggcaatcaaagaggttgtcaaagatcatgaaaccgggttcgttgttaaagaagatattcatgagttaaagaaagccatatacaattgctatgttgacaggaatatattaattaatttcagtaataactgtatcgtcaatgtgaaaaaatttaagtggtcaacactggcaacaaaaacttttcctaaagcttatggaaataaaaatggaagaaattaa

SEQ ID NO: 112866 - DNA, 477 bp, Enterobacter aerogenes
atgtcgatcataatggatattatctctgttattggttctggtgtttcgatatctggtattaccctgaaggatttaatcaagaaaaaccctaataaagttgaaattgaacgctatataaaatttcttgaaccaaagaaagtcttgacggctcctcttgatgaggaaattatttacgcagttataaaaagcctggaagaaataaagaaagagacggaaaatgttaggctgaaatgcaatgatgagtcggtttcattagttttattaaatttggttttgactatgagtgaagaacttatgagtcttcataagatttctaattccgctgatgctaatgtgaagatgtataaaaatctgcaaaagataagaataaaatttgctcaagcacttgctatgttatgcagcgcatatgatattgacataacacgttcagaactttcaaaatttatcctagatgttggttataaacctcgtagctga

SEQ ID NO: 112867 - DNA, 543 bp, Enterobacter aerogenes
atgacagcagaccagatcattgaagccatcctcggcaaagaagggggttacgttaataacccgaatgataaaggcggccctactcgctggggtatcacgcagaacacagcgcgtgcatacggttacaaaggcgatatgaaagagctccctagggatactgcgaaagaaatctatatgcagcagtattggctggagcccaaatttgacaagatcgccgaattgtcaccatcaatcgcagaagagttatgcgataccggcgtcaacatggggccgcgtgtttccacaacgttccttcagcgttggctgacggcactgaaccaacgcggcaaactgtatcccgacctgaaaccagatggcgtcatcgggaacatcacgatcgccgcgctgcgcagttacctcgccttacggggtagcgccgggggcacggtgatactgaaagggttgaactgcagtcagggcgcacggtatctcgaactggcggaagcgcgggaagccaatgaagaatttctcttcgggtgggtgaaggagagagtaaacctatga

SEQ ID NO: 112868 - DNA, 618 bp, Enterobacter aerogenes
atgattgataacgctgtccttcggctacgcgccgaacgcctcgcgcgcgcaacccggccttttcttgctcgcggcaaccgcatccgccgctgccagcgctgcctgctccccctaaaacagtgtctgtgcgcaacgctggcgccggcgcaggccgacagccgcttttgcctggtaatgttcgacaccgagccgccgcaggcgctgctcgatctggtcgccaaccccgattatcagcccatggtcgtctttccggcctcttatgccggagcggaacgccaggtactgagcgccccgccggagggtaagccgccgctgtttattatgctcgacggcacctggacggaagcgcggaaaatgtttcgcaaaagcccgtatctcgatgcgctgccggtaatctctgtcgacctgtcgcgcatctccgcctatcacctgcgcgaagcccatgccgacggtcagtactgtacggcggaagtcgccatcgccctgctggacttagccggcgacgcgcaggcggcggccgcgcttggcgatcactttagcctgttcagaagccgctatctggcgggaaaaacgcagcataagggcagtatcacagcacaacaggctgaaagcgtttaa

SEQ ID NO: 112869 - DNA, 144 bp, Enterobacter aerogenes
atgcaattgttcatcgcgttcgctcagaagcaaaactttggtaccgggcgcgacgttgtatcgatcaatcggctccgggtcatatgcgatgtcacgattggcttcatcggcaagacaggaaagataatcttcacgggtcattga

SEQ ID NO: 112870 - DNA, 1077 bp, Enterobacter aerogenes
gtgagccgcttctttctgctcgtcgctgagataggtcatgtcgtcgatcgccttattggcgtcggctttgccttcctcaaggtttgtcgccacggcatcagtcagcgctttctctacccccgccgggtccgtcgcgtctttcaccgcctggcgggccgcttctttctgctcatcgctcagataggccatatcgtcgatcgcctgataggcgtcggctttaccttcctcaaggtttttcgccgcggtatcggccaccgctttttccacgcccgcaatgtcggtcgcgtcgttcaccgcttgctgcgcctcggctttctgctcgttgctcaggtacgccatatcgtcgatcgccttgttggcgtcggctttgcctgcctcaaggtttgtcgccacggcatcggcctcggttttttccacctgcgcaatgtcagtcgcgccattgatcgcctggtgtgcctcggccttctgctcgttgctcaggtacgccatattgtcgatcgcttcattggcgtcggctttaccttcctcaaggtttttcgctacggcatcggccagcgctttctgcacctcgtcgacgctggtcgcattatcaacggctttctgagcttcagccttctgttcgtcgctcaggtacgccatggcgttgattgcctcactggcgtcggctttgccttcctcaaggtttttcgccaccgcgtcagcaagcgcttcctctacgcccacaacgccggtcgcaacgttcaccgcctgttgagccgcccctctctgctcatcgctcagatgcgtcataccgtcgatcgcctgattggcatcggctttggcttcttcaagatttttcgccgtggcgccggacagcgctttctgcacctcatctacggtggtcgcattttcaacggcctggtgagcggcttctttctgttcgctgctcaggtacgccatagtgtcgatcgcctgattggcgccgtctttcgcttccttgagtttggctttggccttatcctggctattatcaccgccgtcgtcgttatcattaacggcggcaatggcgagaccaccgatcgcaaccgcggcgattaa

SEQ ID NO: 112871 - DNA, 912 bp, Enterobacter aerogenes
atgcaattacgtaaactggccgccgcaatgctggtcatgggagtgaccgccggtctggcgcacgctgaagatgccgccccggccgcaggtcagagcacgctggataaaatcgctaaaaatggggtgatcgtcgtcggccaccgcgaatcttccgtaccattctcctactacgataaccaacagaaagtggtgggttactctcaggattactccaacgctatcgttgaagccatcaagaaaaaactgaacaaacccgatctgcaggtaaagctgattccggtcacctcgcagaaccgtatcccgctgctgcagaacggcacctatgatttcgagtgcggctccaccaccaacaacctggagcgccagaaacaggccgccttctctgacacgatcttcgtcgtcggcacccgtctgctggtgaaaaaaggcggcccgattaaagacttcccggatctgaaagacaaagcggtggtcgtcacctccggtaccacctcggaagtgctgctgcataagctcaacgacgagaagaaaatgaacatgcgcatcatcagcgcgaaagatcacggtgactccttccgtactctggaaagcggccgcgcggtggcctttatgatggatgatgccctgctggccggcgagcgcgcaaaagcgaagaaaccggataactgggaaatcgtcggtacgccgcaatcgaaagaggcctatggctgcatgctgcgtaaagacgacgccgccttcaaaacgctgattgacgagacggtcgctcaggcgcagacctccggcgaagcggcaaaatggttcgacacctggttcaagaacccgattccgccgaaaaatctgaacctgaacttcgaactgtccgacgacatgaaggcgctgttcaaatcaccgaatgataaagctcttaactaa

SEQ ID NO: 112872 - DNA, 996 bp, Enterobacter aerogenes
gtggaagatttaaaaatctcaaaaaacaataaattttttttccttcctgttaatacaggatatggtttaaacggtgaacccgacgataagcttatagatttttatcacaagcgaagtgggaacagaattcactgttctattgttggaaatgttgtgatccctaatggttacggtagtaatgagtattgtttatttatctctaagtctgataaatggaaaatattaagcgatactataaataataacaatactcttgctggcattcaattaagtactacatggcctaattatatagggaataaaaattttgttacatcatcatcatcatcaattgatgcatatttatatcaattaaaaaatataaacaccactgaaatagatgagattattacccgacttgaggaagccattaacatttcgattgatcaaggatttagacatatccagttgcatgctgctcatggatatttttttagtctgctaattgataatcttttttgtacactgtcatcttatgcattagaaaagatacatgatatatttttaaacatacctaagcatatagaaacatcgttaaggttttctttattaattggcattcaacatttagataaacttagacatagaaaaggtataattaaagatatactcaatctaccctttgattactttgatatatcatttggtttttataatataaacaaacatatgatataccctgaaactgaatcaatgttatcatcgagaataaaaaaatcaatagagctttcgatcgaaaacccaaataaaaaattcatcatttcaggtcggtctattagaaattataatcatgaattaccagagaatatattcgttggtatttgtcgagatattatagccaatcctaaatttttagtaaattctgtagacggttgcaatttatgtggggattgtcattattattcccgaggagaatcgcatctttcatgcggtagatggcagaatactaccctttag

SEQ ID NO: 112873 - DNA, 354 bp, Enterobacter aerogenes
atgaatataaaaaaactaagagaattacaaataaaacaggatgaacaaattgggtttaatgtaaagttcaattctataaatgataagtatgaccaaataacaaaggatttagttggcttatttggggaaattggtgagttttctaatatagtaaaaaaaataaacctaaagatctccaataataattatgaatttgatatcgtccaagcagagtctcatttaaaggaggagtgggttgatagttttatttacttattacgtatttctgcaatccttgggatagatatagaaatagaaacattaaaaaaaatggagtataatagtggaagatttaaaaatctcaaaaaacaataa

SEQ ID NO: 112874 - DNA, 771 bp, Enterobacter aerogenes
atggctgtattctctaatacaaaaattttacatgcaatacaacatgataatctcatcatggattatgatttaaataatattggtcccgcgaattatgatcttaggatgggaaattattattatgatctaaatgaaagtgaccatccgatacaattacagcctaatcaaaaagtaataataaagcctggtcatcttgttgtattaattactaaagaaaaattaaatataccaaataatgttattggacgagtaataagtaaaggttcattatttagtattggcttaactcctgtatgcaccaacgctgaccctggtttttctggcaatttaggtattgtgacgcataatattagtgataaatatatagttatacctcaatgtgagtctattgctaagatcgatttttcaactctcgaatctaattctacaaaaccatataaaggacaacatggctttcaaacaaatatatggccaatcaaaaaacaattccaaaaaaatcactctgatataaaagataaaagagttggaactgaaaaagatgaggcatataaaataatacccaaatatgtatcattgactatcaaaaaatgcttgcgatatcaaaagattgcgtcagtatgcctaatctgcctaatgattctaaatataattctcattgctgcaattgataatcaatggttaaccaccacagtttcatttataataagtgtagtggcaagtatagttgttcttttaattacaacgcttatagataaggtattcaaagtatga

SEQ ID NO: 112875 - DNA, 240 bp, Enterobacter aerogenes
atgtcattagaagtgtttgagaaattagaatcaaaagttcagcaggcgattgataccatcactctgttgcagatggaaatcgaagagctgaaagaaaagaacaccacgctggcgcaggaagtgcagagcgcgcagcacggctgtgaagagctggagcgtgaaaatagccagctgagagaacaacagcagggctggcaggatcgtctgcaggcgctgctgggccgcatggaagaagtctaa

SEQ ID NO: 112876 - DNA, 984 bp, Enterobacter aerogenes
atgagtgacaagcagcctctactcagcatcattattcctgtttttaataatgcgctatatataaaacagaccctcgcctctgttttcgcgcaaattgataacgatgtagagattattattgtcaacgacggttccacagataatagcgccgcgctcattcaacaggcaattgatgagtatcaaggcactggcgaccttcactttattaaccagcaaaatgcgggcgtatccgtagcgcgcaatgttgcgctcgacaaggcgcagggtcgctggattggctttattgatggagacgacctctggtgtcctcactttttgcagacgatcaagcctctgctattagaggatgaaggtgatttaatcgacttccagtatcactactttgcccagcaccctccggttcccagcgcgccaacgccagggaaacgcaccgatatcacacaaattaaccacgatacgctttatgagatcttccgtcgttcccgctggcatatctggagccgtatctatcgccacgagctcattaatcagcgtcgttttcatgtcgggcggcgctacgaagatatgatgttcactccctggctgtatttcgaagcccgtcatatcatttgccttgatcaaatcctctattggtatcgcgataatgcacaagggattacgcgcaatattcaaccgtcagatgtcgatgatatggtttttgccctaaaccaaattattgaaaatgtcagaacgcatccgacgtcgcagatgcctgagcgactcatcacgtctttaattataaattgctttaatgaaatcaagggaatacatgcgaaactgtatggattttacaactacagcgaacaaacgatatctgcgctgaccgctgccgccgggcttcttccctccggtagccttcctctgaaaaggcgtctccatctacgctatcctcgtctctggaaacacgtttcccggcttcgccatacgctacgccggggacgatag

SEQ ID NO: 112877 - DNA, 1242 bp, Enterobacter aerogenes
gtgcttaacactcgtctaaaaattaagaacacggctcttaatcttgccgttttgctttatttatttacgtttatgctcttttacgccgcaccggtagaaatgagaaaggtctactatctggcaggttacctgacattttttatcgcattgttcgagtgccgttcactgacctcctggaaaaacaatcgagatattgcgggtgcagcagcgctttttggcctgaccctactggggtggtatgctcttaccttcacccatggtgaatattgggcaatctacgactcctataaagacacaggtaaagtactgcttgttaccgcactgattgtctttctagtctctaatcttcgttttgcttttccagccaggacgttttcgttactgtttatcgtcgctgggctagtgactaacatctatgccatctaccagggcatggagatagaatcaaatagattgcaaatcgaactcgatcgcgccacggttatcgcttatatttttaccatgacgaatatcgtcatgctgaccgccattcttgaactcaagagccaataccgctatatcctcttcctgcttgccgcattaagcggatttgcggccattgcctataccgagacccgggctgcgctgctgacgtctccagtattaattatcttgctattaatcgtgcatccccaggttcggaaaaaacagcttatcaagctcggggctgcatttatcgttatgttggcactactggcattctgcttccatcagaagcttacggaccgctatcagaagctgcgtgatgatgttagccaataccaggacaacaatagcgtatcgtctatcggctcacgattagccatgttccagagtgggctacaggccgccctggacgcaccttttggcgagtcggcggaacgacgtaacgataacatcaagcgccaggtagagaataacccaaagcttaccggagcgctggattacattaatgtccacatgcataacgagcttattgaaaatttctcactgcgcggcgtggggggagtcatcacgctcattattttctatgctactttattaataaacgcctggcgcaaacgtaatgtgatgcaaggcatgttaaccatgtcggtgattatctatggtttaagtgacgttattttcttcggcaaagaggcagttataatattttctacggcattaatccttagcatcttgtatcaaaaagttgtgatacataaggatgagaatcatgagtga

SEQ ID NO: 112878 - DNA, 1173 bp, Enterobacter aerogenes
atgcgtaaactccatattattaacctggaaaaaatgggtggcgtcgaacgcctatttttacaatatatccatgatgttactgcagaacaggaccatattttctgtatcagtaatcggatagggcctgaaatagcccaacatttaaccggtcgcaaagtgacttttgtgaaccgaattctgaacaattacccggttaaattcccaccatttttacgcaagtatgccctgcaaaccaaaaccttgctggcaaacccagaggcaatcatcgtctgggatctcgtccctgtttttgcggctaagcccgcgcgaggaaaggtcatttattacgatcatggctgctcgtggcgttatccgcataataaaaaaactctgaatttctttgcggcgctggatggcacaatttccgcctcctatgcttcaaaaagggtcatggcgctgcgctttaatctgccgtgcccttcccgggtattaattaaccgtattctcccgccggcgaatatttttactggtgacaaaccgcttaccgccccgctacgtctgggcattgcggcgcgcctagttggcttgaaagggattagtgtcgcactcctgaccttaaagaacctgctcgatcgcgggataaacgtcacgttagatattgctggcaaagggccggatgaacatcaatttatccagcttgcgcagaagttggggatcgcggaaaacgtaaacttccttggctttcgcgatgatcttagtgatttttttaataatatccatatttaccttagtactccagtcactgaacccttcggcctttcctgtctggaatcgttgttttatggggttccggtgatctatccattaattgatgggcagcctgaagttgtcaaaaatggggtctgcggtatcggtattacgccagatgtcacgcccgaagcgcattttgagcagtgtggaatcaacgtcaattttccttatgatgtttattttcccgaacaggatgcgttacaccctccgcgattactggcgccggaaaaatgtgctgatgccgtcttacgcatcgtcaacggcgactatgaggctttccgcagaaacgcttttgaacatgtaaaatcaaatttcgacgctgccgctttcgtgggcgactttaactctactattagcgaaattctggatgcatcgcgtgcttaa

SEQ ID NO: 112879 - DNA, 168 bp, Enterobacter aerogenes
atgagtactattttgcatgaacatggttttgaaagcgcctggattgaaatgcaacttgcgcatgttgataagaattctattagagggatttataatcatgcaaactatgttgagggtagaagaggcatgttacagtggtatagtgataatataattaaaaattcatag

SEQ ID NO: 112880 - DNA, 525 bp, Enterobacter aerogenes
atgataagtaagaaagaaaaaattgcgttactacatatgctggctataaaagaaagcttaacaagtacggagtttaacaatgtacttagggaagtccaaaaactttcatttgactcgtttttttccatgaaagtgaatgaggttaataggacttcgtctataattacaaaaacaagtagtacttcaccattgaagccaaaaagttttgattttattttgagaagtctcagggttcaagatcctgaaaagtatgaattactccagcagcttaagttgaatttgcggtccggtgctgtacttaaaaacttcagtgatattaaagaccttctggcaaaacttgatcaagctagtttgattactagcagtaaagcctcaacaataagtaatttattaatctatctttctaagaaaaaatctaatgagataagagatattataaagaatcatattcgtccaaatgtgactcatgatgataaaggtttcaatgagttagcgaattatataattgatcctactaagaaatag

SEQ ID NO: 112881 - DNA, 849 bp, Enterobacter aerogenes
atggctacagttgtttctatgattaatatgaaaggtggagtgggaaaaactacgttgacgtttaatatggcttggtattctgcatggatacgtaatcttagagttttagctattgatttagatccacaagcaaatttgagtcaatatttaatgggtgcagaaaaatatctggattttttgaataaacaaaataaaacagtggtggatatatttgaacaatattctgcacccgatagattaacaggctctcctgttataataaatcctgatgatatgattcatgagtttaaagattggcaagatgaaagttgcattcatttggtcgcctctcgactagagcttgcatggactctaaaaaacccaacagaaaaagctagccttcttcctcagtttatagcaaaagttgcagatagatatgatctaatacttattgattgcgcacctactgaatctattcttactacagcagcctatctttccagtcgttatatttttgttcctgttaaacctgagtttcttgcaacaattggtcttccattgttagctcgttctatgagtgagtttaaacaaaggaatactcagcaaagtttagacatggcaggaattgtttttaatgactctaaaagaacaggaactactcctgagcatttagagtcgatacgaaacgtcaataaacttgctggtgattttggttggccagttttgagtaatcaagcctatcattccgattcctatccaacgggttctcgagatggtagcccaatttttagaactaaatatgcaagagattatgtgaaagatgagtttcatctggttgcagaagagttcttggatggagttggattatga

SEQ ID NO: 112882 - DNA, 387 bp, Enterobacter aerogenes
atgaaaattattaacgtcgtactgcttgctatgattgtcacatctagctgtgtatatggaagcaacgaaagtaattttattgttgcggaaaaaatggagcgacaaaacgccattaacgcactattgcgcattgaaaatggccctagcgcacaacaagccgctgaatttaatgatgaaatgataaataagttgaatcctgttattcttgatacagctagtataggtgcatttagcgaatgtgataaacttgagtcacatatcctgaacaatttaaatattccaatgaatggagttcctgatgagattactcgcgatttttccattgcactgtcacgacaagcttcagacaggtgtcaggcaataatctcccataacatgggccaatga

SEQ ID NO: 112883 - DNA, 720 bp, Enterobacter aerogenes
atgaatattaaaggtggctttgctgtaatgagcgatacaccagacattttgacacttaaaagagaggggatatatgaagactatagattaaaaattaataagagtggcgatctttcagaactgataattgaagagacgaaatcaaaaataattgaattactatcaaataaacaaacaaactacttaaccgatggtatttcacctgaaatccttataaaagcaggtgtagctgaagtagaaggaggagcgctgttctgcctgtcaaatgcacttccagcaatagatgaatcgctaccaattgaagaggttcttgaattcagagaaaaacggggtgacttgcatagagccttaataaaccatattaactcacttgagatgcgcgttttgacatcagagttccctggccaagaattgaagaaagcaatacatgaaattgacactggatgtgctgaatctatttctctttataaggaaaggggcattaaattcaatctttcaaatatcaaggttaacttcaatatgaaagagattatcgctgtatcaggttctgtttatggcggagcctcattaatcatgccgcaaacaggagcagcaatatctgggttcgctgctgggctagcttcagtctttagctggaatgacgccattaaaataaacacaataaaattaaaccatccattcaattacattgcagaaattcagcaagccggttttatgtga

SEQ ID NO: 112884 - DNA, 186 bp, Enterobacter aerogenes
atgcatacagttgatgacgagaacgttaaaaaggttgtgcaggcagtaaaagctggacctacaaacaacctggcttatgaatcagccatggaactagctattaaatggctagttgagaatgacgacggcaccctatacctcaccgctgaacaaaaaaaagcaattcaagaggtcgtctctcattaa

SEQ ID NO: 112885 - DNA, 516 bp, Enterobacter aerogenes
atgactacttactacacagttgactcaggtaattactattctcctgggatggttgccagaccgatcactccatccattcagccaatcgaactacacaatatggtaaccaatctttttccacgcggagtatcaaagcatggagatggttactttctttctgccaatgcgatagcaggacagatcaatttttcgatagactgggggctcgagttttatagaagagcaatgcggccttctgcaccatcaagatatgagtgcatttttgcgtgtgaaacattagctgaagccatcgcatttagagcccaatacagaagccctaactctccaatttatgaagttgaggcagatgaagatttaattcacagaggtgatatggcacttttgaacaatgcgaattcctgcctcgtttatacctatcaaattgaacattactgggctggaacaacattttcacaacagccattctgggaaattttgattcctcttccagtaacgatcggaaaccgcgtggcgtaa

SEQ ID NO: 112886 - DNA, 582 bp, Enterobacter aerogenes
atgcaagagcagcatgaaaaacaggaaacaaaatctcaggctatcgatttttcaacggaatttgatgagttgattaatgcagaaggcaggattactcctgcaattctcactgccgttaatcgttattttttgtacttctctttcttcgagtctttgcttctaaactgcgctggcagccaatggaaaagcgaaaagtatgcgaagcatcttttgcaaatggagattgtggataaggacgttcttaagcgaacgtacatgtttttttctgaacgctatttaattgataaacgtaaatttgaaagcctatgcggagagctgcaacacacctctcaaaaagcaagagacgatcatttttcatcaatgcaagctatgaccgacgacccattggttcaacttggtgtgtgcttgttcgtttgtttcaggttgcggaacaatctgttccatggaccgaaatggcgttattttcttgaggggcaagaagagctacttctttccgcaggagatctaattcactccattctatccctttttcctaagcatgatggctgggcgtttcagaacatactcgactctaacgattaa

SEQ ID NO: 112887 - DNA, 258 bp, Enterobacter aerogenes
atgccacagtggaacattgcagccaaaccgaaaaaagatcaggacaatgttaacgtcgacctggcagccagctgcgtcgcttacaaagagcgcctgaacatgccagtgatagctgagcaagttgccagagagcagccacagcacctacgcgagtacttcatggagcgagttcgctactaccgtgaacaaagcatcaagcttccaaaagcttccgatccactttacactgaaatggcagacttaaatgcaagaaaatga

SEQ ID NO: 112888 - DNA, 717 bp, Enterobacter aerogenes
atgttagaatcacttaaagaatatctttcctcaaccgttaatactgcagcacaaagagtaagcaatccggtttttggtgcattctctctctcctggtgcgcattcaactggaaatcaattttattcctcttctttagcgattccggaatcatcgataagatcagctacatctcaaatagtagtaattggaaaactatagccctgtacccgtgcatttctgtagcgctcttgtgtggatgtcttccttggataaacaacctcatttctttacttcaagccaaaccaatcgacaacaatgactcaatagaaaacttcagaaaggcaaaacgtattcttcgcgcaactcgcctgcaacgccttcaggccaaacatgatgttacttacgacaaagtaaagactggtgcagaaaaagacattcagtctatgaaggaacaaataactgagtctcaatcaagaatgggggaattgacaaaagaaagggataatttaatctctaatttaagtatttataaagatgataacaaaaagcttaaatctgaaatatcatcacttaaaacattactaaaaaaccaagaaaaccacatactaaaaattgagaaggagaaccatgagttgatgctaaatatccctgatcacaaaaaaccagtttatacgctcgacggtcaagaagtttttgtatttggaaaccaaaataagccaatcactcgtaatgagtag

SEQ ID NO: 112889 - DNA, 519 bp, Enterobacter aerogenes
atgagcgcggcagcttactacaacgagatcgacccattcgcggcgcaatggctgcgtaacctcatagccgccgggcatatcgccccgggcgaagttgacgaacggagtattgaagatgtcacacctgacgaccttagaggatttacccagtgccactttttcgccggaattggcgtctggtcacatgctttgcgtttggtcgggtggccggataacaaacagatatggacaggaagttgcccatgccagcctttctcctcgactggcaaaggctctgggtttgatgacgacaggcatttgtggcctgcgtttagctggctcatcaagcagtgttgccctcagcgagtctttggtgagcaggttgcgggaggtcgtgcggatccatggttcgaccttgtacaacatgacctggaaagaatgggctacacctttgggctcacgccgtttccggctgcgggcatcggtgcgccgcacattagagagcgggcctattgggtggccaacaccaacagcgaatga

SEQ ID NO: 112890 - DNA, 615 bp, Enterobacter aerogenes
atggttaaaaactatgaagaagaagcctttaaagtcatcagccgcttcatagcattgtcccttactccagatagattgatgaagataggagcttttgttgtctgctacggacagtttgaaactactttagaacgagcgttatggactttgaaagaagttgatgtaaaagggatcagacccttcactgaaaagttagcttctgataaatggtttgaatgtttaggcgaaggaaatcataaacttaccaaagagtgtaatgctgttttaaaagaagcatctctaacggctttggatctctcaaattatagaaatagcctgatacatggctatcttttaccaattggtgatacaccgtcatttttaagaaaccctgcatggcacggagagaaaaggaacaaaaattcaggggacgccttcattgaagagccattactcgatttagctattctttctgcgtggactttattcagacttgtcagactcacggaaaaggtatttgaagatgaaaccgctgaacctgcaatcatccaaatggtgagcgaagtaagagaagccagaagcttttcaagtgagttacgctaccttaaagacttaatgaactatgagaagtactaa

SEQ ID NO: 112891 - DNA, 204 bp, Enterobacter aerogenes
atgaagagtctaacatccgcccttctattgtgcctggcagcggtgaaggcttcagccgtgccgattacattgatactgtctgatgaagtggaggtgtcagatgggaagatttgcgtctatgagaatgcccagcggagtgaatctgtgaaggtggcaaagtctgcgccctgccaccataccaaaacgtttgatactgacgattga

SEQ ID NO: 112892 - DNA, 561 bp, Enterobacter aerogenes
atgaaacgagtacagccagtaagggagaaacaacagattgcagaggttgaagctctgctacggaaacataacagcagccctatctatggtgatctgtgggtgttcctgaaccagacggcggcgcgtatcggtgacgcgctcaagttgaagtacagcgactttgatcgaattgatggaaacatcctgaacctgaaagaagagaaaaccggcaagacgcgttctctaatgttgacgcctaaagctctgcaactggtagcacagcgccgtgcggctaacccgtctcacgtgttcttgttcgaggttgatagcaacagggcgaagggtaaagcgatcagccgtgtcaccgtgtccacaaagttcaaggaagctggcgaacgtctcgatctgcatattgcggcgcatacgccacgtaaaaacatgggattccacgcgctgcaacgtggggtgagtctgccaacactgacgaagctttacgggcatagctcgcaggccgtcaccctggcctactgtgggatcatggataaagacattgaagatgtttataccggaatcgactactaa

SEQ ID NO: 112893 - DNA, 705 bp, Enterobacter aerogenes
gtgacagagatagttagtgttttatcccatgatgtacggcgctacgcttcaaacggcagggccaaaggtggtaacgatgactggcgcacaccgcgccggatgtttgacaaccttgatagggaattcagctttaccattgatgcagcagctaccagggaaaacaggttgtgtgatcgctactttgatatagattctgatgcgttagcccaaagctggcagggtgaaagcctcttttgcaatcctccctacagtcagatcagcaagttcctgaagaaagcacatgaaccagatacaggcgtgtttgtggttcctgcacgtacacaggcggggtactggttaaaacaggtctggactaacccttattgccatgagatccgctttctgcaccgtaatgtaaggtttgtaccgcctccaggtgttgcacaggcggtgataggcaatcgtgcacctttaccagtggctatccttgtctatcgcaatgttccacgcacagcagagcacaggatcacggtttgttgtgccgatacgcttttacctctgaccgttgtcaacaggggcgggaagggtggcagacctacactctatgacgctgatcaggtggatatggttgttcagatgtatgagaagggcagcacgattcaagcgattgcagaggcaaccgacattccccgatcaacagtgggacggatcactatcaggctgtag

SEQ ID NO: 112894 - DNA, 762 bp, Enterobacter aerogenes
atgcacaaaacccgaatggaaccgaccgaactattttttaagtattacaagatcttgtttcatacagaaacaatcaccaatcttgaaacaggcaaagtattcaagctaagttctactgacattcacctttattgctatttcatcgatcagtttaaatcatacggcttgaaagaacagcagttttttgaaagtacgaaaagcattgaaagtaaaacgcctcacgcttcagataaatcaatccgggattttatcaaaaagttttctgaacttggactaatcaagtatcagaagattaagaagggcggaaaattccagagcaatctttatactttagttcttacgccagatgaggcgaaagggatcgttagctttaatacaatctggagcagagaagaagaaacttccccgcaagaaccacagcagccagaaacaaaccccgcgttaccatcttctgatgatattcatacttcagccgattccggcagcgatgatagccaggacgaacagcagacagcatcgccacctgataccagaacagaagaaataacaaagcctgttcctgtttatccgtggggatcatcaggagcttttaatcctaatagaagtgtaaccgaacctgctaaacagtgggcgctatcaaaaactggcggcaatgtttatcaagctgaacgctacttgatgaattacctaagccaattgtatgctaagccggtaacactatcttttcacgaagaggaagagtctgaagaattaccattctaa

SEQ ID NO: 112895 - DNA, 186 bp, Enterobacter aerogenes
atggataacaatacaaatctattaacccgcttgcgtaaacatcgccagtacaggcagatcgttgatgaatatgaacgctgtggctgttcttttatcgtagccagaaaacttgaattgccgccgtcacacactgcccttgtttgcggcattatcgacattttaaaggagaattacaacaatgaataa

SEQ ID NO: 112896 - DNA, 354 bp, Enterobacter aerogenes
atgaataaggatttacattattatttgctctacatagacgacatccgatcagatttgggaataactatccgtcgaaaagcctggaagcacaaagctaaggtttttagatcacttgccgtcttgcttgaaatacttgaagaagttactaacgaagccttaacctctgaacttctaaatcaaaatgacaaagaagaaatacaaagagaggtaataacccttcttaaacaattcgaactggcaagaaaaacactaacaacacttgttgatttacaatgtgcaattccgcctctggataattgttactataaaaatttaaattggggggcggtcaatggcaacaaagcaacaaattga

SEQ ID NO: 112897 - DNA, 480 bp, Enterobacter aerogenes
atggcaacaaagcaacaaattgaacaggtacgcgcttacgcctactttccgagccaggcacaattaccggatagcgtcatagccagcaaaatagatatgtgggcagatgtccacggagacaaaccgcaaaccctgtataaggcgctcttggattgtctaaggtatctggtctatacagatcctatcatcgcatcaggaaccggcacaggcggaaatagccgcactgaacaagtgggacaggtgcaggttacaacagagacgacaggcgaatatgtctctaagtggaaacgcatcttagacgggtatctatccggcgatctgcgcttccctggaatacgtagcccgaaaggtaagaatgtgattattggcggagttgaccgccgcgagatcgaccgcgtgaacgcgaacccgtacagcgttaacggcctgcttaaagacggcagagaccgattcaaaattataagaggagaattacaatga

SEQ ID NO: 112898 - DNA, 294 bp, Enterobacter aerogenes
atgaaagatttaaaagcagagtttgacagtttttatgattcagttgaaaaggtagttattgatttagtgcaatcggactacagcagcacagaaacctttatcagtaactttgaatggctcaagcatcgctattttgcttatgctgataccgttacagaagaggataaagcctggctgtgtgaaaaccatcttcccgcctttgttaacctgatgcaagtagcgacaaccgttgcggcgattggctcaactttggaacacgtgacacgaccgcagacaggggcagctatccactaa

SEQ ID NO: 112899 - DNA, 285 bp, Enterobacter aerogenes
atgaaagaatccattattaaaaaagctatgcctgacggcaaagtagccgtaacactattctgtgatccagatgtagccaacgaattatttaaagtggctcgtgaaatgtctattgaagtaatcgacgcaggcgaacaacagacagttactaaatctgctaaccagtctgaagcttattcacgtgttgctgagattgcaaaatctttagaacaaaaaaaccaacctgttaagccaacctcatcaggcacgcttaacgctattcttatgtctatggggaaaaaataa

SEQ ID NO: 112900 - DNA, 1053 bp, Enterobacter aerogenes
atgccaatgattgcccttgacgcatttcataatgcagatctaacagatatttttgttaaagcttttcaaccgaaatcccttattatccaggaactcggactatttacagatattggttctgataaccctattgcggctgtagattattacgttgaagaatccgacgaagttacacttccaacagataaccaacgttatggaaccgatactaacggtattactctgcgtaaaactaaaactattgcgcttgagattccaatgactgagggaaccgctgaaatcaagtctaaagactggcaaggtaaacgctcattcggtggcactggcgagaaaacccgtgaagaagcagtgtatgaagcagcacaaacgcttgccgctgatcgtgatatgtgggtagagtacaaattaactcaagccctggtaactgcaacgcaaaccgcaccagaaacaattaatcctgagattgattatcaggcgttgtttggaactcgtttcacttcactgaatcttgatctttcctcgactacttttgatgtgccagcgtggattgcacgcactcaatcgcaagctaaacgccgtgcacgtgggcttaccattgaacgcatttttgcattctgtgcaccagaagttttctttgcgattatgtctcatccgactattaagcaaatgatggcttatactgttgatccgtattcatcacgcaatattctgaccaactacagtacacttggaacagatagcggccttgatgctattcaggctttcaactttggcggatttactttcgttcttgttgatgatcgtttctttggaatgatgggtgaaaatcaggtactgatcgcgcctaagtttgccgatggcccacagaacccgttgaaacgttattacactaaagcaagccgtgacggtattgtagcgcagcaagcgccgcaaacttcatacgcttatacaaccgtgtcagaacgtaataacatccacctttggacagaaacaagcgcacttgctgtaaatatgttgccgtctgtttattcaatggtagacgttactatttaa

SEQ ID NO: 112901 - DNA, 1863 bp, Enterobacter aerogenes
atggcaacaaaaattcaggccgcaacgttaattaacacggtgcgctaccagacagatcgcaacagccttaatcaggcacgtaagcagatgagacagttacgccagcagatggaaaacgattctgttaaacagtcgaaagctgagatcaagcggatgcgggaacaggcagatgcggagatacgcgaaacgaaacgcgccgcacgtgagaaggccaaagcagaaaaccagggcagcgggaagcgtggcgggaaaacgcaggcagaacgcgatgcagcacgccagagacgcgaacaggagaaagccttagctaaacagcgtaaagctgaggaacgcgctgttatgcagacggctaaccgtcaggccaaagccgatcacctgatgaaaagccgtagctttgacattaaccgcctccaggggctgaaccaggaacagcgatataacgctatccgtgaagcacaccgcattacagaagagtaccgcaatcaggcgatcactctacagcaggcgaacgaggcgctacgccaacagaaggcaatcttaggcagcattgcccgccagaatcgcacacagaaccgccgtgccggtgttccaacgccagcaggacacagccgccttgcttcaagccttgcccttgccggtgttgccggtggtgttggatatggtgcagagcgtgcagtagacacagccagagaaacccttgcgggaagtatcgagcgtaacgccggacgccaacagctacagcaatacgggatcagccctcttgaagctgatgcactgattcaggaaacacgcgccagaacaggcaagacgttgacgactgaacagcttgcagatcaggctaaagactaccgcgagaaaactggggaactctctttagggaaatggactaaagctaaggatggttcctggtcattgggatcagcgggtgaaatggcggatcttgtgaatgcggtaactcaacgaggcgggaaagcggcaggccagcaggtgcagcagaacgtgcaagggatgaactacacagaatatcttgtttatcttcgccagcttcaaaagcaattcaagttcaccgatcagcaaatgacgttctttgcagaaacgattaacgatggttcgttagcgttaggcggtatcgatcagaccggcaagaacctgacagacactatgatgtcaattgctcgcagtggtcagagccttaccgatgaacaaagcaggaatctaacttacctggctaacctcggatcagtcgcacagtctgcatctgaaaatctccaagacacatttagcagcgccttcgcttcgcgtatggaggagttagggatcggtgctgatcaaacacgtgaaagtttcgctgaactcaagccagttatgcaggagttaggacgcgagatcggcagcgttacagcgtggatttctaaacatctcggaatgattccaggcacagccagctacaaccgtgacacgtaccagcaaagctatcaggcagcgttagatcacaagaatgattctccgctggcgcaatggtggtctaaaaggtggaatagcacatctacagcgggatctgccggttttgaagacgctttagcaggtcgcccgatggatcagaagtacgtaaacccatatggcacaactgaaccaaacttcacaacgcagaatgctttagatcagcgttatgcaaacctggcttttggtaatccgctcgacttccagacgcctaagtttacatttgagattcacaacgaaaccaacgtgaacaccaatgatgatcgcttgatgggtgtctttactgcacacacacagcaagagattctgaacagttgggatgatatgactttccaagttaacaacatgaccagcaacaactaa

SEQ ID NO: 112902 - DNA, 1212 bp, Enterobacter aerogenes
atgatttacaagagagatcgttatctgattcttgatccttgtggtgtgtacatggttcgcattgcgctacctgcttacatgcgagggtatttcagcggcaaaaagaacttcatcaagtccactggcacacgagacatcaggcaagcaaggctgatccgtgatgctatcgccgtagagttttccagattaagggaacagctaaaaccacagcccagcggcacaaagatggaacggatcatcaatgagctacgccagataggaaacatagccaaagaaaacccaatcccattgggcgaatctgttacctcatgcccttctcttctcaaacttctggatctctaccttgtgcaattcagcgagaaacgaaagttgactaccctttccaaaacaaacaaagccgtagaggtgttacttgctcatctcaagaaaaaagatgttcagctaaaggatgtgaacagaacaaccgtaacaggctggcttgataagctaaaaaatgagaaagcgcctcagacgatacaaaactatatcagcgcccttgctcagatttgggatctggctaagaaccggtatcacgatgcaccacaggataatccctggcgcggtcatgcgctggaagcgaaaagcagcaaggttagctatgaagtattcgctccgggcgagttagcgaaggtctacagcctgcttgatgatgaaatgaaagctgtaacgcttatcggaatgtatagcggtatgcgactcaacgaggtgtgcaccctgaaatcagttaacgttaagacgattgaagatgtgttgtgctttgaagttttagaaggtaagacaaaatcggcggccagaatcatccctgtccacagcaagttaactgcactggttactacgcttctccagaagcccgatgacggcttcctgttctaccatgcatcaatcacagaccgtgcagatggtaagcgctctacgtggcatacacagcgatttacaagggctaaacgtaaggctttgggagaagctggaacagaaagaaaggtgtttcattcgctacgccattcctacgcacagcaactggacaggaacaaagttccagaggataggatcgcgctgttaatgggacatgagcgcggcaatactgaaagcttcaaaacgtactctaagaactccgcttcacctatggagctatcaagttatgttgagttgatttctttccctgaatttgattga

SEQ ID NO: 112903 - DNA, 816 bp, Enterobacter aerogenes
atgaagccaaaggcagaggcaaataaattatcaaagatcctgagcatttttttgggagaggatagatttcctgttgatgtagaatctttagcgttagagtattctaaaaaaacctctcctaatgatcctatagtgaaaattaaaaagagtgacattgataattttgaaggtgccttaattaaacatccaaataaaaatcaatggatgattttatataaagaaaatattcgttcagaaggtcgcaaaagatttacgattgcacatgagttagggcactacatgttacatcgtgctgaaatgaatgagtttttatgtacgtccatagttggtgaacaatcattatcagtccgcgatatagaaaatgaggcggatacatttgcatcataccttttaatgcctttggacgattgtagaaaacagatatctcatcagcaatttagtatcgaattactgattcactgcgctaatagatataatgtatctcttatggctgcagcgttaaaattgaaagaaatacttccaaagcgaattgtagttgtcgcagctagggatggtatgattttatgggcttcctctaaccaaaaagcatataaaagcaaagcttatatcaaaacaaaaggtgtaccacctatttcaatccctgagggatcattaatgtcttcattatcaacaaatcctgttggtgaaagtaaaaaacagccagcaaatttatggtttccagatgaaccgaaagatttacatttaattgagcatgtgtttgttgcaactgaaggatacgactatacgctgggtgtgcttgaactcgaaagtgaatga

SEQ ID NO: 112904 - DNA, 324 bp, Enterobacter aerogenes
atgagttctacattgggtaataaaataaatgcaaggcgtagggagttgaagtttagcattgataaacttgctgaattgtctggaacgagtaaaagttatatttgggagttagaaaatagggaaaactccaacccttcggctgaaaaaatagagaatatagcaaaggccttaggtgtgacacctcaatttttacttgaaagtaaaagtgctaatcctgatgaggatgtaatagatgaggcattctttagaaaatataaagggctttctgatagtgataagaaaaaagtgagaaaattaatagatgtctgggacgatgaggattaa

SEQ ID NO: 112905 - DNA, 663 bp, Enterobacter aerogenes
atgaaaaataaattcataaaaatcaatgacaaaattgttgagatcgatgatctcactcctacaggggctcagatccttcttgtagctggtgtcaaagacattgttgagtacgttctgttccagaaactaaaaaatggtttgcttgaagagattcgccctgaagaaaaaacgaccctcgataaagaaggtgttgaaacgttcctgatgtttaactccgaccgcacttatcgttttacacttaatggcaaaatgtttgattggggagcaccaaacttaacaggggccaccgtaaaatctctcgcagagtgtgattttgatagtaatgatgtatggcttgaaatgaaaaatgagaaagacaaactcattactgaccatgagcatattgaccttactcaaccaaatgttgaacgtctttatactcaggaaaccagtattaacatcattgtcaatgcaaaaatgcgggtcgtacatcgccgtgtgattagctactgggatgttgtccgactagcatatgaacatgccgaaaataatgaaacatcaatctattctgtagattacgctaagggtccaattaacaatccagaaggctctatggttgatggtcaatatgttcaactaaccgatgggatgattttttatgtcactcaaactgataaatcttaa

SEQ ID NO: 112906 - DNA, 1194 bp, Enterobacter aerogenes
atgtcactcaaactgataaatcttaatccctgcctgaaaagacttcaggatgagggttatgaactcgaaattagagatggtttccttatggttcactcagtaccatatgtaaacgtcaataaagaggtcctgaaagggacccttatcactaatcttgttttagtatcacccgatattattggcaaaccaaatacacaccaaatgtatttcaacggggaacatccctgccatcctgatggaagaatattagcagccattcaacatacctctccaaatcaaacgcttgggaatggcatcatagggaatcattggttctccaataaaccaccgtcaggtagctatgatgactattatcatcaggttactagttatgttagggttattgagaaccaagctaaagctattgatgaaaatgtctcagcgaaaacatttatttcacattacctcgctaatgatgatgacctttttacatatcaagatacagcttcagctcgtattggaactgttcatcttaacaatctaattgcaagacagaaagtggctattgttgggttaggtggaactggctcttacattttagatatgatatctaaaacttgtgtaggtgaaatacacttatatgataaagaccaattccaacaacataacgcatttcgtgctcctggagccgcatcaatagatgatttagagaaaaaacaaaaaaaatgtgattactattatcaaaagtatagtaatctgagaaatggaatcattcctcataatgaaatgctgtcagaaactaacttgcatgagctaattaattatgactttatcttcataagcgttgatagcgccacttcgcgtaaaacgatcactgattatctttttcaacataaaatcagctttattgatgtaggtatgggattaagttttaatgaagataaaagcagtcttttcggaacttgtcgttctacagtatatacaaaaggtatggatgatacgcctttaaaatctctgccaactatatcaagagatgatgaagtatacagatcaaatattcagctggtagaattaaactgcctaaatgcggcatttgctgttatacagtggaaaaaactatttggtttttattgtgacgatatgagttcgtatgaaatgacatacagtttagggttaaacaaaatagcaaataaagttacggagagagtagaatga

SEQ ID NO: 112907 - DNA, 1176 bp, Enterobacter aerogenes
atgcaaccaaactcagagaagtgtattttttgtgatgtttcctttgataaaggtagtctggagcacgtattccctagtgcgttaggcggaaggattactacaacacatgcgacatgtaaaagttgcaataatttattttcagaagctagctcagatgcggttgagatcgctctagctgataactttctttatatcagaaatgctttaaatgtttggtctggaagaggaaacccaccaccaacaataaaggaagcaggtcagtttgatgatgggattaagtatgatcttgcaccaaatctgacacctattgtatctaagtcaagaatcccctcaaaagaagaaactgataacaaaacagtctttgatttcgttgctcaagatgtagatgatgctaataggattgttggtattcttaagaagcgcggccttaacataggggatattaatgcaaaatatgttacaactaaacctcctgttataagagctaacattaagtttgaaggaaataagatttttcgtgccatagcgaaaatagcagtagtttcttatgttgttttgtatggtaattctcgagccagaacggatatttatctgacccttagggaatccattcgaaacggggaacctgacattacaaattattgcggatgggactatacaaatgactttcctaccattgaaaatttacatccacacgaaaaaaccccagatgccattcaatgtggatttgaacatgcaatatttatcacaaatgtcaaccatcaattggtttcttatataaagctttttggtgaatttaatttctctattattttaggtaatcattcgagtataacaccaaaatgcttgtgtttgaatcctactgcaggaaagtcttcaaggtttaacattgtatttactccgccattaagttacatacctaaaaatattaactcattcaaaaatgagcatgaattagtttgggaaaaggtacagctagcaatgagtgctatagtagagcactgccaaattttatcgacgcaagaatatattaaaagcctcagtcaagagttaatgatttctgttcaaactgcatccattgattctgaaatatctgaaataatacgatcattttctgagaagcttgcttatatagaaaatggattggcatgggaagaagcaattgatattgaataa

SEQ ID NO: 112908 - DNA, 717 bp, Enterobacter aerogenes
atgccggtcatgcagataggcacgctgcgcttgcaggttaatcgtaaagcgattaagaacctgcatatcaacgtcctgccgcccgacggcaaagtccgcgtttcggccccggaacacatgacggaaacggcgatacggatggctgtcgcttcccgctttcgctggatccgaaagcagcagcaggattttgccagacagccccgtcaatccgagcgggagatggtcagcggagagtgccactatctttggggccgcaggtatcgcttgtttgtgatcgagcgccagggacgccatgaagtgaaggtcgcgggaaacaataaactccagctttatattcagccgggaaccagtaatgaaaataaggagctggtattaaccgacttttatcggcatgaactgaagcggcaggttgccaaattgctgcccgaatggcaggccagaaccggtgtccccccaacgttctggggcatcaaaaagatgaaaaccttttggggtacctgtaataccaccacaaagcgaatctggctcaatctggagctggtcaagaagccaccggagtgtctggagtatattctggtgcatgaactggttcacctgctggagcgtcatcataacgagcgcttccggctgcatatggaccgcttgatccctaactggcgcgagcgccgggatttgctcaataagatgccgctggcgtttgaggcgtgggagtactaa

SEQ ID NO: 112909 - DNA, 3096 bp, Enterobacter aerogenes
ttgagcactatcggccagcgcgaacgcgccacacagcagcgtttgattcagttttttgttaaggatttaggataccgctatctgggacggagcgcaggatatgccggtgacagcaatatcgacacggacatactgagcgcatggctgaagcggcgcggcgtcagtgatacgctgattacccgcgtgcttcggcaactggattccgccgccgcgctgggcgaaggcaagaagctgtattacgccaataaagaggtctatcgcctactgcgttacggcgtaaaggaaaaggaaggtgcgggcgagcagaatcagaccgtgtggctgattgactgggcaaatcctgaagccaatgatttcgccatcgccgacgaggtgacggtcaaaggtgaatacagcaagcgcccggatctggtgctgtacgttaacggcatcgcgctgggcgtgattgagcttaaacgctcgtctgtccacgttagcgaaggcatccggcagaatctcgataatcaaaagaaaacctttatccgcaatttctttaccaccatgcaactggtgatggcaggtaacgatacgcagggactgcgctacggcaccatcgaaacgccggaaaaatattatctggagtggaaagaagagaataccggcacatacacgcataaactcgactttcatttaagccgcctttgcagcaaatcaaggctgctggatatcgtccataactacatggcctttgacgctggtgtgaaaaaactctgtcgccataatcagttctttggcgtcgaggcagctaaacagcatattgcccgtcgtgaaggcgggattatctggcacacacagggatcgggtaaaagcctgacgatggtctggctggcgaagtggatccgtgaaaacgtacccaattcacgcgtgctgattgtgaccgaccgcaccgagctagatgaacagatcgaaagcgtgtttatgggcgtggatgaagagatttatcgctcctccagcggcaacgacctaatcgcgacgctcaatcatcctaacccgtggctcatctgctcgctggtgcataagtttggtcgtcgtagtgaagcagaagacactgcggcaaccgacgacttcatcaccgagttacagcaatccctgacaaaaacgttccgcgccaaaggcgatctgttcgtcttcgtcgatgagtgccaccgtacgcagtccggcaaattgcataacgcgatgaccgctattctgccggaagccctgtttatcggttttaccggcacgccgctgatgaagaaagataaaaagaaatcggtggaagtgttcggcccttatatccatacctataagtttgatgaagcagtagcagacggcgtggtgctggatctgcgctatgaggctcgcgatattgaccagtatctgacgtctgagaaaaaggtcgatgactggtttgaagccaaaacgcgcggcctgtcgaatttagccaaaacccagcttaaacagaaatggggctcaatgcagaaactgctgtccagtaagtcgcggctggagcagatcgttaacgatattatgctggatatggatacccgtccgcgcctgatggacggacgcggcaacgccatgctggtatgcagcagcgtgtatcaggcctgtaaggtttacgaaatgttcagccagaccgatctggcgggaaaagtggcgattgtgaccagctttcgtcccgacgcggccagtatcaaaggtgaagaaaccggcgcgggcctgaccgagaaactgtttaaattctcgacctaccgcaaaatgctggctgactactttgagcaaagcgaagagaaggttgccgggcgtatcgccgagttcgagcgagacgttaagcagcgctttattaatgagccgggacaaatgcgcctgcttatcgtcgtggataagctgctgactggctttgacgcaccgtccgccacctatctttatattgataaaaccatgacagaccatacgctgtttcaggcgatttgtcgggtaaaccggctggatggggaagataaagagtacggctatattatcgattataaagatctgttccgctcgctggataaagcgataaccgattacaccacgggtgcgtttgacgattacgatcgcgatgatgttgatggcctgctgaaaaatcgtctggagcaggcaaagctggatcttgacagcgcgctggaggtggttcgcagcctgtgcgaacccgtcagggcaccgcgcgatttgcctgactatcagcactatttctgcggccagtcaggggaaaaccagacgatattaggcgaaaaagaggcgctgcgcctatcgttctatcagaatgtcgcccgcctgctacgcgcttacgccaacctggcaaatgaaatgcaggaagcgggttataccgatgaagaagtggaaagcatccgagctgaagtcgctaaattcgagagactgcgctacgacattaagctgaccagcggcgatctgctggacatgaagcgctttgaacccgccatgcgccacctgttggacatgtacgttcgcgccgacggtagcgaagtgctgatggatttcgaagagttaagcctgattgagctgattgttgaaaaaggcgcagcagcaaccgcggctctaccagacgagatccgcaacaatcaggatgcgatggcggaaaccatcgaaaacaacgtgcgtaaaaccatcgtggatgaaaacccggtgaacccaaaatactacgggcgcatgtcgcttttgctggatgaactgattacccttcgccgccagaatgcgcttgattatcagcagtacctggagcgtatccgggatttgagcaagcaggtcatccgcccggaacaaaccaacggagcatcctatcctgaaacaatggatacacaggcaaagcgtgcgttttatgataacttcggtcatgacgaggtgctggcaacccgtattgatacgacaatccgctataccaaaaaagcggagtggattggcgatcgttttaaggaacgagagcttgcccgtgcactacgcgaagaaaccgccagttataacgtcaatattgatgacgttcttgagcttgcccgcaagcaaaaggaataccactga

SEQ ID NO: 112910 - DNA, 1068 bp, Enterobacter aerogenes
atgatgacatatacacaaggcaatttactggatgcgcccgtggaagcactggtgaatacggttaataccgtcggtgtcatgggtaaaggcatcgcgctgatgttcaaagagcgcttccccgacaatatgaaagcctatgccctcgcctgcaaacaaaagcaggtcatgaccggcaagatgtttattaccgaaaccggcgaactaatggggccgcgctggatcgtcaacttccctaccaagcagcactggcgcgccgactcccgcatggagtggattgaagacggcttgcaggacttacgtcgctttttgatcgaagagaacgtgcggtccatcgctattcccccgctgggtgcgggcaacggcggcctgaactggccggacgtccggacgcgaattgaatctgcgctgggcgaccttcaggacacagaaatcctgatttatgagcccaccgaaaaataccagaatgttgccaagagcaccggtgtaaaaaagctcacccccgccagagcgatgatcgctgaactggtgcgccgctactgggtgctgggcatggagtgcagcctgctggaaattcagaagctggcatggctgttacaacgcgccattgaacagcatcagcaggaagacgtgctaaaactgcggtttgaggcgcactattacggcccgtatgcccccaacctgaaccatctgcttaacgcgctggacggcacctatctgaaagccgagaaacgcatcccggacagccagccactggacgttatatggtttaacgatcgggaaaaagaacacatcaacctctggcttaacagcgaagccaaagcgtggttaccggcgcttgagcaggtcagccagttgattgacggttttgaatcgccgtttggtctggaactgctggcgaccgttgactggctgctgacccgaggacaatgccagcccacgctggattcagtgaaagaggggctacaccagtggcctgccggtgaacgctgggccagccgcaagatgaagctctttgacgataagaatctgcaatttgccataaaccgcgtgatggagttccattgctga

SEQ ID NO: 112911 - DNA, 657 bp, Enterobacter aerogenes
gtggcctatgactacagcgccagcctcaacccggaaaaagccctgatctggcgcattgtccatcgggacaatatcccatggatactggacaacggcctgcactgcgacaatagccaagtgcaggctgcaaactggatcaatatcggcaacccggagcttatcgacaaacgcgccgggcatccggtacctatcgggacgggcggaacgctgcatgactatgtaccgttttactttacccccttctcgccaatgctgatgaatatccacagcgggcgtggcggcattaagcagcgccctaatgaagaaatcgtcattctggtcagcagcctgcgacacgtggcggcacaacaagtccccttcgtgtttaccgacagccacgcctactataatctggcgaattactataccgatctaaacaatctgcaccggatcgactggcccatcctacaggcgagggatttccgtcgcgatcaggacgatcttgccaagtttgaacgctatcaggccgaggcgttaatctggcagcactgcccaatcacactgctggtcgggatgatttgttacaacgatggcgtcaggttacaattagagcagtggctgtcgcaacgcaatctgtcaatgcccgttcacgcacgggccgggtggtacttctcatga

SEQ ID NO: 112912 - DNA, 576 bp, Enterobacter aerogenes
atgtcagatattcgcacacagcaatttctttatcacttaacggatcttaacaatctggaagatattttctccgaagggctaaaatctcgcagcctcttgcgtggtttttcagatattgccgatcctgaaatcatagcttcgcgcagtgctttacgattggaagagtatgttcctttccatttttttgcccgaaacccttttgatggcagggttcatcgtaataatccagataagacgttcgtcctcattgctgttcgtcgaagctatgcgcagacaaatagctggtcagtcattcccagacatccgttatctggttcagcgattactttgcttgattatgaaacgggtatggctaccattgactgggaaaccatgaaccgccgtgaatatggggatgacaattgcaagtgtgtttgtatggctgagtgcctgtctccagccactgtaaccgcaaacaattttcatagcatctatgttccagatgcagcaacagaaacagttgttaacgccttgaagcaaaagtatagactcgatatgtatgtcaacatcaattctcgtatgttcccgggagcctga

SEQ ID NO: 112913 - DNA, 1350 bp, Enterobacter aerogenes
atggtggatttaatggtgagtgagcagcagtcgggtacggcggagaaaggcgtgcctgcggggtttaaattgactgaggtggggattattcctgaggattgggagtgcaaatatctcggagaacttggcgatattgttcggggaggctctcctcgccccgcaggtgatcctaaatattttgagggtgattttatcccttggctgacggttgcttcattgacgacaatcccggatgcccaacagatcgttatggcaacatcctcgatgttaaccgaattaggttctatgcatagccggaccttagaaaaaggcactcttattatttctaatagtggtgcaacacttggtgttgcaaaacttttaggaataaaatgctgtgcaaatgatggtgttgctgcaattattaaccaacgaatcggaaataaatcatttttgattcattacattaatacaataacaaaaagccttcatgacaagattgcaacgggtaacggacagcctaatctaaatactgatctgattagacttatttctgtaccttttccaaacgagcaagaacaggaaaaaatagcagatacgttgtctgattgtgacaattttattcttaaactagagcaactaatcgccaaaaaactggccatcaaaacagccaccatgcagcaactattaacgggtaaaacccgtttgcgacagtttgcgttgcgggatgatggttctgttaagggatataaaaagagtgagttgggggaaatccctgaggattggagttgtattaatctcggtgaactaggtaattgcattattggattaacttataaacctgaagatacatctgattatggtatattggtattacgttcatccaatattcaaaataatcacttagcttatgatgataatgttttcgtcagtatagaaccacctgagcgcacaattgtgaaagaaggtgatattttggtgtgtgtgagaaatggcagtcgccaacttattggtaaatgcgcattaattgacaaaaatgcgcaaggttcggcattcggtgcatttatgtcaatatttcgaactgatatatatgaatttatatttcatcaatttcagtctaacgttattcaaaagcaaatagctgaaattatgggcgccactatcaatcaaataactaacaaagatatgttgggctttaaaattccattacctgaaaataaagaagaacaaaccgccatcgccgccatcctctccgatatggacaaggagattcagaccctgcaacaacgtctggacaaaacccgccagcttaaacaggggatgatgcaggaactgttaacaggaaagactcggctcatagaaaggaactag

SEQ ID NO: 112914 - DNA, 2445 bp, Enterobacter aerogenes
atggctatcaaaaaaaccgaactatattcctccctgtgggcaagctgcgacgaactgcgcggcgggatggatgccagccaatacaaggactatgtgctgaccctactgtttatgaagtatgtgtccgacaaatacaaaggcgacccttacggaatgatcgttatcccgaaaggggccagctttgacgatatgatcgcgctgaagaacgataaagaaatcggcgataaaattaacaaaatcatccgcaagctggcggaagagaacgatttgaaaggcgttattgacgaggccgactttaacgacgaagacaagcttggtaaaggcaaggagatgattgaccgcctgacgaagctagtcggtatcttcgaggggctggatctgtccagcaaccgggccgatggcgatgatctactgggcgatgcctatgagtacctgatgcgccacttcgccaccgaatccggtaaaagcaagggacaattttatactcctgcagaggtgtcacgcattctggcgaaggtgatcagcattacgcctgacacaccgcaggatgccactgtatacgaccccacctgcggttccggctctctgctactgaaagtcagcgacgaaacgcgacgcggactatcgatcttcgggcaggagatggacaacgccaccagcgcattagcgcggatgaacatgatcctgcacaacaatgccaccgctaaaatctggcagggtaataccctaagcgatccgcagtggaaagaagccaacggcaagctgaaagccttcgatttcgccgtggccaacccgccgttttccaataaaaactggaccagcggactggatccgaagaaagatccatttgaacgtttcgtctggggcgttccgccggagaaaaatggcgattacgcctttctgctgcacattatcaagagcctgaaaagcaccggtaaaggggcggtgatcctgccgcacggcgtgctgttccgcggcaacgccgaggcgaacatccgtgaaaacctgatcaagcagggctatatcaagggcattatcggcttaccggccaatctgttttacggcaccggcatcccggcgtgcattatcgtgattgataaggagcacgcccacagccgcaaaggcatttttatgatcgacgccagccggggctttatcaaggacggcaacaagaaccgcctgcgcagccgggatattcaccgcatcgtggacgtgtttaaccaccagcgcacggtgtccggctacagccggatggtgccgttaagtgaaattgccagcgaacaaaataattacaacctgaatatcccccgctatatcgacggtggcgaaccggaagatctgcacgatctgaccgcccacttacagggcggtattccggcacgcgatgttgatgccctacaagattactggcgagtcttccctgccctgcgcgacgtgctgtttaccgacgatcgccccggctactgtcgggcacaggtagaggcacagcaggtgaagccaaccattctggcacatcaggaatttaaggattttgccacccgcagcctgctgccgtttaaggcatgggtgaaagaggcggcgctggcagatattggcaaaggtgataaaccgaaggaactgatccgcgatatcagcgagatgctgctggcgcagtatgccaacagcgaactgctgaataaatacagcgtgtaccagatcctgatggactactgggccgacgccatgcaggacgatgtatacgtgattatgcaggaaggctggaaagccgccgcgcaaattcgcgaactccagccggtgaaaggcaaggacggcaaaaacgtctggaaagaagcgcacgattttgagtttgacaagcggcgttacagggctgatgtgctgccccgttcactggtggaaattcgctgtttcccggaactactggacgcgttgaaccgtgcacaggaacgcagtgaagaagccagccgtcagttaggcaagtttgtcgaagagcaggcaggggaagacgatctgctggccgaagcgaagaacgataaagataaggtgacgcaaaagttggtcaattcccgcctgactcaactgaagaagaccaccgccgacccggatgagctggcggcgctgacccgctgtctggcgttgattaaagctgaggcgaatgcgaaaaaagcgctgaaagccgcgcaagaagcgctggatcgcgcggtgtttaaacattattccacgctggatgaagcggcgatcaaagtattggtggtgcaggacaaatggctggcgacgttgcaggccgggattaaggcggagattgagcgtatcacccagcaactggcggagcgcgtgaaggagctggaagagcgctatgccgagccgttaccggcgctggaagcgtccgttgaggcgttgagagagaaagtggccgggcatttgcgagcaatggggctggtgtggtga

SEQ ID NO: 112915 - DNA, 240 bp, Enterobacter aerogenes
atgaacgaaaacgatatttatcgccgtattcagcaagcgctgtccaacgcgccgcgtaatcagtacaccgttgagctgcatctgcaaatgatcaaatatgccgacgaactggaacacattacggcaaaagccttttgcgaaggcaccggtctgagccagagtctcggtaccgaattcagcaaaatgcgtaacttaacccgtcggctgaaagccgccggactgaacaccgatctgctgtaa

SEQ ID NO: 112916 - DNA, 1530 bp, Enterobacter aerogenes
atgcctccaagaaataagagcattaccagtcaaaagattaactcgattacaattcagaaattaaaatgcataaatgatttgaatgagattttttttcacccacatgcactaactgctattcttggtccaaatggaagcggtaaatccaccatcctccatgctctagcaagcatatatatgccagaagagggattttctggtgaggatcataagctaggtgattttttccctcgtagcccgcaagctgaatggaatggcagtaacttcaacatcaatatatcatatcgtcgtgatggtgttttaattgataatgagataaaaaattatggaaaagctggtgatagaggttctcgatggatccaaatatatgctagacggccaatgcgagaagtttattatttaggtatagataaatgcgtaccaatgattgagtcggagaagaaaaataacgtaaaatatgtaacaagcaatgtaagcaatgcattaatcaccacaatactcggcaaggcatcctatattttaaataaacgatacaccagttttaaccatcatcaaaaacctaacggcactaaatttatcggcgtagaaactggcggccttgcttactcctctcttagcatgagcgcaggcgaacaaaaaatatttcttatccttgagactgttttcaaagcagataaaaacgccctgatcttgattgatgaacttgatctattattacatgacgaagcgttaaaaaaattaatctttgttttatctgaacatgccagggagaaaaacaaacaaattatctttactacgcatcgtgaattaataataagcatggcagataaagttaatatacgtcatattgtatctcttgatacccgctcatattgttttgaagaaactaaaccagacgctataaacagattaactggtgagcaagttacacctatagaaatatatatagaggatgatgttgcaagtgcgatcgccaggaaaatatgttcctcccttcaggctagcagatacgtcaaaatatatatgtttggcgctgcaattaacgcctttacactacttgccagttcactcatcagaggggaagatatctcccacaaaatttacattttagatggtgacgaatataatacagccgatcaaaaagcagcagcactagacagagtcttaacaggcacagaagaaagaacccggcagttaaagatcgcaggtgaagggaaaattatacagtttaaccttcctgtggatctgaaacctgaagcatatctccatcaattaataacaactattcctatcgcaggtctggaaaatgatgcgttggaaattatcacagttgcaaacagcatccgcttcgaaatggatccgcatagatatattacgaacattataaatagattaggtttggagcgttcatctgggctcgctaaaattattgatcttgcatcaaaacaccctgactggaacaattatacccaaagtatctctaactggttgactcctttaattaatcaattaagagaagataatggctaa

SEQ ID NO: 112917 - DNA, 633 bp, Enterobacter aerogenes
atgagtgagcagcgcccccctccgtcacgcccgccacaaggaccgattggctggctgctgtcgctgaccgggcggcttatcgggctggtcattggcgcgctggtgttgcggatcgtactggagctggcggggttgtatttctggtggccacaggaggggagcaagcatatttttttggtaatgaggcaggagcgggtggaattggttattgcgttacagtcgcacccactggggaatgaaattctggtgctgctggaaaaaggggcaacgcacgtgcttatggtcaacaggctcctgcagaaaccgttcaccgccctagcttatacgctggtgagttttatgcagcgcctgatatggcttgccaccatgagccccctgttctgcctgtgtgcggtacccgggctgacagaggggctggtacaacgggatctgaggcgatttggctccgggctggagtcggtttttctccaccgttatgtcatcacatcaggcagttcagtcgccaccacgctgtgggtggtttatctggcgcagccgctatttctgcctgcgatgctggttttactgcctgccgccttatggtttgggataacggtatggatggcggcaggaagctttaaacgttggttataa

SEQ ID NO: 112918 - DNA, 681 bp, Enterobacter aerogenes
gtgtatgtcgggctggacgcgctctccgatgccgtagtcgctgccgccgtcggcaattcgatgtttgccgatctggtgagcgtcgccgggcacctctacaagtttggcctcaacgaaggactgcccggcagcagtgaaaaaccgccgcctatcaatctgcactgcgatgagtttaatgaactgatgggcgaggagtttattccgctggtcaacaagggcggcggcgcgggcattcaggtcaccgcctacacccagacgctgagcgatattcaggcccgcatcggcagcgcccccaaggcaggccaagtggtgggtaacttcaacaacctgattatgctgcgggtacgcgaaaccgccaccgccgaactactgacgaagcaactgccacaggtcgaagtgcgcaaccgccaggtgagttccggtgtcaccgacacaccgggcggcatcaacagctttaccagcaacacccgcgagcaggtaagcaccagtaatgtaccgctgctggataccgccgcgttgattcaacttcctaaaggccaggcctttgccctgcttgagggcgggcagctgtggaaaattcgtctgccactgcccgtagcagataagcacagcccactaccggagtccgtcgcgcaactggtggcctggatgcaagcacgccagcaggggcaggtggaatga

SEQ ID NO: 112919 - DNA, 792 bp, Enterobacter aerogenes
atgaatagcattacgcggaatgtgataatgccgctgctgatgataattataaccttaccttttatatacctttgctttagtctactggaggaaaatgacctttttcttttcctcggtttggcagggactgtattaatttatttttgtatttacgcattacgatgcgctttaacacaccctaaaatgctcatcatcaggttaaatcgtcaacagaagaaagtttatattcaaaaacatcatcgtacatttaatatattcgccaaatggtccattgaaacgctcatttatgactggaatcttatagaggcatattttggccatcgtatcagtagatattatggtcacctttcctggtaccgctggcatgcgacttcatccagtggcaacaaaaccagctttaccgttagcgaagatatcttaccggcatggtctccctattcccgatttaaagccgatatcaatacaattatctctagctatgaagaatcatgggagtggtgtaaccactatatgaatggcgcgttgcccgacttgaacttaatatcacctgaaaacgaatacagttataaatactgcgtcacggcaatcagcagtagaatagtgctgcacgctaataaggatgacaaatggaccactatatttcccatcagagacccatttttcttaacattttctataattattgtccccttcattttattagatgcatttgcaatgcgctggattatgcgaagacttccggatacggtctggtctgattccgcgcaagctgaatcaacctcagaaagttaa

SEQ ID NO: 112920 - DNA, 1692 bp, Enterobacter aerogenes
atgaagaagtttttccccgtcatggatattggtgcgacgatagtaattttaatttctttttattatttaacacatatgcaacctatcacacctgaaagtgggattggaattaatgatcttattagattcgtatggttaagcaccccaatattgttagtttttttcctgttaagagcgataaagataaaaccatttacatcactatatgtaacattgatgttattttttagtttatcctatattagcaataaaaagtccgaattaaccggcgaacctctcacatttaatgatataatagcaatatctaatatatcagtggcttcaaaatatactcccgcaatgagcatcgtatattcattaattgccatcctacttttattttttattttcctcatggaaaataaaatcaccaaaaaagaaagttgcagaccatctatttatttaatggtaatcatactacttccgttttccttttatttatatatcctaaatcaatttcctttaggaagtcacgcatacaattcaatcaactatgaacttaaaaaactcaaaatcacatacatacaatacaattggtcgcaaaacgagtcagaaaatggactcccaatgcatctggtacaaacaagcgcaaggaaatctattccatccagcacatcctctcaaagagagttatatgacaaatacaatgataacattccaaaacagaacggtgaaaacacaataatatatatattatgcgaggcttgctggtataatgaaaataacttcaagaacattttccaaccgttaatcaatctcggatacaaggaatcaagagcaatttctccagcttatggcggtggtactgccaatgctgaatttgaaatgtttaccgggttgcccagtcattcaagatatatatctggcattgtctaccaggagtattctaacttcatttcggcacatgccgatacgttgccacagcgattgaaaaaaaatggctatattacctataccgcacacaacaacaatcgagagttctggcacagaaatgtcatatatcccaaatttggctttgataagtttcaggatataagtgaaatgggaactctcccatccgaatatgccaatgaaaaaaaatactggcaatgggcaaccgatgattatcttttatttaacaccgccataaaagagttaaaagcgacaaaaaataaaaaaatattcatgagtttaatcactatgtctacacatggaccatatcatgttgaaaatgattatggtgagaatgcatactcatatcagttaacccaagcaatttcacgactaactgaatttacaaaacaggttgaaaaattggatccaaatactcttatagttatctatggagaccataagcctgcgctgaataagtttttcataagtaaaggcatacttaaacaaaacattttcggtaacggcccttatgattatggagatgtccctgtactgataaaatctaaaaacttagaagcaacaactaatgtcgtaaaagaatcaaaaggaaaacccttcttttgcctaacgaacgccattgacaaaaactatataggaacaagaattttttcattcgatttctatgaaaagaatgggtgtttttctgatggcgactatgattataacacccttgttaacaaggctccatcctggctatattcactagctcttttcaagtga

SEQ ID NO: 112921 - DNA, 177 bp, Enterobacter aerogenes
atggcgatttttgatggtcacaatgacctgctgctcaatttatggcttcaccatcgcgaggatccttcaaccgctttctttgccgggattgagaacggtcatctcgactatccgcgcatgctgcaaggcgaatttgccggcgggctattcgcgctattcgtgccaccgcaggaatag

SEQ ID NO: 112922 - DNA, 177 bp, Enterobacter aerogenes
atgcctgtaaaacaacgagttataactcctactaccgcttttacaactgccccggatgaaaaattacgacagggtgaagtggacaagtggaaggaagataaccgcgaagccctggaagaacttaataactttcatgatgaacacggttgcttcagcgatgaatacaggaccttttaa

SEQ ID NO: 112923 - DNA, 510 bp, Enterobacter aerogenes
atggctgataaagaagaattgacggaaaaaattcaatgccttgagtgtggaaaatacttctcgttcctggctccgcacctgaataaaacccatcagatgaacgccagggaataccgcgaacgctggggtattccgttacacaccccccttgccagcgtcagtcattcccgtcagtgcagagagaatgtattgagccgcatccggcgaggcgagattaatcccgatgagcagctcgcgctcatggctgaaggaaggaagcgcgccccggaacgtgcaaccagcaccaggctgcataaagtggcggcgcgaaacgtagcacagacacatcagatctggaagcgctcgccagtggtgaaagtggtaccagaagcgctcaaggctgaagccgtgaaaagaatggaggccagaaaagtaacgggggaaaaagttaaggcgattgctgctgatctgaacctgtcggttgggtgtctgtataagtgggtgtcggccactaaacagactgtaaactga

SEQ ID NO: 112924 - DNA, 408 bp, Enterobacter aerogenes
gtgactgagaaaaattatatcgtatgcggtcaaactggcgctggcaggactactccacagaagagaacaatgttgaatgtacgcattgatgaagatctgaaaaagaaagcagaagcagtgctgacggaacagggaatgacggccacagacgccgtgactgccctttaccgcttcatagccgaacacggccgtatgcccgtacaaagcagagttgtcacgatggatgatgcggttgaaatgctggtattcgctaaatcagacacgtcacaactggaacgggtttatggcgaaaaaaatgccagcacgctgctggccaataccaacgtgaagatgatatttgccgaaagcggaactccgcctgacaccgaaccaccagggaaacaggcttccggtacggacaaacggtga

SEQ ID NO: 112925 - DNA, 645 bp, Enterobacter aerogenes
atgccttattataaggggcgctggcaccgttacagcgaggcagagcgccgcgcttatggcgcagcaatgcgggaaaaagaaagcaaagcggccagctccgcctggcacagggaatggatcagcaaaacggggctgcgggaacgactctggaccgacagagccatcactgattttctgccccccccccagaaggcaggccctatctacgcctggaagcgtaaatacatactcaaagtggaacagacgccggccttccgcgcctggctgatacagcgtcaggactggcttatacgccggggaaaactgccggcatcactgcagacgggtgaggatatgacaggattaattggcagcggtctgacattacggaccgtttatgaaaatgaacagggtgagaaacggctgatcgtatcggttacggataatgtggtcctctggaaaacggccgaccccgatttgcctgccggcggtaaatcgcagggaagcgccaccctggcgagcttcaggcgctggatcgccagtgaacacccggcttccggtgtggaactggaagccttcgacaaggttcttcaccgtcgcaaatatgcacaaaagactacccgtgagatccgggccatgaaaaaccgtaatcgccaggaaaggtga

SEQ ID NO: 112926 - DNA, 549 bp, Enterobacter aerogenes
atgggaacctacatacgaacctgcgcggaaatcaaaaccacggacggctggcaaccggtcggctacggcgcgtttcccccggtgttgtggcacgacatggacgggtatgaagcccccgcgtacagcgaaccctttaaggaccagaactacggcatgtttggcctgtttgccggcgaaagaaattacagccagtgtcaggtgctggccgagccgcgcggtttcccggacgacatctcggaagaggccctgcggcatcttgtgcctgaagtatggcaactggaaagcaattggggctggggtgagccaccaccggccacggtcgctgagcggatcgcccgttcggaggcagactgctacgggtattcctggctgagtgcagcggagctgaccacgttcgactatgaccagacgtttaccgatcagcgccccgatacaccacaaaccgtcacctatcgtgaatttctggggcaacggtattttctgcacctggatgcgctgaaagcgctgagcgaacaggctgaggtgcgcgtgctgttctgctttaactga

SEQ ID NO: 112927 - DNA, 636 bp, Enterobacter aerogenes
atgaacatcagcaacgatatccgggcacgcattgaggccgccgcggaggcgctggtcagtgaaggcgtgaacagcccgaccaacgagcaggtccgccagaagctgggcggcggctccctgtcccatatctcgccggtcatgcgggagtggcggcgccggctgcgcgagcagactgacacaccggcgctgcccgtaccggacacgctgcagcagctggccgccgatctcgccgcccgtctgtggcagcaggcccgcgaactggctgaggctgacgccgcggcggtacgcgaacaggcggatgcagacatcgcccaggcggatgaacagcgtgatgaggcactggacgaagtacgccgcctggaagccgaactgacatacctgcgcggcgtggcggacgaacgtgaccggctgcgcggacaactggaagagacgcgcgcggcacttgccgaatcccgcacgaataacgccgttctgcaggccacagccgataccggcatgcggcagcttgacgacacgcgggcagagctgaaactggccagagaagataataaggcgctgcaggcagagctcctgcagctggcgcgcgcggccggcagacaacccgatcctgcgcaaaataaaaccggtaaggagtaa

SEQ ID NO: 112928 - DNA, 228 bp, Enterobacter aerogenes
atgatcaccgacacccggacccccgaagaactggccgcggccattcagaccgcgctggaaatagccgcacggttcggcggcagagacactgcgcatcataaagcgtgggttatcgatcagatgtgccgcgcactggccggcgacggctacggggcatatgtagccggcgtgtgtgccggcgagaacggcccggacacctacacctgggacgagggcattacaccatga

SEQ ID NO: 112929 - DNA, 237 bp, Enterobacter aerogenes
atgacaacgctacatattcgtgaaatacccaccgatggagcgccgcctatcttcgcaggccgctcaatctcagatgatgacctttgcgcctcatgccagcatctcgactatcgaccagggcacctcagcgcctgcctgctgtcaggttgtgggcgtgacgactggccttcagaactggatgagaacggctacagcgttgcctgtagcagctataagcgtgaaaaattgcttgattaa

SEQ ID NO: 112930 - DNA, 372 bp, Enterobacter aerogenes
  misc_feature (351)..(360): n is a, c, g, or t
atggacccaaaacctcctgaatggaccaccttttttatgggccaaaatcctggcatagaacctgatttcttcggtatgaatagtagcacaggagcagtattagttattgaggctaacaattccagatatcttattccctttggaaccggtcatcacttaatcaatgatggcagcattgtcaaaggatttgggcttaaaacaactcttaatagtatagaacataaaaaaattcgcagtttagataaaggcagtcacaacgaaacgaacctgttaactcgcagtcagagcagtaaagaagtcgatatatataacctaaaaatagattctgagatggatattctcacaactctnnnnnnnnnntttaggaagtaa

SEQ ID NO: 112931 - DNA, 279 bp, Enterobacter aerogenes
atggcgatgtgggaaaagatattacaaaaaaatctttattctgaatgggttatccgaaacaccctatactggatgactcctgtaagtccatggaaacttgaagaaaacacatcctcttggattatcttctttgagataagtggccctgaatgtgagtttgaattcggaaggctgttaaacgattttagcctccgcgagaaacttcatcatcaaaccggtcaattgcgtgatgccattgtcagcaaggttctccgaagcatagatgacaggcttgcataa

SEQ ID NO: 112932 - DNA, 936 bp, Enterobacter aerogenes
atgagtcctttctcgcgctttgcgcattattttatggaagtggcccgcagcggcagcctgcgccgggcggcggaaaaactgcatatttcggcttcggcgattaaccgccagatactgcaggctgaagcgtccttcggcacgccgctgtttgagcggctgccggaaggtttgcggatgaccaccgcaggcgagctgttgtatgacaatctgctgcgctggcaaaaagagtttcgcgtgacccaacagaaatttgatgaactgcaggggctaaaacgcggaacggtgaatgtcggtatggtgcaggcgctggccgaagggagttttgccgcggcgctggcagagattatcaaccagtgcgagtggctggaactgatgttgcaggtcgccgatagccagagcatcagcgacagagtgcgtcaggccgatgtcgattttggtctgatcctcgatcctgaaggtcaggcgggtctcaacgtactggcgtttattgaaatggaagtcggggtggtactgcatccgcaccatccttttgccgccgcgcccgcgatctcgctgggggaacttagcgatgaacggcatattattcccggcgcgccgttaatagtgcatgaccgggtggcaatgctctatcgccattatgatttttcgccgcccaacaccgttagctgcaatgatattcgtctgattaaatcgctggtgcttaaaggcggcggggtgacggtcctgagcctgctggacgtgcaggacgaggtaaacaacggttcgctggcgtttgtgccgctacgtaataagctgctacggcctttgactctggcgctgtgcaccgcgccatcgcgccagctatctcgtccggcgcaaatggcgattcaaaaactaacgctagtgatggaggagatgcgtagcgctgctcactctcagcctaatggcccgccctga

SEQ ID NO: 112933 - DNA, 240 bp, Enterobacter aerogenes
atgtcttccattcaactctgcgccgcgcatcaggcgacctctggcttcgacggcgatgcgatcgcccagtacatgcgtaccgactttattacgctgcaggaacatttcagcgtccatgaggcgcgtgaacactttatctcgcagctcgccagcgacgatattcccggccaggtatttgtcgtcgccggtaacaagctgcgcggcagcttatcagtcaaaaaacttttgcaggaggcatag

SEQ ID NO: 112934 - DNA, 870 bp, Enterobacter aerogenes
atggcggaaagcaatcgcaagcaggcggaaatccccgccagcgccgaaatgatcaataacccggtgggcactgcctgcgggttcgccgtacagctcaaccgctgcctgatgtttttcacccccggcgtgccgtctgaatttaaagttatggtcgagcaggagatcgtaccgcgtttacgtgcgcgcttcacgcttccgtcgccgcctgtctgtctgcgtttaaccaccttcggacgttcagaaagcgagctggcgcagagccttaatcacctgcagctcccccctggtgtggtgatgggctatcgctcgtcaatgccgattatcgagctaaaactaaccggtcctgccgagcagcgcgatgcgatgctggcgctgtggccagaagtgcgtaaggtagccggagagagccttatctttgagggcacggaagggttaccggcgcagatcgcgcgctgcctgcaggagcgtcagcttagcctgaccttgagcgaacagtttaccagtggcctgctggcgctgcagctgaggcgggcgaacgcgccgcttctcgccagcgaagtggtgccggcgcaggaggagaccttagcgcaatcggcgcgctgggccgccgagcggcgcgttaaccattttgccgggctggcgttgtcggtcagcggtcaggaggccgattacctgaactttgtgctggcgacaccggaaggtacgcacgcgctgcgggtcaagttcagcgtgaatcgccacgggctgtcggtgcggcaagaagtctgcgccatgatggcgctgaatatgctgcgccgctggctcgacggtaagccggtcagcggcgagcatggttggatcaacgtcgtcgagacgctgtttatcgactga

SEQ ID NO: 112935 - DNA, 411 bp, Enterobacter aerogenes
atgcatccctctgcgcgatggtggtctgatatggctaaagtaaccaaaaccgaaccggtcaacgatctgaatgcggaagggactgccgatgatggtctgaatattgatgagctgaatgccgtcggcaacgttcaggagacccggctgcctgacgaaaaagacgctgaaccatcagatgatgaggataccgccgaagaagatgaccaggaagaagccgcggagcctaagtttgtggtgctgaaagggaattgcattcgccatgacggtgaggtttaccgggaaaactcccttattccggtctccggtaaggatgccgagcgtctgctggcagcaggtgtaattgccgatgttcaggttctgcgacagcgcgcgttatctgctgcgcgtggtgtgaaaatcacaacggagtga

SEQ ID NO: 112936 - DNA, 480 bp, Enterobacter aerogenes
atgatccgcctgagtacgttgctgctggcgccgccggtgggcgagcgcttgagtgaacgttatgatgactatcgtcagcatggcgcgtcggtgctctcggcttttctcggttgcctgtgggcgtcgctggcgtgggcattcatgccgcttgagacgccgcgctggcaagctattcgcgaacaccatggcgactattttccgcatattaatccgcatcgcccacgcccgttagatccgctgcgctatttgctgcagtcgctctggctgctggcgacccgggtgccggaagcggataaaaaaataaactggcgctcgctggcggcgctggaaggggttcacgggcgctacgcgcagtggctggaaaaattaccggagaaggtcaacacccgtaccgccacctcgataagcaaaaagagcttgaacatctgcatccgcagctgcggcggctggtgcttggcaccattaccttcttctcgctga

SEQ ID NO: 112937 - DNA, 1863 bp, Enterobacter aerogenes
atgtcaggtggactaatcgtcaacacaagtaccatccgtaacgtggtgacatttagtgttgatcgtaattcgatgaaaaccgctttagatgcttttgaccagattcagaagaaagcgaaaggtattaaagaccctacaataaacatgaagagattcagccagggactaaagtctgctgaaagagaattagataagctgaataagaaagcctctaagcctcgtagcaacgatgaacgagaaaaggcaagggcagctaaggccgcgcttcgtgtagagcaacaggcagcgaaagaggcccaaagaacagcggtacgccgtgaacgggcagagctaaaattgctcgatacgggttcgagtttcaaaagtatgcaccacctaaccaacgtagaattagcccaggcggcattacaggccagcaaaattacccgtagttatgctgatggaacgatcagcctacaacgccaaaacagcgagattaagcgcttacagcagggttatcgcaggctcaatgcatcacgtagggaagcagctaaacgaggcgctacggctcctgtaggtggctctggagcgattacaggcgggcttatggggttaggtagtggtgcgttggctggcgctggtgtgggtgcggcggcttacggtgcttattcatggggtagagatgctgtaacagcccaggaagagcgcagcgagattgtgcaacgtgccagattgggcggtgtggattacaactttctgcaatcgttaggccagtttgcacaagctaacgggattgattccggtatcggtacgcagggagccagaaaaaacttggatgttgcaaaagatgtgtccgagaaactcgcagacggtgcgctgaatgcgaaacgtaataaacagggtgaatggacaggagtaccaacaggcattaacactgctttgaacatggggtatacgcctgaacagcttaaagaatgggctaaaaatccgtttggttttgtctcttcatacaccaacacaatgcaatctaaaggattgagtgaacaggaaattttgcacaatctcgaagacctcggggacgatctcgggctttacgccaaagcctttatgaacggtggtaaggcactaactgatcaggtggacgtgctcaagcgtaacgggcagtggttgaaccaggaacagcaagatcagcttgtggcctaccgcaaattcaatcaggaaatggacattctcaacgatagccagaagttggcattcttcgaaggtttcatggagtctctcgaccctgcgacggttaaagagtggaaggaagctatgcaggaggctcttccgttcttcaaaggcttaggtaaggcggcgggggatgttgtagatggcttaatgaagatgaccaactggatcactggtaagttgaatctcctgaacggtgacaacaccactaaagaggcggtgagccagcattacggcacaacgtcagcacctgcactgcctgggagtaatccagtggctaacgcctacggagccagccagcctaaagcagacggcacacatgagcataatgtattcgacacaatgcgtgaatggtggaacggtacaagcggggcgcaggatgttagcagttacgctcagagcgccaacggtgattattctcctgtttctatgttgaaacaatcggcagcggctactgcgacaccgccagctaaaaatacagtggttcagccagtggtattacaaaataacctaccggaaggaatgatctctctcactattgcccctgatccgacattcggaaacatgctaaatgctaccgttgatcagcgtatcaatgataacaatcagcgtatggtgctggctgtttcatctggacaagggacggggggctaa

SEQ ID NO: 112938 - DNA, 1038 bp, Enterobacter aerogenes
atggcttattcagatctattttctggcaacatgtatgactttgccagcccgtttacattctctactcagttgaatgcaattgtaagtaatcttgggttattccgtgttgaacatcacgacgtaaactctatcgctcttgagaaaatcaccgatgtgaaaaatctcgttgcacctgaaaagatgccctatgcacaaagcgattggaacagtgcagaacgcccagaatttaccaatgccctctatcagcttaaatacactaattccttaaattcagtgacttcacgagatctggagcagtataaagcgcgtggaaccgtagacactgctgatcaaattaccctcgctatttctgatttcagcgatgcgcagtacgcccaggtgagcaacaccgtagaggttgaccttgtagaggcgctgttagggcttcgtgttaattctcaattcgccggacagggcgatcttgatttccttgctggcggtagcaaaaccacatacacgatggacattagcgcagacgctaacgtgttccagcaactaagtgagatcggacgcattcagaatgtgaaacttggatcagggctggcgcaggctaaacaaggagcggtgatcctggcatccggcaaagcagccgtagcgctacgctatcacccgtccgtgaaagacttcatggtgtatacgctgccgctggaatctggtgataacttctacacccgcactaaaggtgcaaaccctgcttttgaaacctggacgctaaacggcgtaactgtgatcgatgtgacaggctatagcctaatcactgacaaaatcggggttgatggcttcgttagtttgccaaccatgaaacctgagtcaaatgcctacgtcctgcatagcggtgtgggcgttcgccatgcgacacaaggcaaaagcgcggatctgtatcaccagtatgtaattgttgatcagcgttggggcttcccagaagtggctacagagtgtagctatctgccgattgttaatgtgcctcaagcgatcattttcggtactgtttcagaataa

SEQ ID NO: 112939 - DNA, 378 bp, Enterobacter aerogenes
atgcaatttgggacattcacatcgtcaaacggtgaaaacgctttttcacgttataaggtaattgcttatgcaagcgatgccgtattacaggacaaacgaattaatttagccgcaggaatccctgattcccttatcgtaggtgatcttgttagcacatcaggtgctaaagctggaaacgctgcgagtattgctttcgtcgtggttgaacccgcgcaagctggctctaaatcaattgttgttgcatctccatcacatgtaattatctctaaattagggattgaatttaacgggcttgatgaaaccgcagttgaggcgcaactttccgtgcttggctttactttcactgactacgacaccgtagctctacgcaccacctaa

SEQ ID NO: 112940 - DNA, 228 bp, Enterobacter aerogenes
atgtttcttatgaactatgaccgtgtgattactcacaaaggcacttctcttattctctctgaaaagatgatgaaacaggcggcgcatgtattaggcgtaagtgtcgaagagattcgacaggctacagagaaattctggcctacagccacgatcacaaaatcaaatacccctcacccttcatcagggcttgagacacgattaaaactaatagcaaaaaaaggaaaataa

SEQ ID NO: 112941 - DNA, 390 bp, Enterobacter aerogenes
atgggaagaaaagagcgaaatccgattaaacggatagaaaaagcagtaagagcaacaaaacgtaaatacagcaataagctaaaagattattcaagagaatctataccagactcactaaaaacaactattttagaacaccctccctctgtaccttgcggtgatgaatacaacgccttgcaagaaatacttagcactacgcctggcgtattctggaaacctcgaaaaagaaaagaatacataattgacagtagccagcttaaatcctggcaaattatcggatttgaatattactccgattatgtcgggtattcacaaactaacggcctgagtggtcacactgccgatttggattttttatttaatgacgataaggaaaattataatgactaa

SEQ ID NO: 112942 - DNA, 207 bp, Enterobacter aerogenes
atgaaacgcttactggtgctgacgctggcgctattgccagccctggcgaatgccggacaaattacgatgactcacccacaggaggaacagacggagaacggaaatacgctatgcacttatcagaacagcatctacttgttcacctacgtaactaaggggaaatgtccctatacgaaaaccttcaatacagaggattcggaagagtga

SEQ ID NO: 112943 - DNA, 957 bp, Enterobacter aerogenes
atgcccagaaccgtaccacaaagcggccagccaaaacggcgctttagctggccgaaagggatgccgcaaattatcgctctcctgctggtattagcggtggatagcctggtggcgccgcatttcttccaggtgctgctgcaggatgggcggctgtttggtagcccgattgacattctcaaccgcgcggcgccggtggcgctgctggcgattggcatgacgctggtcatcgccaccggcggcatcgatctgtcggtcggtgcggtgatggctatcgccggggcgaccgccgcctcaatgactgtcgccgggcacagcctgccggtggtgctgctcgccgcattgggcgcaggcgcgctggccggcctgtggaacggcattttggtggccgtgctgaagatccagccttttgtggccacgcttatcctgatggtcgccgggcgcggcgtcgcgcagctgattacctccgggcagatagtcacctttgattcaccggcgctttcctggctcggcagcggatcgctgctgttgctaccgacgccggtgattatcgccgtcgcaacgctgctgctgttctggctgtttacccgcaaaacggcgctcggcatgtttattgaggcggtggggatcaatatccgtgcggcaaaaaatgccggggtgaatacccgcatcgtggtgatgctggcctatgtactaagcggtatttgcgcggcgattgccggcattatcgtcgcggcggatatccgcggcggttcgctgatgggcgggcgcttcaatctgctgctgtcggtggtgggggcgttgattatccaggggatgaacaccgggattttactctccggtttcccgccggagctcaaccaggtggtgaaagcggtggtggtgctgtgcgtactggtcgttcagtcgccgcgctttatcggtctactgaaaggggtacgcggccgtgataaaacgtaa

SEQ ID NO: 112944 - DNA, 786 bp, Enterobacter aerogenes
atgttcctgataattttaataaaatcgctcatcatcggcggcctggtcggcgtcggcgtgggcgccggagcggcacgcatgtttcacgcgcccaccacgcaagggatgggggcgtttcgtaccttgggcgagctgaattcctgcgaaggcgatccggcttctcacttctcttttggtctcggcttcttctttaacgcctgggcctcttccgttgcagcaggttccttcacccaggacgttgatcaccgcattatcccgaactggggcgcggcggcgttgatggtgaaaaatcgtaacgttggcgaaacgctacacgatccgaaaaaaatggccattgcctgcggcatcatcggcatcatcggcatgatcgtcgtcgccttccttaacctgaccgcctcttccgtaccggaagcgctgcaggtcaccgccgttaaggtattggttccggcggcaaacctgctggtgaatactgtgatgccggtgattttctggctggcggctatcgatgccggtaagaaatcaggcttctgggcgacgattttcggcggcgcggcgcagctgattatggggaacgccgtaccgggtctggtactggggatcctgatcggtaaaggcgtagaagagagcggctggaaccgggtaaccaaagtgatgatgattgccattgtcgcgttgttcgtcctcagcggcttcttccgcggcttcgacatgaagatgctcgaatccttccatctgaccgtgcctaactggctggacatgatccacagctcactcagcggcaagtaa

SEQ ID NO: 112945 - DNA, 2016 bp, Enterobacter aerogenes
atgaatcttaccagctctctttcaatagatattctaaaagtaggcagagatagtaaaaaatttattgggcggccgttttatttgtcatatgatacagctaggcttcttgtatgcgacgcctggaaagctcaagtcaagggaatacctgcaggtgcttttttactcgcattttatgatggcgaaaatggagttgaggaggctgtattacttagagctctttcgcaaactaaattaccctcagataatgatattatatcttccatgatcgaatattataaagataacatggatatatcaggtcgttcaggaggtgataaaaatagtcgacttgatcaattcacaagatacgaatttagcttttctggactcgaatgtcgtgttttaggtgttttctatagaaatcaaaatggaaaaatagaatttggtgctgatttagagaatttctattctgcaaataattatagtgtatataaaccagacggtgacgttttagagtttattgttaatcaacgagatgatgatggtattgcagggcaagattctgattttaaaattggaaaagtgagatattcatctagtattcgcaatcaaagtgaatgtgctgatattaacgtttgggttaatccaaaagattttctaggtaagcggacagccatgtttggtatgactagaacgggtaaatccaatacggtaaaaaaaataatagaagctacagaggaaatctctaaaaaagcgtctttcaccctgttaaatgctaccaatgagcaattggaatacacagcttatggtacacctacttttccagttggacagataatttttgatgtcaatggcgagtatgctaacgcaaacagacaagattctggtacagcaatatatgatttatataaggataaagttgtaagatatagtgttttagaaaaaggaaatgacttcaaagttatgaaggttaatttctataaggagattgaaaatggatttagtctaatctgtaattatttccaagagcagggggttagtggtgattatgtaaataacttttctgctgttagttttgaaaaaccagaaagtgataataaatttggttcggaatggactagatatcatcgactagttgctgcatataaatgttgtcttcatagagcagggtttaaaaataatggggatgaaaagatatattttacgggcgcttctgaattaaactcaacgattattgaaggaaaagttattgatccaaagaaaggcataaacatagagcaagcttgtatttggtttgaaaggatttgggagcaatatgaagagcatgaatttttttctagctatatcagcgatagaggacatgagtgggcaaatgatgatctgaaatcaatgctggtatttttgactaggtacaaatcgcctggcaaaaaaactcaagttagcggctataaaaaaattaatgttaagcagcttctagacctgcatacaacaagtttagatgagtcttttgagctgcaaataccgaagtttctgcaggaagggaaaattgttatagtcgatctctctcagggagagccactagttcaacgtttgttttcagaaaaaatatgccgctcaatttttaatatggcaatgagtaagtttattaaaaatgaacataataactttgtgcaattttattttgaagaagcccataatcttttccctaaaaaagatgataaggatttgagccaaatttataatcgcatagctaaggagggagcgaaactgcatttaggaatgatatatgctacgcaagaagttagttcaattagctctaatattcttaagaatacacaaaactggtttatagcacatttaaataatattgatgaaacaaaagagctagaaaaatattatgactttaaagatttcactgatgccttagtgaaattttcggcaacaaatgacaaggggtttgttcgaatgaaaacctatactaatccatttattgtccctgttcaggttgatcgattcttagcaaataagggtttgtaa

SEQ ID NO: 112946 - DNA, 1389 bp, Enterobacter aerogenes
atgagctataatgctaaaggcaataggccctttgagtgggcaagcaaatcacaacatactcatgttataaatgatcatgatgtacaatcattgttggaaaggtgcaagtttccctcaagcaatgaagatgccactagggatgttaggaataattctttcttggttcaatctggtaataataggaaaatacagactataatttctgtagacggaggttataccgaggttacggtcaagaagaattatcctagctcaaaggttgcattttttcagtttggaggattagagtttagtttagaagcgcttgagcagttagctgagagcccttttatccatcctgaacaaatggaaaaatttaaaaaaatagagcgttttaaattggtgttaccaacgaaggcagcatctcttgattcgatgtcgatgattgattcaataagaatacctattattgatttttttaatgtaaaaagatctagtagctcatatatggaaacattgaagtggttggttttccatgaatttaaatctgggactgatgaagccaatgatatattaactgaaataaatttcactagtttaccaatccgtaatggagaaagtcagaaattagtttcaataaaaaaagaaaacattgatagtaatggctatttttatttcaataatgaacaatataatttaatagatttatttagatttcatgaggttgtagatgatgatgctggctctagtggagtccttggatacttaactaacgttattgaacatataatcattgttcattgcattaaggaaatagttcatagaaaaccatctttcttagaacgtttcctattcataaaagatgggcctcttggtttctttgggcaaacagcaaaattgcataaagacttacgtgagttatgtaatatctttattccaaagttatccttgaagattgtagagttggaaaaatcaggaacatttgttgagcatgcggaacagatcacattgggtgataatgcatgtttaaaaaaaggagagtgcttaccgttatttaataaatatatttataaacatatcttgcctggacctgcatccgaagatatgttagataatttaccttcatatgcctcaacctcctattatagtgggaaattaatttaccggagtaataatgatcgtgtttgggtattaacgatacctataaaaagtagtgaagaaatgaaaattttaagcagatcttcatttcataatctcgatgaaattcttaatgctattgatagccttaaatgcgatatgtacgaaaattcaatagtccctatcgcactagttaatcaattagtttcacttgcaaatcatccatcatcaaaaattctagagaaatttgcaatccaaaatatgatagagtaa

SEQ ID NO: 112947 - DNA, 597 bp, Enterobacter aerogenes
atgagcgatgaaaataaacaaacaagcgctttagttcgatactggaatatatatggaggtactaaagcagtatttaaaagcagctatttttggtgtgcttttattacaacatggattttatacccagcctggtctcatcaaggatggtggaatgatattttatcattaatgcccaacttacttggtttttctttaggtggctttgccatgtggatagcaattggtgatgaggcctttaaaaaaataattacaggtgatggcgaaaatgagcatggtgaagtagaaatatctccatatatgtcagtaaatgcaccttttgttcattttatattgttacagcttttaactatcattacagcattattaactaaagcatatagttcaatacttataaacaacgctttcatgtattactattttggtataagttataagtatgtattattattcctaagcttttttgcttattttatatttatttattcagtattctctgcattagccgcagttttagctatattcagagtatcaagttggtataatacatttatgactttaagcaataaagggaaagtcccaaaaaatgatgacaattag

SEQ ID NO: 112948 - DNA, 207 bp, Enterobacter aerogenes
atggctatcaaaaaaacgcacgtcggcaccgtcataaccaaagacggcccgaagctcaagaggctgcacgcaacggaaaaaatgtgggtggtcggcactaacgagctttaccacaaagagacggggcgccgtcactttgcagaaaacacccgccgtcggctgcttctcgaatcaattcgcccaattcaggaggctaatcatggttaa

SEQ ID NO: 112949 - DNA, 228 bp, Enterobacter aerogenes
atggttaacgaaattgacgccgtggtcactcgggtgatcgagtgctggccgattcacgacttatggatggtggaagttgaggtgatggccggtggtgaatacctgcgcactgatatcaccgtcagcacgaaacgagaggcctgcgcaattcagccgggcgacaccgtagcaatccctgtcgtaggtctggatggcgattttgccgatgaagatgaattgccgttctga

SEQ ID NO: 112950 - DNA, 420 bp, Enterobacter aerogenes
atgaagcactcagacaccagaaaaacgaaaacagcaaacagggcgcagagaaggaaagacaagagtaagggcagggcgaaaaccatcatttataagtcccggcaggtggggccgtcttgcttgcaagacaccgaagggaagaggtcagcgctagcgatgccggccatccccgcggggcgtgaaaaaatcggtggctgcgattggcttgactggaacgagctgtctgcgctcggtcttattgtccgcattaacgctgaaatacttcatccacttggattggcaattttccgcgatccggcttccggcatctcagcgggcgccatgattgcgccagatggaaaatgggagtatgcgcccgatgtcatagaagggctgcgggtaagactctccgattactccggaaaacacggtcacttttga

SEQ ID NO: 112951 - DNA, 609 bp, Enterobacter aerogenes
atgaataacacgcttcttcctccctctgccagcgcgtggatgcgttgcgccgaagctgccacggcgaagctgtccggaatcacggtagccattcgcacgctgtggacgccgacggcatgcccggttgatttattgccgtatctggcgtgggcgctgtcggttgatcggtgggataagaactggccggcagagaaaaaaatagcgtcaatccagcaatcctactggcttcatcgccggaagggtacgcgcgcagccgtgcggcgagtgatcgaagatatgggtttttccgccacgtttgcggaatggttcgatgtcggagatgagccgggcacgttccggcttgagattgatgtaaatgaagttggccttaaaccaaaaacactggatgaactgaatcgcctggtaggagatgccaagccggttagtcggcatatgtcaacgatgacaattgcaacccataccagggggaatgcatgggtaggcgcagcgaattttgatggcgaggtaattaccgtttacccgccgaattacaagccggacgaaagcatttattacgacgggcgggctttctacagcgggaattatcattttgcgggtaacgatgcatga

SEQ ID NO: 112952 - DNA, 2175 bp, Enterobacter aerogenes
atgaatattagcgaaaaagcacaatgggaaaataatgtcagcatgctgactcgcctcgataaagttgaaggtgggcgcgaaggtgcggcgaatattcaagcgaaacagctggggaaccgtacgcagtatttaaagcaggcggttgaagcctacagcacgctaattaaatcgggagagttaccctactcgaatcaggatgaggctaaggcggctattgctgccggtaaagtacctgaaggtgcgttattctcggtgcgctctgaaaattccggcgtgtgggtggaagaattcaaaaacgttaatggtgagccagttgctaccgggaagcgcctgcctgatagccagggcgtatccatcatcgttttcacgtcagcggaagatccgacaggtacgaacgcgggcctgtcaatgaccgttcctggtcaaacgttccgtgtagcatacgataacagcgctaccgagacggtttaccggaataatggcggcaatgcggtgaagcttttcgaggtcgccgataagcgggcaatggagcaactgttgccagatgctgggattatgggggaagttgacccagattatgccgtcgagtttgttgatgcattgttccgtcgcgccgtgggtattgatttgcgtggtgtgctggaagcgaacgccggaatgcgcattatgggagtccctgtaaccaacttgccggatgactccgattactgttttgcatttggtgatgagctggggcgcattgtctttggtatcgggaaaacaggcttcatcgaagtgatgggaatgcggatttttgtcacggagggtgagaactttcttgaaattattgatgaaaatcagcgggtatctgccgggattggcagcaaaggcgagattttcaataattcagcggtggagccgcagcccgtcgagcctgagcgattctggcttgattttgccgaagtgctgcatgtcattatctacgggcaatcactttcaatcgggcaatacggcacgccggtgctgaacacgccgacacgcaacgccctgatgttcaatacgggggtgcggagttacagctccaccccggcatcactggtgccgctgcgtgaaactgtcagtggcagcaacggggagacagtggcgtcctctctggtgtatggctttactgataacgtcagcgatatggccggtcgcgatctactgtttaatgctggcggcgtcgggggaattacggttgaggggctttcgaaaggcacagagccttatcgccggttgattgcgcacctgacatggacagcttcgcaaatggtgctacaggggcgtgactatgccgcggattttatgttgtggatccagggcgaagcgaacatggcaaacgggaccagcgctgacagttacaccgggagggtgtcaaccttacgggcggatgtggccgcagatacggcggggatgcgtgatgtgggacgcgatctggtcatgttgatgtatcagacctcatctcacggctattacgtgggtacagcagaaaacccaccggagcttatcgctcaggcgcagcttgatatggcgctgaataatcctcttattgatatgtgggggccatcatatatggggcttccggcaaaccataccattggacagggaaacgtccatcacaatgcccacggttacaggctgatgggcctatatgcgcaaaaggcattgcgacatcgcctgcgaacacgcaccgcagataagccgaatggtgaaaaatatttacctgtgcatgctacccgtgcccgaaaaataaacagcagaaccgtgattactgatgtatttacgtatcacccaccgttagttattgatgactcgtatatcactgagctggcagatggtaatcatggtgtcgaattacatgatgaaaccgggcggcttgatattgtatccgtggagattgtggcgggaacgaaaattaagatcgtgtcgaaaacagatatcggaaacggggcgtttgtggcatttgcctggacgccggagaaccgaggggaaatcacaaacaaccgatatcaacaatggtttttcgggcgagaaacaggggtacgaacaaccattcatgattctgaccctgaaaagacagatttaacagatgaaaacggcaagccttatccgctttataactatttgccgattcagaagattgccatttccgaataa

SEQ ID NO: 112953 - DNA, 699 bp, Enterobacter aerogenes
atgattcagtttcaggtaactaaggattttggtaatccactacttccctttagtaacgctcgttctgcgatgtatctagaatcagcgctatctatttacgaaatgcgcagcgcaaaagacagtagcagaaaaggtaaggctctggatgttattggcctgagctttgatagcgagggtctggtgtgtgatagcgttaatggtcattacgcggataccggtattattgagcctctgactaataccgtcatcgttgcgtttcgtgctaacccgcaggaagtcacaacgcagatttactcgggtctgcctgaatcggagagaccgtttacaggagcgcgggccgcgattactaaagacggtatttttgtggctgatacgggggcgacgcccgcgacgatccacgctcaaatcggcaatatcacgccaggctgggagctaatagcagtagtgacgggagcaaaacaactttcggtaatccgtgcatcgactatggaaacagtgaccacgaagtttgaaacccgaaacgagccgaaaagaactattcgcatcgggggtgggtatgttgccccgcacaacctgggtatcaacggacgtgtaggattatgggcaatgtataacggtgcgctggatagcgcgaccatcgcaggtctgtttgcaaaagcacgttccatcatggctgagaaaggcgtaattgttccgtag

SEQ ID NO: 112954 - DNA, 1071 bp, Enterobacter aerogenes
atggataaattattttatgcgcgccttaccagcgcgggagagcggaagtttgccgccgctgctgtctcgggggagccggtcaactttagcgagatggcggtaggagatggcggcggaatcgtacctgacctgtcagagaatgacgatctggttaatgagctttaccgggcgccgttaaatcgcgtggtcattgccgatcagggtgccaatattattcgtactgaaatgatcatgatgccgcaggtgggtgggttctgggttcgtgaggcaggcctctatgataacgagggagtctgtattgctgttgcgacggtgccaccttcctataagccattgctggcgcaaggatcggggaggcttcatgctgtaaacatctggattgcggtaagtagtaccgcagatgttgagctaaaagccgatccgtcagtcatccttgcaacggttgacgaggtgaacaaagccaagaatgaggcgaaggattacaccgatcaggttacaggagatctggatactaatattcagcaggcaatcacagatgctatcactgcggcacgtcgggacttctgggaagaggaaaacccgccgggaacggtgcgcttctttgctcaaaatatcgatccgaacgagaagtggccgtggtcgcaatggacttacaccggcgaaaataaaacgatccgcgtcggcaaagcggacggttcagacgtcggcgcgaccggcggcagcgataccgtcacgctcaagcaggccaacctgcccgccgttcagattgatgtgagtggcgaaaccagtgaacagaaagagcagaagctgacgaccacgcgcggcggtgttcacaatcatggtggggtggcaggtaaagatgacccgtgggaaattggcggcgatgtgcgtcagctctttaacccgaaagagctgggtgtgacagatgacgccggagagcatgatcacgaagtcacggtacctccgcataaacacacgacaaccggcaaaaccgcgaacctcggcgaaggtaaatcgttcagcgtgattgaggcccacactttgctaatgtgttgggcgcgggttgcctga

SEQ ID NO: 112955 - DNA, 246 bp, Enterobacter aerogenes
atggcccgatgttatgtttatatccagttgcgccatgcttttaatctggcttcacgcagagtgggactggtggagaaaaaaataacccccaccaaattcaaaccctcccatccttcccgtcaggcaacccgcgcccaacacattagcaaagtgtgggcctcaatcacgctgaacgatttaccttcgccgaggttcgcggttttgccggttgtcgtgtgtttatgcggaggtaccgtgacttcgtga

SEQ ID NO: 112956 - DNA, 624 bp, Enterobacter aerogenes
atgaaagtgctgtacggcgcgctgccgcgtagcagcggttccgtgacgctggatggccatgaagtcgtcacccgttcgccgcaggatggcctggcgaacggcattgtctatatctccgaagaccgtaagcgtgatggcctggtgctcggaatgtcggtcaaagaaaacatgtcattgaccgcgctacgctacttcagccgggcgggcggcagccttaagcataaagatgaacagcaggcggtcagtgatttcattcggctgtttaatgtgaagacgccttcaatggagcaggcaatcggcctgctttccggcggtaaccagcaaaaagtcgctatcgctcgcgggctgatgacccggccgaaagtgctgatcctcgatgaaccgacccgtggcgtcgacgttggggcgaagaaagaaatctaccaactgattaaccagtttaaagccgatggcctgagcatcattctcgtctcttcggagatgccggaagtgctgggcatgagcgatcgcatcattgtgatgcatgaagggcatctcggcggtgaattcacacgcgagcaggccacccaggaagtattgatggctgccgctgtgggcaagcttaaccgtgtgaatcaggagtaa

SEQ ID NO: 112957 - DNA, 681 bp, Enterobacter aerogenes
gtgtatgagcagtcgccggtgacccgaattcagcacaccagcccggcggtggtcagtaccgcgcgcggccaggtaaccgcgcgctacgtgatcgtcgccggtaacgcctatctcggcgacaagcttgagccggaactggcaaaacgcagcatgccgtgcggcactcaggtcgtgacgaccgcaccgctgccggaagcgctcgcccgctcgctgatcccgaaaaactactgtgtggaagattgtaactacctgctggactactaccgtcttaccggcgacaaccgcctgctgtacggcggcggcgttgtctacggcgcccgtgacccggacgacgtcgagcggctgattatgccgaagctgctgaaaaccttcccgcagctgcagggggtgaaaattgactaccgctggaccggcaacttcctgctgaccctgtcgcgtatgccgcaattcggccgtctcgataacaatatttactacatgcagggctacagcggccacggcgtaacctgcacccatctggccggacgcttgatttcagaactgctgcgcggcgatgccgagcgcttcgatgccttcgccaaactgccgcactacccgttcccgggcgggcgcagcctgcgaattccttttaccgccatgggcgccgcctactacagcctgcgcgaccgccttggggtctga

SEQ ID NO: 112958 - DNA, 1695 bp, Enterobacter aerogenes
gtgattccgattccgacagcgactcggactctgacagtgattccgattccgacagcgactcggactcggacagcgactccgattccgacagtgattcggactctgacagcgattcggactctgacagtgactctgactctgacagcgattcggactctgacagcgattcggactccgacagcgactcggactctgatagtgattccgattcggacagcgattccgactctgacagcgattcggactctgacagcgattcggactccgacagtgactctgactctgacagcgattcggactctgacagtgactctgactctgacagtgactctgactctgacagcgattcggactctgacagtgattccgactctgacagcgactcggattccgacagcgattccgactccgacagcgactcggattctgacagcgactcggactccgacagcgactccgattctgacagcgattccgactccgacagtgactccgattcggactctgacagtgactccgattcggacagcgactcggactccgacagcgactcggattctgacagtgattcggactccgacagtgactccgactctgacagcgactcggactccgacagtgattccgattcagacagcgactccgacagcgattcggattctgacagtgattcggattctgacagtgactcggattccgacagcgattccgattctgacagcgattccgattctgacagtgattccgactccgacagtgattccgactccgacagtgattccgattccgacagcgactccgattcggacagtgactcggattcggacagtgactcggattcggacagtgattcggactcggacagcgattccgactctgacagtgattcggactccgacagtgattccgattctgacagcgactctgactccgacagcgactcggactccgacagtgattccgattcggacagcgactcggattccgacagcgattcggattcggacagcgattccgactctgacagtgactctgattcggacagcgattcggatagcgacagcgattcggactctgacagtgattccgactctgacagtgattccgactctgacagcgattcggatagtgacagcgattccgactccgacagtgattcggactctgacagtgactctgactctgacagcgattccgactctgactcggactccgacagcgattcggactccgacagcgattcggattcggacagcgactcggattcggacagtgactccgattcggacagcgactcggattctgacagcgactccgactccgacagtgactccgactccgacagcgactcggattcggacagcgattcggactctgacagcgattccgactccgacagcgattcggattcggacagtgactccgattccgacagcgattcggactctgacagtgattccgactctgacagcgactcggattccgacagcgactcggattccgacagtgactcggatagcgacagcgattccgactctgacagcgactcggatagcgacagcgattcggattctgacagtgactcggattcggacagcgattcggactccgatagcgattcagattccgatagcgattcagattccgaaccgcaggcaaatgatgatacgcatacggcagctatcgataccgtag

SEQ ID NO: 112959 - DNA, 2460 bp, Enterobacter aerogenes
atgttcaaggaaaaaaatgccgcggtaatgaccgtagcggctaccgcgaccctgtgtcttgccgtctggacaattgtggtcctgctgggcggtctgggatggtggaactggcacgccaaccgcacgctgcagtggacggcgatccgcgagatattgaccgtctgtggcctgatctgggcgtatggtctctgtctctggatactgggctttattgctttccacctgtttatcaggcaaaaagccgatgggcaacagcgtcagatgcggacttttattagccagcagacaaaaccggcgcagccgtttgcgtccttaaagcacactcttcgtcgccgctacggccgattgtggcgcaataaggtccgcctgctgtgggtcgctggcgaggcggcgcagattgccgccatcgttcccggccttgcgcaacagcaatggctggagggccgcggtacggtgctaattcacggcggtagcctgtcggagacggtggataacgagcggctcagcgccctgcgtcggctgcgcggccgccggccgctggatggtatcgtgctggcgctggacaatgctcaggccaccgccgcgaccctggacgggtatttgcgaacgctggagcaggttacgcaggtcctgcgctaccagccgccggtctatctgtggcaattccgcgacagcgactggccgcaggatacgcgcattacccagacgctgggggcgttgttcccgccgcgggccgtcccgcaggatgttgaacggcagcttcgcgccattctgcccgccatgctggcgcaggggacccagcagttgtgcactgattcgtcccacgattacctgctgcgtgtcgctaaatggctgaaggagggcggtatcagcggctggaagacgctactgacgccgtgtcttaccgggcatctgcaacagatcccgctccgtggtctgctgttcagcccctcgttaaaggcgaaagaagcggtggacaatgggctctatccccaccgttggccggccccggccgtctggcaggggatcatcgcagactgcggccgcgcgcgcggcgtgccggtgggggtggcgtggcgccgctccctcggcgtcggcctgctggcgctgattgctctgtgggcggcgggaagcctgctctcttttatcgtcaaccgccagcaaattgtcagcgccacccagcgggtacagctgctgcggcagcccgtcgttaacgaccagcagctgatcgatttgcaggtgctgcgcaacgatatcggccgtctacagaatcagctcgccaacggcacgccctggtatcagcgctttggtcttaatcataatgcgccgctttctgccgcgctgctgccgtggtatgggcgggctaaccagcgtctgatccgcgacgccgcggcgcaggcgctgacccggcaactgacggtgttggtcaacctgccgccgcgcagcccgcagcgggcgcagctggcgaaagcgggttatgaccagttaaaggcctatctgatgatggcgcgtccggacaaagccgatgcggcgttttaccgccaggcaatgaccgccgcgcagcagacgcgtcagggagtcgccccggcgctatggcagagcatcgcccccgatttatggggcttctatatggacaacttgccgtcgcagccgacgtggagaatcaccccggacgccgcgctggtgacgcaagcgcgtcaggtgttgctggcgcaaatcgggcggcgcaacgccgaaagcacgctttacgagaacatgctgctgcaggtgcgccgtaactatgccgacatgacgctggaagacatgacgccgcagaccaatgccagccggttgtttaccacggaagaggtggtgccggggatgtttacccgccaggcgtgggagggcggcgtgcgcgaggcgatcgataaggcggtggcggccaggcgtgatgagatcgactgggtgctgagcgatagccgccagaccgtcagcggcgatgtctcccctgaggcgttgaaacagcggctgaccgatcgctatttcaccgatttcgccggggcgtggctgggttttctcaatagcattcgcttaaatccggcgcgcaatattgccgatgttaccgatcagctgacgttggcgggcgacgttcgtcagtcgccgctgattgcgttgatgaatacccttgcctggcaggggcagaccgggcagcagcgtgagggcgtggcggattcgctggtgaaatcggcaaaaaatctactcgataaggataagcagccgtttattgaccagcaggccggcggcgtgcgcggcccgctggaaagtacctttgggccgctgctggcgctgatgggcaaaaatccctctcagagcgtggtcgccgcagacagcacccttagtttacagacctggctgacgcgcctgacccgcgtacgcctgcggctccagcaggtggcaaacgccccgacccgcaggcgatga

SEQ ID NO: 112960 - DNA, 1041 bp, Enterobacter aerogenes
gtggtttcttattacaacgaaatagacccctacgcggcccaatggctacgcaaccttatcgacgctggccatattgcgccgggcgtcgtggatactcgttcaattgaggatgttaccccaaatgaccttaaaggattcacacaagttcacttcttcgccggaattgcggggtggtcgctcgcactacgtcgcgcgggatggcctgataacagacccgtttggacaggttcatgtccttgccaacctttcagcccagcaggcaaaggcggcggatttactgatgagcggcacctatggcccgccatgcattggctggtcgggcagcgccgccctgtcgtcgtctttggcgaacaatctggcagctctcacgcaaacgactggatcgaccttgtacaggctgacgtggaagccctgggttatgcattcggggcggttgcgtttccgtctgcgagcgtcggtgcgccgcatcagcgagatcgagcttactgggtggccgacgccaaccgcgagcaatacaaagaatgcctatcaggatgccgagaaagtgattgcaaggaggttggccggtcgtcagtcgaacctacaggacatagcatgccttgtcggctggcccacatcgacaaccatcgacaacaatcaggttacggggcagggcgcggcagttgctgcaccaaggcgcggaacgacattgggcagagttgccagattagcggcctggccgacgccagtcacgagcaacgaccgctcaccatgcccacaggaagctataaggacatatcgcgacaatggaacaaaaattcagaagcgcttgcaagacgtagcggcgctatgcggtccggcccggttaacggtttctggcgagatgctgattggctctttagccaggatggaaagtggaggccagttaaacccggtcttaagccgttggttaatgggcttcccggaagagtgggacaattgcgcgcctacggaaacgccatcaatattgaagcggcgacagcgttcataaaggcttatatggcggcggtgggttatgcctga

SEQ ID NO: 112961 - DNA, 1098 bp, Enterobacter aerogenes
atggcaacaggactgacactaacgacggcgggcgccgctgaaatcgaggccgcgtatcaggccggggaggttgtggatattaccgccgtactgatcggtgatggtggcggcgtgactttaccgaccgaacccgacgacctggcggcggtgaccgcgctttttggtcagtttggccgtgaaacctttgactctgattcaagcaatgaggggtttatcagcgggcagattgttatcaactgccgggattatccgggtaaaactctaagagaggcggggctggtcagtgctaagggtacgctcattgcttacggcgtgtacccggcgacgtacctcccggcgcaatctgattccattatcaaagagatcattctgacgctggtgctgacgttgacccatacctcaagcgtgcagcttgttatcgatccggcgcttgccacactcacgcaggaaacgggtgataaacgctatctgcggcgagcacaaaatctttctgatttaaacgataccgaagaggcccgggataatcttgaactgggtaactcagccacgcgggacgtgggcaccgaggcgggaacggtagctgcgggggatgactcacgcattaccggcgcactgcaaaaagagagtaacctatctgacttaaccgacgttgaaagtgcgcgcgagaatctggggatgaaccgtgacggtgaggggtttaaggctatcgtcgacgccattctttatcctggaatcattatccctagtgaaaaaagcccggctgagcgcttcccgtggcagacgtgggagagtttaagcgatacctttgccgacagggtagtgcgcattggttccgggcacggtgcgaccggcggcaacaataaggtaaaaatcgcagccagcaacctcccgccacactggcacaaatcgggtgacagatcacccggtgagacctgggatccgaccacgacacacggcacggacaaccagaagagcggaccgctcaatatgacggcgggaacttatatcgacgcagcgggcgagcaggaaaccgcaaacgaatcacttgatgtgactaacgaatatgtaaccctctgcttgtggaaacgaacggcataa

SEQ ID NO: 112962 - DNA, 921 bp, Enterobacter aerogenes
atgttacataagaaaacaacacaagaaaatgtagcttttggacttgctgtacttaactactatcttcgtttcaattctaaagcaaatttacaggacgctaatgtaagttcagaggaattgataagtaatttagtgaatattctgtatggccataattttatttgtacatcggaaatttcatcaaattatccgggaatagatgctatagataaaataaatagactaggactccagataacacatacaagaaccaattcaaaaattaataaaacaatagataaaattcgtgaaaacaaagttaacaatgacattggtgtgctatatttcttcattacatcaagaaggcagaagaaatacactatcacctcacaatgcccaaatctaaacgtcacagtaaataacattctagactttgattccctggctgaactgctttcgcaaaatcagaataaattggctcaagcagaagcagagcttattaaagcaatgcctcgtctctaccaagatgtaaaagcacaatatgaggttatgcttaatagtattcttgtgaccaggaaggagttggatagaagagtattcactgctgacaaaattttggaagaacctgaagaaatgctttcatcccttagggaaatcagaatcgtcatacaaaaatcaggcattatgaatgaagctaattctgttgtatcttcttcatttaaagaaatagtcaacattattaatgatgttgagagtcaaattgcaaaaaaatacatgagtggatataaaaaatataaggccgggatttttccttcgtgggattatcctgataaaggagattgtttagacattttaatgggaataagaaaagatgttttagaccaaatgcataatgttgacattgagatcaataaactgaaagggtttcttgggatacagtaa

SEQ ID NO: 112963 - DNA, 1119 bp, Enterobacter aerogenes
atggctcgaaaatttgttatacaaaaacctcagtcaaatgaggagctatttaaatcgttagtaattaacgctattgattttttagatgcatcaattgataatttggataaaagaccaaaaaactcaattattgatttttatactgctattgaactttttttaaaagcaagattgatgcgagagcattggactcttatattagaagatccagggaatgcacatagtcaaaactttagcttgggtgactttaaatcggtttaccttgatgcagcagttaaaaggctaagatctattcttggtataaatcttggtgataaagttgtagataatttcaaagcgttgggtgagcacagaaatcaaattgttcatttcgctcatacagaatattcaaatcagcaagcaaataaagctggtgtagtagcgcagcaatggtcttcttggcattatttatatcacctcttatcggtagattggaaagacatctttttagatcatcagaaaagcatagatcgtattcatagaagaatgctcactcagaaagagtttctaaaagcacgattcactgaactctcgcaacaaattgaaataaatagaaaaaaaggaataaaggttgtaaattgcaatcaatgtaatctacctgcaggcatagttaatgaaaatcataagtggggagatgattatgaatgcttggtatgcgaatcacggggtgtagctttggaaaaagttcgggataccctagattgccctcaatgtggtaatccttttgagttttttagccatgatgtcaatgaatgttcgacatgcaaccataaaatagacacaaatttattaattagactgtgcaaagcaaagtataaaacaggtgatgattggcatgagcctggtggagatgtcattgctggatgccatcaatgtcaacatagccctgattctgttttttatattgaaggacagtggagttgcgtttcatgttttgatcgcggatggtctgcaactaactgtccacattgtggcgcgtatgttactggagatatggaaagaattaaatactttgcttgttataaatgtgaagataaacagagggatttgattttatcaacgtcgggcgttaatttataa

SEQ ID NO: 112964 - DNA, 171 bp, Enterobacter aerogenes
atgaatttgggcaaggaagccatcaaccagcgcggaatcctcagtgatatccgtcagcacccaaatttccggcggtgtcagttgatgaggctgatccgggttcagcttgttgcgcagcgtctggacattcattccggcgcgttctgccagcttcgccatgttgtgacgtag

SEQ ID NO: 112965 - DNA, 936 bp, Enterobacter aerogenes; identical to SEQ ID NO: 104543

SEQ ID NO: 112966 - DNA, 429 bp, Enterobacter aerogenes; identical to SEQ ID NO: 104544

SEQ ID NO: 112967 - DNA, 1191 bp, Enterobacter aerogenes
atgccggcagatgggaccgtggtcccggtcgacacttataccaccatgccagtaggtgggaccgtggtcccggtcggcactcataccactatgccggcagatgggaccgtggtcccggtcgacacttataccaccatgccagtaggtgggaccgtggtcccggtcggcactcataccactatgccggcagatgggaccgtggtcccggtcgacacttataccaccatgccagtaggtgggaccgtggtcccggtcggcactcataccactatgccggcagatgggaccgtggtcccggtcgacacttataccaccatgccagtaggtgggaccgtggtcccggtcggcactcataccactatgccggcagatgggaccgtggtcccggtcgacacttataccaccatgccggtagatgggaccgtggtcccggtcgacactcataccaccatgtcagtaggtgggaccgtggtcccggtcgtcactcataccaccatgccggcagatgggaccgtggtcccggtcgatactcataccaccatgccagtaggtgggtccgtagtcccggtcggcactcataccagcatgccggcaggtgggaccgtggtcccggccgatactcataccaccatgccggcagatgggaccgtggtcccggtcgacactcataccaccatgtcagtaggtgggtccgtagtcccggtcgtcactcataccaccatgccggcaggtgggcccgtggtcccggtcgtcactcataccaccatgccggcagatgggaccgtggtcccggtcgatactcataccaccatgccagtaggtgggtccgtagtcccggtcgtcactcataccagcatgccggcaggtgggaccgtggtcccggccgatactcataccaccatgccggcagatgggaccgtggtcccggtcgacactcataccaccatgtcagtaggtgggtccgtagtcccggtcgtcactcataccaccatgccggcaggtgggcccgtggtcccggtcgtcactcataccaccatgccggcagatgggaccgtggtcccggccgatactcacaccaccatgccggcagatgggatcgtggtcccggttggtattcatacccctataccggcgactgggaccatggtcccagtcggtactcaggaactatctaaaaagctcgaaccatag

SEQ ID NO: 112968 - DNA, 174 bp, Enterobacter aerogenes
atgctcaatctcatccacagtgaatgctccttttgggaaaagcagttggcccttccatcccagcgccagctggataacggcaccacgtcgcggcagaacaatctgcccgtcagcgtcctccagctccagatcaagctggtctgcttcaaaaccccggttatcggtcagcgttag

SEQ ID NO: 112969 - DNA, 456 bp, Enterobacter aerogenes
atgcccggcgtcgaattccagacgccggtggctgataatgtcgtatgccttgagcaccagggcgtttttgacgttggggttgtagacaaactcccgcacggcaggaaagaacgctttcacgttttcgtagacaccgtgaccgacgccggtcgagtcgataccgatataggtcacgttgtactgctgcgtcagctttttgatagcgtcagcctgggcgcggaagtccattccgcgccactggtgccgctcaagaatgcggaacttgccgcccggtacggttggcggtgccaccaccacgcacccggcgctgtcaccgttctgcgtgcctttcgccgggtcgtatccgatccagacttcgcgccagccaaacgggcgcagcgccagcgcctgaaaatctgcccacacttcccagctgtccaccatgcacgcctgcagctcgctgagcgggaatactga

SEQ ID NO: 112970 - DNA, 2019 bp, Enterobacter aerogenes
atgacaagcaaaattaaaatatatagaatgttaaatgaaaaaccatcaatttatgttgagattattgatctttctggtccggttgatttggaactatacttaggctctaaattaatagaaactgcatataataagcactccaattatacttttgaaataaaagattccggggtatactctgttactgcgaaatctcatgactcattacaacttaactctaatagcctgcgttttttgatggaaaattttcagcctaatttatcattcaaatcactggaggaaagcaggccaatcaattttagtgtggatgagcctgaaattgataatataaataaattttatattgaagttaaagttacaaaaaatagaataaaaatggttgagaaggtattgcaggaaagtacggagttaaatctcttccaaagaaaatcattaaatttaaactctttccaagagaatcattcaatacataattatgaatattatataacatctaattccttaagtaaggaagatgctaaaaatatttataaaaaaattagagacattgaaggaatagtttattgttcgttagttcctgtgacggatacactgctccctcctgaattaagcaccatggtaaaatcaaaaaaaaagcttgagcgtgtttataacacacctgatttttccgaattgcaaggatatttggatgaacctcatggtatgaatgttcgtaatgcttggtcaaatggctattcaggtgaattggttgcgattaggcatcttgattttggaatttataagaatcatgaagaatttcaggatggtaatattaccgttgttaatagtcgagatgaaacagatgactgtaatcacggaactgcatcagcaggttgtattgcagcaggaaacaacgattttggcgtaaccggaatagcatattcatcatctttttatttttatgatattgaagataaagataaaatattagaacaagtgaatcccggagatattgtaagcttgaatgttgaattttcatcaaacgatgtttatatacccgcaattggaataaagagttggtgggatactattcacaacatcatagaaaaaggggccatcgtaataatggccgcaggtaactctggagttgatttgagtgatacgtcgatttgtcctgatttcggtgactccggagctattctcgtaggggcttgtacgtcatctactggacgtagactttcattttcaaattatggtcattactcttcattaatcaactcttggggagaaaatgtaactacaacaggttatagttcactgcaagatttacctggtcatgaccgagattatactaatacttttaatggaacatccagtgcaacacctttatgttcaggtgcgttagctttgttacagtgttatgcaaaaaaacaaggagttattctcactgcggaaagtatgaaacagttattaaatgagtctgattataccgaaagtgttgaagatcttataggaaaaaggccaaacatagagcagttatttacgtgtatagataaaaccattttatctccaattaatcaggaaaatccatttcctgtatcatcaaattatataaactataacgctttttttagttttaattcagattccgaggtcaaaataaactttgattatagattcagtgatataataaacacaggagttgtgacatattatagtagtgaagggcctgttgagcttgagtggtacagctatggatatagttgtgtgaaaattcctgtatctgatgaggatggcagaattagcattgtttatatgagagttagtaaggttataaacccatccatatttacgatgaatagttcagcggatattcaagggcagtcccctgggcaatttgatcttgttttaaaatttatgaaagaggataataagtttctccataaaaataaatacaaaggagttttgccattatatattaagtcatttgattttgaagattataatctaccggtacgtttaaatatatttattgactaa

SEQ ID NO: 112971 - DNA, 1392 bp, Enterobacter aerogenes
atgtatgaagtgattgatgtatcagctaaggaactaagggtgttattaaacactgtagaagatcattttaacgattttaaaagtaagcagatagcacctaataaattacaagaaacttttgttgcatttgctaatgctgatggtggaaatatatatattggtatagaagatgcagcttcagatagagagcgtttatctggttttaatgagccggaggaagccaatgcgataattgcaactttattggaaaatactaatcctgctgttgagaatgttgagattgaatatttaaaaacaccgaaagatggacttattttacatatagatataccaaagagtcccaaggtccattacaccgcttccggcgattgctttataagggctaatgcgcaaaaagtaaaaataaaaggtgataggattactcaactttcctactcaaaaggcgctgagccttatgaaaaaaaagcagtggatatagttgaagtacaagatattattgatagtgattattatattgattatcgacgtagaataggtacttctcaatctccggaaggttttttaaaaaaacaacgtctgttaactaagaaagatgatgcgtttgtacccaatgtaggttgcgtattactttttgatgaagaaccgcaaggaagtttagatacacgatgtgctgttaaagtatatagacttagaacaactgaaactgaatacaaacgagaacaacttcaggaagatcctgtgacgattgaagggcctttggaaatcgtcattttacgtactatagataaagttaaagaatacgtcgatggagcatctttcaaggacggtgataatctggttaaactggtttatcctgcagaggcgctaaaagaaatattagtcaatgctgttattcatagagattacagccagaaggatgacgtacacgtaaaagtttatgataataggattgaagttcaaagccctgggagattgccagggtacatgacaataaacaatttatatgaagagcgattttctcgcaatccaaatttagttcggttgttacataaactcccaaatccagtaaaccatgatattggtgaggggcttgatactgctaaaaatgaattgcgtaaagctggacttgtagcacctgtattcgaagaacgaggtaataattttgttgtgataattaagcatcaaactatcgcgtcaattgaagatgtgattattgaatacttcaaaaataatccaacagggcaactcacaaataaattggttagacagttaagtggtgaggatgatctccagaaggtcaagaaagcattacagaaactgagagatgaaggaattatcaggccattagatccgaatgctaatgcttttagatttaagtatgtcaaagcctaa

SEQ ID NO: 112972 - DNA, 228 bp, Enterobacter aerogenes
atgggacggcatggcgttaacgtcagccagaatgaccagatcgggattaaaacgctgctgctcgcgcgccattttggcatggctaaccagccggtcctgctccatttcacgctggacaggatcacgggattcattgaagaaatagcgttcccagacctcatcgctcagcgcctcacggcgcagctgctcttgctcgttatccgcagcgtaaagagcgatcaggtttga

SEQ ID NO: 112973 - DNA, 390 bp, Enterobacter aerogenes
gtgatcgccactggcccgcagaatggcgcgcagctatgtttctttatcttaatcgccattgttatcgtggattatgccgttataaccagaaagggcagtttaacgctccatacggtaactataaaagtccttattttcctgaaagtgaaatactcgcttttgcagaaaaggctcaacgcgcaacgtttatttgtgccagttatgatgaaacactggcgctgctgcaggctggtgatgttgtttattgtgatccgccatacgatggcacatttagcggttatcacactgccggttttacagaggacgatcagtatcatctggcgtctattcttgagcgccggtcatcagaaggtcatccggttatcgtgtccaacagtgacacgtccctga

SEQ ID NO: 112974 - DNA, 264 bp, Enterobacter aerogenes
atgcttgcggggaaccagtacaccgccctgtttcatgatgtaggtggcaaagcaacctgcgtccgcagctgccagtaccgcatccagacgcggattatccagtaccggcgcacccgctttgcgttcgccctgtactctcgccgcctgacctgccagcaagcgcagctcgcggtatgcctgacgccccggaataccaaagaaacgaaattgctggacacggtgcagcgacgcccaggcgctgacatgctcggcgctgtcacgtag

SEQ ID NO: 112975 - DNA, 228 bp, Enterobacter aerogenes
atgtttgcggggaaccagcacaccgccctgcttcatgatgtaggtggcaaagcagcccgcatcagccgccgccagcaccgcatccagacgcgggttatccagtaccggcgcgcccgctttgcgttcaccctgcactcttgccgcctgaccagccagcaagcgcagctcgcggtatgcctgacgccccggaataccaaagaaacggaactgctggacacgatgcagtga

SEQ ID NO: 112976 - DNA, 417 bp, Enterobacter aerogenes
atgaaaggcgctgtcaatgagctcacgttgggtggcggcaatctcctgattactttccggcgaccagtttttcagcgcgtcgggatctttacgcactactccttcgcccgagcagggggcgtcgagcaaaatggcatcaaagcattcgggcagcgcggcgccgaagacgcgcccgtcgaagtgggtgagggcaacgttattaatgccgcagcggctgatattggcgtgcagcactttcacccggctggcagaaaattcgttggccaggatcgctccgtggttgcccatccgggcggctatctgtgtggtcttggaacccggcgcagcggcgacgtccatcactcgctcgggcatttcaccatcggcgaacagcgccgccaccggcagcatcgagctcgcttcctgaatataaaatag

SEQ ID NO: 112977 - DNA, 237 bp, Enterobacter aerogenes
atgctctggccattgcaggccaacagcattagcggcggcggcgacagcggcgccttcccggcccttcatcggtgcgaaggggaacttgcctactttatagccaggcgcaggcagcggatcgatagaggcggttttacgcaggcgggcaacgaaaaaaccttcacaatcaaaaatctgcgggaatacgtgcaggaaaccttcgtcggtgagcgcttcgcgagcctgcgggaagagtga

SEQ ID NO: 112978 - DNA, 564 bp, Enterobacter aerogenes
atgagcaaccgtacgatcgacctagccttagagatcagcaaactggaatccctcgccgcagaaggcggggatctcaccccagaaatgatcgctgatacgctggaatgcattgaaggcatgctcgaagataaattcgacgcaaccatgaatgttatccgcgagtttgatacgaaagcggaggcctgcaaaaaggaagctgcacgtattaacgagagaaaaaaacactgggagcgtcaggtatacgtgctcaaaagttacctgttgcaatgcctgcaggccagtaaccgtactaccttcaaaaccacgcttaacaccttcactgcccgtaaaggcagtgtaagcctgaaaatagacaatgtggacttacttcctgatcagtttgttgaatcacatacagaagttataaccactcccaaaaacgacgagcttaaaaaagcattacaggagctggacgccaaaatagaggcaatccgcgccgccggagaagagccaagtccagaattactggcatctatcccaggtgctcacctcgaaacgggctcaataaccctacaggttcgctaa

SEQ ID NO: 112979 - DNA, 687 bp, Enterobacter aerogenes; identical to SEQ ID NO: 88223

SEQ ID NO: 112980 - DNA, 150 bp, Enterobacter aerogenes
atggtcgccaagcagatggaattaatcgtcgaaggctgcctgagccgcatgctgatcaaacgtagccaggccgacgtcgataccgcccatcgtctggcggaagatatcctgcgctttgcccgctgccggatgggcggcgcgcttacgtaa

SEQ ID NO: 112981 - DNA, 309 bp, Enterobacter aerogenes; identical to SEQ ID NO: 97984

SEQ ID NO: 112982 - DNA, 258 bp, Enterobacter aerogenes; identical to SEQ ID NO: 97985

SEQ ID NO: 112983 - DNA, 723 bp, Enterobacter aerogenes; identical to SEQ ID NO: 97379

SEQ ID NO: 112984 - DNA, 432 bp, Enterobacter aerogenes; identical to SEQ ID NO: 97380

SEQ ID NO: 112985 - DNA, 2058 bp, Enterobacter aerogenes; identical to SEQ ID NO: 97381

SEQ ID NO: 112986 - DNA, 255 bp, Enterobacter aerogenes; identical to SEQ ID NO: 97382

SEQ ID NO: 112987 - DNA, 570 bp, Enterobacter aerogenes; identical to SEQ ID NO: 91932

SEQ ID NO: 112988 - DNA, 162 bp, Enterobacter aerogenes
atgaccatggatcaaattgctggggtgcttaatacttcagtgaaaagcctgtatcgtaaacgcattgagctttatgaacgtctggggctggccaactttaatgaggcctgtttgtttatctttaaaaatagactgctggagtgtcccgcacagaagcgataa

SEQ ID NO: 112989 - DNA, 777 bp, Enterobacter aerogenes
atgacaaccgtgacgaaactaaccggagtggtgctccctggtaccggatacccaaacattaacagtttcaaggaaatttatgtttctgttacttcaggtctgcttgggttgtattctttcagaaattcactggatttctcccggaagaattatgctgaaaatggagtagatttaacaatcatcggcgcacctactctggtggatggtggggcagtatgcaattatgaaaactgctttgatacgggaatttctgctcaggattccttcacctatatagcactttcaaagccaacgcttgctacttcagcagagcaatattgcatgctgatatctaattactttcagccaacgcctacaacaaatgccggtgatagtattggctttgcctggaatgggtctgcgccccgttttcgttgctatgcacaaaatagtccatcatcagtagtacaagcagatgcgggtgtagctgggtttagcgaaagcgaggttgcattgttcgctggtatggcctccctgactgatggaaaccgcctggcatttgctcatgcaggaactctgtctatcggaaaccctacggcaatgtcagcaagaagtacatctggtgcagggacgattttgattggtggccatagggctggctccggggcttatccggcatttggtaaggggatttacgcagctgcgatttacaacagtgcagtaacaaacgaggaactcggcgtcatttacaacgatttaaaaatatacgcggaagggagagggattactacattataa

SEQ ID NO: 112990 - DNA, 1968 bp, Enterobacter aerogenes
atgacagaatttgaaataaatagtccgctgcttcatctcgctttgcttgaaacgctaaagcgagacgatataaaagatgaaatagatttgtttctaccctttattgcagtaactgcatcagaaattggcaagtcagttataaatgagagtgatatacaggataagctccagcagagttttgggtttaagcctccattggccgcggtgaaggtcttgatgacacgagctaaaaaaagaggacttctaatccgcgaaaattatgcttttattcctgttcacgataaaataactgaatggaaaaatggcttcgagcataaaaaagaagatgtggaaacatcccttgcaagtctcaaacaagaatttatcagttttacggagaccaacttttcgaaaaaactctctggcagtgaagctgaaaaactaattaccgagtttattgaagtgaatgtcagcagcgtgattagccacagagcttatcaaagaatggaacttgctgatcgcattaaaaacactaaccatgttatcgcatcttttataagtcacattcatcgcaatcagcctggagtgcttgagcatttcagtcggtgtgtcaaaggaatgttactagctaattatctattttatgcggataaagctacagacaagaaatcctataaaggaattaccgtttaccttgactctcctatagtcataggaatgctaggatacagcggacgccaagccaaagaagcatatactgactttttgaaccttttgaaatcactaggaattgaaattgttatttttgaccgcacgcttagtgaaatcgagggtctgctttacgcctggaaaaatgacatttcacggaaacgttatgaacgttttaatacgaaaacgttagaatggttgagggcgcaaggttatgacgcagaacgtattgatactgatcttaagcttttagaaagtaacatctctaaacttggtatcgatattaagctcggctttagtcctaaggcaatgtatcaatgtgatgaagcaaaactgcaaagtgctattggtagagcttttcggcgagataaaaatctagagcacgatactgtttgcatttcccgtgtacacaatatgcgggaaggtaaaataattaataacctcagtcagtcttttagtgtttttgtcacccccaatactggcctagtcaaggaggctaatgattttttccgacatgaaactaaccgccaggctattcctgtggtcgtttcagaacaatggatgacagccatgttctggctaaaaaaaccggacatttatgctcggctgcctcaagagcagcttctttcaacagcctacagcttattgtataccgatgatcgcttctgggaagctttcatcggtcgtcttgagaaacttgaaaaacgcggagatattactcaggatgaatttcttcaaatccgctgggatagtgatcttctccgacttgtccatgatgtttctgttgatgtaggagaagatttttccgaggaagatgttttcgacgttgttaatactatcaagagaaaacatgaggaaaaacatcaaagtgatatggcagaacttgaagaccgcagtcgctctgaaattgagactgtacgtcaagaagcatctacgcaacttcaggccattagtcaggaaaaacaagttgcggaggtaagaattgaatctctagagcgcaaaatacgtaaggtgagtgcgtttctggctggatcaatagcctggtttttcagtggattgcttgttttcgctctttgtctggcagctgtgaaaggtattcctgatgaaatgcagccagctttgttcaaaagcgaattatttaaaggtaatctagtcgggcttaccatagtcattaccttaatattcggattgataagcagcgttacagggatagatttagctgtttgccataaatacataaaagcaagaatggaaaaatggtttttgtccttatttaattaa

SEQ ID NO: 112991 - DNA, 606 bp, Enterobacter aerogenes
atgaaaaatgacatatattcttgctttaaagaattaaatgaaactgaaagtgaggatagctataacatcatttgtgaaaaagaaggtcgtagcgacctttatgcaatcatggctcctcatggtggaaagattgagtcaggaacaacagaaatctcggtagctattgctcgtgaggatctatctctttatatttttaatgcaaataaaaccaataacaatagagcccttcacataacaagtgctcgtttcgatgagccacaatgtgaaagcatgttaggaaaagtagaaactgtattggctatacatggcgctcgggatcctgaaaaagagccgaaagaaagagtctgggttggcggtagtcttcgtgaaaaattcgtgattcatttagatgcaaccttgagcccgttaggtattttagtggaaatcatacctgaatttcttggtaaagatccgaacaatatctgcaatcgggggattagcaaagaagggatgcaacttgaaatcacaaagtcactccgtgatactctaaaaattgataaaaaacgtatggaagaatttagtgaggctgttcgtgcagctatgatgcttacgtacccatcatcttaa

SEQ ID NO: 112992 - DNA, 2940 bp, Enterobacter aerogenes
atggacgaggttgtaacaaaatactcggatgtactccagagttggcgagatcatcgttttaatttcaatattgcaatcccccagacaaatactcctgggctccgtaagccccagttagctgctatttatgcgactttaggacatttgttgatagacccctcttcaccagcaacggtggttatgccaacaggtactggcaaaaccgacaccatgcttgcactactcgtctctggaaaaatggaaagaaccctgatccttgttccttcagatgccctcagaagtcaattagtaggcaaatgtgcaaattttaaaacactgcgcagcgtgggagctgtgtccgatgttgcgttaaatcctatagttgccgcgatcagttctggaatgtctgagaaagaagttattcagctttccaaagcaaatgttatcgttgcaactccacaagcactaagattatttgacgaagaagcgatcaaagccctaggggatatgtgtagccacctattcattgacgaggctcatcacgttccggctaacagttgggaaagagtcaaaaatatttttaagaataaaccatgtatccagtttacagcaacgccatttcgggaagatggtttagctttggaggggaaaattatatataactatcctctaaaagacgcccaaaacgatggttatttcaaaagcatagaattccacccagtacgagaatataacttagacatttcagataaagctatagcggataaagccgtagaacttctgaggaaagatatagacgctggttataatcatttaatgttagtcagggcaaaatctcaaaaacgtgcagagtatctttttagcatttacagcacatatacagacctgagttccattttgatacacagcaaagtacctaatcaagcaaaaatttttgaagacatcgtccaaaaaaaatatcgcattattgtttgtgtagacatgcttggagaaggttttgatttgcccgaactaaaaattgcggcaattcatgatcaacataaaagtcctgcgatcacactgcagtttattggtcgactaacaagagtcgataatactcttggggatgccaagttcgttgctaatattgcgaaccaaaaaaccgatcaccagatgtcagatctctataaagagagcgctgattggggaaaaatcatccgcgacgttagtcaggaaaaagttagtttcgaaattgaaaaagaagtctttaatgaacaattctctgatgataccgactcggattctatctttggtctgaacccaaaccccaaagtcagtgcattggcttatcatttatcaccaaaaaattggcaaccagaaaaggctcgagagttcgatgcccgcagagagaagttgaagcatatctccatcaatgatgaaggtgatactatcatcatggtaacaaggcgggacacattagtgggatgggcacaaactgaagctatagttgatacaagttgggtcttgtatctggcgttttataacgaacccgagaacactcttttcatacacacttctggagatgatactcaatcgacccagttcctgaaattaattgctaaagatgctgtacgtatcaatggtgagcctactttccgttctcttcataatatcaaattgatgaaattgcaaaacgtaggtttatctcgagctcgaaaggatctccgatttacaatgcatgttgggcacgacatcaatcaagtcattagtgacatcgaaaaaggtaacgcgaagaaatcaaacatatttgcaaccggttttgagctgggtgaacgtactacagttggatgctcgcataaaggtaaaatctgggagatgaattcatcgccaataaattattggattaaatggtgcaaacgtatatctacgaaactcaatgaccagtctatcaacccgagcgatgttttgaagaacgtcatgcgtgcagagaaaattgagaataaatggcctactggtcttttttactgtgattggcccgatgcaattgcaatagaaactgagcaaaaaatctcactcatttttaaaggtgagagattcaatctacttgatattgtactgggtaggccaagtcacgatgatgacataactctgagtatcccaatactcactgttgatcacaatggattagagcaacaccttacaaacatttatatcaaacttttagctgacggttacaaaacttactgtcccgacctgaaaattgttttctctaaggaaatatcactggatgaatttctgaatgatgaagctcttgtgttgctaaacgtagatggttcgatggtctacggaaactatcgttatttttcacccaacaacttaaatgtaaagctacccaaagatttgctcgaaacttgggactggggaacaacaaaaatttatcaggagtcaatgcgcgctgaaaaacgttcagatagcgtacagggattcacttatcaaaaaattgctgatgaattcgaaattgtcttcaatgacgatggtgcaggtgaaattgcagaccttgttgcaattcgcgtagataatgacaagatctacattagcttattccattgtaaatattgtcctttgactgacggaaccgctataccaggtgctcgcttgagcgatgtttacgaggtctgtggccaagcctctaggtcagtaaagtggctatatactggggagaaattttttgaccgtctacttgaacgctaccaaaaatctctttcaaaaggtttcgacagaatacttaaaggagcacctcagcaacttgaaatattacgaaacaagtgccatgaccatgagtttatattcaattttgtcattgtccaacctgccgtctcagccaagaaagtttctgacgaacaattaacagttttaggaacaagctattcatacattaaaagcatctctggctctgatataaaggtgattgtcagcccttaa

SEQ ID NO: 112993 - DNA, 765 bp, Enterobacter aerogenes
atggactatggtttgaagactttagcagggacttctagagttgtatcaacactcgctgaagcaattctcaagcaagaagtttcggaaaggaggacaagtgtaaatgatatcagaacccagttgaaacaaagctttaaaagctcttatggacaaaatttttgtattgaaataaatgacccagttctaaaaagaaaattaaaaaggatggggaatgatgttttctgcgaggtcatgtcatattttatcgctgaatcattatttcttgagtctaataaattaagcgctggtgcgacagtaattgtttcagaattagaaaatattgaggataagctcattgatgttcttcggcgtgctctggttgatatgcataagataaccactatgagtagttttaatgttgagttgaatcacaaacctagaggtgatagaacccgaattgctatgttaacgcctaaaacagcacagcatattactgaaactgaagagggaaaacgtgaatatcaaatcactgttatttttacacgtttcaactcaatgacaggtaatggacgattaatagtccagggtgatgatcagacgacagcttttggtttggcaaagggattaagacacgtccctttggattttaagaagaagattactgaaaatcttcatcgaaataatggtctgcataaagacaattggcattatatcactttaacagtccatgacttgaagttgggaagcggtgaagtggtcaagtattttattcatgagatttcttag

SEQ ID NO: 112994 - DNA, 702 bp, Enterobacter aerogenes
atgaaaaagataatttattttagtatgtgttttataggtgtagtcatacttgcgtatgtcttcaactttaatactggaaaagggttatctaaaagcacagaggtttgggcacaatttggtgattatttgggaggggtagttaacccgatacttactttcttgtccatagtactattgataaaatctgttaatctacaaagagaggctaattcaagccttattcttgaaaataaacgccaggagcatctcgattacctgaagaattttgagtctagattttatagccttattgatgctcaacgtacagcttttgaaaaattcaaattaactaaattagatggaagtgaagttaaatgtggggaagctgttaattatcttgaggagtttgttttttctaggaaaggtgaaggtgtctcgcgaaatgatatcgctcgtgatgttaacaagtgtgatgcttccgagtcaatttactcatcagcaagacgtttctatcttttgctaaagttaattgatgaaaagttatctgataaagaaaaggatgaatattacgaagtgctgataaatttaacagactttccattggttaggttaatggtcctgacattgtgtctttatgattgggatattattaaatatgtagatgttagtggcatccttgctaaggatgaattgattcaatataaatctcattttgtgttttag

SEQ ID NO: 112995 - DNA, 447 bp, Enterobacter aerogenes
gtggatgagctgcagagggtggatgactggctgacggcgctactggtaaaactggagccagaagcacgtaaacgcgtgatgtgggatttggctcagcaactgcgccaaaatcagcagcataacattcgcctgcagcgcaatcctgatggtacggcctacgagcctcgccggataacaactcggaagaaaaagggccgtatcaagcggcagatgttcgcgaaactgcgaaccactaaatacctgaaaactgctgcaacagctgagtctgccaccgttgagtttacccgcaaggtgcagcgtattgctagagttcaccattatggcttacgggatcgggtaaaccgtggtgggatgaaaataagatacgctcaacgcagactacttggtaatagtcgggaggtggctaatttagtgaattgtgtactatttacattattgttcaaataa

SEQ ID NO: 112996 - DNA, 1215 bp, Enterobacter aerogenes
atgaaaatctatctgctaaaaaataaaatatttatttcatttttgcctcacattagagtagtcataaaagtctacgttgaagatggtcagatcttatcagatatttttcatggaactagtgtacaacgtaaggaattagattgcggtttgcctctttttaatgagagggttatggggaggccaacggttgaacacttacttaatatgctgggtgaaaatattaatgatagtgtttgggagttgcttggttataacgatggtcaagttgaaacttacaatgccattacagcaagtcactcattaaatgagttgttttgtagttgccctaacttagcttgggctattattataaataattattatggtgttgggtttcatgtggtggaatattatgcaaggatgaaaaggcgacagctcgcagcttcattaattgaatctccccctgaagagaaagttgtcaatctcttgaaaaaaacagagatgctaagtgggcgaaaatatgagcttgtaatactgtctaggtgcttgcaggagttggaaataattgaatcttataagcatcacgataaagtgactatccaagaactatatttatcttatcgctatcgaattctttcaggatctaaattattagcaagtctttgctctgagaaaaaagagtttttacgagattacaaagtagggatgtgcactcttagtaaaatcgttgaggatagtgttcgtataggtgaaaatataggaattaaagactctctaaatatcattgctaattgttctgatagtgaatcagttaaatattatcatgataaatggacagtaaagttacgcgaaactacaaaattgctgcgtgatgatatttttcttgagcatcctgcgctcttggattgccagggtatagagtttctctcttcgataaataaattgattgtcgagggtagggaaatggaacattgtcttgcatcttataaagaaaaagtaatgaagaaagaaagttttatttacaaggttacagcgattacaggagagagaattacactcgaactgggtttttctaaaggtaagtatttcattaaacaagcgaaaggctttagaaatgctgagccatcaaatgctgtacgagggttttataatacgtggcttactgaagaaaacgaaaggcttaagttaatagaggaagaaggcaggttagtccacaattactcaatgagagcctag

SEQ ID NO: 112997 - DNA, 1236 bp, Enterobacter aerogenes
atgcaagattcatcgcttattgatatcgatgcattcactgcatttttgagttcaacaagaaagcgtcgattagcaaatgtagatgagcgaaatagaaaaaatgaaagcttcttaccttatttttttccaacacgacctctaactccatctgaaatatctgaactggctccagagtgtgttggactattatctgaaaacaacaaatctctgaatgatgaacccgctgtgatttgggctagatatacacaagccttacgtggaatatgggttcaaccaacgttgctagcaagtgtaaaacaaaaaagtgaaacgacctcaaaggaaaaaaaatctaaagtccttcatataggcactgataaaaaaaacaaaattgttgttgcgttaacaaatattagaacagatgaggaagattgggccgcaatggtctgcaataaatctaatttatctcgtgccagataccaacgaatatctgaactggttaatgcgacattaaaactttcacctaaacctgattatgttttatttccagaactatctatccctttgcgctgggttgaaagtatcggtgaacgattaagtgcggcaggtattagtctaatcgcaggtactgaatatcggcactttaataatgatgagttattaagtgaggcactacttattctgtcggacaatagacttggatatcctgcatttgttaaaatttggcaaccaaaactagaaccagcagcaaacgaagatgaaacactcttctcaatgtacggtaagtcttgggcattttccactcttgccggaaaacaaaaaaaaccagtttatattcatcacggagtcaactttggtgtcatgatttgctctgaacttcaaaacagtaaggcaagaattcgatttcagggaactgttgatgcattaatgatcttaagctggaacaaagatctagatacgttttcatctttgatcgaatcagcggcccttgatgttcatgcctataccattttggtgaataatagaaaatatggtgacagtcgtgtgcgttcaccagctaaagaatccttcatgcgtgatcttgctcgtgtaaaaggtggggacaatgattttgttattgccgcaacactggatattgatgggcttagatctttccagagtagatcaaagcgctggtctaaagatggtgataaattcaaaccattaccggagggatttaacttagcgaagaatcgaaaaaagttgccgccgaaataa

SEQ ID NO: 112998 - DNA, 444 bp, Enterobacter aerogenes
atgcaaaccttatcatcacacccgatacgggcggctaagacctgtctgtcacccgttgaaatctggcagcggttactgactcatctgttgtcgcagcactatggtctgacgctgaatgacactccgttcagtaatgaaaccaccatacgggaacacattgatgctggagtatcgctctgtgatgcggtgaactttcttgtcgaaaaatatgaactggtaagaattgaccgtaatgattgctctgtcatggagaagtcaccgttcatcaccagtatcgatattctacgtgcccggaaagcctccggtctgatgaaacaaaactattaccagggtaacggcaggccatcatcaggagctataaacaatgggaagtcaattaatgttgatatcgacaacattgatacaatgctgtccaatgtagggaagctaccagtaacaagatga

SEQ ID NO: 112999 - DNA, 366 bp, Enterobacter aerogenes
atgaacaatcattccgaatctggtaccaaaccggagaatcccgcctgccagcagtggggacttaaacgcgctattacaccctgttttggagctcgtctggtacaagaaggcagtcgggtgcattttctcgatgaccgcgccgggtttaatggtgctttcagcaacgatgacgcgttgcgcttcgaccagacatttccactgatactcaaacagttggagttgatgctcaccagcggagaactctctccccggcatcagaactgcgtcacgctatgccacaacggactcaccagtgaagccgatacactcggctcatgtggctatgtctacattgctgtttatcctgaccagactgagccgcattaa

SEQ ID NO: 113000 - DNA, 444 bp, Enterobacter aerogenes
atgaatacacaaaaccttgaattcgctcagcagggagcaatctcggcctcggtggtccctgacgagttacgcctcgggttctggccgcagcactttggcaccatcccacaatggataacccttgagcccagtatctttggctggatggaccgtctgtgtaccgattatcacggcggtatctggaacttttcgacgctcactaacggtggcgcttttatggctcctgagtcagagcacgatgagaagtgggcgttgtttaacagcatgaacggcaatggagctgaactcaccagtgaagctgcaggtatagtcgcctgcctgatgacatacagccaccacgcctgtcgtaccgaatgtgacgcgatgactgagcactattatcacttacgagacttcgcgctgaaccatccagagtgcaacgccattatgcatctcatcgactga

SEQ ID NO: 113001 - DNA, 465 bp, Enterobacter aerogenes
atgtcattcagacccattgcgccacttatcctcgcactttgtttctctgctcaggtgctggctttaggtaaccacgagacctggacgagcggcttcgcacagggtacggcggaatacactattctcggcaaaggacagtcacaactttacctcgcctgcgacagctccggctcgcaggccgctactatcatcttcaccgacgtgaacggccatcaggtcagcatggatagcggccagaccctaatgatgaaaattgataacaccgaagaagtcgataccagtgaaagcgaatcccatgtgggttcagacaatgtgatgtgggcatggaacaaattacgtagcggcaagaacgtcattgtctcgggcaccggcgcgaaaccaacagcatttacgctcaaaggtgctggcgttgttattcctgaatttggcgaaaacgactgcgtaccgaaatttgcccttccgtaa

SEQ ID NO: 113002 - DNA, 1410 bp, Enterobacter aerogenes
atggacattacgaacacaatcaaaatagaccttgcatcgttacaatcaggggggcccctactacgggaaaaagcccttcgtccgggagatgtgttgttagttaaaggaaacactttctttagctcactgatcgtttcagtgactcagggcgaatattctcacgcagcaatctggatacccgggggggatgaaaaagttgaaggcattttcctagccgaatccgatactaacggtgttggttttacctcactaatgccaatgagccttcatacgggaaatgcttccggaagagaaacagtttttcaaatccctgatagcccaagtaaatggattttgttacgccatccagggtgtgaaaatatcgacccagccaggatgcatgaggcctcacttgatttgcaaaaggatgatttttacaaaacttattctgccgcaccaagacttctggaaacggtaaccttacgaaaatcatatcattcattagctaacatggcagcgcaggcaattgaaatttgccgtagcgataaaggaactcgtggagtattttgctcagaactggttgccaattttttttctaatctagatcttgaattattttcagataagcgtgagtcacacacagtctctccaaatgacttactgttgccagaatgtcgtctcttagaagttgaaaatgcgtttgtagatacacaaagccttccgtctggagcctatgcttatggttctctttcccaggaaagaaagaacgatccttttctccgctacatgataaaccaacgcggcatgagcgataaaattactaaaaatgtggttgaattagagaggtatttacgcgatacaacccgcgcgatcattgaacagcacaataaaattgctgcgaaaactcaaagccgaattttagaacagattgcacttgctgaattctggcacgaacccgagcaggtcgaaaaattgcggcgctatgcagtaatgcataaatatgggttcctgttattacaatgcattaatgaacatgatgatctccaacgatctggaaacactcaagttgaggatatcgaatcttggaacgatgctagtgcaacattacactatatagctattgaaattatgtcaggggtccaacacgtacttctcagaaataccattctttttagtattcgcagagtaagaaaaacttataaagactcatcgcctcgcagaacacagctagttaagttcagacgccttcggaccaggatgtttaaaatatgggagagaaaaaaatatgaaaatcatgaaaatcttgcgttccacaaacgctcattaatgcctagttcgctcagtgaacgggcagaggtatatattcataaaattgcgcaacaagcattcaatttgctaaaagaggaattggccagcaatcaaactacatga

SEQ ID NO: 113003 - DNA, 699 bp, Enterobacter aerogenes
atggataaattgccccgtgatattaaggacaaagttctagttcgccctgtgggtggatcagaagcctatgaggaatttaatagcgtccaccactttatgcagacaaaaggaacggggaccaatgcagacgcccgccagtttaggctcgcagtgaagcgaaagggtattgcaatatggcccgatgatgaccctcgagttacaattcaacatgcaagagatggcattcgttgggaggttcgtctgaaggtgctacgggctgaacatttgtcttctctcagtgacgttctggatgagaccgtatcagccaaacgttttgggaatcgctactatggctcagcatcccggccagatcagatgaagtttagcaatactgttcgtcaaaactgtctgaatagatgtgttgttaccggcgtacgcactaaatgtaggggagaagcagctcacctcattgagcactgcaaggctggttttgaccactggagcaatggtttgtggcttcgttctgatatccatcggctttttgatgctggcatgtgtgcggttgatcctgaaacgttacgtattcatttttctcctgaagtccttaaggaagataaagatctgagcgagcttgaagggaaacagttattggcaactaagaagccggtcaacacagtctatctagtaccaagatgggaggtgttttgtcggaagttgtag

SEQ ID NO: 113004 - DNA, 939 bp, Enterobacter aerogenes
atgaaaaatacaatcgacgttagcgtcattatccctgcttacaatgccgcagcgaccattggtcgtctggtcaataaaatcctcagcgaaacccacgtagctattgaacttatcgttgtcgacgacggttctaccgatgataccggcagcattatccgtcaaatccgcgatgaacgactcattctcattgagcaggccaatcgaggggtctatgctgcccgaaatactgctctagccttgcacaagggagagtgggttatattccttgatgccgatgatgatattaacgacgggttcattgaaaaacgatggcaagcagctagtgcgtcacaagccgacgtgattatatttaatggctggcattgtggcgccgaccaccatcgaagagcagtccaccgaaagcagccctatggagcgactttgtcaggccataagtggattagacactgtgttacacgccgcgaatggccgcattacctgtggctacaaatggtcaggtcatcctatatcagacagcattcactatgcttccagcccggcaagagccataaagacattctgtggacggttcaccttgcggcgaacaatggccaattctacgtattggatgttaaagattacatctatatgagcaatacggcctctatcacgcaccgaccggattactatgatgttcgggcaatgagctatatcgaggtggtcgcagaaatcatccgcttggcggaactggatcaaaacaaagaaataaaagtatttttgtacaggcatgcgctggtggaagcgcgtcactttctgggactgtaccgcaatcgggttggggataaatcgggtgtgaaaagctgcttcagagagagtatttccctcgttggttttttcagaggcatcagcagttttagcgatgtatttttctttatcaaactagtgtctaaactcctatag

SEQ ID NO: 113005 - DNA, 207 bp, Enterobacter aerogenes
atgatccgttgccacctagcccgactgatgggtgaacacaaaatgcgcatcactgatgtagtcagagaaactggtatcagccgcaataccataacgctgatgtacaaagaaactgctcaaaaggttgatttggaggcggtagacaagctttgtgcctactttcaatgcgacataagcaaattgtttgagaggatacctgaggaatga

SEQ ID NO: 113006 - DNA, 3105 bp, Enterobacter aerogenes
atgataacgcctaccaaaatagggaaatttactgaagatacgcgtgtaaagatcccaaccattcttcacctcattaggttgggttacacctatctgtcccttaaagaacagtgctgggataaaaaaactaatattttcccagaacttttcaagactgccattgcaagaattaaccccaacacaaaaccagaggatatcgagcgctttctgaaagagataactctcttactcgataacgaagatttaggacgcgcttttttcgaaaagctcactgatcgatcgaatataaaactgatcgattttgaaaactttaataacaatagcttccatgttgttaccgagctgacttatgtcaatgacgatgaagaatttcgccctgacatcacattactcattaatggaatgccgttgattttcattgaagtcaaaaagccaaacaatcgtgaaggcattatcgacgaaagaaatcgcatcaacgaacgctttcagaacccaaaatttaagcattttgccaacatcacccagtttatgatcttctccaacaacatggagtatgacgacggtgacccggaaccgattcaaggagcattctacgccagcagttcgtaccataagcctgtattcaactatttccgtgaagaagaaatttttgacctgactgcaatgttaaagccgttgtctgaaggctctgaattggttgtcttaaaagacaataaccttgaagttattcgtaacagccctgagtttcagatcaacaaagatcataatcgaccgactaatcgcatttgtacctcactcctgaatcgtgaccgcctggcatttattctgcgttatgcccttgtctatgtcactgaatctacaggtattgagaagcacattatgcgctacccgcagctgtttgctaccaaggcaatagctcgcaagttagatgcaggaatcaaaaaagggatcatttggcatactcagggtagcggcaaaacggcactggcctattacaacgtgagtttcctgacaaattattttcagcaaaagcgggtgatccctaagttctattttattgttgatcggctggatctattgcagcaggcacaacgtgaatttatcgctcgtgggttaacggtacatactatcgattcccgtgaagcattctcccgcgatattaaggcaacacaggttatacacaaccatcttgggaagcctgaaatcactgtcgtcaatattcagaaatttaaagatgatcctgatgttgttacgaccaaagattacgatgtcagtattcaacgcgtctattttcttgatgaagttcatcgtagctataacccaacaggaagcttccttgctaacctaacccaatcagataccaatgccattaaaataggtctgaccggaacacctcttcttggaactgattacaactctcggttgctgtttggtgaatacatccacaaatattattacgatgcttccattgccgacggctacacactgcgccttatccgtgaagagattgccagtaactacagaatggtgctactgcaagcactgaaagatgcagaggtgcaaatgggtagcggacagcagactcaagtctattcgcacccaagctttgtaaaaccgatgctggattacataacgactgattttgaaaatagccgcaagacctataatgacgactccataggtggaatggttatctgtgccagctcggagcaggcaaaacagatgtttgcactgtttaatgaagagtttacttctactggcaacccccctgaaacgaatgagattgaagactatttacaagctgcagaaccagacgtgtcagggcgtaagcaaaagacgataaagaacgctgcattaatcctgcatgacataggctcaaagcaagaacggaaagactgggtggaggattttaaagccgggaaaatagatttgttgtttgtttacaacatgttgctaactggctttgatgcaaaacgactgaaaaaactttatctgggccgtgtgatccgaaaacatggcctgttacaggcgttaacccgcgtaaaccgaacctacaataattttcgctacggttatgtggtagattttgccgatattagccaggaatttgatgccactaataaagcttacttcgaagagcttcaggatgagctgggtgacgaaatggcgaattactcccagttattcaaatcccaggaggaaatccgccaggaaatcgaacacatcaaggatgtactgttccagtttgataccgaaaacgcagaaatcttctccgaccaaatcaacgagattcaggatcgtgaaaccgcgctagtactgaaaaatgctctggccgatgccagaagcctgtataacgttattcgcctgcagggtgactacgatttcctcaccgagctcgattttgaccggcttaatgtcctctaccgtgtcgccagtgcccgccttgatctgctcaatctgagagagaatctggaacagggtgaagatatctccgggttactaaatcgcgcgctggaagatgtcattttcgagttcgtgaaggtgggcgaagaggagctggttttggccgacaagctgaagcagactctacgccgtacccgtgaagcattagctagcaactttgatcagcaagacccacacttcattacgcttaaagaagagctggaacgcctgtttaagaaaaagaaactcagtgacgtcacgcagcacgaaatggttgcgaatattggcacactcaatagaattcatgaccgcatcaaagagctgaaccgccagaacaacctgctccgccagaagtatcggggagaccggaagtatgcccgaactcataagcgattacaggagcgcggcgcatttggtgagccagagcgtaaaatatttgaggcgttgtttggtgtgaaacaggatgctgatgaaaaagtattgaacaacagccagatactgaacaacgaaagttactttgaaaaacagttagtgtcttgcgtgatcaaccattttgaagatgtgcaccatatcaacctgagtgccgacgcagccagagacatcaaccgcctgattgtcgcagagtacctgaacgaatttaataccggagcaagaacgtggtag

SEQ ID NO: 113007 - DNA, 1638 bp, Enterobacter aerogenes
gtggtagagctagaatttagagataaaactaagaccctaatcgacaacctgaaaagcatttgcgccaactacggtctaggtaacgatggtaacgaattcaaaatcatcacgcaggcattcctgtacaaattcctgaacgataaatttgcctttgaggcgaaaaaagttgatccaaagctagctgatgagaagcgctgggaagatgtgctaagcgccatgagtgaagagcagttaaacaaactgcaactcaagatgagtgcggatactgcaactctgaagccgcaccacttcatcagctatctattcaataatcaaaatgctgctgattttgctaagactttcgacgataccttgctggatatcgccgtaacgaacaatgatgtctttgcggtgaaaactgacggtggtgcgaaagtggtgctgtttgaccgcattagccaatacattgcggatgaatcaaaacgtgatgacttctgccgcgccatcatcaataagctcggtcagttcagttttgagcgtatttttacccaaaaatttgatttctacgccaccatctttgagtacctgatcaaagactacaacagcaactctggtggcaaatacgccgagtactacacgccgcacaccgtggcacgtattatggctgagattctggtgccaaaagagcaacaaggcaaagtacgtgacgtgagttgttatgacccatcagccggttccggtacgttgttaatgaacgtagcccacgctatcggcgaggatcgttgcagtatttttgctcaggatatttcacagaaatcttccagcttgctgcgcttaaacttaatacttaataatctggtgcactccatcccgaatgtggttcagggcaacacgattttgcacccgtatcacaaagacggccgggagataaaacgctttgattatattgtctccaacccaccttttaagatggattttagcgacttccgtgacgctctggacagtaaagagaatcaggaacgcttctttgccggtatcccaaaagtaccaaaagcggcaaaggacaaaatgtccatttaccagttgttcctgcaacacatcatttactcgctaaaaccgggtggcaaagctgcagtggtagtaccaacaggctttattactgctcaatctggcatcgataaaggtattcgtgagcatctggtaaataacaagatgctcgcgggcgtagtctctatgccatcgaatatctttgctactaccggtacaaacgtttctattctttttatcgatgacagtaataaagagggcgtagtactgattgatgcttcgaacttaggtgagaaagtcaaagatggtaaaaatcaaaaaacggtgctgacggaagaggaagagcagcgcatctacgaggtctttaacaataagtggactgaagaagatttctctgttgtggtctcctatgatgaaattgcggtgaaaaattactcgcttagcgccgggcagtatttcgaagtgaagattgagtattcggatattacgccggagcagtttactgaaaaaatgaaagggttcagtgacaaactggagagtttatttggtcagtctcgtgagctggaagcggaaattaagaaagggctggcggggttgaagtatgatgcatag

SEQ ID NO: 113008 - DNA, 225 bp, Enterobacter aerogenes
atggcaaccctagaaacaatgtcggccgcagacagagctagcatgttgaaatatattgaaagctactgcgagaaaaaactaaaattcgaccataccagcagtaagtttgaaatatcaaccgatgatgaattaaaacttttactttatggtattgaaaagcgtttttacaccacttatgacgggcatgaaagaagacttgctaattccgtacagcctctaaattaa

SEQ ID NO: 113009 - DNA, 360 bp, Enterobacter aerogenes
atggctactaatttaaaatgttttaaagcgtacgatattcggggtaaattaggtgatgagctcaatgaagatatcgcgtatagaattggacgcgcttatggtgaatatctaaaacctaaagatatggtcttgggtggtgacgttcggttgaccagcgagtcattaaaactagcattggccagaggattgcaagatgcaggaactaatgtcttagatatcggtctggctggaacggaagagatctactttgcgacgtcatatttacaggttgatgggggaatagaagttacagcaagccataatcccatcgattataacggtatgaaactggttcgcgaacatggaaaccatcatttatga

SEQ ID NO: 113010 - DNA, 555 bp, Enterobacter aerogenes
atgaacaccgcgtttcggctgctacttacattcaatgccacatcacttttggtgattatttttcttgtgcaaaaaggatataccttagggtaccttttcccaaaaaatgatggtcttagctgggttagtttgttgccaaacgtggtatcttatcttctctatgtacttattccagtactgtttacaggattaagtatcgtgctcagctccaaacttggaaaagaccaattcaaaaaaggtgaggttgatagtattgagcatgccaacaacagctttttgcccagttatttaggttatttctttgtggcgcttagtgtaggaaattgggagacattatggtttgtgtatggtgttctgtttattttcactttcctatctcaagcactttattttaacccactatttctcatctttggttacgagttttacaacgttaaaacaaaaaatggaaccgcgatctttttaatcagtcgtcagaaatataaaacaccaagtgaaattgatatttcaacagcctttagaattaacaactacacatttattgaacggagttag

SEQ ID NO: 113011 - DNA, 2295 bp, Enterobacter aerogenes
atggtgcaaagcattgacttacttagagactacggaattttcagaaattacatcaagactgatgcaaaagatttcggaaggcttaatttaatatacggttggaatggaagcggaaaatcaacattatcatcgctttttgagcaaatagaaaaccgacagaatactagataccctaattcaaccttttctgtaaaaaccttcgatcaaggaacgataacaaaagataacattttcgcaaataatttaaatctgaaagtattcaatcaaagttttataaacaaaaacattgactggaataactcagtaaaaagcattttgttgatagctcaagaaaaaattgaagaaaagaagaaattagaggaattgaaaacatctttagataaaaaaacaaaagagtatgttagaagaaaaacagcgaatgataaacttaccgatgaacttcaaaagttcctaacggatgcagctaagagaactaaaacaagtttacaagtcattgataccagtgactcaagatttttaagctataacagaacaaaacttgaaaacttcatcacgtcaaatgttgatctaataaaaaaagcagattcaatcctagatataaatgaagtggcaaggttaactaaagcagcaaatcctacacaaaaaccggcaattacaaccaaaattccgagcgtagattcctccctactaaaaaaagcacaagataggttaaatgaactattcaaacaatcagtaacaaataaagttattgagagtttgaaaaacaatcaagatatacaatcttgggtttttagtgggttaaatttaaatctaggtagtgatagttgtcatttttgcgggaacaagatatcacaagagcgaatcgatgaattaaacgcacactttaatgatgaatacagaaaattctcaggaaccctagacaaagctaaaacatggttagcaagccaattcattgtgttagtaaacaacagtgatattgatatttatgacgaacataaagagcttctaaaagaaaagttatcactccttaaagatgaggctgaaaaaataaatagccacatcaatgaatgggagaaaatattagatgaaaaaataacaaaccctttcaacattgatctctttgctgttgaaataccaaattcattatttgtcagcttcaatcaaaccgcaactgaaattaataaaataatagagtcgcataataaaaaatgcacagactttaaagaggaaactaataaggtaaagtctaaacttgagtcacactatgcggcatcggaggtaaacacgttcgattacttcaagaaaatgtcaaaccgcgacgcggaaacaaaaaatttactgacaaacgataatgacctaaaaagaataaaagcagaaataaaatccattgaagattcattatcaaatgaaaccatagcagcagatattttcaacaaacatctacacggttttcttggtcgctcagaattatctctccaatttaataaagaaaaaaatggatacgaaatactcagagataaccaaattggacatgcacctaatcttagcgagggtgaaaaaactgccatagctttgatttactttataacaaaactaacagagaatgataataaaatctccgacagtatcatcgttttcgatgatcctgtttcgagttttgattcaaaccatctatttcattcatattcatttataaaaacatattgtaatgatgcaaagcaactttttttactaactcataactttacgtttttcaaattggcacgcgactggttcaacacaaacaatagaaacagaaaaagaaaagaaaaagttgaaaacgcatttttctataccattgaacccagtgctgttacgcctcgctcatctgcaatatgtaatgctgacccgagtttaattgattacaactcagaatatcattatatctttgatactttgtataagcataaacaacatcctcgactaactcgtgagcaggcattctttacagcaaatctatctcgtaaattgttagaatcatttttaaacttcaaatacccaaaacatagatcagatctatcacaactaatggatgttgctgcgaaaaattgtattgcctttgatagcaataaaaaagaaaaggtttatcgcttcattaacaaatattcccatagtgctgttatcgaaatgaatgaagatattgctgaaaatttaataggtgaaggcacaaacgtaatcggagatatctttttatggatagaagaaattgacaaggttcattatgatgaaatggtaagtgtttgtcagaaaaactga

SEQ ID NO: 113012 - DNA, 489 bp, Enterobacter aerogenes
atggatttactaacttttatcagcgctataagttggcctgttgttttttttattgttgttcttatgttcagaaagttgattgttcaacgacttaagtctttcgaggggttcggtcttaaagttgatatggtggaggagcaaaaacaactgattgaaaatccaagcaaagtcgtaacggatcaccgggcgctttcgcgtcaagttgtctcttctcatttcaacgctgagggagatataggatacgctttatattcgaatggcatattaattcaaaagcttaaaattacgatttcagatttaaatcgttttcgtgataccccagttcatttcccaattgctttccctattatggtcctgaatgtgcaatttatcggtggctcgactcctgatgtgattgaaatgaatagaggtagtattactttgcgctttacgaatcacaaacccagtcatgacactgagctaattaacatcatcgtagtcggtttgtag

SEQ ID NO: 113013 - DNA, 558 bp, Enterobacter aerogenes
atggcgattttcggctacgggcgtgtctctaccgctcagcaagatacggagaaccagaggttggagcttgagcaagctggttgggcgtttgacttttggtttgctgatattgttagcgggaaagttcaggcaattcagcgtaaggcgtttgctgaaatgcttggcaaaattcgaaccggtgaaacgctggtagtggcaaaacttgaccgtttggggcgtgatgctattgacgtgctccagacagtccgattgttatctgatcgcggcatcaaggtgatcgtccaccagcttggaacaactgacctcacttctgctgccggtaagcttctgttgtcgatgttggcagcggttgcggagatggagcgtgatctactgattgaacgcactcagacgggtttgtcgcgagcaaaagccgaaggcaagaaattgggtagaccttctaaaatcgcaccagaagcccgtagagcgattatagagaaaaagagtagcggaatcagtgtcagcgcattagcgcgtgaatatggcgtttccagagcgactatagctgcgttgctttaa

SEQ ID NO: 113014 - DNA, 498 bp, Enterobacter aerogenes
atgacgggagcagactttatattaccgatggcagcgggagctgcgcttagctgggccagctatagagtggtcactcatataacactaaaacggcagatcagcacgctacgtgcaattgtatgggggattcttggcactctctcattggtgctaggcgtgtgcgcattttctgctgtaagcgcagaacacccagcagcgaaaaacgagacatcgtgcttaggtagcgccccggaatgctatgcaaaagcgcaccacaaccccgtcaaagagtgcaagcaggtaatggacaagaaagcagcgtttcgccatgtgtggcaggaaagtgaagcgcagccagttttcgacacttacctttggcacaacgagaaaaagaaaatgattcaagcatttggacaacaggctaaggccattaatagcatgaatatgctgataccactgcaatacttttgtgtttttaacgccagcaccggggaagtcatcgcggcttcatttgagtaa

SEQ ID NO: 113015 - DNA, 1254 bp, Enterobacter aerogenes
atggttattagtcagtgtctaaagtgtaatttatgctcacatatatataggttaagggtaggagtcggtttcgatggttaccaaaaacactactttgactgctcaaattgcaatgcgaatatagttttcgcacttaaagcaaaagcccctgaggctcatattgaggtggttgaaaattgcacattattatggggggtagatgaggtagaggttatgaatttccacccgaattgtgcattcgataaggatgatttacacaatcccttatcttttccatctatacatttaactcaattaatctcaccacatatgcgatttatccaagggagaatgcagagtgtggctaatcagtttgatataccttttgccccttataaatggagtttaattaaagggatgatgggaacgttgcataaagacaatgtaaaggcaaacagatttgttcaacaatacatgcaacaaagaaacaaagatatgaatgtcgagattgatgggcatcccctctcatcagagcaggtgatcgtttatgaatcgggcgtaggatatcctgagtattatattattcatgagttttttgattctcttttttaccccaaaataaccaatatcgtcaggcctataatcgacgaaattgataagcgtgataaaagtgtttttactgattttttaatttattggaatcaggagctgaaagagcagaatcaatatagatatatgaatgctctttctgattattttcgatacagagatcactttgggcaaatagctctctattcaagaatagatcatgatgttgatgatttgattgtttcatctaaagggtttgatcagataaagttgtattatggggatgtatatgaagcactaacttctaacatgactattttagcttgtcttaataatataatggatgggaggaaatatgatcagtttaaaaccatgtctctttctaaatacttagaagttaacaaagccaataaggcaaatccatttaaagataatgttctatttaaagcctttgcagaagatgacttagagtcgtctattaggaatggttctcatcacgcatctatttggtatgatggcgaaaaagtaatgtataggagtggaggcacgggggctcaacatgatatttcttactcgcgttatcttgatctctgtaataaacttactattaagttatcagcaatttggataattgaacattacctcaatttgcatgttaatggatcaggctatttcaagtttgaataa

SEQ ID NO: 113016 - DNA, 492 bp, Enterobacter aerogenes
atgagtaatcaacaactatcagccaaccaaatcgcctacctgagccgcgctatgtcagacggtaagggcctcatcgaaatcggtgagttggctcggggtcttggtaaacgacctgacaacgttaagcgtaaactggagagaatcttcccggaggatcatttactcaatctgaggaaaagatataaagcctcaattggtaagggggcatcgcgggagattgaaacttacatgctcgactacaagaccgctggcgctctcgctatgtcatatgacggtatgttaggcattgaggtcttaaccatccttgaggactccctgagcaccatccaagcgatgaccatcgaagccgcaaaagataactccgctggcgtccttaaggccgctgctggcttccgtgagcggtaccgtgagcgcttggagttccgtccgggtgcctccgagaatgaggaccgcagcgtcgcccttaagcgtcttggacgtaagggtctgtaa

SEQ ID NO: 113017 - DNA, 633 bp, Enterobacter aerogenes
atggcggttccatacgaaccagcggagtttgataaagaggcttttaactgtccgtattgtcaggcttatgctaagcaaacatgggggcgattatatccgtactatgaagacacgggtttccctatgcatgtatcacaatgtgagcgctgtggggaatattcatattggttcgaaaagtcccttctgattcctgcttctgcgaatgttgaaatgccaaatccagacatgccggaagactgtaagtccgactacatggaagccagaagcatcgttaacctgtctcctaaaggggccgcagcactcctccgcctgtgtctccagaagttaatggttcacttgggtgagccgggagagaatataaacaaagacatcaagtctctcgttgagaaaggtcttcctccccgtatccaacaagctgctgacatttgccgtatcgttggtaatcaggccgtgcatcccggagagattagccttgatgatgaccctcagttaactcatggtctcttcaagttattgaatatcattgttgatgaccgcatcaccagacctaaagaaatcgaagcgatgttccagagtatgcctgaaggtccacgtcaaggcatcgaaaagcgggacggcaaggctagcggatag

SEQ ID NO: 113018 - DNA, 1380 bp, Enterobacter aerogenes
atgagtttcaactcaactccaaaggaactaattgaacaaaatatcaatgggttgctttctatccatgatagttggcagcgtattcctatggatgcgatagccaaaatcactaatggctttgcatttaaatcatctgaattcaatacaaacaaagatggcttaccgttaattagaatccgtgacgtgctaaaaggtaatacagcgacttattattctggcccagtaccagaaggatattgggtgaatccggaggatttaatcgtcggaatggatggcgattttaatacaacaatatggtgctcaaaacctgctttattaaatcagcgggtatgcaaaatcgatatagatgaagagaaatatagcaagagatttttcttccatactttaccagggtatttatccgctataaatgcaaatacatcttcagtaacggttaagcatctttcatcccggacactgcaagagactttatttcctctaccaccactagctgaacaaaaaatcatcgccgaaaaactcgatacgctgctggcgcagatagacagcaccaaagcacgtcttgagcaaatcccgcaaatcctgaaacgttttcgtcaggcggtgctggtatcggcagttaatggtaaattgcaagcagaatcctccaacaaggaatgttgtactatagattcattgtgcctcacctcatttgatggcccatttggttctaagttaaaaacatcggattatactaattctggtataagagttgttagattagagaatatcggtcatttagaattcaatagcgaaaaagaaacttatatcagccatgaaaaatacaagagtttatatagcaatacattgaaagagaatgatctaattttttcttcctttgttgacgaagatgtaagagtttgcctcatgccacaaagtgaacaaacattcatcaataaagcagattgtttttgtttaagagtaaacccatcattagcatcaccacattaccttgcacttgttttggccagcaaaacctcttatgagcaaataaaggaaaaagtacagggtattacacggcctagaataaatcttagaacgctacgctcattaaaatttgatattccagatcttaaagatcaactcgaaatcgtccgccgcgtcgaacaactcttcgcctacgccgacacaattgaaaagcaagtcaacagcgccctaacccgcgtcaacagcctcacccagtcgatcctggcaaaagccttccgcggcgagctcaccgcccagtggcgtgcggaaaacccggatctgatcagcggtgaaaacagcgccgccgccctgctggaaaaaattaaggccgaacgcgccgccagcggtggtaaaaaaacttcgcgtaaaaaaacctga

SEQ ID NO: 113019 - DNA, 804 bp, Enterobacter aerogenes
atggatatacgaacattacctggccagaatttacgtggatggtcagaaacaatgattaatcttgaggcaagaatattagttaatacggctaattcggtagcggcaatgcatctacaagatagcttgacgcgtcttaagtttatcggtgagataaagttgtttattatggcgcagtttgctattgccagaagtgctaaatcacaagatgaatgtatggtttgcatcaaaacattgcgtgccgaaaataatagtttgcttgagcaatctcgggcacttaaaacaggttatgcaaagctttatgctgaggtgaaaatagttaaggatgagaataagatagtcggttacatcatctcgggtgttgatgtcgttgtggccggcgtggctattttgggtggtattgtcatgatgtccaccatgacgccgttgggagttgtggctggtgctatcattgtagttaatgggttaaatacaattacacgagaagcagcgcgaacattccttgatgataaagaggctgcggggatctttgctgatgggtcaatggagtttgcggagtttctaggttttagtcggcagcaagggttaggaatgtataatgcagtcacattgctcagcgaagtctacggtgcgtatggactgcgactaaaacctgaagcaaaacgcctctggtattggacaggaacagatttctttcgcaaagcaaacaatacgccgcgaccgatgatggctctcaaaatcgctggctggggtgttaaagctaaggctactattgatttactctctattgagcctgacgggaaatga

SEQ ID NO: 113020 - DNA, 324 bp, Enterobacter aerogenes
atggcgattaatgataaagacttgcttggcgttggattcagcaaacaagaggtggaaaacctcaagaatcgacttaatctatataatggaacaatggaaaacctgatctctgtgctttcccggcgattcagagtgtcgttctggataactattgctcttattctggtcatggttgtaacgatattgagtggcagttcaaagtatatcatctctggatctataggcggggttattgtattgattattgcttggggtacattccctccgattatgggttggaaggctgctcgcctacaaaaaatcatttcccgtcaggctcaatag

SEQ ID NO: 113021 - DNA, 138 bp, Enterobacter aerogenes
atggaagtaacagaaaatacatcgctagacttcggcttcactttggccgatctgaaaaaattaaaaccaacattgctagcactgatgggtcgtttgagggagaaattcaagaatttgctaatttatttagcacgttga

SEQ ID NO: 113022 - DNA, 687 bp, Enterobacter aerogenes
atgaaaggattattcaccgctctggcggccatgcttatggccgttggatgtcaggcgcaacagccgccgacgcaggttatttatcgtttcgatgaccaccgctatctggagctgaaggggtggggctgtgaaggtgaactctggtacacggatacactgagggggattcacaccgaaccagttagccaattttacagaatatatactaaaaaatttattcatccttctgagcgctatattgctattcctaactgggaaatagatgggtttattgtctcgaaagataacggtcaaacctggagccctgtcggatattcgccgggttataacgagccggatgggatgaattctccccctcgagatgatgttctctctttcaccgtcgtcaacgaccagggttttttgcagaccaggcatcgcctgtatatgtcgtccaaaccgttcgacgatccgcgtctggcggctggtggccctggtatccaatatgtcattgaaggggaaactcacactataaccccccagtttccaggttggtcatggggaatggtttatatgaccaaacaaggacttgagaacgatacggcaaaattccacaccaactaccaggggctccccgacagagtacccgaagtaaaaggctataccggttgggatcatatgcgttgtgatatggatgcaggacgttaa

SEQ ID NO: 113023 - DNA, 1086 bp, Enterobacter aerogenes
atgtctataacgaaattcagccgagttcagcgagaagctatctggaaagcatatggtaaaagatgcttttatactgatgaagtacttttacttgatagttttgatattgaacatataattcctgaaaatattttagaacgaccagatgaatggattgaacttaaaaaagaactggggttagacgacggttttaatataaatggatacgaaaatttagttccagccaggcgaaggattaatggtaataaaggggcgacagttttacctaagcgggcgttaatgtattttctttctttctctatggaaaagaaaaagattgttgaggtttttattgaggactttgaaaagcaatctggcattgaaaaagcaaggcacttaatagctaaggcacttgagtgcaatgaagtgacaaaaagtgatgttgtaaactttgtggatcaagcccgttttggttttactgaaatatcaaaaaatatattagcacaatacccagagttagagtttgatttgttcaatgctgaagtgtttagtgaatttaaaaagaaggctatatctgagccggtgacattggttgacagttctgggaatgagttaattgtttcaacttgtgaagattattcttcatgtatcaacaagggttatgcagaaaagaataattttgatatcaaaatagcttcgaagttaaggtgcatttcatcacttattaatttcatttctgctgcaagcactccttctaaaagtcttatccatcaacttggactttgtgatatatcaatgatgtgtgcttctatgtttccagatctttctggagaatgtaattataaaaataaatataaaacctatcaggggttggtttcaaatggcaacgcaaaaattatgtcagtcgggactggatttatacatattgaaaataatttgatggggcaatatattgttgaagtttgtcgtgggtgctttgatgataaacaatacgagcagatacttgtttttgagtattcatatgcgacagaaggtactttttcatatgctaatgcaaggcttatttcaagattgcgaaaaacaagtaaaatggcttttgtagattaa

SEQ ID NO: 113024 - DNA, 483 bp, Enterobacter aerogenes
  misc_feature (469)..(478): n is a, c, g, or t
atgtccgagagaataaatttctcagtacttattgatgagactaataaaaaatatgagcaagaacttctcaaggctggcattagcaatgaaaaaatcattaaagtaaaaacatgtacagttggtgggcgggcgttaggaggagttaaattgttcacaacggtgttgcaagaggcaagtagattccatattgtccattgtaatactttctatgatggtctttttgcaatgcctgctgcaagattacgtgggaaaagaacaatattccgagccagatgcgggattgaactatcaaatcacggcataatcgataatgtcatttatcagttttcaacaaagattttagccaactcagactatgttaaaagtacttttagtagggtttctaaagatctaagcaaggttatttcgttatataatcctttggatatgaagtttaaacgagatattgctgtctgcaatgctagccccnnnnnnnnnnggtga

SEQ ID NO: 113025 - DNA, 657 bp, Enterobacter aerogenes
atgtcttcactgtcgattcggtcattcacgctatttcgcgaggatcaaccggtgcgcgatgcgctggtgttattcacgctgacgatcctgctgcactttatgggcgctatgttgcgtctggtgcaggagctctcgttcttttggccgctcaacgccgttatggcaggtattttcgcacgctacgtctggctaaatcgcagctatttttacgctatttgttttgccgcgatgctggtttatgacggcctgacttcccgttggggcatgggttttgcgtcgctgctgattaacttctccaatatcgtcttcatcgtcattctggcgcaactggtgctgtgggataagcggcgtgccgattcgatgccggggccaattaacgctctgaatcttttttgttattgcctgctggcggcgttggtgtgcgcggcggttggcgcgttgggctcggttgatgttgaacgggcgacttttattccgcaactggcggactggtttagcgagcagttctcgaccgcggtcctcatcctgccgtttattctgaccctgacgctgccatcggtgctgggccgctttcgctttccatctgtcgccggatgcgcgtccgcagccgtggcagctgttttcaacccgtctcggcatggcggcgatgctgattag

SEQ ID NO: 113026 - DNA, 240 bp, Enterobacter aerogenes
atgtatcctgttgacctgcacatgcataccgtcgccagcacccacgcctatagtaccctgcatgactatattgccgaggccaaacgtaaaggcattaaactttttgccatcaccgatcacggcccggatatggccgatgcgccgcactactggcatttcgtcaatatgcgtatctggccgcgtctggtagatggcgtcggcattctgcgcggcattgaagcgaatattaaaaatacctag

SEQ ID NO: 113027 - DNA, 474 bp, Enterobacter aerogenes
atgctgacctcgctggatctgatcattgccggttttcatgagccggtatttccgcctcaggataaagccacccacactgaagcgatgattgccgcgattgccagtggcgcagtccacatgattagccatccaggcaatccgaaattcccgatcgatattccggcagtagccgaagcagcggcaaagcatcatgtggcgctggaaattaataattcctctttcctttcatcgcgtatcggtagtgaagataattgccgggcaatcgccgccgccgtgcgtgatgcgggtggttgggtggcgctgggttcggactcccataccgcctttacgcttggcgaatttaccgaatgtcgcaaaatcctcgacgcggtgaacttcccggaagagcggatccttaacgtcagtccgcgtcgactactgaatttcctcgaatcacgcggaatgccggcgattgcggaatttgcagacctttaa

SEQ ID NO: 113028 - DNA, 372 bp, Enterobacter aerogenes
atggttatccccaccctggtcgtagtcaacgcgctggtagcccgcttccagccaggtcgagtgcacatcgttccagaagtacattggccggacgatcgcgccgtagtttttacggttgtcggtattatccttgccgttgtcgtagtcgtggaaggccagcagatactcgatctgcgcctgctgggtgaacttatggctgccctcgaagctggcgtagaccgtggtcaggtcgtcggttttgttatagacgctgttatccgagttatcggaatagcgcaggatcaccttgttcaccccgctgtcgttggtgtggctcagcaccagcccgccctgccaggcatcgaggcgcgcgtcgctgtccaccgcttttga

SEQ ID NO: 113029 - DNA, 567 bp, Enterobacter aerogenes
gtgacgattaacaactgccaacaggcaattgcccatggcatcgccatggtgccggaagaccgcaaaaaagacggcatcgtgccggtgatggctgtcggcaagaacatcactctcgcggcattaaaccagttcaccggtccggcaagcagcctcgacgacgccgcagagcagcactgcattcagcagtcgattcagcggctgaaaatcaaaacgtcatcgccggatctggcgattggccgcctgagcggcggcaatcaacaaaaggcgattctggcccgctgcctgctgctcaatccgcgcattttaatcctcgatgaaccaacccgcggcatcgatatcggtgcgaaatacgaaatctacaagcttatcaatcaactggtgcagcaaggcatcgccgtcatcgtgatctcatccgaactgcctgaagtgctcgggctgagcgatagggtactggtgatgcacgaaggcaagcttaaggccgatttgcataaccaaggtctgacccaggaacaggtgatggaagccgcactgaggagcgaacgccatgtcgaaaaacacgtcgtctga

SEQ ID NO: 113030 - DNA, 951 bp, Enterobacter aerogenes
atgtcctggttactcgaaatgaagaacatcaccaaagccttcggcgcggttaaggccgtggataacgtcagcctgcggctgaatgccggggaagtggtgtcgttatgcggtgaaaatggttcggggaaatcaacgctgatgaaagtgctgtgcgggatctatccgcacggcagctacgaaggtgaaattattttcgctggtgagatgttacaggcgaatcatattcgcgataccgagcgtaaaggtatcgccattattcaccaggagctggcgttggtgaagcatctcacggtgctggaaaatatctttctcggcgccgagatctcacgccatggcctgctggattacgaaaccatgaccctgcgctgccagaagctattggcgcaggtgaatttatcgatctcgcccgatacccgcgttggcgatttaggcctgggccagcagcagctggtcgagattgccaaggcgctaaataaacaggtacgtttgctgatcctcgatgaacccacggcatcattaaccgaacaagaaaccgcgacgctgctggcgattattcgcgatctgcaaaaccacggcatcgcctgtatttatatttcgcacaagctcaatgaagttaaagccatctccgacactatctgcgtaatacgtgacggtcagcatattggcacccgcgacgccagcgggatgaatgaagatgacatcatcactatgatggtcgggcgcgagctcacggcgctgtacccaaatgaaccacataatcatggcgatgagatcttgcgggtcgagcatctcaccgcctggcacccggttaaccgtcatatcaagcgcgtcaacgacgtgtcgttttccctccgccgcggcgaaatccttggcatcgccgggttagtcggcgccgggcgcaccgaggcggtgcaatgtctgtttggcgtctggccggggcgctggcagtga

SEQ ID NO: 113031 - DNA, 1134 bp, Enterobacter aerogenes
atgtcagactcaacaaacaatagctatggtggaatacttcgccttggagcaggattcagcatcgttctaatgacgctcactgccatttttatctggttttatctaacgtggattgcccgtctagatatattccttcaagctgtcacttttaacgagctgttctccttctctggaataatatttttaagtagcattatattgttctgtggcgtactgtttctaccctgtttgttaggatgcctcgttatacatggcaatcaaaataatgccaagtcaaagcgaaagaaagtacttcaagcatttatttatgctggaagctcttttctctgcataacatttgttgctttaatatctttgtttgatatagacccaggggaatttactttcatagccttgatgttattgactggcattattagtgtttttattacatttattcttcagagaaaaagcatacgcactcatctgaagtcactaaacacgataacaaagataaaaattttactattagattactcaatgaaaccctttctactggggatcaattgctggctagtagtcttcccaataacacttttaagcaaattcttacacgtcgaaagtggaatggatgactaccagcagacctcgttattccttgtgtatggtacattagtaatagtaatcaatatatttccactcatcttttttttacgacaagatttctctagaggatggtttaaacctctgagaaatactacaggtgttgttttcgctttattactactgtcatcagccttcatgcacgtcattccgttactgattgtcaacatggcatttcggatgactgggatgacgatcatggaaccagttacaatttctatcaaaacggatgaaattccttctgaaatgcttcatagccgaggatggaagtatcagctctcagaggataaaaaatttagcttagtatcaggagttatctttttttcatatggcggagtttatcttgtctgtcctaaagaaacgacaaaaaaattccgtgaaagtataatcttcgacatactgtctgaagaaatagaaaaaaaggctagagaagaaataaaaaaatcagcccagcaatgtattgcagtggataaaagtgctttaaacttttga

SEQ ID NO: 113032 - DNA, 810 bp, Enterobacter aerogenes
atgaaaactaactatttcacccataagttattccctacagatggggtaaatatttgcgaatcattgaaaacaagctttgatgccatgattgcaaatggcaggaatacggccacgctctcgaatgagtatcatgtcatccaacatatatctggcgatgtctatacatttataaaaacaaatagcagagatgtttttagaaagctagatactagcaacaatatatgcgttgatctttctaacattttaaaccaaaatgaaaagatagcattcgcatcattttttatattgaagggtgatttaataggctttagtaatactttgtattcccctagaattggtaagttggcggaaatatatgatgcaacaatgtttaccagaaacagcaatcacaatataaatttcacaccaataactaatgtagttacagagcaggatgttatgaattatgctcatgttggtaaaataaccatgaaaatggataaatctcaaggtatcattggtgggcttaacacactcttttctggtaatgtaacctatgatgatgtggattcttttgaaataaaaataatccccaagagaaccaaagatataaaggatactttctcaggactgatgcagggtaagcccacagaggttagttctgtagcagtgtcggctaaagaacacattggtgatgtagcaacagatctgaatgttataatgtcaaatgttgtatatgatttcgtaaatcctaatgacaccactactattgaagtccagatggaaaggaatttcaataataactctacgctgagaaatttgggttactga

SEQ ID NO: 113033 - DNA, 438 bp, Enterobacter aerogenes
atgaagttcaaaggttttgtcctaggtttcatagtgatagctgcatgcaatgcgatgggctttggctttttatacttagcaaaaaattacttcttccctttggtgactttcaaagataacctaggtaaccttggttcttccttagttacttattcaactgcaatgatggcgcttctgattgctatggttgtgataatttttggtcttgatggccctcggctacagaattttcaaaaaggtggatacctccacactacttactttatgtacatgattacattttttgaactaggcttaaccatggctctatcattactttgcttatctaatatatcaagtgtaaaagtggcctcttactctttaacttttgcgtttattacctttttactaatcggttgtttaggtattcaactattaaatataaaaaagaatacataa

SEQ ID NO: 113034 - DNA, 699 bp, Enterobacter aerogenes
atgaaagaaacttgggcctccggctcaattgagttgttaagacatgctgattctcatattaagctggagacagcttttgatagtagaattgctttcataagtattgataattcagttgagacctccatcagaacgttcctgtctcttccagaaaaaatatcgggcgtaaaattccaacgaaaagaagttgaagaagctggtaacagttttccaaaaatggttgttcttctgtttgacaaagctcggcagaaaatagctggtctagatgatggtgatatcgagcactatcatcgcatcagaaatcagctatatcacaatggaactggcttaggtgttgaccgtcgatacctaggtgcttatcggcaaatagcagccgttctattgaataatttatttggtgtaaaagctgatcctaatgtggtagagggcacgctagacaatcttatattactatttaacgaagtggaaacattagttaaaaaaatattcgatggttccggtgtagacgccggccaaacgttcaaatgggaaatagcagtacgggcgggtattttggaaataaatgatattaaactgattagcgaattacgcatgattcgaaattctcaagtacattccactgccgaaaatatcgacaaaaaacgtatcgaactaggtgtcgaaatagctgaaaaattaataaaaaaaatgaaaaactaa

SEQ ID NO: 113035 - DNA, 2199 bp, Enterobacter aerogenes
atgagcagtgcctacaatagtctcgatccccgtgtccgtagatgggtttataagcagggctggtcatcattaaggcccttgcaggagagttctattccagcaattttagcccgtgatcgtgatgtactaattagtgcaggtacagcagcgggtaaaacagaggctttctttctgcctgcctgttcggcggttgcagatctcaccggtggatttggcattatctatatcagcccgttgaaggcattaattaacgatcagcaccgtcgtcttgagagtcttggtgaagccctggaaatgcaagtgacgccctggcacggggatgtaccacaaagcaaaaagaagaaagcacggacaaagccgtctggcatcttacttatcacacctgaatcacttgagtctttgctcataaactcattgggttggctcaaacaggcgttttcttcagtggcatacattgttattgatgaattccacgcttttattggctcagagcgtggtatacagctgctttctctgcttaatagaattgaccatgtgctaggacgccagttaaatccagttccccgtatcgcgttgagtgccacgctgggagatctggaaaaagtgccagaactattgcgcccggataagagattaccttgtgaaacggtaacagacagtaatagcacagccacactacaggttcaggttaaaggttatcttgagcgggttcccgaaaaaggagaagagctccagagctctgccgaacagctcgtctgcgcggatattttcaggctctgccgtggcaattcccacttggtctttgctaacagtcgaaagcgtactgaaagcatagcggcaacactgagcgacatgtgtgaggcaaatgtcgttcctaacgaattctttcctcatcatggttccctggccagggagttacgtgagacgcttgaagcccgactgcagaaagggaatttgcccacaaccgctgtttgtacaatgacgctagagctgggtattgatattggtaaggtgcagtcggtcatacaagttacacctccgcattctgtttccagtctgcgtcagcgtatgggacgttcagggcggcgcggttccccatcggtgctgagaatgttaattactgaatctgaacttaccgcaaccagcagtattgtggatcatttacgtctgcagttggtccaggcgatggcaatgatcaggttgatgatctctaaacgctggttcgagcctgcagatgtccggcagaaacattactcaacgctgctacaccagatccttgctattactgcgcaatggggcggagttcgtgccgatcagctctggtcacaactttgccagacaggtccgttccggaatgtcgatataaatgacttcaaaagtctgcttacacatatggggatatgtggcctgctcactcaacttgccagcggtgaaatagttgtcggggctgcgggggagaagttgactaatcactatacgttttatgccgtattcaatacacctgaggagtttcggattgttacgggaaaccgaacccttggcacagtgcctgtagactccccacttttgcctgagcagcacatcatcttcggcggacggcgctggaaagtgacagagatcgaggtcgaaaaaaaggttatctatgttgaggcgactaaaggcgggcagccgccactattcagtggtagcgggatgtctgttcatgatgttgttcgccaggagatgctcgctatctatagggaaaatgattaccgtatcgtggtaggcagcaagagagtcgattatgctgatgctgctgccagaagcctctttgcggaagccagtaataacttccaacgctacaatctacaaaatgactgttttattgccaccggtcagaactgctacgtgatcccgtggatgggggataaaattgtcaatacaattacgtccctgcttatacgttgcggctttaaagccagttcatttgcaggtgtgatagaggtagaggattcaaacgttgcctctgtccagcgtgcacttaagaaaatgttattgtcggggttaccttcagagtttgagcttgctgcagttgttcctgacaagtatctggataaatatgacgagtatttaccagagtctttgcttgcgaaaggatatggggcaaaggcgtatgatatggaaggaacgtgcatctggctgcagaaataccttcagtag

SEQ ID NO: 113036 - DNA, 2310 bp, Enterobacter aerogenes
atggagttctggatatttataattgctatttatttgatttatattatctttttcaaaaagaagaaacctaattccgcgggctcttatacttccgctcctgtgaaagcaccacctaaagaatggcttgctaacaacaaaaaaaatcaggcggtaatgcacaacgatgacagcgaagatgataatctggctacgtttacactaagtggcggacggaatgtcgaatacagcataactgccactcaacgccagaatctctcaaaaactaccggtgctttggctcgctggattttaccgggagaggtgatcacagccggtggggtagaggttaccggtggccacttctatcttggacagcgaatgaaacctgccgggcataactcaggtggttattatgatgatagtagcgaggcatcgctaattgacgacacgcttaagatataccccacaccttacatttacgaagatagttcattagggtactggcccagtttttcctcactttcacctgaagcacgtggcgcgtacctgagttggcttgcaagcgatagatgtgacacttcttgcccaattggttacgtttttatttatctgtatggtctggaaagacgggcacttgttgacagcaggaacaacagtatatctgacgatgagttctattctcttttcaaagagatctgccgtctcagatcggttttcaatgaaaaccgatctttccggaactactcgtcccagttacttgaagcgatgtccattcttcgcccgaacgaaaatcttgcagcagctctcggcaatgattcggagttcagcaatggcatgcagttcaggctaatccttgcaaagacagttgaggcaggagccccggtgccagttgatctggctctgacgtgggtgacaaaccatactgaatactcattgcgaacccccgcccgccgctgcgcgaaagaatttgctgcactttttaaacggcgttacacctttaaatacgatgaagggatggtcgtgaagccgaataaagcgcgtctgcgtttagattacacacctgcaagtcctagtttgcgaggtattcaacttcctgttcccgacttgcctgatccaagtgcattgaaaggccctgttcagaagcttatgacccttgccgatatatgcacagatgaactggatgcttacagtcgttaccttggtagaaaaggcacgtcagcaaatgataccgctgcaattttgttgctgccttcagaaatcgttaacgaaagcgcagaagaaatattaagtgcattcaaacgctgggctgatgacgcgatccttagtaaggctggggtagttacagttgctgactactggtcacatatgaatgctacctgtccggcgaagatcaataaaaaagaggccgacttgatgcaggcctttgctcagaaaatggggtactgtctggctcctgacccctattaccaccacgtaaaagcagatgtcgatggtgttcttgttttattccctgctggtgaaggtggacgcttctctccttctcctgaatttatcacagctgtattgacgctccgattaggagcggtagtcgccttgattgacaattctctcgatcaagccgaacagaaagtgctcgagaatgccataaacaacaatgccggcttcagcgatgatgaaaagcgctctctacacgcatatttaacgtggcagcttcataccccggcgaatatgacgggaatgaaaagccggattgaattacttggtgctgcggaaaaatcagctgtgggtaaggttatcgttagtgttgcttgctctgatggcagaattacacctgccgaagtcaaacagcttgagaagatttatacaagcctggggctggatccctcatccgtatcaagcaatatccatcagcattccgcaactgaaactgctctcgtttcatctgtaccagctaatcagtcgacggcagggtttacactggatgccaatgtacttgcccgccacgaatctgccactgatgatgttcgtaaattactgaactcgattttcactgaagaagaaccagaacaaccagaaagcgctccagcctcattaaccggggaaggggggcttgaccccgctcatagccaactttatcgcaggttgctggataaagaacaatggtccagaaaagaggcgacagagttgtgcagtaactggaacctaatgctcggcggtgcgcttgaggtgatcaatgattggtcctatgcggtggttgatgcaccagtgctggaagatactgatgatcatatttgggttgacctggaaatagccaaagaattagagggttag

SEQ ID NO: 113037 - DNA, 909 bp, Enterobacter aerogenes
atgaaacaactccctacatgcgctgaagcaaaagcccacgctaaatacctttcacggtcgctcaatatcaatctaagctacgcccgggatgcagtggcattacgctataactgccataactggtcggaactcagcacagtatttggtcagcttagcgataagtacatgtcgttctatggccttgccagccatgaagaaaagcgtgtttttagccagcttctggcaccgtatatcgcagaattgcaaaatgccattcatcctgaccgccatgtgccggaaagcttgatacgtaagatcgctgaaggccatatttcccgggtatccggtaaagtcatgtcggctgtaatacatgaatgcgaggattttcctcccacgacagttaaagaaatcattgaacttcttgaattttatgatgaaacggtcagccgggtattagcaggacatcacaaacagatcccgaccaataatccctggctggaaccttgggtatttggtgtgcgcttttatgcctattaccactttaatggcaagcaggtcaccatcttaagccgggagtgggatttagatattcatgatgcctacctgccacatgcctgtgacagagtattttcacgcccatggtttcaggactatatgatcggctatctggcctacctcgtgaagcaatttatcggattgggttacgacggtaccgttaagatttgttgcattaataattatagcgcgctggattaccatcagaaaaaagcagcccccaacggtcgtgtggggctcaatcacttatacagagagttacttaatcgcgggggagaagaaaagtggtcgtttagtcaaaatggtcataaacatgattttggtatcgagctcccgtttgccgcattgacctcattgaagaaaggaagaaaatga

SEQ ID NO: 113038 - DNA, 807 bp, Enterobacter aerogenes
atgaacaaagccggaaaaatagcgtatttatggctaaaggcacagagcgatagcgaaaaaattcgatttattgcacaagcgctggggagtgtcgaatatcaggcgtttataaaaaaatatcagcctgaaaagcagcatgcccacaatctacctttaagttttttgaaatggcatttgcctcagaaactagtggcctcctatcagggcaaggagatcggcctgagaagtgtaccggagacggttggcgataagctggaaattcggcatacctggatgccaacaggacagtttgctccttcgcgtcatggatcttacataccactgggaacccacgttgcttgtactgctctgatgcaaccctttttgcaaaaacagcaggaaaaatgtctggagcaggcctggcaggcagcacttcccctgcttatgtcacctgacatcagtaataacaatgaattcaccgctccatggcttgatttcgagccctatctcaatggtgaaacggatgtgtactttttactggatgaacctcaggaaagagtcaagattggaatatcaggtaatctcaggcaacgcgtggataccttgaagcaacaacataataccagcctgagtcttatctccataatacccgcagggggtattgagacagaatccgcattacatcttttctttaaaaaatacaggttggatcagaagggacttggtcgagagtggttttcttacacggatgaattatgcgaatttatcaataccctgaacacctatgcaatcaggagccactgtctaagagcttacggcattatctga

SEQ ID NO: 113039 - DNA, 4248 bp, Enterobacter aerogenes
atggcagataaaagaatatcaaaaagcactttgtcaatgtttctaagatcaaagtgtgacagaagtttatttttatctcttcaccaagattctgagttggctactcacaacatgccggttcccttgcaagctcgacctggagttggcgttcttcaaacagccggtcgtaattttgaggatcagcgtaacgaccaactgattcgagcttttggtagtagagttatctaccagccagataaattaggtacaaataaaccggtcaaagcttctctttctgatttattaaaaaaagtcaactctcttccgtctgtcattctccaaggaaaatttgagccaatagatttccaaagtgactttctaaataacattggacttaattcatctcactcctcacttattcctcctatagcagggcttataccagatattattttagtaagagagcccagagaggacgacgaggaaataaaaccaaatggaagccggaatgttatacaaactgcaacagaaaaacgttttgccctaagcattattgatattaaacatacaagtgaggcaaacccaagttattctgctgaggttgcattgtatgcgctactcctttcaaattggattattaaacaagggttgcagaataaatatttcgtcaccattcgtagttatctatggacaagattcaagcaaggacagtccatacttgatacgctattattaaaccctaacaacatagcacctgagcaatacatcaacgctcttatttcagatagtgaagatgcgaatcttcgattttatctacctacagtgttacatttttttcgcgaagatttaccgcgagtaatttctattggtgatagttctaataaaggctgggaaaatctggaatggcatgttgacagccgatgcagtgcctgtgactggctcggaaatgaagtatgggcaaatacaaaagataaaaccagaatttctgcctttcccaatcactactgcttcacagcagccaaaattaccggccacctaagccaaatcgcaggaatgacacgaggggcaagaaaaacacttaatctgaacagaataaattgcacaaacgatgtcgctacattgcctccttcagatattgcttttcaatctcatagtcacttaaagaaagagcgcagccgaatcccagcaagagcaaatgctcttttatcatcgaatacaaatgttgatacttcagctgtacttgctagcttagctccatggccacaactacattcatgtatagccgttaactttgatccaagcgccggattattaacgggattatcaattacaggaaaaacaactgcttatataaaaggtcaaagtccacgatacttcccaactaaatcgtttgttgtggatcagaaaaacttagacgatgaatggaacgctctcgaaggtttattatctacactatctgatatgattgatcaatccgaaaaatatattcgagaagcaggaaaaacccctctcacagctcaaattgcattttgggaaaaacgtcagtttgaggagttatgtaatgcgatggggagacatctaccacgcgtacttggtctaactgatagaaaaacaaaagcattagcatggttattcccagcggatgaacttatagaaaaaccggatggagcagttagcccatgtgtagtattcattgatgacattattaagagagttgttttctctccatcacctcatgtcatcactttatttgacacagcaacaaactattacttcgggaactttcctgtcgtacaaaaagatgcttattatcgtgagtttcttactaatggtataccccgtgaaagaatatatgaaatatggagtaatgcggccacaataaaaagaggaagtgtcatatctccaagaaatactgttattcaagaatttgcaaacgctttagaaaaacaatgtaaagcgttaaacagtattgttgataaattacgatttgacttcagcgggcatttaaaggcaaatgctcctaaactctctctttctatccccagaggtacaacaaatgttgcttttgactccaaactatgggtttggtgggatgaattacaatatcagacaaaaaaattagagtcacatcagagaatcgctcttgacgccgagacattagaggcaaactacgatgctattagaattacaaatggaagaccaacaggtcaacctaacgagtatgtattcgatgtactaactggttctacagaggctaaacttgatgacaatgatggttttttgattcttggaaaagaaggattccctggttttccattacaacgtgcattagatatcttaaataagggtattaactattctttaattcaagatgcattgttgaccactcccttatggtcatcacttagcgtaacattaatttcattcgatagaaacactcgtaaggcagtactatcaatatttaatagaaagcaaactaatttctttcagttacttgtcgcaaattcgcctatagatttcatgaatgatgtttttataacaaaagggcaatcatcatttaaatggtatgaaaaagtaaaaaatatcttaagcttagttggaaatccatcaatagctgttgcagatactaacgctgcacatgcaatgggggctaaacctgcaaaatctggtaaagatgttgtgactcctcttgcccgcgtattatgggaagctgataccctttataataattcaataatttcaacagcagatgctaaatctattgcctcatatgcgaaagcaaaatttggtttgaatgatagccaaaaggctgctatatcacatgcttcagaaaaaggattaacgctaatatggggaccacctggaacgggcaaaactcaaacattagcagcatgtattcatagcatggtctatcatgctatgaataccaacgcccccttaaaagtcttagtaacaggtccaacatataaagcagttgaagaacttatagaaagggtaattaactcactaagtgcggaaaaatcgtgtaacactgagatattcgtaggatattcacaatctcactccccaaaaaacatctcatgttgcacaacacacttaaaagtgtcttcatttaaactctcaaatagcaataatgaaacagctgattgcattgcaagtttaaggaatacaaaatctactacaatagtcgcaacatctactatgcaagcttataaacttgccgaatggatgcatggttcttccgtagctcctatttttgacattttaatcatagatgaaagctcccaagttcaagttactacagctatttctccgttagctacaataaaagatagctcacgtgttattatcgcgggtgatcatttacagatgccgccaatattagccttagaaccaccaaaaggatctgaatatttagtcagcagcattcaaaaatatctcatggaacgatcctttggcagtaaaatattgccatgtccattagaagaaaattatcgttctgccgaagatattgttgcgtatgcaagaactataggttacagatctactcttaaagcatcaaatgagaaaacaagccttcatttcttgtctaaatatccgaaaccactatcaaactatcctagcacccttccctggtctactttatggtctgatattctagatgaaaacaaaaagatattaacattattacatgaagatgaactatcatctcagagtaacattttcgaagcgaagattgtttctgctttaacttggatattaagtcagacagttagtaataacttgaacggcagggaagcatgtgttcatgatacgccgaccgccgaacacttctggcaaaaatgcattggtatagtgacgccacatagagcccaacgagcactggtaataagagagctaaaatctatttttcctgcagatcaaggagaacttattgatagcgcagtggatactgtagaaaaatttcaaggtggtgaaagacatacgatcattgtaacatttggagtgggtgatgcagatgtcatcatcggtgaagagacatttttaatgcaactagaacgtacaaatgttgctatatcgcgtgcaatggccaagtgtattgtagttatgcctcagactcttgcagggcatgtgccccaagataaaaaagcacttgagacagcccatgcaataaaagactatgttgatgaattctgtaatcaagaaatccttgcacagattcaatatggctcagaagttaggaatgctaaattgcgatatcatgtttag

SEQ ID NO: 113040 - DNA, 1125 bp, Enterobacter aerogenes
atggcccttgcataccgtaaagaaaatgcgctgaatgctatttgcccatattttactatgtttccgttggaatatcctaataaaataataaagaaatataaaaaacaacgcccggtggttttagatccgttttgcgggagaggtacaacgcttttttcagctcgtacatttggagtttctgcatgggggattgattcatcacccgttgcagtagctgttgcaagagcgaaacttgctagttgtgatcccatgtcacctattgagcttgcagaaaatattctttctaaagttgatccaaataaaatacctaatactccattttttagggttgcatatcattctgatactctaagagatatttgcgcattaagagaaggactatctaaattaccattagatacagacagttccgttatacttagagctgcaatattaggggcattgcatggccctcttgcaagaaatatagataatatgagttatttttcaaatcaaatgcctcgaacttatgcttctaaaccagattatgctgtaaggttttggagtgagcgaggaatgagtccacctaaagtcgatgttttgcgagtccttcgtcgtaaaattgaacgtcttgtcggtctttcaagcgggattccggacacatttaaacaagtgatccaaggagactcaaggtctgctgatgtttttcagtctttgaatatgcgtccttcacttataattacctctcctccttattatggtatgaagacctatgtacaagatcagtggctaaggaattggtttttaggtggtcctgaatccgtagattacagttctggatcacaattagatcattctggtaaggatacattttcaaaatcacttggtgaggtttggcgtaacattgctaaatgtgcttctgaaagtaatgatctgcatatgtatgttagatttggaattattccatctgcatcagtgaatgctaaagagatatttagaaattcactagaagaatcgaacattctatggcgattgatatctgttcgggctgctgatagtgctgaagcaggtaagcggcaagcccatcaaatgagaacaggatcttctgccgctatagaatatgacttccatgtcgagcgaatttag

SEQ ID NO: 113041 - DNA, 324 bp, Enterobacter aerogenes; identical to SEQ ID NO: 100776

SEQ ID NO: 113042 - DNA, 1326 bp, Enterobacter aerogenes
atgagttctctgtatcagtcgatgattgccgtgatcgagcaatctattactccgctggcaggacgccttgggcaacagaaatatgttatcgccatccgcgatggctttaccgccgcattgccgttcatgatcatcggctctttcatgctggtatttatctttccgcctttctcgccggagaccactaacggctttgcccgcggctggctggacttttcccagcagtaccgtgaacagctgatgctgccgtttaatctcagcatgggcgtcatgaccttctttatctcggtcggcatcggcgccagcctcggacgccagttccagctcgatccggtcatgtccggcctgctggcgtttatggccttcctgctggtcgccgcgccctatgctgatggcaaaatttctactcagtatttatccggccagggcattttcaccgcgctgatcaccgccatctactccacccgcgtttacgcctggcttaagcaaaacaacgtgaccattcgcctgccgaaagaggtgccgaccggcgtcgcccgttcgtttgagatcctcattccggtactggtggtcatcggtactctgcatccgctcaacctgttcattgaggcgcaaaccggcatgatcctgccgcaggcgattatgcatctgctggaaccgctggtctccgcctccgattcgctgccggcgattctgctgtcggtgctgatgtgccagattttctggttcgccggtattcacggctcgcttatcgttaccggcattatgaacccgttctggatggccaacctgtcagcaaaccaggcggcgctggcggccggcgcggcgctgccgcacgtctacctgcagggcttctgggatcactatttgctgattggcggcgtcggttcgaccctaccgctggccttcctgctgctgcgtagccgggtcacgcatctgcggactatcggcaaaatgggtatcgtgccgagcttctttaatatcaacgaaccgatactgttcggcgcgccgatcatcatgaacccaatgatgtttatccccttcgtctgcgtgccgatggtcaacgcggtgctggcttacggcgcaacccaccttggctggctgagccaggtggtgtcgctgacgccgtggacgacgcccgcgccgattggcgcctcgtgggcggctaactggactttaagcccggtggtgatgtgcgttatctgcatggtgatgtcggcagtgatttatctgccattcctgcgcgcctatgagcgttcattaataaagaatgaagtcgaaaaggcgaaaagcgttgcaccggtcgccggggccgttagccagtaa

SEQ ID NO: 113043 - DNA, 315 bp, Enterobacter aerogenes; identical to SEQ ID NO: 87490

SEQ ID NO: 113044 - DNA, 951 bp, Enterobacter aerogenes
atgtcgacaatcaatgatgtatcacggttagccggggtatcgaaagccacggtttcgcgcgtgctgagcggttcgcgcggggtaaaagaggccagccgccaggcggtgcttcaggcggcggaaacgctgaactaccggcccaatatgattgcccaatccttactgagccagtcgacgggctgtatcggcgtgatttgcgcgcaggacaacatcaatcagaccaccagctatctctacgccctggaaaaacagctcagccagcatcagaagcatctactgctgcgcttcgccaataaccgcggcgacgtattaagcgcgctggatgaactcacctgtggcctgtgcgatgacgtgctgatcatcggcgcgcgctttccgctgcagatcgagcgccccgatgtggtgctgattgattgtctggaaagcgatggcgagaacagtattcagtttgatcacgccttcgccgcggaaaccgcctgtcattatctgattaatcaggggcggcggcagattgcgctgatccatccgcaggggagcggctttgccgatcaggtgctgctgggctataagcatgcgctggagaagaacttcctgccgtttaatcgcaacctggtcttcctggactgcgcctcgtcgtcggtggcggtgcaggagttgatgaataacgccactaccctgaactttaatgcgctgttggtgagcgatgaactgcaggcgcagcgggtagtgccgcagctgcaggcgtttaaccgcgcggtgccggaaaaagtaatggtcttcagtctcgcgggttcgctgcagatgccgggtattccgaccatcccggcgattgagtattcgatggatgcgatggcttcgcggatcgtcaactggctgatcgggaaaagcccgcagcccggcggcagcctgctgcgcggcgacttaattattcccgagcgttgggggaaataa

SEQ ID NO: 113045 - DNA, 291 bp, Enterobacter aerogenes
atgaaagcgtgttggatgttgtgtctggttactgcccttagcgccagcgcggcgtgggccgaatcgccgctgcaaagcctgcagtttgagcagcaaaaacagcaggtgttgaaagcggtgaaggaaaaatgcgccccggcgagcaccctcagcgataccgatttcgccaataaaatcctcgcctcgaaagacaaccagagttacgttcgcgaagcgacgctggcgaaagagcgcaataatcaaaaaggctatctggccgccattgataaaattcgctgcccggagaaataa

SEQ ID NO: 113046 - DNA, 903 bp, Enterobacter aerogenes
atgggttccagcaaaagagggatgttgaacgtattgatcgccgccgtcctgtggggcagttccggggtctgcgcgcagtacattatgcagcaaagtcagatgtcatcgccctatctgaccatgatccgcctgctgttcgccgggctgattttgctgatgctcgccttcgttcacggcgacaaaattttccgcgttatgcaaaaccgcaaagatgccctcagcctgctgtttttctcgctggtcggcgcgttaaccgtgcagtacaccttcctgatgactatcgagaagtcgaacgccgccaccgccacggtgctacagtttttgtcgccgacgattatcgtcgcctggttcgcgctggcgcgtaaggcgcggcccagtccctttgtgctactggcgattggcacctcgcttgccggcaccttcctgctggtcacccacggcaacccaacctcgctctccatctcgccggcggcgctgttctgggggatcgcctcagccttcgcggcggcgttttataccacctatccctcaacgcttatcgcccgctacggcacgctgccgatcgtcggctggagcatgctgattggcggggcgatgctgttgccgttttatggcagccagagcgcgaactttgtagtgaacggccgtcttctgctcgcgtttttctatctcgtggtgatcggcacctcgctgaccttcagcctgtatctcaacggcgctcagaaaattggcggcgcgaaagccgggatcctcagctgcgccgagccgctgagcagcgccctgctctctctattgctgttgggcattacctttactctgccggactggctggggacgctgttgattctctcttcggtcattcttatcgcggtggattcccggcggcgggtacgcgcggcgtaa

SEQ ID NO: 113047 - DNA, 906 bp, Enterobacter aerogenes
atggatagtttgagccatctgttgacgctgctggccccgcgttgcgaagtgaatctgcattgccgtttcggcggccgctggcaggccggacacgatcaaatgcgagcgggcgtggtgccgtggcactttgtgttgcgcggcgaagggcgcctaaccgtcggtcatcaaacccgccacatgcgcgccggcgacgtgatcctgctgccgcacggttcgccgcatctgatggagagcctggtggagtggggtcaggtactgcccgtcgcccaccgctttaacggcacgctgacggaagtccgcaccgccgaagagagcgatgcgctggagatgctgtgcggcgagttttacttcggcccgcacgtcaactggctgttcgccgaagagtcggcgctgatccatttacataccgatgagcgcgaagattgcccggaactggatattttgcttaacgtgctggtacgcgaaagcctggcggaacatcccggcggcagcgctatcgtacgcagtcttggcgatacgctgctggtactgctgttacgtaccctgctcggcgcgcaggagccgccgggcggcctgttgcgcctgatgagcgatgcgcggctgatgccggccgttctcgcggtgctggccgcgccggaacagccttggactatcgagagcatggcggcgcgggcgtttttatcgcgcgccaccttcgcccgccattttgcccgcgtctatcatctgacgccgcaggcgtggctgtcgcaactgcggatggcgatggccgctcgcctgctgcatctcgatcgccaggcgcggctggaagtgattgccgaacgctgcggttttcaatcacaggcttcgtttgcgaaaacctttaaaaaacactacggcatgacgccgggcgagtggcgtcggcagtaa

SEQ ID NO: 113048 - DNA, 537 bp, Enterobacter aerogenes
atgagccgtttagccgatatccgtgaacaagatgccaccggtaaagccgccgatattttcgccggaattaaaaaagcgatgggtaaagtgccgaatgcctatctgaccatcggcggccactcgccggcggcgctgcagcaggcgctggcgcacaacgcgatgctgcataaaagcagccttagcgcggaggagctggaggcgattaatttatcggtcagcgaagcgaccggctgtgattactgcctggccgcccataccctgatggccaaaaaagcgggcttcagcggcgagcaaatccacgccctgcgccgcggcgagtatacggaagatgcgcgcctggacgcgctggtgaaattcgcccaaaccctggtgaccaccaccggtacgctgccggaagcggacgtcgccgcgctgcgtcacgccggttttagcgaccagcaggtgattgagatcatcagcgccgtcagcgccatcttgttcaccaacatggtgaaccgggttaacgacacggtagtggacttcccgaaagccgattaa

SEQ ID NO: 113049 - DNA, 471 bp, Enterobacter aerogenes; identical to SEQ ID NO: 108546

SEQ ID NO: 113050 - DNA, 630 bp, Enterobacter aerogenes
atggcagcaacctttctcgatatcgctatcaccccggatgtcatggatgtgcaacatgaaatgggcagcgaccagctgtggcaaacgccgcacagccgccgtcaggcggatcgcttcggcgctagcgaagaggggatgatcgctacccgcgacagtttttatctggcgacggtgtcgcaaagcggctggccctacattcagcatcgcggcggcccgccgggttttctgcgcctgctggatgacaccacgctggccatggccgatttcggcggtaatcggcagtacattaccaccggcaacctgcgcggcagcgaccgggcctgcctctttttgatggattacccgcgccgtgccaggctgaaaatctacgccaccgtcgaggtgctggcggcggaagagcagcctgagctgctggcattagtgacgccggcaaactatcgcgcccgcatcgaacgcctgtttcgttttcatctgcaggcttttgactggaactgcccgcagcacattacgccgcgctacagcgcacagcaggtcgcggaatacagccagagcctgcaagagcgtattcatgaactggagcaggagaatcagcgcctgcagcaacaattatccccaaaaggagagttttga

SEQ ID NO: 113051 - DNA, 915 bp, Enterobacter aerogenes
atggaccgattaagcgctatggcgctgctggtgaaagtcactgaactgggcagtatgtcggcggcggcgcgggcgatgaatatgccgctaacgaccgtgagccgtaatatcggcgagctggagagcgcgctgggagtccgtttattgacgcgcaccacccgtaaactcaccctcactgatgccggcgtcgattatgtcgccgccgcgcggcggatcctcgaagaggtggaaaacgccgaacgccgggcaatgggtgaataccaggagccgaagggcgagctggtgatctccgcgccgacgatgtttggtcgccagcacgttctgccaatcattagtgaatttatctcccgttatccgcaaattcgcgtacgtttgttacttagcgacagtaatgccgatctggtcgacgaccatatcgatctggcggtacggattggcgaactggctgatagcagcatggtggcgacccggctcggcgcgatgcgcattgtcgcctgcgcccatcccgcgctgttggcgaaatacggcgaaccgcagcggccgcgcgatctggcggcgctgccgatcatccgtattgaatcgccgatgccctatcgcggctggcgctttcgcgccgttgagcgcgaggaccagctcattcatctgccgccggtgttagccgtcaccacgccggagagcgccgccgatgccgcgcggctgggcgttggcgtggcccgcttgctgcactaccaggcgctggatggcctgcgctgcggggaactgcgtctgctgctggaaagcgtcgagccggagcccgcgccggttcatttgttatataccgcgcgggagctggctccgcttaagctacggaaatttatcgattttgccgcgccggcgctgcgccagtccttgctacgcattgccggggccgtttaa

SEQ ID NO: 113052 - DNA, 1494 bp, Enterobacter aerogenes
atgacatctgaagtcgcaagccaaccggcgccgtcaatccgcctgctgttcagcgccctgttgctggtgatgctgctgtcggcgctggaccagaccatcgtctccaccgccttgcctactatcgttggcgagctcggcgggctggataaactctcgtgggtggtcaccgcctatatcctcagctcgaccatcgtggtgccgctgtacggtaaattcggcgatctgttcgggcgtaaaatcgtgctgcaggtggcgatcgtgctgtttcttgccggttccgcgctctgcgggctggcgcaaaacatgacgcaattggtactgatgcgcgcgctacaggggctcggcggcggcggcctgatggtgatcagcatggcggcggtcgccgacgttatcccaccagccaaccgcggacgctatcaggggctgttcggcggcgtcttcggcctggcgacggttatcggcccgctaatcggcggtttcctggtacagcacgcctcgtggcgctggattttctatatcaacctgccgctgggtctgttcgcgttgctggtcatcggcgcggtattccacagcagcaacaaacgtagccagcatcagattgactggctgggggcgatttacctcagcatggcgctgttatgcatcatcctgtttacctcggaaggcggcagcgtccatgcgtggaatgacccgcagctgtggtgcattctggccttcggcatcgtggggatcatcggttttatctacgaagaacggatcgccgccgagccgattattccgctgtcgctattccgcaatcgcagcttcctgctgtgtagtctgattggctttgttatcggcatgtcgctgttcggttcggtcactttcctgccgctctatctgcaggtggtgaaagaggcgacgccaaccgaggccgggttacagttaatcccgctgatgggcggcctgttgctgacctcgatcatcagcggccgggtgattagccacaccgggaaataccggattttcccgattatcggtaccctgctcggcgtgaccggcatggtgctgctgacccgcatcaccatacattcgccaatgtggcagttatacctgtttaccggcgtgctcggtgcgggcctggggctggtgatgcaggtactggtgctggcggtacagaacgcgatgccggcgcagatgtacggcgtcgccacttccggcgtgaccctgttccgctcgattggcggctccatcggcgtggcattgttcggcgcggtctttacccatgtgctgcaaaataacctgcagaaactgctgccggagggcgcggtgctgccgccagccatgaacccggtggcggtacagcatctgccagcggcgatccgtctcgattatctcgacgccttcggcgcggcgatccatgcggcattcctgatggcggcctgcattatggccgtcgcgtttgtcctttcctggctattgaaggaggcgccgctgaaaaccgcggcgcattaa

SEQ ID NO: 113053 - DNA, 648 bp, Enterobacter aerogenes
atgccagcacaaaaagctaatgaagcgccgcgtcgccccggtcggccacgcggtaaaaaaccgggaaccgctaaccgcgagcagttgatagatatcgccctggcgctgtttgctcgtcacggcgcggcccgcgtgtcgctcaatgccattgccaaagaggccggggtgacgccggcgatgctgaattactattttacgtcgcgggaagcgctgattgagaatttgctggaagagcgctttatgccgctgcgcaacgatatcagccgcattttcgtcgaccatccgcaggatccggtaacggcgttgacgatgatggttgagacgctggcggacatggcggagcaaaatgcctggttcgcgccgctgtggatgcaggagatcatcggcgagatgccgatgctgcgccagcacatggatgcgcgcttcggcgaggagcgttttcaggtgatgctggagacggttcgccgctggcagcaggaggggaaaattaacccggcgctggcgccggaactgctgtttaccacggtgattagcctggtgctggtgccgttctcgcgcatccatagcgacccgcgcttacaggcggtaacccggcagaccattgttagccacgcgctggcgttaatgggagacggggtcggcggttaa

SEQ ID NO: 113054 - DNA, 417 bp, Enterobacter aerogenes
atggctctaataattacaaaaagcattaatcccgtcgatcaacaagaattgtttgccggcctacggcagtataatcagcagtatctcgacgcagatcagtttggcgatctgggcatttactcccgcgatgagcaagcggtgatgcgcggcgggcttatcgccaaacgcaaaggcaactggctgtgtatcgaatacctgtgggtgagcgaagcgacgcgcggcaacggtctgggccgcgagcttatgcaggaagcggaacggcaggcgcaggcgttgggctgcagccatctcctggtcgataccttcagcttccaggcgctgccattttatcagaaattaggctatcagttgcagatgtcgctgcccgatttcccgcacgcgggtatgcaacgccactatttatcgaagacgctgtaa

SEQ ID NO: 113055 - DNA, 1125 bp, Enterobacter aerogenes
atgaaacacatcatagcccccatcgcgacagcattatttctcctgagcggatgcgataatgtgcagacaactgcgccgcaacaacccacgccggaggtgggaattgttacgctgcaagcccagccggtgccggtggtcagccaactgactggccgcactaccgcctcgctcagcgctgaagtgcgcccgcaggtcggcggtatcattcagaagcgcctgtttaccgaaggcgatatggtgaaggccgggcaggccctttaccagatcgatccctccagttatcgcgccacctggaacgaagcggcggccgcgttgaagcaggcgcaggcgctggtggtctctgattgccagaaagcccagcgctacgcgtcgttggttagagataacggcgtctctcgccaggatgccgacgacgctgcctccgcctgcgcccaggacaaggccagtgtggagtcgaaaaaagcggcgctcgagagcgcgcgcatcaacctgaactggaccaccgtcaccgcgccgattgccgggcgcatcggcatctcctcggttacgccgggagcgctggtctctgccgaccaggataccgcgctggcgacgatccgcggcctcgacaccatgtatgtcgatctgacgcgatccagtgtcgatctcctgcgtttacgcaggcagagcctggccagcaacagcgatactctcagcgtgacgttaacccttgaagatggcagtacctatcccgaaaaagggcgtctggcgctcaccgaagtcgccgtcgatgaatccactggctcggtgactctgcgcgccatcttccccaacccgcagcacgtcctgctgccgggaatgtttgtccgcgcgcgtatcgatgaaggcatcatgaacgacgcgatcctcgcgccgcagcagggtatcacccgcgatgccaaaggcgacgccacggcgctggttgtcgatgccgacaacaacgttgagcagcgtaccgtgcaaaccggcgatacctacggcgataaatggctggtgctgagcggtctgaaagcgggcgacaagctgattgtcgaaggcaccggtaaagtgtcccccggacaagcggtgaaggccgttgccgtcaaaaataacggaggcaatgcctga

SEQ ID NO: 113056 - DNA, 3108 bp, Enterobacter aerogenes
atgttctcccgtttcttcgtgcgtcgcccggtctttgcctgggtgatcgctatccttatcatgcttgccggggcgctggcgatccgcacgctgccggtgggacaatatccggacgtcgccccgccagcagtaaaaatatccgcgacctatactggagcttccgcagaaaccctggaaaacagcgtcacccaggttatcgagcagcaactcaccgggctggataacttactttatttcacctccaccagcagttcggatggtacggtaagtattaccgtcacctttgagcagggaaccgatccggataccgctcaggtacaggtgcaaaacaaagtgcagcaggcggaatcgcgtctgccgagtgaagtacagcaatctggcgtaacggtagaaaaatcgcaaagcagcttcctgttaatcctcgcggtgtatgacaaaaccaaccgctccaccagttctgatatctccgactggctggtcagcaatatgcaggacccgctggcgcgcgtggagggcgtcggcagcctgcaggtattcggcgccgaatacgcgatgcgcatctggatggatccgaccaaactcgcctcttattcgttgatgccttccgatgtacagtcggcgattgaggcgcagaacgtgcaggtctccgcgggtaaaatcggcgcgctaccgtcgtccaatgcccagcaattgaccgctaccgtgcgcgcgcagtcgcggctgcaaactcctgaccagttcaaagcgatcattgtaaagagccagtccgacgggtcggtggtgcgcctgagcgatgtcgcgcgggtggagatgggcagcgaggattacaccgctaccgctaatctgaacggccaccccgccgccgggattgcggtgatgatggcccccggcgccaacgcgctggataccgcgacgctggtgaaaagcaaaatcgctgaattccagcgtcagatgccgcagggctacgatatcgcctacccgaaagacagcaccgagttcatcaaaatctcggtcgaggacgtcattcagaccctgtttgaggcgattatcctcgtggtctgcgtaatgtatctgttcctgcagaacttccgcgcgacgctcattccggcggtagcggtaccggtcgtgttacttggcacctttggggtgctggcgctgttcggctactcgattaacaccctgacgctgttcgccatggtgctggcgatcggcctgctggtggatgataccattgtggtggtggaaaacgtcgaacggattatgcgcgacgaagggctgcccgcccgcgaagccaccgaaaaatcgatgggcgaaatctccggcgcgctggtggcgatcgccctggtgctgtcggcggtattcctgccaatggcctttttcggcggttcgaccggggtaatctatcgccagttctcggtgacgattatctcggcgatgatgctgtcggtggtcgtagcgttaaccctcactccggcgctgtgcggcgcgctgctaagccactccaaacctcatgacaaaggtttcttcggcgcctttaatcgcctgtgggggcgtacggaagatggctaccagcgtcgcgtactcggcggcttacgccgcggcgcggtgatgatgggcgcttacgccttgatttgcggggcgatggcgttggcgatgtggaaactgccgggcagctttctgccggtggaggatcagggcgaaatcatggtccagtacaccttgcctgccggggcgacggcggtgcgtaccgccgaggtgcgccgtcaggtgaccgactggttcctcaccaaagagaaagccaataccgaggttatcttcaccgtcgacggcttcagtttcagcggcagcggtcagaacgccggaatggccttcgtctcattgaaaaactggtcgcagcgcaaaggcgacgaaaataccgcgcaagccattgcgctgcgcgccaacaaagagctgggcgcgatccgcgacgccaccctgttcgccatgacgccgccatcggtggacggccttgggcaaagtaacggcttcactttcgagctgatggccagcgggggtaccgatcgcgatagcctgatgaagctgcgcagccaactgctggccgcagccaatcagagcggcgaactgcagtcggttcgcgccaacgatctgccacaaatgccacagctgcaggtggatatcgataacaataaagccgtctcgctggggctgtcgctcagcgacgtgaccgatacgctctccagcgcctggggcggcacgtacgtcaacgactttatcgatcgcggccgggtgaaaaaggtctatatccagggcgagagcgacgcgcgcgccgtgccgtccgatcttggtaaatggtttgtccgcggcagcgataacagcatgacgccgttcaccgcgttcgccaccacccattgggaatatggcccggaaagcctggtacgctacaacggctcggccgcctttgagatccagggggaaaacgccgcgggcttcagctcaggtgcggcaatggacaaaatggaaaaactggccgatagcctgccggcgggttccacctgggcatggagcggtatttcgctacaggaaaaactggccagcggccaggcgatgagcctgtacgccatttcgattctggtggtgttcctgtgcctggcggcgctgtatgaaagctggtcggtgccgttctcggtgatcatggtcatcccgttaggcctgcttggcgcggcgctggcggccacgctgcgcggcttaagtaacgacgtctatttccaggtggcgctgttgacgactattggcctgtcgtcgaagaacgccatccttatcgttgaattcgctgaatccgcggtggatgagggctattcgctctcgcgggcggcgatccgcgccgcgcagacccgtctgcgcccgattgtcatgacctcgctggcatttatcgccggagtactgccgcttgccattgctaccggcgccggggccaacagccgcgtggcgattggtaccgggattatcggcggcaccctgacggcgacgctgctggcggtgttcttcgtcccgctgttctttgtgctggtgaagcgtctctttacccgcccacgtccttctcaggagtaa

SEQ ID NO: 113057 - DNA, 1365 bp, Enterobacter aerogenes
atgtttcgtttgagtttaatgtttatcgcgctcctgaccgcgggctgtgtctctcttgacccgcactacgagcgcccggccgcgccggtgccggcgacccttcccggcgcgcacggcgaatcaacggcggtggtcggcgactggcaaaaagtggtcaatgatgcgcggttaaaaaaagtggtcagcatcgcgcttaatagcaaccgcgatgtgcaaaaggcattagccgatattgaagccgctcgcgcccagtatggcgaaacgcgcgcatcgttgtttcccaccgtcgatgccgagctgagccatacccgcagcaaaacgatcgccagcggcctaagttctacctcgcaggctgacggcgcggtctcgagcttcgaactggacttgttcggcaagaaccagagcctgtcgcgcgcagcgcgagaaagctggcttgccagcgaattcaccgcacaaaatacccgactgacgatgattgccgatttgaccaccgcctgggtgacgctggcgacggataatagcaatctggcgctggcgcagcagacgatggatagcgcggagaactcgcgtaaaatcgtcgctcgccagatggcggtgggcaccgcctccgccggtgatttaagttcggcggaaagcgtctatcagcaggcgcgagccagcgtcgccagctatcgtacgctggtggcgcaggataaaaacgccattaacctactggcgggggaaaccgtaccggagagcctgctgcccggtacgctggagagcctgggggataacagcatcgcgctggtgccggcgggggtatcatcatcggtactgttgcgccggccggatattcaggaggcggaacataatctcaagagcgctaatgccgatatcggtgcggcgcgagcgaactttttcccgtccatttcgctgaccgccagcgctggggtcggcagcgattcgctatcgtcgctgtttagccatggcatgcaggtgtggtcgttcgccccgtccatcagcctgccgctgttcaccggcggcagtaatctggcgcagctacgctatgcgcaggctgagaaaaaggggctgattgccacctacgagaaatccattcagagcgcctttaaggacgttgccgatgcgctggcgcgccgggaaacgctgagtgaacagctcgatgcccagcagcagtatgttgccgccgagcagaagtcgctggatatcgcgatgaagagttatcaggccggggtcggcgactatctgtcggtgctgaccgcccagcggacgctgtggtcggcgaaggcgacgctgctgtcgctgcagcagaccgacctcaataaccgcattacgctctggcaatcgctgggcggcggcgccagttaa

SEQ ID NO: 113058 - DNA, 903 bp, Enterobacter aerogenes
atgagtatcgacctgagcaaactgctgaccgagcgacgcaacgccaacagcgccaacattgacaccctctccactgtcgacatgctgacggtgataaaccaggaagatcagcaagtggcgcaggcgataacgccttacttgccgcagatagcggaagtcgtggataaagtggcggcggcgctgcgggccgggggacggctgatttacatcggcgccggcacgtcggggcgtttgggtattctggacgccagcgaatgcccgccgacctttggcacccgtccggagcaggtggtggggattatcgccggcggacataaagcgattctgagcgccgtggaaaacgtggaagacaataaagcgcaaggggcgatggatctgcaaaacctaaacttcagcaaccgtgatgtgctggtggggctggcggccagcgggcgtacgccgtacgtcattggcgcgatggaatacgcccatagccaaaatgcgtttgtcgctatcgtcagctgtaacccgcacggtgaaatggcgcagctggcggacgtggcgattaccccggtggtcggcccggaagtggttaccggatcgacccgcctgaaagccggcaccgcgcagaagctggtgctaaacatgatctccaccggggcgatgatccgcatcggcaaggtctacagcaacctgatggtggatgtcgaagcgaccaacgccaagctgattgagcgccaggtgtctatcgtgatggaagcgaccgactgcgatcgcgccaccgcgcagaatgcgctggatgcctgtggccgccactgtaagacggcgattgtgatggtgttggcagacttaagcgccgcagaagcgcagtcgctgctggcgaaaaacaacggttatatccgcaaggcgctaagcaacacctga

SEQ ID NO: 113059 - DNA, 1434 bp, Enterobacter aerogenes
atggcaaaaataactaaagagatgatagcgcggatcctggctcacgtcggcggggccgcaaacgtggcgcaggcgggtaactgcatgacgcgcctgcgcttgaccctgcgcgatgaaagcctggccgatagcgccgccattcgccagattgacggcgtgatgggggttatcgtcagcgatgaacagttccaggtggtattagggcccggcaaggcgcagaccgccgcggaaatgatgaacggcctgatggaagcggcgccgcaggcagccgcctcgctggcggatgtggcagcggagaaaaagcaggcgttaaagagcaagcagaccagcggtgtacagaagtttctcgcgaagttcgccactatttttacgccgctgatccccggctttatcgccgtcgggctgttgttaggcttcgccacgctggcggaacaaatcttcgtgctggagaacgcgcatcctaacgccagtctggtggcgctgattggttatatgaaggtattcagcaaagggatgtttaccttcctgagtatcctgattggctataacgctcagaaagccttcggcggttcgggcgtgaacggcgcgattatcgcctcgctgttcgtgctgggctacaacccggaagcgaccagcggattctacgccggaatttcgaccttcttcggccatggtatcgacccgcgcggcaatattatcggcgtgctaatcgcctcgattcttggcgcgtgggtggagcgtcaggtgcggcggataatgcccgctaacctcgatatgatccttacctcggcggtgacgctgctgattatgggcgcggtgacctttacggtgattatgccgattggcggctggctgtttaccggtatgtcgtggctgttcctgcatcttaacggcaatccgtttggctcggcggtgctggccgggctgttcctgctggcggtgatgttcggcgtgcatcaggggtttgtgccggtctattttgcgctggtggatgcgcagggctttaactcgctgtttcctatcctggcgatggccggggccgggcaggtgggtgcggcgctggcgctgttctggcgcgcgaagcgcgattcgctgctgcgaacccaaatcaaaggggcgattattccgggcttcctcggtattggcgaaccgctgatttacggcgtgaccttgccgcgcatgaaaccgtttatcaccgcctgtatcggcggcgcctgcggcggtttcttcgtgggcctgattgcctggctggggctgccggtcggcctgaacacggtgttcggcccgtccgggctggtggcgctgccgctgatgacctccggtagcggaatttatgccgggatggcggtgtacgccggcggtctggcggtttcgtatttatgcggttttgtcctcacctggctgttcgccagtaaaaacgttgacctgagttaa

SEQ ID NO: 113060 - DNA, 813 bp, Enterobacter aerogenes
atgatgaaattgcgtttacgcacggcggcggcagtgatgctggctggcctgctgttagcgggctgtgaccagaagaatgacaatgccaaacacataaaagtcggcgtgattaacggcgcggaacaggatgtggcggaagtggcgaagaaggtggcgaaagaaaagtatggcctcgacgtcgagctggtgggctttagcggctcgctgttgccgaacgatgctaccaacgccggggagctggatgccaacgtcttccagcatcgtccctatctggaacaagacaacaaagcgcacggctaccacctggtggccatcggcaatactttcgtctttcccatggccggctattcgcgcaagattaaatccgttgccgatattaaagatggcgcgaccatcgccattcccaatgacccgaccaacctcggccgcgcgctattgttattgcaaaaagagcagctgattaccctcaaagcgggtaccggcctgctgccgacggcggtggatatcaccagcaacccgcgaaacctgaaaattatggagctggagggcgcgcagctgccgcgggtgctggacgatccgaaggttgatgtcgccattatcagtaccacctacctgcagcaaaccgggttatcgccggtgcgcgacggcatctttattgaagacaaaaactcgccgtacgtgaacatcattgtggcgcgtgaagacaataaagacgccgaaagcgtgaaagagtttatgcagtcgtaccagtcgccggaagtggcgaaggcggcagaaaccatcttcaacggcggcgcggtaccgggctggtaa

SEQ ID NO: 113061 - DNA, 543 bp, Enterobacter aerogenes
atgaagaagaaactaaccgccgccgatatgcacaatccacaggtcatcgccgagacgccgtggttcagcatgcgcaaggtaggtattgatgtcgcccccggcgagcggcgtgacttttattccattcactacccacgcccggcggtcgggattgtggcgctccaggacgacaaagtgctgctgattcgccactaccgctatctgatcgataaggtggtgtgggccattccctctggcggcgtcgatgaaggggaagagcccgccgtcgccgcgctgcgcgaactacgcgaagagaccggctggcaagcgcaacacgctgaggaaatcatccgctacaacccgtcatacggcagcagcgaccagctgtttatcacctggctcgccaccgatttaagctgggttggcatggacgcagatcaggatgaagtgatggaaaccggctggtttaccttcgaagagataaaccagctgatcgcccgcggcgaaatgccggacgggctgtctctggtcccgctgctgcacctgatggcgcagcgtagatga

SEQ ID NO: 113062 - DNA, 954 bp, Enterobacter aerogenes
atgacattaaccgacgtggcgattgtcgccgtagagggctttagcccgtttcattattccgtcccctgtatgctgtttggcgatacggtctcggaaaccaaacgttttaatctgcagatttgcgccgaacagccgggattactcagcgcccgcgacggcttcgcgctatacgccagcggtgattttaccgcgatggaacaggcggatatcgtggtggtgccctactggggcgaggtcaaccagcgcccgccgcaggcgctgatcgcgagtctgattcgggcgcgcgataacggcgcggaaatcgtcggcctgtgcctcggcgcgtttgtccttggctacgccgggctgctcgacggtaagcgggcggcgacccactgggagttcgagcaggatttccagcgcctgtttccgcaggttcagcttgatatcaacgccctgtacgtcgatgaccagaaggtgattacctcggcggggaccgccgcggcgctagattgctgcctgtatatcattcgccagcgttttggcagcctcgccgccaaccagatcgcccggcggatgatcgtgccgccgcaccgcgagggcggccaggcgcagtttatcgcccagccggtgccgcgcaacacccgcgatgcgcggattaattgtctgctggattatctgcagcagcacattgccgagccgcataatcttgattcgctggccgaggtggtggcaatgagccgccgtacgctgacccgccatttcgcccgggcgaccgggatgagcattgccaactggttaaccgccgagcgcctgcgccgcagccagagcctgctcgaggcgggggatttaccggtcgagcaggtggcggaagcggtgggctatctttctgccgtaacctggcgccagcagtttaaagcacgttttggcgtcagcccgacggagtggcgccggactttccgccgcggcgtttag

SEQ ID NO: 113063 - DNA, 1050 bp, Enterobacter aerogenes
atgcagatcaacgctataggtacgtactccgccagccagccgctcgaatcgatgtctatcacccgccgcgaacccggcccacaagatgtacagatcgctattgcatactgcggcgtctgccattccgatctccatcaggcgcgagcggaatgggccgggacgctgtatccctgcgtgccgggccatgaaatcgttggccgggtgacggcggtcggcgatgccgtctcaggttacgccgtcggcgatctggtgggcgtcggctgtatggtggatagctgtaaacagtgcgaggagtgcgctgaagggctggagaactactgtgaccatatggtgctgacctataacgggccgacccaggacgcgccagggcatacgctgggcggttattcacagcagatcgtggtcaatgaacgctacgtactgcggataaaccatcccgaagcgcagctcgccgccgtcgcgccgctgttgtgcgccgggatcacgacctattcgccgctacgccactggcacgccgggccgggcaaaaaagtcggcgtcgtcggcatcggcgggttggggcatatggggatcaagttggcccacgccatgggggcccacgtggtggcctttaccacctcggaatccaagcgcgacgcggccagagcgttgggcgcggatgaggtcgtggtgtcgcgcaacgaagacgaaatggcggcccacgtcaaaagtttcgatttcatcctcaacaccgtggcggcgccgcacaatctcgatgccttcaccacgttgctgaaacgtgatggcactatgaccctggttggcgccccggccacgccgcatccatcgccggaagtgttcaatctgatcttccgccgccgctcgattgccggctcaatgatcggcggtatcccggaaacccaggagatgctcgacttctgcgccgaacacggcatcgtcgccgatatcgagctgattcgcgccgatcagatcaacgaagcctgggaaagaatggtcaagggcgacgtgaaatatcgcttcgtgatcgacagttcgactctcgccgactaa

SEQ ID NO: 113064 - DNA, 303 bp, Enterobacter aerogenes; identical to SEQ ID NO: 107684

SEQ ID NO: 113065 - DNA, 1008 bp, Enterobacter aerogenes
atgaaagccattgctattacccaggccgccgccgacggcaacaacatcccctttttacgcgatatcgatctgccggatccgcaggcgcaggggcacgatctgctggtcgaggtcaaagccatttcggtgaacccggtcgacaccaaagtgcgcgccgggtttaatgccgataccccgcgggtgctgggctgggatgcggttggcgtggtgaaagccgttggcgatgcggtgacgctattcacgccgggcgatgaagtgtggtacgccggcgcgctgggccgtcccggcagtaacagcgaactgcagctggttgatgaacgcatcgtggccctgaagccgcgctcgctggagaatgcctccgccgctgcgctgcctctgaccgctatcaccgcctgggaattgctattccaccgtcttggcgtgcaggaaggcggtaacggcggcgatacgctgctgattgtcggcgcggcgggcggcgttgggtctatcctcacccagttggccagcaaactcaccaacatgacggtgattggtaccgcatcgcgcccggaaagccagaagtgggtacgcgaggccggggcgcatcacgtcattgaccacagcaagccgctcgctgaagaactggcgaaaatcggcattcatgccgtgacccacgtcgccagcctgaccaataccgatcagcattttaacgaactgatcgccgcgctcgccccgcagggtaagttggcgctgattgatgacccggagagcctggacgtggtgccgctgaaagcgaaaagcatttcgctgcactgggaatttatgttcacccgctcaatgtttgagacggatgatatgatcgcccaacatcagctactgacccgcgtcgccgcgttgattgacgataacacgctgcgcactacccttggcgaacactacggcactatcaacgccgccaatctgcaaaaagcccacgttaagctggaaaccgggcgctcggtcggcaaaatcgtgctggagggtttctaa

SEQ ID NO: 113066 - DNA, 1197 bp, Enterobacter aerogenes
atgcgtaaaatactcctttcgctgctgctggcagccgcgaccagcgggacggcgctggcggatgacggtaagccgttcccgcatatcggctggcgcagcgcggataatctcgccgggctggatttcggcggcgcgctgcgggcaaattatcgctatgaagactggaaaggcagtaattatcgcaacccgccacatctgcgttttgatacattccgtatcgacagcagcggcttctatgataattatttctttgatgccgggttctggtttcaggatcaccgtaaatacgccatcgaccgcgcttacgtaggctatcgcttcgacaacaataataatattcagctggggatccccggcaaaccatttggccttgaaccttatccgcaatttggctggtcctatggtattccgttttatttaggctttggcgtgagcgccggtagcggcgtgaactatcaatatcatgataataactggtcgctggatgtggcctatttcccgtggatggaaccggagaatttgcgctatgcgccggacgttggcgattacgatcggctgaaaaacactatctatccgactcagcatcagcagcataatgaaaagcgggaccaggtgaatgtgcgtattgcgcgtgattttcacggcggcggctggaataacgagctgggcggctcactggcgctggcgcggttgcacaaccacgagaccgacgacgacggcaccttctgggcggcaggcgtgcacggcatgttacataacgggccgtggcagctgacctcgcagctgattcgctaccaatacgatccgaagaacccggcgggcgtcagcgacgatacgattctgatgggcggcaacggcctgacgccggcctacctgatcccggcgaaagcgacgaccgcgtcgctgaacgtcgcccgcgatgtcgacgtgaagtggggcggcgtatcgaagctgcgtttttacaacgactacagcgtgctgtggaaagataaaagcggctggagcgattcgcagatgaacacccttggcgtacaggtctttgcgctgccggtgatgttctgggtcgatctcagctgggcgaagaatgttaatccgtggggaggcgcgctgaacgccaccggctggaccagcacccagtccgagggcagcggcaaatggtacttccgcaccaacgttaatattggttattacttctga

SEQ ID NO: 113067 - DNA, 1038 bp, Enterobacter aerogenes
atggcaaaggaaactataacgtcgtccccagcaggtgagttcattatgtttgccagcgatgacggggaagtgcgcgttgaatgccgctttgagcaagaaacactatggctccctcaggcgactatcgccagcctttatcaagtcaccccacaagccgttacacagcatattaaagcgatctatgaggaaggtgagcttgagcaaaacgcaacctgtaagtcttacttacaagttcaacaggaaggtagccgtcaggtaagccgaaaccggcttcactacagcctgcctgtcatactcgctgttggctatcgcgttcgctcctctcgcggcacgcagttccgccagtgggcgacccagacgctccaggaatacctgatcaaaggttttgtgatggatgatgagcggctgaagaatccgcctgtgggttcatcggcagtgcccgactatttcgatgagatgctggagcgtatccgcgatattcgcgccagcgaacgccgcgtttatttgcgggtgcgagagatttttgcattagcggctgactatcaaccgtcgttaaaagaaaccacgcagttttttcaaactatccagaacaagttacattttgcctgcaccggacataccgccgctgaactcattcatcaacgtgctgacgccagtcagctgcatatggggctgaccaactataaaggtgaagaggtgcataagtgtgatgtgacggtggcaaaaaattatctcactcaggatgaagtcaatgagcttaaccgcgtagttaacatgtggctggattttgccgaggatcaggcccgtcgtcgtcagcaggtctttttacgcgactggcaggataagctggatcagttcctgcaatttaacgaccgtgaggttttgcaaggcgcaggtaaagtcagtaagaaaatggccgatgaaaaagcgcaggcggaatatagtcagtttgctgagcaacagcggcgcttaaaggaagccgaaggtgaaaaggatatcgccggtttgctacagtggaaaacagagcctaaaaagtag

SEQ ID NO: 113068 - DNA, 1395 bp, Enterobacter aerogenes
atgaaagatcatattctgtccgtcaaagagaaaattggctacggtatgggtgacgccgccagccacatcatttttgataacgtcatgttatacatgatgtttttctacaccgatattttcggtatccccgccggctttgtcggcaccatgttcctgctggcgcgggcgctggatgcgatttccgacccgtgcatgggcctgcttgccgaccgtacccgcagccgttggggtaagttccgcccgtggatcctcttcggcgctatcccgttcggcctcgtctgcgtgctggcttacagctcgccggatttaagccacaacggcaagctgatctacgccgccgtgacctacacgctgctgaccctgctctacaccgtggtgaatatcccctactgcgcgctcggcggcgtgatcaccgacaacccgacgcagcgcatctcgctgcagtcctggcgcttcgtgctggcgacggcggggggcatgctctccaccgtgctgatgatgccgctggtcaactttatcggcggcgaagataaagcgctaggcttccagggcggcattgctgtgctctcggtggtcgccttcctgatgctggccttctgttttttcaccaccaaagagcgtgtcgaagcgccgccgagcagtacctcgatgcgtgaagacctgcgcgatatctggcgcaacgaccagtggcgcatcgttggcgtactcaccatcctcaatatcctcgcggtctgcgttcgcggcggcgcgatgatgtactacaccacctggatcatgggctcggcggcgctgttcaccgtcttcctcaccacctactgcgtcggcaacctgattggctcggcgctggcgaagccgttgaccgactggaaatgcaaagtcagcgtcttctggtggaccaacgccctcctggcggtgctcagcgtggcgatgttcttcgtaccgatggacgccgaaatcaccatgttcgtctttatcttcatcattggcgtactgcaccagctggtgacgccaatccagtgggtgatgatgtccgacaccgtcgactacggcgaatggtgcaacggcaaacgcctgaccggcatcagcttcgccggcaccctgtttgtgctcaagttggggctggcgctgggcggcgcgctgatcggctggatgctggccggcggcggctatgacgccgccgctaaaacccagaacagcgccaccctcaccatcattatcgccttgttcaccctcgttccggcggtgtgctacctgctgagcgcggtaatcgccaaacgctactacacgctaaaaacgccgttcctgaaaaaaatgatggccgagctggccgagggcgcgcgtcgcaacgaacaagagttcacggcagccccgatcgaaaaagaatggcaaaactaa

SEQ ID NO: 113069 - DNA, 2319 bp, Enterobacter aerogenes
atgaaaatcagtgatggaaactggctcattcaaccagggctcaacctgatccaacccgtacaggtttacgaggtggagcagcaggggaatgaaatggtggtctatgccgcaccgcgcgatgtccgcgaacgcgcctggcagctggatacgccattgttcaccctgcgctttttctcgcctcaggaagggataatcggcgtgcgcatggagcacttccatggcgcgctggataacggcccgcactatccgctgaacgtgcagaaagacgtccatgtcgaaatagaaaatacggccgagttcgccgagctgaaaagcggcagcctcagcgtgcgggtgactaaaggtgaattctgggcgctggattttctgcgcgacggcgtgcgtatcaccggtagccaactgaaaaacaacggctacgtgcaggatagtaagacccagcgcaactacatgtttgagcgcctcgacctcggcgtcggcgaaaccgtctacggcctcggcgagcgctttaccgcgctggtgcgcaacggccagacggtagaaacctggaacgaagacggcggcaccagcactgagcaatcctacaaaaacattccgttctacctgaccaaccgcggctacggcgtgctggtgaatcacccgcagcgcgtctccttcgaggtgggctcggagaaagtctctaaagtccagttcagcgttgaaggcgaatatctcgagtacttcgtgatcgacggcccgacgccgaaagcggtgcttaaccgctatacgcagttcaccggccgcccggcgctgccgccggcatggtcgttcggtctgtggctgacgacctcgttcactaccaactatgacgaagcgacggtaaatagctttatcgacggcatggccgagcgccatctgccgctgcacgtcttccacttcgactgcttctggatgaaggccttccagtggtgcgattttgaatgggatccgctaactttcccggacccggaagggatgatcaagcgcctgaaggcgaaagggctgaaggtctgcgtgtggatcaacccgtacatcggccagcgctcgccggtgttcaaggagctgaaagagaagggctatctgcttaagcgcccggacggttcgctgtggcagtgggataagtggcagccggggctggcgatttatgacttcaccaacccggaagcctgccagtggtacgccagcaagttaaaaggtctggtagcgatgggggtcgattgcttcaagaccgacttcggcgagcgtatcccgaccgacgtgcagtggtttgacggttccgatccgcagaaaatgcacaaccactacgcattcatctataacgagctggtgtggaaggtgctgaaagagaccgtcggcgagcaggaggcggtgctgttcgcccgttccgcctcggtgggcgcgcagcagttcccggtgcactggggcggcgactgctacgccaactacgaatcgatggcggaaagcctgcgcggcgggctgtcgatcggcatgtccggcttcggtttctggagccacgatatcggcggtttcgaaaacaccgcgccggcccacgtttataagcgctggtgcgcctttggcctgctctccagccacagccgcctgcacggcagcaaatcctatcgtgtgccgtgggcctacgacgaagagtcctgtgacgtggtgcgccacttcacgcagctgaaatgccgcatgatgccgtatctctatcgccaggcggcgctggccaacgagttcggcactccgatgttgcgtgcgatgatgctcgaattcccggacgatccggcctgcgactatctcgaccgtcagtatatgctcggcgattcggtcctggtggcgccggtgttctccgaagcgggcgaggtgcagttttatctgccggaggggcgctggacgcacctgtggcataacgatgaattgccgggtagccgctggcataagcagcgtcacgatgcactgagcctgccggtctacgttcgtgacaacaccctgctggcgctgggcaacaacgaccagaaacccgattatgcctggcatgaaggcaccgccttccagctgttccagctgggcgatggcaatgaaacggtctgtcaggttccggcggccgacggttccgcgatcttcactctgaaggcgaagcgccagggtaacaccatcaccgtgagcggcgaaggcgaagcccgcggctggacgctgtgtctgcgcaatatcccgcagatagcgggcgtggagggcgggacgcaggcgggcagcgaactgggcgtggtggtgagcgcccagggcaatgtgctgacgattacgctgtaa

SEQ ID NO: 113070 - DNA, 1572 bp, Enterobacter aerogenes
atgcaaatggttacctcgcgacagaacagattattaaaatttctcttgcctaaacgagaatacgttacgttattaaaaatggctgaatacttaaatgtttcagaaaaaacagttcagcgtgacttacgttttcttgaacaatggctctctgactggaaaattagtattgataaacgtgccggcgcgggcgtcatgctattggctgataacgtcgccgatctgttgcaattagaccagttgctcagtagcgaaagcgatgatacagatgccatgatgaataattcccggcgtgtgaaaattgcttctcagttattaagtgaaacgccgcgcgaaacatcgatcagtaaattgtctgaacgttattttattagcagcgcctcaattgtgaatgatttaaaagtgatcgaatcatggattaggccactaggtctgatgctcattcgtagccagagcggcactcatattgaggggagtgaatcccatgttcgccaggctatggccttattaattaatggtgttattaaccataatgaaccaggaaatattattcactcccgtctggatagcggtagctataaagccctggtgcattatttcggtgaagaagatgtcatctttgtgcagtcgcttcttcaggatatggaacgaaaattaagttggtcgctgggcgagccgtattacgtcaatatcttcacccatatcctgattatgatgtatcgcatcacccgcggcaatgcactaccgcgccgggagcagggacatccattatttgatgagtccatctttcgtatcgcgcagaatatgctgcaaaaaattgaggcccgcattgcccatcctttaccagaggacgaaagctggtttatttatcaatacattatttcgtccggcatgctggtggaagagcgtgatgatgtcagcgtgctgcgcaatatacgttccagcgatgaggcccggcaaatcacctcccggctgatcgccctgttttcctcggtggttgatatcgatctgacgcatgacaccgcgttatatgaagggttgctcattcatatcaagccgctgctcaaccggctgaattatcgtatctatatccgtaatccgctgctggaagatatcaagggcgaattaacagaggtgtggccattaactctgcgggtggtgaatcaggtatttgccgcctggggcgagaacgcggtttcggaagatgaagtgggttatttaaccgtgcatttccaggccgcgatggagaggcaggtggccagaaagcgggtgctgctggtgtgttcgaccgggattggtacctcgcatctgttgaaaagccgggtcctcagggcctttcctgactggaccatcgtcggcgtactgcctgcgggtagtctacatacgctacagcgacaggatgatattgaactggtcatttcaaccattcatctgccggagattgcgttaccggtagtctatgtcacggctttttttaacgatgccgatattaagcgggtaacagaaaaagttatcaccgagaaattacaccatgctgcaacgtcaactgccagcaatgaaattttatatccatga

SEQ ID NO: 113071 - DNA, 471 bp, Enterobacter aerogenes
atggacatcagccggattttaaatactaagcgtgtattgctggatatgaaggccacgactaaagcggaagttattgaagaattaaccgacctgctgcagaaagatggggccataagctgtcgcgaaacgtttattcaggacgtttggcagcgtgagtcggaaggttcgaccggatttgaaaaccacatcgctattcctcatggaaaatcatccgcggtgctgaatactacgctcgccattggccgtactcgtcaggatattgcctgggaaacgctcgatggaagccaggttcgttgcattattttatttgccgtccgtctggaagatcaaaatactacccatatccgcttactctcccaggtcgctggagcgttggccgatgatgacattattgcgcaattgctcgaagaaaccagtccgcagaagattattgatctctttagtcaatatgctgaatcggatgtttactaa

SEQ ID NO: 113072 - DNA, 315 bp, Enterobacter aerogenes; identical to SEQ ID NO: 87526

SEQ ID NO: 113073 - DNA, 1092 bp, Enterobacter aerogenes
atgagtgagaataaaccacctgtctcgcaggaaattaaaaagcatttgttaacgggtatttcatggatgataccgctgattgttgccgccgggatctgcattgccctcggtcaggttctgggcggtaccaatgtcgccgagaaagtcggcaccattccatggatgttgaatcaaatcggcggctgggggatggggctcatcgtcccgctcatctgtgcggcgattgcctattccattgccgacagacctggttttgcccctggtctgatcgttgggtttgtctgcgggcaaatccacaccggtttcatcggcgggatgctgggcggtttcctggtgggctatacggtgctgctgttaaagcattacgtgcggttgccaaaatcgatgcaagggctgatgcccataatggtgttgccggtattaagcaccattattagcggtctgttgatgatgaccctgataggcaagccgatcgcctggctgcaggaggccttaattcatctgttggagtcgatgcagggcggttcacgattcctgttgggggccattcttggcgcgatggccacctttgattttggcgggccggtgaataaaaccatgtcgttattcgccgatggcttgctggtgagcggggtctatgggccggaggcggtcaagtttgtcggctccatgatccctccgttcggtattacgttgtccttcctgctgacccgccataaatatacccgtgccgaaagtgaagcgttaaaggccgccttcccgatgggtatttgcatgatcaccgaaggggtgatccctatcgcggcccgcgatctgctgcgggtggtgggatcctgcgtcgtggcttcagcggtggcaggcggcttgattatgacctggggcgtggaaagtccggttccacatggcggtatgtttgtggtgccgctattcacccatccactgctgttttgtctggcgctggcgattgggacggttatctgtggcgtgatgttgtcgctgtggaaaaaaccggtcacggagcgtgatgaagagtttgatgaactgagcgaccaaaaagtcgccgatgatgaaatcacctttacccttgagtaa

SEQ ID NO: 113074 - DNA, 852 bp, Enterobacter aerogenes
atgtttgccgatatgaagcagatggttgagaaagcctggcgtgaacagtatgccctgctggcgattaactgtatgaatctggaaagcgcccgcgcggcggtacgcgtggcggaaaaataccgcgcgccgattattctcaatctctatcagggccatctggcgcattttccgccagcgacagcgatggcggtggctaggacccttgccgaagaggccagcgttcccgtgaccttgagtctcgatcatgggaaagaaccggtgaagatccgccaggcttttcgcgctggattcagcgggttgatgattgatgcttctgcatttccacttgcggaaaatatccgccagacccgcgaagtcaccactctggctgccagcatcgggctgtgtgttgaaggggaattggggcatctggctgatgctccgcgctatgactctgcgacgaacgccgacctgatgacgcaacctgaggacgtcgccccgtttatcgagcaaaccggtatcgacttactggcggtctccgtcggcacggcccacggcatgtatgcgcctggggtcacgcccgcgctggattttgaccgtctggcgcaggtgcagcgagcctcttcggtgcccctggccctgcacggcggcagcggcacgccatttgatcagcttgcctgctgcccggcatttggcgtggcgaagattaatgtcggcgcggcggtgtttgaagcaggtaaagccgcactactccataccctttgccatgacagctctattgaactggccgatgccatggcggtgatggaacacgccagcgctgaagctatcgtcccttacttacaagcatccggcgcgataaaccgcgcctga

SEQ ID NO: 113075 - DNA, 861 bp, Enterobacter aerogenes
atgttagtttccatgcaagaaatacttaaaccgactcgtgaacacggctttgccatcggcgcatttaacgttgcggacagctgctttattcgcgccgtcgtggaagaggcggaagcgacaaatactcccgccattatttcaattcaccccagcgagcacgattttgtaggcgattccttttttagctacgtgcgggatatcacccagcgtagccgggtgccgtttacattacatctcgatcatggcgcctcggtggagcatgtgctgcgtgcgatccagtgcggttttacctcggtgatgatcgatgggtcgctgctgccctatgaagaaaacgtcgctctaacgcgggaagtggtcaggctggcgcatgcggttggcgtctctgtcgaaggtgaactggggaccatcggccagacgggaacgtcggtagagggcggagtgtcgaaagtgacttataccgacccggcgcaggcgcaggattttgtcactcgtaccggcgtcgataccctggcggtggcgattggtaccgcgcacggcatctatccaaaagggatgcaacctgaactgcagatgcacatcctgcgcgatattgccggacgagtgtcgatcccgctggtactgcacggcggctccgccaatccggatgcggaaattgccgagtctgtcacgctcggagtcgggaaaatcaatatctccagcgatatgaaacacgcttacttcctgaaagtacgtgaaattttgagtaaagagagctggtgggatccgaatgtgatttatccggaaccgattaatgccgcacgtgaagttattcgccacaaaatgaagttgtttggttccaccggcaaagcaagcttgtattga

SEQ ID NO: 113076 - DNA, 918 bp, Enterobacter aerogenes
atgaattacctcggactggatgtcggtgggacgaaaatcgccgccgtcgtgatggatgagcagggacgggagcgaggtcgttaccgctgcgcaacacggaaagaaaatcgtcaggcatttatgtcgtgcatcgtggatttcgttgccgatattcgcgcgcggatgggatcgccgatggctattggcatcgcgttgccgggtagcgtttcgccacagcatggcgccattcgtaacgccaacattcaggtgattaacggctatcgtttacaggatgcgcttgaacaggcgctcggtcagccggtggtgttagccaacgatggcaattgtttcgctttatcagaagcatgcgatggcgccggagaagggttttcatctgttttcggcatgacgttagggaccggctgcggaggtggtattaccctggagcggcagcctttcgtcggcgcctcaggtattgccgcagagtgcgggcatatcgccttgcccggctattctcctgaggaggatgggccgccgacacgttgttattgcggcagatttaactgtgtggagtcttttatttccgcaacggggctacgtgaacgctatcgactgctcagcggaaagcgtttgtcgagcgagcagattctcgcccgcgcgcaggcgggagaatccgccgcttgccatcagatccaccgctttcgtcaacagctggcgcggacgctggcgactattgtcaatatcatcgaccccggcgtgattgtgttgggcggcggtttatccaacgcgctgcagctggtagcggatttaccatcggcggtcgccccgttggtcttcaccgaccatttttccacccctatcatttctgcgcggcatggcgacagtagcggtatgcgcggcgccgcctggcttgccgtgcgaagcggagttaaaccatga

SEQ ID NO: 113077 - DNA, 675 bp, Enterobacter aerogenes
atgaaacgttcccagattaactatgcgatagataaagcgctggcgatggccgaaacttttcgcatcagcctgccggaatttgcccactttacggcgtcaagctggccgcagaagcggcatgaaggttggcatgaagtccaggatctacagcttggatgggatgtgacggatttcgccagtggttgctttcgcgaaacgggccttacgctgttgacgttacgcaacggttctttatccgacccgcgttataccaaaccctacgcggaaaaaatgttacagattcagcaagatcagcaaaccccctggcatttccattaccacaaaatggaggacatcattaaccgcggcggcggcgacctctgcatgcaactggcctgggcgacacaggacgaacagttagaccagcagcgccatgttagcgtgatgatcgatggctgccagcgtacgctgaaacccgctgagacgctggtgctgcatccggggcagagcgtctgtctaccggtgggcctctatcatcgcttctgggccgaaaaagggatagtgatgggttgggaaatttcaatggttaatgacgaccatacggataatcgttttctcaaggcgggcgggcgctttccctccattgaggaagatgaacctgcaagatggctgctgtgcagtgaataccggcagtga

SEQ ID NO: 113078 - DNA, 723 bp, Enterobacter aerogenes
atggacttagaaaatatctttcgtgacgtgaagttgagtaaaaccgaaatgaccgtgctgcgttttattcaaaatgacccgcagctatgtatccgcgaagggatccgcaccgtcgcggagcgctgctacagtaatccttcttcgctggtgcggctggcgaagaagcttaagttcagcggctggctggagctggtctatttcatcaagttcaatatcaccatgccaaagctcgatgtcaccaacgatattgattatatgagcattcaaccggcagaagcgctgacgccgctgctggcaggccttgagcagcagcgtattttgatccacggcagcggtttttcgcagctaatcgcccagtatatttataataagtttctcgttaccggcgtgaacgccagcctggcgctgtggcccgattacgaaatccttgagcaaaaaaacgctgcccgctttgattccatctggatcatttctaaatccggacgcagcagttcggcattaaattgggtcaaggcgctggaaggcaaagagataaaccttgtctgctttaccggcgattatcaaagcccgctggcgcaggccgcgaatacggcgtttattattcacgacccgcagaagttcgacgatgatatttactggagcaacccgttttttggctactgcatattgggctttgagcggttgttaaaaatgtggtttaccagcgtacatagcaataggtag

SEQ ID NO: 113079 - DNA, 1380 bp, Enterobacter aerogenes
atgaaattaaccgtattaggcgggggcggcgtacgctctgcatttctggcgaagtcgctggcttataacgcgcaccgcattggtttaacggaagtggtatttcaggatagctcagcagataatttatcgctatttggtgaaatcgcccgctatgtatttaataccattcgcccggatattcattttacgaccaccagcgatccggctgccgcgctgcagggtacccattacgtgattaccacgctgcgcgtcggcggcgatgagagccgcatccgcgacgagcgaatcgcgctggagcataacacgctgggccaggagaccactggcgcgggcggttttgccatggcgatgcgttcgatcccggcgatcctgcgctactgtcggctgatcgaagaacatgccgacaaagacgcgatcctgtttaactttaccaatccgtccgggctggtcaccgaagcgattatcaaatccggtttcaaacgccgggtatacgggatttgcgatgcgccgtcggaactcatccgcgagctgccggagatcctcggctgcgacccgcacgacctgagcgtggaatgctacggtttaaaccatttttcctggtttacgcacttcaccgtgcgcggggaagaggttaccgcgcagctggtcgccaacccggatttgtaccgcaaaacggcgatgcagtacttctcgccggagctggtcaaactgtgcgataaccagttgcttaacgaatatctctattactactactatcgcgaagtggcgctacgggcgattcaacaggcgccggagacccgcggcgagcagattgcccgtatcaaccacgatatgcgtcaggagctcagcggcgtggatgttaaagcggatccgcaggcggcctttaccatctggatgaagcactacctacgccgcgaaaacagctatatgcaaaacgagtcgcagcaggaaaaattccatacccgcgagccgttaacgctgcggcagtttattgaagagccggataccggcggctacgccggggtggcgctggatattctggaggcggtcaacagcaccaccaccaaacgcatcgtggtgtcgatacagaataacggcacgctcgattttttacgccccgacgatgtaattgaaatcagctgcgatctgagcaaagagggtcttaagccggtgacaccgataaacgtgccgacggcgcagaaaaatatgattgccagcgtgaaggagtatgagcggctggcggtggcggcaattctgcagcaggacaaatcgctggcgctgcaggcgttgatggctcatccgctggtcggttcatattcgctggcgaagaagctggttgaggcctatctcgacgatgaacagttcgccgggtggcggtaa

SEQ ID NO: 113080 - DNA, 1560 bp, Enterobacter aerogenes
atgtctgtaatacgtcaacgtattctggagaatatgcaaaaattctccagggccatgatcggcgcagtattgttcttgccggtcattggattaattctggctctcagttccgtcttaactaacccgactcttattgctgaaaccagtttccttcatcaattagggcaactgcttggtgataccttctggccattattcggtaacctcggattattgttttgcgtgggaataagttacggcctggcaaaagataaaaaaacagaggtcgcacttgtctcggtgatgtgttttatcatgtttctcggcgccaaccattcatggctggaacatactcatgcggtggcggaaaaaattaacggcgaatattacggtaccgggcaaacgcagctattaggctttgtggtcgtcgatatgggagtattcctcggaatcattcttggctgcaccattgcctgggtacataataaagtctccaatattgagctgcccggcgcgctatcgatgtacggcggggcgaagctgacgctggtcgccatgacgccagtcattatctgctatgccattgcttttacctggatttggccttttatgacccacggcattagcgcccttaccgggtttatgaagaatgccggcgttgcgggagtgtttgtctacggcttctttgaaaaattccttattcccaccggtttgcaccatttcgtgtggtcgcctttccagctcacgcaaatcggcggcacgctaaatgtcgatggccaggtcgtctccggcacccaggcgattttcctcgcctatatgcgccatcccgatctgacgccggtgatgaacgatgcattacgtttctcgcaacaggggatgaccaccatctttggcctggcgggcgcatcgctggcgttttatcacaccgcgaagccggagaagaaagcgatggcaaaggcgattctgctgccggcgattatcacctcgatgctgaccggcatcaccgaacccattgaattcaccttcttatttgtctcgccgctgctgtgggtgatccatgcgacgttaaccgccgcttcgcaggcaatttgcgacatcttcaccgtgcggccgtggggcgcctccggcctaattgaatttctgatctacaacctgccgctgccggtgtcgttaacccgctggccggggtacgtgctgatcggtattggccaatttatcgtttattacgcgatattccgcacgctggtagtgaagttaaatctgaaaacgccgggccgcgaggatgacgataacgttaagttatacagtaaggcggactaccgtaaaaaagtcagcggcccgcagtcgatgacggatgaaattattaatggcttaggtggtaaagccaatattatctccgttgataactgtttcacgcgcctgcgggtggttgtccataatatgacattagttgatgatgaaatattaaaaagcaccggcgcaaatggcgtagtacgcaatcgtaatgaagttcaggttatttatggcgtcaaagtcgggcaagtccgttcccgggttgatagctggctagcagaaaattaa

SEQ ID NO: 113081 - DNA, 1710 bp, Enterobacter aerogenes
atgaaatttcttggaaagctgattctctggctgctgatcgccctgctggtcgttatcgtcgccgcttactttgcgctgcaaacccgctggggggcgcgccaggcgagcagttggttaagcgaaagcaccggctggaaaatcgccttcgataagatggcgcatgacttctcttccccactacatctgcagttgcaaaatgtcacctttggccgcgacggcaagccgccgacgctggtcgccaaaacggtggatatcggttttagcacccgccagttcagcgacccgctgcacgctgatgaaatcgtcctcagcgacggcacgctgaatctttctccggcttccgcctcgatgccgtttgccgctgaccgcctgcagctacgcgatatggcctttaacagcccggacagcgagtggaacctgagcgcgcagcgggtgaccggtggcgtgatgccgtggcagccggaagcgggcgacgtgctgggcagaaaagcgcaaattcagatgagcgcgggctcgatgaatattaacggcatcgaagccagcaacgtcctgatccagggggcaatggataacggcgaggtgaccctgaacacccttggcgccgatatcgcgcgcggcacgctgaccggtaacgccaaacgccgcgccgacggtagctggctggttgataacctgcgcctgaatgaaattcgtctgcagagcgccaaaccgctgaatgagttccttgcgccgctcacctcggtgccgtcgctgcagattggccggctggatgtgaccgatgctcgtttgcaggggccaggctgggcggtgaccgacctcgacctcaacttgcgcaatctgaccttgagccataacggctggcagagcgacgacgggacgctatcgatgaacgccagcgagtttatctacggttcgctgaatttcctcgatcccatcgtcaatgccgaattctcgccgcagggcattgcgctacgccagttcagctcccgctgggagggcggcatggtgcgtacctccggcaactggctgcgcgccggtaatgcgctggtgctcgacgatgccgtcttcgccgggctggaatatacgctaccgtccaactggaaacagctgtggatggagccgatgccgggctggctgcaaagcttgacgctgaagaaattcagcgccagccgaaatctgattatcgatatcgacccagccttcccatggcagatcaccgcgctggacggttacggcggcgaattacagctggtgaaagatggtcagtggggcgtgtggaatggcagcgccaccctcaatgccgccgccgcgaccttcaaccgcatcgacgtgcgccgtccgtcgctgaagctgaacgcgaacgcttctacggtcaacatcagcgagctgagcgcctttaccgagcgcggcattctgcaggcgaccgccgcggtgtcacaattgccgcaacgccaggtcaatttgagcttgaacggccgcggcgtgccgctgaatattctgcaggcctggggctggcctgcgctgccgattagcggcgacggcaacttccagctaaccgcgaacggtagcgtgcaggccaatgcgccgctgaaaccgagcgtcaacggccagctcagcgccaccaatatggacaagcagcaggcggcgcaggtgatgcgcaacggcgaggttagcaacgcgcctgccgcgtcggttcccgtaacgccgtag

SEQ ID NO: 113082 - DNA, 1392 bp, Enterobacter aerogenes
atgtccgttacgaccgcagagtcagaaaatgcgcaaccggttgcgcataaaccagccagcgaattaatctatcgcctcgaagaccgtccgccgcttccgcaaacgctgtttgccgcattccagcacctgctggcgatgtttgttgcggtcatcaccccggcgctgcttatctgtcaggcgctcggcctcccggccgaagatacgcaacacatcatcagcatgtcgctgttcgcctccggcgtggcatccattatccagattaaagcctggggaccagttggctccggcctgctctccatccagggcaccagcttcaacttcgtcgccccgttgattatgggcggcaccgcgctgaaaaccggcggcgccgacgtgccgacgatgatggccgcgctgttcggcaccctgatgctggcgagctgcaccgaaatggtcctctcgcgggttctgcatctggcgcgccgcattattacgccgctggtctccggcgtggtggtgatgattatcggcctgtcgctgattcaggttggcctgacttctatcggcggcggctatgcggcgatggccgaccacaccttcggcgcgccgaaaaacctgctgctggcgggcatcgtgctggcgctgattattatcctcaaccgccagcgcaacccgtacctgcgcatcgcctcgctggtgatcgcgatggctgccggttatctggcggcgtggttcctcgatatgctgccggctaacaccgcgcctaccaacagcagcctgatcactatccctacgccgctctattacggcctgggcatcgactggagcctgctgctgccgctgatgctggtctttatgatcacctcccttgaaacgatcggcgatatcaccgccacctccgacgtttctgaacaaccggtctccggcccgctgtatatgaaacgcctgaaaggcggcgtactggcgaacggcctgaactcatttgtttccgccgttttcaataccttcccgaactcctgcttcggccagaacaacggcgtgatccaactgaccggcgtcgccagccgctatgtgggctttgtggtggcgctgatgctgattgtgctcggcctgttcccggcggtaagcggctttgtgcagcatattcctgaaccggtacttggcggcgcgacgctggtgatgttcggtaccattgccgcatccggcgtgcgcatcgtctcccgcgagccgctgaatcgccgcgctatcctgattatcgccctctctctggcggtgggtctcggcgtatcgcagcagcctctgatcctgcagttcgcaccggactggctgaaaaacctgctctcttccggtattgccgctggcggtatcacggcgattgttctgaatttaatcttcccgcctgagaagaactaa

SEQ ID NO: 113083 - DNA, 1203 bp, Enterobacter aerogenes
atgttgcatctcgataccttatcgacgctcgttgccgcaaccatggtgttgcttttagggcgaaagctcgttcagaacgtcccattcctcaaaaaatataccattcctgaacccgtcgccggcggcctgctggtggcgctggcgctgctggttttgaaaaaaagcatggatatcgaaattgatttcgatatgagcctgaaggacccgctgatgctggcgttcttcgccactatcggccttaacgctaaccttgccagcctgcgggcgggcggcaaagtgcttggcactttcctgattgtggtggtgggcctgctgctgctgcagaacgcgctcggtatcggcatggcgaagctgctggggctggatccgctgatgggtctgctggccggttctatcacgctttccggcggccacggcaccggggcggcgtggagtaaattgttcgttgagcgttacggttttgccaacgccaccgaggtcgccatggcttgcgcaaccttcggcctggtgctcggcggcctgatcggcgggccggtggcgcgttatctggtgaagcactcttcctcgccggacggtacaccggacgaccagctggcgccgacggcgtttgagaagccggatatgggccgcatgatcacctcgctggtgctgattgaaagtattgcgttaatcgctatctgcctgaccgtagggaaggtggttgcgcaactgctggcgggtaccgtgtttgaattaccgaccttcgtctgcgtgctgtttatcggcgtgatcctcagcaacggcctggcgctggctgggctgtatcgcgtgtttgaccgtgcggtatcggtactgggcaacgtcagtctgtcgctgttcctcgcgatggcgctgatgagcctcaagctgtgggaactggcgtcgctggcgctaccgatgattattattctggcggtacaggcggtggcgatggcgctgtatgcggtgtttgtgacttaccggatgatgggcaagaactatgatgccgccgtgctggcagccggtcattgcgggttcgggcttggcgcgacgccgacggcgattgccaatatgcaggcgattaccgaccgttttggcccgtcgcatatggctttcctggtggtgccgatggtgggggcgttctttatcgacatcgtcaacgcgctggtgattaagctgtacctgctgctgccgatatttggctga

SEQ ID NO: 113084 - DNA, 1512 bp, Enterobacter aerogenes
atgaccgagaaaaaatatatcgttgcgctcgaccagggcactaccagctcccgcgccgtcgtgatggatcacgacgccaatatcgtcagcgtgtcacagcgtgaattcgaacaaatttatccgaagccaggctgggttgagcacgacccgatggagatttgggcctcgcagagctctacgctggtcgaagtgttggcgaaagccgatatcaactccgacgaaattgccgccatcggcatcaccaatcagcgtgaaaccgccatcgtttgggagcgtgagaccggtaagcctatttacaacgccatcgtctggcagtgccgccgtaccgcggatatctgcgagcagctcaagcgcgacggcatggaagagtacatccgcaaagccaccggcctggtggtggacccgtacttctccggcaccaaagtgaagtggatccttgaccatgtcgaaggcgcccgcgagcgcgccaagcgcggcgagctgctgttcggtaccgttgatacctggcttatctggaaaatgacccaggggcgcgtgcacgtcaccgactacaccaacgcctcgcgtaccatgttgttcaacatccatgaactggactgggacgacaaaatgctcgacgcgctggatatcccgcgcgccatgttgccggaggtacgtaagtcttctgaagtgtacggccagactaacatcggcggtaaaggcggcacccgtattcctatctccggcatcgccggcgaccagcaggcggcgctgtttggccagctgtgtgtgaaagaagggatggcgaaaaacacctacggtaccggctgcttcatgttaatgaacaccggtgaaaaggcggtgacctcaacccacggcctgctgaccaccatcgcctgcggcccgaccggcgaagtgaactacgcgctggaaggcgcggtgtttatggccggagcgtcgattcagtggctgcgtgatgaaatgaaactcatcaacgatgctttcgattctgaatacttcgccactaaggtgaaagacaccaacggcgtgtatgtggtgccggcctttaccggtcttggcgcgccttactgggatccgtatgcgcgcggcgcgattttcggcctgacccgcggagtgaacgccaaccatattatccgcgccacgctggaatctatcgcctatcagacgcgtgacgttctggaagcgatgcaggccgactccggtattcgtctgcacgccctgcgcgtggatggcggcgcggtcgccaacaacttcctgatgcagttccagtccgatattctcggcacccgcgtggaacgcccggaagtgcgtgaagtcacggcgctgggcgccgcctatctggcaggtctggcggtcggcttctggcaaaatctcgacgagctgcaggagaaagcggtgattgaacgtgagttccgcccgggtattgaaaccaccgagcgtaatttccgctacagcggctggaagaaagcggtgaaacgcgcgttagcgtgggaagagcacgacgaagcgtaa

SEQ ID NO: 113085 - DNA, 849 bp, Enterobacter aerogenes
atgagccagacatcaacattaaaaggccagtgcatcgcagagtttctcggtaccgggttgttgatctttttcggcgttgggtgcgtagctgcgctcaaagtcgcaggagccagcttcggtcagtgggaaatcagcatcatctggggtctgggggtggctatggctatctacctgaccgcgggcgtatccggcgcgcaccttaatccggcagtcaccatcgccttatggttattcgcctgctttgatgggcgcaaagttgttccttttattatttcgcaattcgctggcgccttttgcgctgcggcattagtttacgggctttattacaatcttttcttcgatttcgaacacacccacaacatggtacgcggcagcgtggaaagccttgagctcgccggtatcttctcgacctaccctaacccgcatatcaattttgtgcaggccttcgcggtagaaatggtgattaccgctatcctgatgggcgtgattttagcgctgaccgacgacggcaacggcgtgccgcgcggcccgctggcgccgctgctgattggtctgctgattgccgttatcggtgcttctatgggtccgctgaccggcttcgcgatgaacccggcgcgtgatatcggaccgaaagccttcgcctggctggcaggctggggtaacgtcgccttcaccggcggcaaagatattccttatttcctggtgccgctgtgcgcaccggtggtcggcgcggcgctgggcgcattcagctaccgcaaattcattggccgccatctgccttgcgacacctgcgtcgaggaagaaaaagaatccgcttcttccgcgtcgcaacaaaaagcttcgctgtaa

SEQ ID NO: 113086 - DNA, 240 bp, Enterobacter aerogenes
atgtcattagaagtgtttgagaaattagaatctaaagttcagcaggcgattgataccatcactctgttgcagatggaaatcgaagagctgaaagaaaagaacaccacgctggcgcaggaagtgcagagcgcgcagcacggccgtgaagagctggagcgtgaaaatagccagctgagagaacaacagcaaggctggcaggatcgtctgcaggcgctgctgggccgcatggaagaggtctaa

SEQ ID NO: 113087 - DNA, 990 bp, Enterobacter aerogenes
atgaataagtggggcgtagggttaactctgttgctggcatccgccagcgtgctggcaaaagattatcagctgttaaacgtatcgtacgatccgacgcgcgagctgtacgaacagtacaataaagcgtttagcgcgcactggaagcaggaaaccggcgataacgtggtgattcgtcagtcgcacggcggctccggcaaacaggcgacgtcggttatcaacgggattgaagcggatgtcgtcaccctggcgctggcctacgacgtagacgccattgctgaacgtggtcgtatcgataaaaactggctgaagcgcctgccggataactccgcgccgtatacctcaaccatcgttttcctcgtccgtaagggcaacccaaaacagatccatgactggaacgacctgattaaacctggcgtatcggtcatcaccccgaacccgaaaagctccggcggcgcccgctggaactatctggcggcatggggctatgccctgcatcagaatcacggcgatcaggcgaaagcgcaggagttcgtgaaagcgctgtataaaaacgttgaagtgctggattccggcgcgcgcggttccaccaacaccttcgtagaacgcgggatcggcgacgtgctgattgcctgggagaacgaagcgctgctggcgacgaaagagctgggcaaggacaagtttgaaatcgtgacgccgagcgagtccattctggccgagccgacggtttccgtcgtcgataaagtggtggataagaaaggcactcgccaggtggctgaagcgtacctgaagtatctctactcgccggaaggccaggagattgcggcgaagaacttctatcgtccgcgcgatcctgatgtggcgaagaaatatgccaacgagttcccgaaactgaagctgtttaccatcgatcaggagttcggcggctggacgaaagcgcagaaggagcacttctccaacggcggtaccttcgaccagattagccagcgttaa

SEQ ID NO: 113088 - DNA, 765 bp, Enterobacter aerogenes
atgagaagagtaagataccttttatgggcgctgctggtggttattctggcggcgctggctggcggctactattggctgcattccggtaacccgaacgcgttacgtcatattgtcctgcagcagtgcgtacccaatcagcagcaacatcaaaacccgtcgccgtgcgcggaagtgaacctgaaaggcggctacgtgttgtttaaagatcgcaacggcccgctgcaatatctgctgatgccgacctaccgtattaacggtaccgaaagtccgctgctgttggatccgctaacgccaaatttcttctggcaggcctggcaggggcgcgaaattatgagccagcgccgcggcgcgccgattgatgataacgcggtatcgctggcgattaactcgcgcagcgggcgcacgcaaaaccatttccatattcatatctcctgcctgcgtcccgatgtccgcgcgcagttagataatgatgcggcgacaattagcagccgctggctccctttgccgggcggtctgcagggccatgaatatctggcgcgtcgggtaacggaagccgagctggctcagcgcagcccgttcctgatgctggcggaagaggtaccggaagcgcgcgaacatatggggcgttatgcgttagcgatggcgcggcaaagcgacggctcgctggtgctgttggcgacagagcgtaacctgctgactctcaaccgtgcttcggcggaagaaaatcaggatcatagctgcgcaattcttaacgcaaaccactag

SEQ ID NO: 113089 - DNA, 1305 bp, Enterobacter aerogenes
atgtcgctctggctaacccacccgctgttcctcccttcgctgatcgtcggcatcaccattgtgctctgggcgacttcgctgttaccggaatttatcaccgcgctgctgttcttcgcggcggcgatgatgaccaaaatcgctccgccggaggtgatcttcggcggttttgcttcctccgcgttctggctggtgttcagcggctttgtgttggggatcgccatccgtaaaaccggactggcggatagagcggcgcaggcgctatcggcgcggctcaccgactcctggccgcggatggtcggcagcgtggtattactgagttatgcgttggcgttcgtgatgccatcaaacatggggcgcatcgcgctgttgatgccgattgtggcggcgatggcccggcgcgcggggatagccgacggcacgcgcggctggtacggcctggcgctggcggtgggctttggcaccttccagctatctgcgaccattttgcccgctaacgtgccgaatctggtgatgagcggggcggcggaaggctcttacgggatccatctgaattacgttccctatttactgctgcatacgccggtgcttggctggctgaaaggggcggtgctggtggcgctgatctgctggctgtttcccggcaagccgcatccgccgcgcgagctggcgccgctggcgccaatgagccgtgacgaaaagcgtctggcgtggctgctggcggtggtgttgacgttatgggtgacagagagctggcacggcgtcggcccggcgtggaccggcctggcggcagcggtggtcacgctgctgccgcgagtaggatttatcagcggtgaggagttcgccagcggggtgaatatgcgcacctgcatttatgttgccggcattttgggactggcgattaccgtgacccaaaccgggattggcggcgcggtgggtaacgcgttgctgcaggtgatgccgctggataaagataatccgttcaccagcttcctggcgctgaccggaattaccagcgcgctgaactttattatgaccgccaacggcgtcccggcgctgtatacgacttttgcgcagagctttgccgacgcgaccggctttccgctgctgagcgtgattatgattcaggtgctgggttattccacgccgctgctgccataccaggcgtcaccgatcgtggtggcgatgggattaggtaaagtcccggcgaaagcggggatgttgctatgcctggcgctggcggcggtgagctatttgattttgctgccgctggattacgcgtggtatcagctattagggaaattgtag

SEQ ID NO: 113090 - DNA, 768 bp, Enterobacter aerogenes
atgcgacatcctttagtgatgggtaactggaaactgaacggcagccgccacatggtaaacgaactggttgctaacctgcgtactgaactggccggcgtaagcggctgtgcagtggcaatcgcgccgccggaaatgtatctcgacctggctaagcgtgcggcagaaggcagccacatccacctgggcgcgcagaacgttgacgtgaacctgtccggcgcattcaccggtgaaacctccgccgaaatgctgaaagatatcggcgcgcagtacatcatcatcggccactccgaacgccgtacctaccacaaagaatccgacgagctgatcgcgaagaaattcgctgtactgaaagagcagggtctgacgccggttctgtgcatcggtgaaaccgaagctgaaaacgaagcgggcaaaactgaagaagtgtgcgcgcgtcagatcgacgcggtgctgaaaactcagggcgcagccgcttttgaaggcgtggttatcgcgtacgaaccagtatgggctatcggtaccggtaaatccgctaccccagcgcaggctcaggcggtacacaaattcatccgtgaccacattgctaaagctgacgctaaaatcgctgagcaggtcatcatccagtacggcggttccgttaacgccggcaacgccgcagagctgttcacccagccggacatcgacggcgcgctggttggcggcgcttccctgaaagcagacgctttcgcggtgatcgttaaagctgcagaagcggcgaaaaaagcgtaa

SEQ ID NO: 113091 - DNA, 600 bp, Enterobacter aerogenes
atgaagaagtgggcaatcttaagtttgattgggctgacagcgttatctgtcggcccgatggcgttgtccgcagaaacagaatccgccgccaccgccccctatcttttacccagcgcgccgatttttgatgtcagcatcagcgagttccgcgaaaaatttaatgccgataatccgaaactgccgcttaacgagtttcgttctatcgcctccagccgcgataaagctaacctgacccgcgctgccaccaagattaacgagaatctgtatgcctctaccgcgctggagcgcggcacgctaaagattaaatcgatgcagataacctggctgccgattcaggggccggaacaaaaagcggcgaaagcgaaagcgcaggagtatatgagcgctattcttcgcgcttttgtaccgacgctaagtccactgcagagccagcaaaagttgcaaaaactgctgaccgccggcaaaggcaaacgctactacaccgaaaccgaaggcgcggtgcgctatgtagtggcagatcacggggaaaaggggctaactttcgccattgaaccgattaagctggcgctatctgaaacgctggaagacaacaataaatga

SEQ ID NO: 113092 - DNA, 429 bp, Enterobacter aerogenes; identical to SEQ ID NO: 111444

SEQ ID NO: 113093 - DNA, 747 bp, Enterobacter aerogenes
atggcaaactgggttacaggtaaagttgtaaaagtgcaaaactggaccgatgcactgtttagcctcaccattcacgcgcccgttgagccgttcaccgcagggcagtttgctaaactgggcctggatgttgacggcgagcgcgtgcagcgcgcctactcctacgtcaacgcccccagcaatcccgatcttgagttctacctggtcaccgttccggagggtaaactcagcccgcgactggccgcgctgaaacccggggacgacgttcagatagtcagcgaagccgccggtttcttcgtgctggaagaggtgccggactgcgacacgctgtggatgctcgccaccggtacggcgatcggcccctatttgtcgattctggaggaagggaaagacctggatcgcttcaaaaacctggtgctggtgcatgcggcgcgctacgcagccgacctcagctatttaccgcaaatgcgcgagctggagcagcgctacgccggcaaattgcgtatccagaccgtggtcagccgtgagacagcggaaggttctctgactggccgggtgccgtttctgattgaaaccggtgcgctggaagaggcggtcggcctgccgatgaccgccgataccagccacgtgatgctgtgtggtaacccgcagatggtgcgtgatacccagcagttgctgaaagagacccggcagatgaccaaacatctgcgtcgccgaccgggccatatgacggcagagcactactggtaa

SEQ ID NO: 113094 - DNA, 1011 bp, Enterobacter aerogenes
atgaaacgagaactggccatcgaattttcgcgtgtcaccgaagccgccgcgctggcgggttataaatggctgggccgcggcgataaaaataccgccgacggcgcagcggttaacgccatgcgcattatgctcaacctcgtcaatatcgacggcaccatcgtcatcggcgagggcgaaatcgatgaagcgccgatgctctatatcggcgaaaaagtgggtaccggcaaaggcgacgcggtagatatcgccgtcgatccgattgaaggcacccgcatgacggccatgggccaggccaacgcgctggcggtgatggcggttggcgataaaggctgcttcctcaacgcgccggatatgtatatggaaaagctgattgtcggccccggcgctaaaggcgctatcgatctcaatctgccgctggaagagaacttgcgcaacatcgcccgcgcgttgaataaaccgctcgctgaactgaccgtcaccgtgctggcgaaaccccgccacgacgcggtcattgcgcaactgcagcagttgggcgtgcgcgtgttcgcgatccccgatggcgacgtggcagcttctattctgacctgtatgccggatagcgaagtcgacgtgctgtacggcatcggcggcgcgccggaaggcgtggtttcggcggcggtgatccgcgcgctggacggcgatatgcagggccgcctgctggctcgccaccacgtgaagggcgacagcgaagagaaccgccgtatcggtgaaagcgaactggcgcgctgcaaaactatgggtatcgaagcgggtaaagtgctgcgtcttgatgaaatggcgcgcagcgataacgtcatcttctccgccaccgggattaccaaaggcgatctgctggatggcatcacccgccagggcaatatggcgaccaccgaaacactgctaatccgcggtaaatcgcggactatccgccgtattcagtcgattcattacctcgaccgaaaagacccggacgtccagcaacacatcctgtaa

SEQ ID NO: 113095 - DNA, 2082 bp, Enterobacter aerogenes
atgtcaggccgcctgttagatgccgtcccgctcaactcgctgaccggcgttggcgccgcacagagcagcaaactggcgaaaatcggtctgcatacggttcaggacctgctacttcacctgccgctacgctatgaggaccggactcacctgtaccaaatcggcgaactgttgccgggcgtctacgcaaccgtagagggtgaagtgctcaacagcaatatcaccttcggcggccgccggatgatgacctgtcagatcagcgacggctccggcattctgaccatgcgttttttcaacttcaacgcggcgatgaaaaacagcctggcgaccggtcgtcgcgtgctggcctacggcgaagctaaacgcggcaagtttggcgccgagatgatccacccggaatatcgcgtacagggcgatatgagtaccccggagctgcaggaaaccctcactccggtctacccaaccactgaaggcattaagcaggcgacgctgcgcaaactcaccgatcaggcgcttgagctgctggaaacctgcgcgattagcgaactgctgccgccggagttggcgcaggggatgatgagcctgccggaggcgctgcgtacgctgcaccgcccgccgccgtcgctacagctcagcgagctggagagcggtaaacatccggcacagcagcgtcttatcctggaagagttgctggcgcataatctcagcatgctggcgcttcgcgccggcgcccagcgctaccatgcgctgccgctcagcgccaacgacacgctgaaaacccagctcctggcttccctgccctttaaaccaacgggcgcgcaggcgcgcgtcaccgcggagatcgagcgcgatatggcgctggacgtgccgatgatgcgcctggtgcagggcgacgtcggatccggtaaaacgctggttgccgcgctggccgccttgcgcgctatcgcccatggtaagcaggtggcgctgatggcgccgaccgaactgctggccgagcagcacgccaataatttccgcagctggttcgcgccgctgggcattgaagtcggctggctggctggcaaacagaaaggcaaagcgcgccaggcgcagcaggaagccatcgccaacggtgaagtgcagatgattgtcggcacccacgccatttttcaggagcaggtgcagtttaacggcctggcgctggtgattatcgacgaacagcaccgctttggcgttcatcaacgcctggcgctgtgggaaaagggccagcagcagggcttccacccgcatcagctgatcatgaccgctacgccgattccgcgcaccctggcgatgaccgcttatgccgatctcgatacctcggttatcgatgagctgccgccgggccgtaccccggtaacgaccgtcgctatcccggacacgcgccgcagcgacattatcgaccgcgtgcgtaacgcttgcacccaggaaggtcgccaggcctattgggtctgtacgttgattgaagagtccgatctgctggaagcccaggcggcggaagccacctgggaagagctcaagctggcgctgccggaactgaatatcggcctcgtccacgggcggatgaaaccagcggagaaacaggccgtgatgcaggccttcaagcagggcgagatgcacctgctggtcgccaccacggtgattgaagtcggcgttgacgtccctaactcaagcctgatgattattgaaaacccggagcgtcttggtctggcgcagctgcaccagctacgcgggcgcgttgggcgcggcgccgtcgcctcccactgcgtgctactctataaatcgccgctctccaaaacggcgcagaagcgcctgcaggtgctgcgcgacagcaacgacggtttcgtcatcgcccagaaagacctggaaatccgcggccccggcgagcttctcggcacccgccagaccggcaacgccgaatttaaagtagcggacttgctgcgcgatcaggccatgatccccgaggttcagcgcattgctcgccatattcacgaacgctatccgctgcaggcacaggcactgattgagcgctggatgccggaaaccgaacgctattccaacgcgtag

SEQ ID NO: 113096 - DNA, 690 bp, Enterobacter aerogenes
atgaattcaaagcgttatgcgcgtatctgcgagatgctcgccaggcgtcagcctgatctgacggtctgcatggagcaggtccataaaccccataacgtctctgcggtcatccgcaccgcagacgccatcggcgtacacgaagtacacgccatctggcctggcagccgtatgcgcaccatggcctctgccgcagccggcagcaatagttgggtgcaggtgaaaacacaccgcacgatcggcgatgccgtcagccacttaaaaggccggggcatgcaaatcctcgcgacgcacctttccgacaaagccatcgattttcgcgaaatcgactatacgcgcccgacctgcatcctgatgggccaggagaaaaccggcatcacccaggaagcgctggcgctggcagaccaggacatcattatccctatggtcggtatggtgcagtcgctgaacgtctccgtcgcctccgcgctgatcctttacgaagcgcagcgtcagcggcagaacgctggaatgtaccaacgcgccaatagcatgctgccgcctgaagagcagcagcggctgctatttgaaggcggttacccggtgctggcgcgcgtcgccaaacaaaaagggctgccttatccccacgtcaacgagcagggtgaagtcgaagccgatgcctcgtggtgggcaacgatgcaggcggcgaggtaa

SEQ ID NO: 113097 - DNA, 2121 bp, Enterobacter aerogenes
ttgtatctgtttgaaagcctgaatcagctgattcaaaactacctgccggaagagcaaatcaagcgccttcggcaggcgtatctcgttgcacgtgacgctcacgagggtcagacacgttcaagcggtgaaccctatatcacgcacccggtagcggtggcctgcattctggccgagatgaaactcgactacgaaacgctgatggccgcgctgctgcatgatgtgattgaagatacccctgccacctaccaggacatggaacagctttttggtaaaagcgtcgccgaactggtagagggggtgtcgaaacttgataagctcaagttccgcgataagaaagaggcgcaggccgaaaactttcgcaaaatgatcatggcgatggtgcaggatatccgcgtcatcctcatcaaacttgccgaccgcacccacaatatgcgcaccctgggctcgctacgcccggataaacgccgccgcatcgcccgcgaaacgctggaaatttatagcccgctggcgcaccgtctaggtattcatcacatcaaaaccgagctcgaagagttgggctttgaagcgctgtaccctaaccgctaccgcgtcatcaaagaagtggttaaagcagcgcgcggtaatcgtaaagagatgattcagaaaatcctctctgagatcgaagggcgtttacaggaagcagggatcccctgccgcgttagcggtcgcgaaaagcatctgtactctatttactgcaaaatggtgctcaaagagcagcgttttcactcgattatggacatctacgccttccgcgttatcgttcacgatcccgatatctgctatcgcgtgctgggccaaatgcacagcctctacaagccgcgtccaggccgtttcaaagattacatcgccattccgaaagcgaacggctatcaatctttgcacacctcgatgattggcccccacggcgtcccggtcgaggtacaaatccgtaccgaagatatggaccagatggcggaaatgggggttgcggcgcactgggcttataaagagcacggcggcgaaagcagcacgaccgcgcaaatccgcgctcagcgctggatgcaaagcctgctggaactgcagcagagcgccggtagctcctttgaatttatcgagagcgttaaatccgatctgttcccggatgagatttacgttttcaccccggaagggcgcattgtcgaactgcctgccggcgccacgccggtggacttcgcctatgcggtgcataccgatatcggccatgcctgcgtcggcgcgcgcgtcgaccgtcagccctatccgctgtcgcaaccactctccagcggccagactgtcgaaatcattaccgcgccgggcgcacgcccgaatgccgcatggctgaactttgtcgtcagctcaaaagcgcgcgccaagatccgccaactgctgaagaaccttaagcgcgacgattcggtcagccttggccgccggctgcttaaccacgcgttaggcggcagccgcaagctggcagagattccgccagagaacatccagcgcgaacttgaccgcatgaagctggccacgcttgacgatctgctggcggaaatcggtctcggtaacgcgatgagcgtggtggtggcgaaaaacctgcagcagggcgaagcctctgccgcaccggtgccggccaacgcgtcgaatcacggccatctgccgatcaagggcgccgatggcgtgctgattactttcgccaagtgctgtcgtccgattccgggggatccgatcatcgcccacgtcagcccaggcaaagggttggttatccaccatgaatcctgtcgtaacatccgcggctaccagaaagagcctgagaagtttatggcggtcgaatgggataaagaaactgcgcaggaatttatcgccgaaattaaggtggatatgttcaaccaccagggcgcgctggctaacctgacggccgcaatcaacaccgcgtcttccaatattcagagcctgaatacggaagaaaaagatggccgcgtttacagcgcctttatccgcttgaccgcgcgcgatcgcgtgcatctggcgaatatcatgcgcaaaattcgcgtcatgccggacgtgattaaagtcactcgtaaccgaaattag

SEQ ID NO: 113098 - DNA, 276 bp, Enterobacter aerogenes; identical to SEQ ID NO: 87552

SEQ ID NO: 113099 - DNA, 735 bp, Enterobacter aerogenes; identical to SEQ ID NO: 111437

SEQ ID NO: 113100 - DNA, 1680 bp, Enterobacter aerogenes
atgcgcagatggctgatagcggcagcgttatggatggcggcggcaagcccaatggcggcctgcccggcgtggtctttgcaacgcgcggagcaggagataggccacctcagtcggcaaattgccgactggaaagaggcctactggcagcagggcagcagcggggtcagcgacgaggtctacgacatgctctcggcccggttggcgcagtggcggcgctgcttcggtgagaaggcgccgcctgaagacgagctgccgccgccacgcggcgaagtcaagcatcctattgcgcataccggcgtgcgcaaactgcctgatgccacgagcgttggccgctggatgcgcgataaaaccgacctgtgggtacaaccgaaagtcgacggtgtcgcggtgacgctggtttatcgcggcggtaggtttatacgggcgattagccgcggcgacggtctggcgggtgaagactggacggcaaaagtgcgccagatccccggcgtaccgctgaccacctccgggacgctggcgaatagcgttctgcagggcgagatttttcagcggcgagaggggcatatacaaaaggggatgggcggtatgaattcacgggcgagagtggccgggatactgatgcgcaaagcaccgtcggcggcgttgagcacgctgggggtgtttatctgggcctggcctgatggcccggcccggatgtctacccgtctggcgctgcttgctgacggtgggtttcctgtagcgcagcgctattcccatccggttaaagattggcagcaggctgccgcctggcgggagcgctggtttacctcgccgctgccctttgtcaccgacggtatcgtaatccgtacccagagagaacccgccggtgacggttggcttcccggacaggggttctgggtggcggcctggaaatatcagccagtttcacaagtggcggaagtgagcacaatccagtttgccatcgggcgtagcggtaaaataactgttgtggcgcatctacaaccgataaagctggacgacaagctcgtgcggcgggtcaatgtcggttcggtggcccgctggcggcagttagatctcgccccaggcgatcagatcctggtgagccttgcggggcaagggatcccgcggctggatgatgtagtatggcgtggcctgaacagaacgaagccgttggtgcctgatactcgctatcactctcttacctgttttgaaaactccgatgaatgccgggagcagttcatcgcgcgattggtttggataagctccgagcaaggattaggcattgatagcctgggagaagcaggatggagacagcttgctcagtcgcgccatttccaacatatcttctcctggcttgagttgacggtgtcgcagttggaaaacattcctggcttaacggcaacccgcgcagagcaactttggcatcgctttgcactaacacggcgcgcaccctttcatcgatggataagcgcgcttggtgtgccgcttccgcacgctgccatgcgggtcttaaaagataattcatggcggctaattgagaagcgtgatgtcacgagctggcaaacgttacccggcgttgggccaaagaatgctcaacggcttgttgagtttattcaccatccggtcatcaagtcgatagtgctaaaacttggtcaactggaggtggacggtttttcgtaa

SEQ ID NO: 113101 - DNA, 1653 bp, Enterobacter aerogenes
atgtcatttgctaaaagccttgctctgaccatcaacagaaaattttctgggcactttatcgccttattggcgatatctatcctcatccagctctggcctgtttttttcacgcagcccatccgatttgcattgcgcatcgccatctgcaacgcgcttttgttactaagcgtgtcgtggatttatcgctatacatccgggaaagtcattctctttttgttaaccagcgccctgacgcttaatttcgccatcgctttcagtacctgggatatctacaaaagcgagttcaataccgttttcgccatgagtattttggcaactaattattctgaagcgaaaagcatagccggtttgtacctctatattctgccaatagcggctttctacttcgtgattacctggtgggcggtgaagttgctcagcgagaagctatcaacgcgaaccaaaggtatcagcgttattctactcgcgctctttatgggctatttctccatctccagcatcatcaaaaagaaccaggatttagaggtttattacccgcttagttcgcgaattctggttaacactccgttgtatactgcttctgaattcgtcatcgccgatcgcgataattcactagccgaacacattacgcagtcaacgcctcactatcctgcgctacaggcacatgatacgggcatcgacacttatgttgtcattgttggtgaatccgcacgcagaagtaacatgcagctctacgatttctcccagcaaacgacaccggttgccagtgcatttactcacaacgcgcttatttttaaacacgctatcgcgcctgcctccgccacggtacttgctgtacctatggtcctcagtaaggccgatccggataactttaccgccgactcgatggccgataatatcgtgaatatttcccggcaatccggcttttataccgagtggatcagtgcgcagggcaactcaggaaaaagtaataactatattgtggcgatcgcctcaaccagcgaaaagcatcaatggatacatacccaatacgatagtgacctgcttcccgcgctggatgaagcattaaaagtgccgggcaaaaaagtcatttttttacatattaacggtagccatgaaatggcctgcgaccgatatccacagtccgccgcaattctcaataccggtgataaatacgaggattgctacaataacgccatccgattcaccgactcttttatcggcgaagtcgttaagcgcatacaaaatagcgcctcttctctaatttatttttccgatcatggtctggaaaaaaatcccgatctggcttcactgtatatgcacggttcccgtaatcccagtaaagaggcttatgacgtgccacagttcatttggtatagccaaagcgccctggccaaccagaaacgacgtattggctgggtaaacgaacgctggccaaccaccaacaactacgccctgatgttaagttggttaggtatcagcaccggtatcgaaaattgtgattctctcctcgagaagtgctatcaacccgaatcgcaaatttcggtcatggacggcggacggcatatattcaattatgaccagttacgcaatacattcagcgcaccggaccaaaagaccccatggcgtaaagtaaaaagaaattcgctatag

SEQ ID NO: 113102 - DNA, 618 bp, Enterobacter aerogenes
atgctgcttcatgttctttatctgattggtattacggcggaagcgatgactggcgctttagcagccgggcgtcgccgtatggacacctttggggtgattattatcgccaccgctaccgcactcggcgggggttctgtacgcgatatccttctcggccattatccgctcggttgggtgaagcatccggaatacgtcattattgtggcggtagccgccgtcctcacgactatcgccgcgccggtaatgccacacctgcgccgcctgtttctggtgctggatgccctgggtctgattgtgttctcaattattggcgcgcaaatcgcgctggatatgggcgaagggccgataatcgcgtctattgccgccgtgatcaccggcgtcttcggcggcgtactgcgtgatatgttctgtaagcgcattccgctagtgtttcagaaagagctgtacgccggcatctcctttgccgcggccattctgtacatcgccttacagcattacataagcgaccatgacgtggtggttatcacaacgcttctgtttggctttaccacccggctgctggctatacgtttaaaattaggtctaccggttttttattaccgacatgggtcacactaa

SEQ ID NO: 113103 - DNA, 864 bp, Enterobacter aerogenes
atgatccgcagtatgaccgcctatgcccggcgtgaaatcaagggtgactggggtagcgccgcgtgggaactgcgctcggtaaaccaacgctatctggaaacctacttccgcctgccggagcagttccggagcctggaacccgtggttcgcgagcgcatccgctctcgtctgactcgcggcaaaatcgaatgcaccctgcgttttgaacaggatcccagcgcccagggtgaattgatcctcaatgagaacctggcgaagcagctggtgaacgccgcgaactgggtaaaaatgcagagcgatgaaggcgagatcaacccggttgatatcctgcgctggcctggagtgatggcggcgcaagaacaggaccttgatgcgattgccgctgaaatcctcaacgccctgaacggcgcgctggacgactttatcgtcgcccgtgaaaccgaaggtcaggcactgaaaacgctgatcgaacaacgcctggaaggcgtcagcgccgaagtcagcaaagtccgcgcccatatgccggaaatcctgcagtggcagcgcgagcgcctggtcgccaagcttgaagacgccgaagtgcagctggaaaacaaccgtctcgagcaagagctggtgttgatggcgcagcgtatcgacgtcgccgaagagctcgatcgcctggaagcgcacgttaaagagacctacaacattctgaagaagaaagaagccgtgggtcgccgcctcgacttcatgatgcaggagttcaaccgcgagtcgaatactctggcgtcaaaatccatcaatgccgacgtgaccaattcagcgatcgagctgaaggtgctgatcgagcagatgcgcgagcagattcagaatatcgagtaa

SEQ ID NO: 113104 - DNA, 717 bp, Enterobacter aerogenes
atgcgtccagcaggccgtagcgctaatcaggtgcgtccagtaacactgacccgtaactatacaaaacatgctgaaggctccgtgctggtcgaatttggcgacaccaaagtactgtgcactgcctccatcgatgaaggcgtgccgcgcttcctgaaaggtcagggccagggctggatcaccgctgaatatggcatgctgccgcgctccacccatacccgtaacgctcgcgaagccgcaaaaggcaagcagggcggccgcacgatggaaattcagcgtttgattgcccgcgcgctgcgcgctgcggtggatctgaaagcgctgggcgagttcaccattacgctcgattgcgatgtgctgcaggccgatggcggtacccgtaccgcgtccattaccggcgcctgcgttgcgctggccgatgcgctgaacaagctggttgctgccggtaaactcaaaaccaacccaatgaagggaatggtggccgccgtttccgtgggtatcgttaatggcgaagccatttgcgatctggagtacgtggaagattccgccgcggaaaccgatatgaatgtggtaatgaccgaagacggtcgcatcattgaggtgcagggcacggcggaaggcgagccgttcacccatgaagagctcctcactctcctggcgttagcgcgagggggaatcgaatctattattgcgacgcagaaagcggcgttagaaaattaa

SEQ ID NO: 113105 - DNA, 642 bp, Enterobacter aerogenes
atgaagccgtatcagcgccagtttattgagtttgcgcttagcaagcaggttcttaagtttggcgaatttacgctgaaatccgggcgtaagagcccctatttcttcaacgccggcctgtttaataccgggcgcgatctggctctgctgggccgtttctacgccgaggcgctggtggattccgggatcgagttcgacctgctgttcggcccggcctataaaggtatccctatcgccaccactacagccgtcgcgctggctgaacatcatgaccgtgacctgccgtactgcttcaaccgtaaagaagcgaagacccacggtgaaggcggcaacctggtcggtagcccgctacagggccgcgtgatgctggtggacgacgtgattaccgccggtacagctatccgtgaatcgatggaaattattcaggctaatggcgctgagttggccggcgtgctgatctcgcttgaccgccaggaacgcggccgcggcgagatctccgcgattcaggaagtggaacgtgattatggctgcaaagtgatttctatcgtcactctgaaagatcttatcgcctatctggaagaaaagcctgagatggctgagcatttggcatcggtacgcgcttaccgcgaagcctacggcgtctga

SEQ ID NO: 113106 - DNA, 597 bp, Enterobacter aerogenes
atggcagaaaaacaaactgcgaaaaggaatcgtcgcgaagaaatacttcaatctctggcgctgatgcttgaatccagcgatggtagtcaacgtattaccacagcgaagctggcggcctccgtcggtgtttccgaagcggcgttataccgtcattttcccagtaaaacccgcatgtttgacagcctgatcgagttcattgaagacagtctgattacgcgcatcaatttgattttgaaagatgaaaaggacaccacggctcgtctgcgcctgattgttctgctgattcttgggtttggcgagcgtaatcctgggctgacgcgtatcctcaccggccacgccttaatgttcgaacaggaccgtctgcagggtcgtatcaaccagctatttgaacgtatcgaagttcaattgcgtcaggtgatgcgtgaaaagaaaatgcgtgagggagaaggctacaccctcgacgagacgctactggcaagccagctgctggcgttttgcgaaggcatgctgtcgcgttttgtacgtagcgagttcaagtaccgccctacggatgatttcgatgcccgctggccgctggtcgccgcgcaactgcaataa

SEQ ID NO: 113107 - DNA, 459 bp, Enterobacter aerogenes; identical to SEQ ID NO: 87560

SEQ ID NO: 113108 - DNA, 1215 bp, Enterobacter aerogenes
atgatgagtctggctggtaaaaagatcgttctcggcgtgagcggcggcatcgccgcctataaaacgccagaactggtgcgccgactgcgagaacgcggcgccgatgtacgcgtcgccatgaccgaagccgccaaggcctttattaccccgttgagcctgcaggcggtttccggttatccggtctccgatagcctgctggatccggccgccgaagcggcaatgggccatattgaactgggcaagtgggccgatctggttatccttgccccggcaaccgccgatttaatcgcccgcgtcgccgccggtatggcgaacgatctggtctccacgatttgcctggctacgccctcgccggtggccgtcgtcccggcgatgaaccaacagatgtatcgcgccgccgccacccagcacaaccttgccactattgcctcacgcggcctgttggtatggggcccggatagcggcagccaggcctgcggcgacgttgggccgggccgcatgctcgatccgctgactatcgtggagatggcggcgcagcatttctcgcctgtcaaagatttgcaacatctcaacatcatgattaccgcgggcccaacccgcgagccgctggacccagtgcgctacatcaccaaccatagctccggcaaaatgggcttcgcgattgccgccgccgccgcacaacgcggtgcgaacgtcacgctggttagcggcccggtgtcgctgccgacgccgccgtttgtgcagcgcatcgatgttggcagcgcgctggaaatggaagcggcggtgcagaatggcgtgcaacagcagcatattttcatcggctgcgccgccgttgccgactaccgcgcagcgattgtcgccgacgagaaaatcaaaaaacaaggtgatgaattaacaataaaaatggtcaaaaatccggacatcgtcgccggggtggccgcactaaaaaatcaccgcccgtacgttgttggatttgccgccgaaacaaataatgtggaagaatacgcccggcaaaaacgtgcccgtaaaaatctcgacctgatttgcgccaatgatgtttctcagccaaatcaaggttttaatagcgataacaacgcattacaccttttctggcaggatggggataagcgcttaccacttgagcgcaaggaattcctgggccaattattactcgacgagatcgttacccgttatgatgaaaaaaatcgacgttaa

SEQ ID NO: 113109 - DNA, 666 bp, Enterobacter aerogenes
atggatatacaggaatcattgatgccgcgggaaaaaatgctgcgcgacggtattgaaacgttgagcgacgttgagctgctggcgttgtttttgcgtaccggtacgcgtacccaggatgtactgacattttcacacagcttgctacagcgcttcggttcgctgtacgggctgttatcggctgagatagaacaatttgcagatatcgacggaatcggcattgcgaaatatgcgcaacttaaaggtattgccgagctggcgcggcgttattttagcctgcggatgagagaggaaccgtcgctggtcacgccgctcatgacgcgagaatttttacaaagccagctcgccgatgaagagcgggagatctttatggcgatctttttagataatcagaaccgggtattgaaacatagccgccttttttctggtactcttagccacgtagaggtgcatccgcgagaaattgtacgcgaagcaatcaaagtgaacgccgccgcggtgatccttgcccataatcatccttcaggtagtcctgaaccgagtaagtcggataagttgatgaccgacagggtggttaagtgttgtagattcatggagatacgcgtgcttgatcatctgattattggccgcggcgcgtacgtctcttttgccgaacgtggctggatttag

SEQ ID NO: 113110 - DNA, 237 bp, Enterobacter aerogenes; identical to SEQ ID NO: 87563

SEQ ID NO: 113111 - DNA, 168 bp, Enterobacter aerogenes; identical to SEQ ID NO: 87564

SEQ ID NO: 113112 - DNA, 810 bp, Enterobacter aerogenes
atgcctgaattacccgaagtcgaaaccagccgtcgcggcattgagccgcatctggtgggcgctaacatcctgcatgccgtagtgcgcaacgggcgcctgcgttggccagtatccgaagagatttaccgcctcagcgacgaaccggtgctgagcgtgcgccgacgcgccaaatacctgctgctggagctgcgtcacggctggatcattattcatcttggcatgtccggcagcctgcgcatcctcagtgaagagcagccggctgaaaaacacgaccacgtcgacctggtgctgagtaacggtaaagtgctgcgctataccgatcctcgccgctttggcgcctggttatggactaaagagctggatggtcatccggtgctggcgcatctcggcccggagccgctaagcgatgaattcaacgccgactatctccagcagcgttgcgcgaagaagaaaaccgccattaaaccctggctgatggataacaagctggtggtgggcgtgggcaatatctacgccagcgaatcgctgttttccgccgggatccatcccgatcggctggcctcgtcgctctcgcatcaggaatgcgagtggttagtgaagatgattaagctggtgctgctgcgctcgattgagcagggtggaacgacgctgaaggatttcctgcaaagcgacggtaaaccgggatatttcgcccaggaactgcaggtatatggccgcaaaggcgagccgtgccggatctgcggcacgccgattatcgccagcaaacacgctcagcgcgcgaccttttattgccgccagtgtcagaagtag

SEQ ID NO: 113113 - DNA, 480 bp, Enterobacter aerogenes
atgggcacaaaagcgatctatccgggcacctttgaccctatcaccaacggccatatcgatatcgttacccgcgcggcgggcatgtttgataaggttttgctggccatcgccgccagcccgagcaaaaaaccgatgttcagcctcgatgaacgcattgcgctggcggagcaggcaacagcgcatctggtcaacgttgaggtgattggctttagcgatttgatggccaatttcgcccgcgcgcagcaggccaatattctcattcgcggcctgcgggcagtggcggatttcgaatatgaaatgcagctggcgcacatgaaccgccatctgatgcccacgctggaaagcgtgttcctgatgccgtgcaaagagtggtcgtttatctcttcatcgctggttaaggaagtggcgcgccaccagggcgacgtctcccacttcctgccgcctaacgtacatcaggcgctgttaaataagctgaagtag

SEQ ID NO: 113114 - DNA, 771 bp, Enterobacter aerogenes
atgtcgacccgactctccgtcgtgatgatcgccaaaaacgccgccgacctgctcgccgattgcctggcgtcggtaagctgggcggatgaagtggtggtgctggactccggcagtaccgacaataccgtcgaactggcccgtagcctcggcgcgcgggtctatagcaataccgactggcgaggctatggcattcagcgccagcgcgcacaggattacgccactcacgactgggtgctgatgattgataccgacgagcgcgttacgcctgaactgaaagcggctattctcaaggtactggacgcgccgcagcgcggcgttatctacagtatcgcccggcgtaactacttcctcgggcgttttatgcgccacagcggttggtatcccgatcgggtgatgcgcctgtacgaacgcgcgcgttaccgctataacgataatctggtgcatgaatctctggatagcctcggcgccgaagtcgtgccgctcagcggcgatctgctgcacctgacctgccgcgacttctccggcttccagcagaaacagctggcgtatgccgcagcctgggcgcttgagcgccatcagaagggcaagacaacctcgatggcggggattttcagccatacgctgggcgccttcgtgaaaacgctgctgctgcgcggcggcgtgctggatggaaaacaggggtggctgctggcggtagtcaatgcgcaatacacgtttaataaatacaccgagctgtgggcactcagccgcggctactcggagaaagtgtaa

SEQ ID NO: 113115 - DNA, 1275 bp, Enterobacter aerogenes
ttggaattgctttataccaccctactctacctcattcagccgctggtgtggctgcgactgctgctgcgcagccgtaaggccccggcataccgtaaacgctgggctgaacgttatggcttctgtcaaaacaaggtagtgccggatggcattctgctgcactccgtctccgtcggtgaaacgctggcggcgatcccgttagtacgcgcgctacgccatcgctatccctcactgcccatcaccgtcactaccatgacgccaaccggctcagagcgagcgatgtctgccttcggtaaagatgttcatcacgtgtatctgccgtatgacctaccctgcgccatgaaccgcttcctcaacagcgtacagccgaaactggtcatcgtgatggaaaccgagctgtggccgaacatggtcgccgcgctgcacaaacgtaaaatcccgctggttatcgccaacgcgcgcctgtcagagcgttccgcgaaaggctatgccaaactcggcggcttcatgcgccgcctgttaagccgtattacgcttatcgccgcgcaaaatgaagaggacggcaaccgcttcctcgcgcttggcctcaaacgtaaccaactggcggtgaccggcagcctgaaattcgatatttccgtaaccccggaactggcggcccgcgccgttaccctgcgtcgccagtgggcgccgcaccgtaaagtgtggatcgccaccagcacgcacgacggcgaagaacaaatcatcctgcaggcacataaaaaactgctggaaaccttccccgacctgctgctgatcctcgtgccgcgccatccggaacgcttcggcgacgctcgcgatatggtgcaaaaggccgggatgagcttcaccatgcgcagcaccggtgaaattccgtcgaacagcacccaggtggtgattggcgataccatgggcgaattgatgctgctctacggcattgccgacctggcgttcgtcggcggcagcctggttgaacgtggcgggcataacccgctcgaacccgccgcccatgctattccggtgctgatgggcccgcataccttcaactttaaagatatctgcgccaagctgcagcaggatgatggcctgatcaccgtcacggacgccgactcgctggtcagagaggtttctaccctgctgacggacgaagattatcgactgtggtacggccgccacgcggtggaagtgctgcaccaaaaccagggcgcgctgtcgcgtctgctacagttactgcaaccctacctgccgcagcggagccactaa

SEQ ID NO: 113116 - DNA, 972 bp, Enterobacter aerogenes
atgaataagcttaaattgcacgccgtttctcgcagcgattttatcgctaaaaattatgctgacttccagacgctgctcgataaccgggtcgatcccaacaccattccagagcgtttttattgcggaggacgcggtggctggacattccagacgacgctggccctcaattattattatggcgacgcgatagaatgctctttcggctctgaatgccgccccgatgctatcaatctgatgcataacgatgatttcggttctcgcgtcaagccctggcgaggtgtcaccgtcgtcgcgcgcgctgaccgaccaccggttatcggcgcggattatgtcgttgaccaaaatccggaagttgacggtcacagtaatcgtatcttcgtcccttattggccgcagccgggtgttcagccgcgcgaacgcacggataacactattcaaaccgtggcctatttcgggcgcgtcgatagtttcccggcggaatatcaaagcgatgaatttaaacaacgcctggctgaacaaggtattgccttgcgtatctcgttcaacaactggacagactaccgcgatgtcgatatttgtgtgagtttccgtaaatcacatgaccataagctagcgcgcaaaccggccagcaagcttatcaataactggttgggcaaaacggtaatgatttgcgacgatgaacaatcgttccgggcaattcgcgaaagcgaactcgactatctgatagctaagaatccggacgaagccttcgcagcgatcatgaagttaaagaacgaccccgagctctatcaaaagatgcgcgaacaaggggagaaacggcttcaggtctattcaagggaagccgttgccgcccgttggatggcgctttttgaagatatctggcgcaagggtttgaatgcacgttcaatgccggtccgcgccctccgctttggttttggcaaagcgattcgtcctttgaccaaaaagtactga

SEQ ID NO: 113117 - DNA, 984 bp, Enterobacter aerogenes; identical to SEQ ID NO: 92479

SEQ ID NO: 113118 - DNA, 1332 bp, Enterobacter aerogenes; identical to SEQ ID NO: 92480

SEQ ID NO: 113119 - DNA, 1104 bp, Enterobacter aerogenes; identical to SEQ ID NO: 92481

SEQ ID NO: 113120 - DNA, 1113 bp, Enterobacter aerogenes; identical to SEQ ID NO: 92482

SEQ ID NO: 113121 - DNA, 1101 bp, Enterobacter aerogenes; identical to SEQ ID NO: 92483

SEQ ID NO: 113122 - DNA, 987 bp, Enterobacter aerogenes
atgcgggtattgatcgtaaaaacctcatccatgggcgacgtactacacacgctgcccgcgctaaccgatgctgtgcaggccattcccggcatccgctttgattgggtggttgaagagggcttcgcacagatcccttcatggcatgagaccgtcgagcgggtgattccggtggcgattcgccgctggcgcaaagcctggttttccgcgcctatcaaagcggaaagaaaagcctttcgcgaggccgtaaaggccgtcaactacgatgctattatcgatgcccaggggctggtgaaaagcgccgcgctggtgacgcgtctggcgcatggcattaaacatggcatggactggcagtccgcccgcgagccgctggcgagcctgttttataaccgtcgccaccatatcgccgttcaacagcatgcggtagagcgtacgcgcgaactgttcgccaaaagcctcggctatgcccggccgcagacgcagggtgattacgccatcgcgcgccactttattcgccccgactcaccggtagcagagccgtatctggtcttcctgcacgccaccacccgcgatgataaacactggccggaagcgcgctggcaagagcttctcgatctgctggcagatagcgccgtacggatcaaactgccgtggggcgcgccgcatgaagaggcgcgggcaaaacggctggcggaagggcgcaagaacgtcgacgtattgccgcgcatgagtcttgagcaggtcgcccagattctggctggcgcacgcggcgtggtttccgtcgatactggcctgagccatttgaccgccgcgctcgataaacccaatttcacgctctacggcccaaccgatccgggactgattggcggatatggtaaaaatcagcatattatccgcccggttaactcatcgcagcttgccgatttagacgctgctgcggtttttgcacaaatagagccattgctggtagcagagaaagcctatgtctga

SEQ ID NO: 113123 - DNA, 1020 bp, Enterobacter aerogenes
atgatgatgtcgcaaagtctttatcgtacgctcagggcgcgctatccccaggcgattatcgacgtgatggcgccggcatggtgccgtccgttgttatcgcgcatgccggaagtcaatgaagcgattgccatgccgctcggccacggcgcgctggctatcggcgaacgccgcaaactcggccacagcctgcgcgatcgtcgttacgatcgtgcttatgtgctgccgaattcgtttaaatcggcattggtgcctttctttgccaacatcccgctgcgcaccggctggcgcggcgaaatgcgctacggcctgctcaacgacgcccgcgtgctggataaagacgcctggccgctgatggtggagcgctacgtggcgctggcctacgataacggcgtcatgcgctgcgctaaagaccttccacagccgctgctgtggccgcacctgcaggtcaacgacggcgaaaaatcacaggcctgcaacgcctttaatctctcaaacgatcggccaattatcggcttctgccccggcgcagaattcggccctgcaaaacgctggccgcattatcactacgccgcgctggcgaaaaagctcattgacgatggttatcagatagcgctcttcggctcagcaaaagataacgatgccggcaaagagatcatcgccgcgctcagcagcgagcagcaggcctggtgccgtaatctggctggcgaaacccagctggaacaggccgtgattctgattgccgcctgtcaggccgtggtcagcaacgattcggggctgatgcacgtcgccgccgccctggaccgcccgctggtggcgctgtacggcccgagcagcccggactttaccccgccgctgtcgcacaaagcacgggttattcgcctgattagcggctaccacaaagtgcgcaaaggggatgccgctgaaggttatcatcagagcctgatcgacatcactccagaacgcgtcttgcaggagctgaacgaactgttagcggaaaaaaccgagcacgaggaagcgtaa

SEQ ID NO: 113124 - DNA, 933 bp, Enterobacter aerogenes
atgatcatcgtaaccggcggcgcaggctttatcggcagcaacatcgttaaagccctgaatgacaaaggcatcaccgatattctggttgtagacaatctgaaagacggcaccaaattcgtaaacctggtggatctggacatcgctgactacatggataaagaagattttctgatccagattatggctggcgaagagttcggcgaggtcgaagcggtattccacgaaggcgcctgctcttccaccaccgagtgggacggcaagtatgtgatggataacaactatcagtactccaaagaggtgctgcactactgcctggagcgtgaaatcccgttcctgtacgcctcttccgccgccacctacggcgggcgcaccagcgactttatcgaatcccgcgaattcgaaaaaccgctgaacgtctacggctactcaaaattcctgttcgacgaatacgtccgtcagatcctgccggaagcagattcgcagattgtcggcttccgttatttcaacgtctacgggccgcgcgaaggccacaaaggcagcatggcgagcgtggccttccacctcaatacccagttgaataatggcgaaaatccgaaactgttcgaaggcagcgatggattcaaacgcgacttcgtctatgtcggcgacgtcgccgcggtgaacctgtggttctgggaaaatggcgtttccggtatcttcaaccttggtactggccgcgcggaatccttccaggcggtcgccgatgcgaccctggcgtatcataagaaaggcagcattgagtacatcccgttcccggacaaactgaaaggccgctaccaggcattcacccaggccgatctgactaacctgcgtaaagcgggctatgacaaaccgttcaaaaccgttgccgaaggcgtaacggaatatatggcctggctcaaccgcgacgcgtaa

SEQ ID NO: 113125 - DNA, 1194 bp, Enterobacter aerogenes
atgcgtggtgatttctacaaacagttaaccaatgacctggataccgcgcgcgcggaagggttgtttaaagaagaacgtatcattacttcggctcagcaggcggacatcaccgtcggcgacagccacgtcattaacttctgcgccaacaactatctgggcctggcgaaccacccggaactgatcgccgcggcgaaatccggcatggacagccacggcttcgggatggcctcggtgcgcttcatctgcggtacccaggacacgcataagcagcttgagaaaaaactggcggatttcctcggtatggaagacgcgattctctactcctcttgctttgatgccaacggcggcctgtttgaaacgctgctggggccggaagacgctattatctctgatgcgctgaaccatgcgtcgatcatcgacggcgttcgcctgtgtaaagcgaagcgtttccgctatgccaacaacgatatgcaggagctggaagcgcgtctgaaagaagcgcgcgaagctggcgctcgccacgtgctgatcgccaccgatggcgttttctcgatggacggggtgatcgccaacctgaaaggcgtctgcgacctggcggataaatacgatgcgctggtgatggtcgatgattctcacgccgtgggctttgtcggcgaaaatggccgcggttcccatgaatattgcgacgtgatgggccgcgtcgacatcatcaccggcacgttgggtaaagcgctgggcggcgcgtcaggcggttacaccgccgcgcgcaaagaagtcgttgagtggctgcgccagcgttcccgtccttatctgttctccaactccctggcgccggccatcgtcgccgcttctatcaaggtgctggagatggtggaagcgggcagcgaactgcgcgatcgcctgtgggctaacgcgcgcctgttccgcgaaaaaatgaccgccgcaggctttaccctcgcaggtgccgaccacgcgatcatcccggtgatgctcggtgaagccaccatcgcgcaggaattcgcgcgcgaactgcagaaagaaggtatttacgtcaccggtttcttctatccggtggttccaaaaggccaggcgcgtattcgcacccagatgtcggcggcgcatacccctgaacaaattgaacgtgcggtggaagcctttacccgcatcggcaaacaactgggcgtcatcgcctaa

SEQ ID NO: 113126 - DNA, 1026 bp, Enterobacter aerogenes; identical to SEQ ID NO: 111409

SEQ ID NO: 113127 - DNA, 729 bp, Enterobacter aerogenes
atggccctctctatttttattagccgtctttggcgattgaagaatattatcttaccggtgctactgctttttatgagctttggcattttagctgaacaaaggcttgagcatggcgtgctgcaagcctactggaaagcgcaatggagtgataatgctaccattaatgttcctgccctcggatttcgctattattggcttgatgaccagggtaacttaaaaaaagttatccatatttatatgaaaggcacgatgaaagaacaactggcgtttattcgccagaattttagtgagatcccggagaattttatcaggtttcgcgagtggtatgttaaccagtcgggcagtctgttggttaataatgtcgcgcagtatgccgaatgcaacagtgagaactatagcgccttattgctttcttttattccctcgcaagataaaccattatccaatatggacgatatgaatgcgcagatctcctgcggcggggacggacgctatccctggttaacgacttaccatttacatcatgaatggaataaagattcttttaaagagtggccagatgataatgcgaataatacatattccgttatgcgtgatgacgtggtgattaaaatacgtactatcaacaagttctgggtctatgccgccctttacgatgacagtaaaacggatggtatgagtgaaaaacgagggtacatcagggtaagtcatctgaaaccagataattga

SEQ ID NO: 113128 - DNA, 792 bp, Enterobacter aerogenes
atgtttaaactctcagtatgcttgctgacctgtaattcggcccgcttattacgggaagtattgccgccgttgttgcgggtggcagatgagtttattgtcgttgattccggcagtacggatgaaacgctacagatatgtcagcagtttggcttaacggttcaccatcacccctatgccgcccacggcatgcagatgaactatgcgacctcgctggcgactcatgactgggtgctgtgcatggatagcgacgaaatcctcgatgatgaagtggttgcggcgattctggcgcttaaggcgggagaggagccggatccgagctgtgcgtggcgcttgccgcgctactggttcgtgcttggcgaacaggtgcggaccatctatcccatctcatcgccggattacccggtacgtctgttcaaccgtcagcgggccagttttaaccagcgtccggtagacgatcaggtagtcggccatctgacctcgaccaggctgccgggctttgtccgccacgataccttctattcactgcatgaagtgtttaacaagctcaacagctataccacccggctggtgaagatgcagaaggtcaggccgtcgctcagccgcgggattatcagcgccatcggcgcattttttaagtggtatttattcagtggcgcctggcgtagcggcaaggtgggggccgtaaccggtttgtacgccaccttgtacagcttcatgaagtattttaaagcctggtatgcctacaatggtaagcagcagggaaccgtgacggagaagcgcacggatccctga

SEQ ID NO: 113129 - DNA, 900 bp, Enterobacter aerogenes
atggctgcgccggttttcgccggtaaactctctatcgttatcgatgatttcggctaccgtccgcagacggaaaataaggtgctggcgctaccgcccaccatctccgtcgccgtacttccgaatgccccccacgcccgggaaatggccactaaagcgcataatctgggccatgaagtgctgatccatctgccgatggcgccgctcagcaagcaaccgctggaaaaagacacgctgcgcccggatatgagcagcgatgagatcgaacgtattatccgtgaggcttacgggaaagtgccttacgccgtcgggctgaataaccacatgggtagcgccatgacctcaaacctgttcggcatgcaaaaggtgatgcaggcgctggaacgctacaatctctattttctcgatagcgtgaccatcggcaacacccaggccatgcgcgccgcccagggtaccggcgtgaaggtgattaaacgcaaagtgtttctcgacgacacccagaacgaggcggacatccgcactcagttcaatcgcgccatcgcactggcgcggcgtaatggttcggcgatcgccattggccacccgcatccttcaacggtgcgggtactacagcaaatggtctataacctgccgcctgatatcacgctggtgcgcccgagtaatctgctgaacgaaccgcaggtcgacaactcgacgccaaacacgcccgtccaaccaaacgcgccgcagcagcagaagccgcgtaacccgttccacggtgtgaagtactgcaaaccgaagcgtccgctggagccggtgaacgccagccgcttctttagcatcctcagcgaaagcatcagccagagcgcgctggtccagtattaccagttgaaatggcagggctgggacagccccaccaactaa

SEQ ID NO: 113130 - DNA, 1272 bp, Enterobacter aerogenes
atgaggggaaaggcgacttattcaaatacatggatcgcaacggctgttcgatccgttctttacgccagcgcgcttagcgctggcgtattgctgtgcgccgcatccgctcacgccgatgaccgcgaccagctgaaatccattcaggccgatatcgccgccaaacagcgcgcaattcagcaacagcagcagcaacgagcctccctgctcgcccagttaaaagcgcaggaagaggccatttccgccgccgcgcgcaaactgcgtgaaactcaggatactctcaatcagctcaataagcagattgacgacatgaacgcgtctatcgctaagctggagcgccagcgcgcctcccaggaacggaatctcgccgcgcagctcgacgccgcgttccgccaggggccgcacaccggcatgcagatgatcctcagcggtgaagaggggcagcgtaaccagcgcctgcaggcctattttggttactttaaccaggcccgtcaggaaaccatcgcccagctcaagcagacgcgcgaagaagtcgcggtgcagaaatcgatgctggaagaaaaacaaagccagcagcaaacgctggtttacgagcaaaaagcgcagcaggccaagcttgagcaggcgcgcaacgagcgtaaaaagacgctctccagcctcgaatcctccattcagaaaggccaacagcagctcagcgaactgcgcgctaacgaatcgcgcctgcgcggccgcatcgcccaggcggaagcggcagccaaagcccgcgccgaccgcgaggctcgtgatgcccaggcggtacgtgaccgccagcaggaggcctcgcgcaaaggcaccacctataaaccaaccgaaagcgaacgttcgctgatgtcgcgaaccggcggcctcggcgcgccgcgcgggcaggccttctggccggtacgcggaacaattcttcatcgttatggcgaacagctgcaaggtgaactacgttggaaagggatggttatcgctgcgtctgaaggcaccgaagtcaaagccattgccgatggccgggtgatcctcgccgactggctacagggctacggcctggtggtggtcgttgaacacggcaaaggcgacatgagtctttacggctataaccaaagcgcgctggttagcgtcggtacccaggtccgcgcgggccaggctatcgcgctggtaggcagtagcggcggtcagggtcgtccgtcgctctatttcgaaattcgccgccagggtcaggcggtcaatccacagccgtggttgggaagataa

SEQ ID NO: 113131 - DNA, 1545 bp, Enterobacter aerogenes
atgtcggttactaaaaaacctatggtactggtgattctggatggctacggctaccgtgaagaccagcaggataacgccatttatagcgcgaaaacgccggtaatggacgcactgtgggcaaaacgcccgcacaccctgattgatgcatccggtctggaagtcggcctgcctgaccgccagatgggtaactccgaagtgggtcacgtaaacctcggcgcgggccgtatcgtgtatcaggatctgacccgtctggatgttgaaatcaaagaacgcaccttctttgccaacccggtgctgaccggcgcggtcgacaaagccgtcgccgccggtaaagcggtacacatcatgggcctgatgtcgcctggcggcgttcacagccacgaagaccacatcatggcgatggtagaactggccgccgaacgcggcgcagagaaaatctatctgcacgctttcctcgatggccgcgacacgccgccgcgcagcgctgaagcgacgctggctaaattcgaagctaaattcaccgcgctgggcaaaggccgtatcgcctctatcattggccgctactacgctatggaccgcgacaaccgctgggatcgcgtagaacaagcctatgatctgatgacgctggccaaaggcgaattccaggccgacaccgcggtggcgggcctgcaggcagcctacgcgcgtgatgaaaacgacgagttcgtcaaagcgaccgttatccgcgccgccggccaggccgatgccgcgatggaagacggcgacgcgctgatcttcatgaacttccgcgctgaccgcgcgcgcgaaatcacccgcgccttcgttaatgccgacttcgacggcttcgcgcgtaagaaagtggttaacctcgatttcgtgatgctgaccgaatacgccgccgacatcaaagtcgcttgcgcgtatccaccagcttcactggttaacactttcggcgagtggatggcgaagcacgacaaaacccagctgcgcatctccgaaaccgagaaatatgcgcacgtgaccttcttctttaacggcggcgtagaagatccgttcaaaggcgaagaccgtattctgattaactcgccgaaggtcgccacttacgacctgcagccggaaatgagctccgccgagctgaccgagaaactggttgcggccatcaaaggcggccagtatgacaccatcatctgcaactacccgaacggcgatatggttggccataccggggtgatggaagcggcggtgaaagcggttgaagcgctggatcactgtatcgaacaagtggccgcggccgttgaatctgtcggcggtcagctgctgatcaccgccgaccacggcaacgccgaacagatgcgcgatccggcgaccggacaggcgcacaccgcgcatactaacctgccggttccgctgatctacgttggcgacaaaacggtgaaagtggccgaaggcggcaagctttccgacatcgcgccaaccatgctgtcgctgatgggaatggaaatcccgcaagagatgactggcaagccgctgttcatcgtggaataa

SEQ ID NO: 113132 - DNA, 432 bp, Enterobacter aerogenes
atgcaagaaattatgcaattcatcggccgtcacccggtcctgagcatcgcgtggatcgcgctgctgggtgcggtactgttcaccacctttaaaggcttgatgtcaaaagttaaagtcattactcgtggtgaagcgacgcgtcttatcaacaaagaagaagccgttgttgtcgacctgcgtcagcgtgacgacttccgtaaaggccatatcgccggcgctatcaacctgctgcctgccgatatcaaagcaaataacgtcggcgagttggaaaaacacaaagcacaacccattattgttgtggatgggtccggcatgcaggcgcaagaacctgccagcctgctgaataaagccggattcgaaaaagtctttgtactgaaagaaggtatcgcaggctggagcggcgagaaccttccgctggtacgcggcaaataa

SEQ ID NO: 113133 - DNA, 252 bp, Enterobacter aerogenes; identical to SEQ ID NO: 87588

SEQ ID NO: 113134 - DNA, 468 bp, Enterobacter aerogenes; identical to SEQ ID NO: 87589

SEQ ID NO: 113135 - DNA, 1020 bp, Enterobacter aerogenes
atgaacgcgcttaatgctgcaatgactgtgatcggtgccggctcttacggcaccgctcttgccatcaccctggcaagaaatggccacgaggttgtcctctggggtcatgacccgaaacatatcgcgacgctgcaacacgatcgctgcaacgccgcgttccttcccgatgtgcccttcccggacacgctgcgccttgagagcgatttagcgacggcgctggccgccagccgcgatatcctcgtggtggtgccgagccacgtcttcggccaggttctgcgccagattaaaccgctgatgcgttccgatgcgcgtctggtgtgggcgacgaaaggtctggaggccgaaaccggccgtctgctgcaggacgtggcgcgtgaagcgctgggcgatgacatcccattagcggtcatctccggtccgacttttgccaaagagctggccgccggcctgccgacggcgatttcgctggcggcgacggagccgcagtttgcagaagaccttcagcgcttgctgcactgcggtaaaagcttccgcgtctacatcaacccggattttatcggcgtgcagttgggcggcgcggtgaaaaacgttatcgccatcggcgccgggatgtctgacggcatcggctttggcgcgaatgcacgtacggcgttgatcacccgtgggctggtggaaatgtcccgtctcggcgcggcgctaggcgccgatccggaaaccttcatgggcatggccgggttgggcgacctggtactgacttgtaccgataaccaatcgcgaaaccgccgttttggcatgatgctcggacagggcatggacgtgcaaagcgcgcaggacaagattggccaggtggttgaaggctatcgcaataccaaagaggttcgcgttctggcgcagcgtttaggcgtcgaaatgccaataaccgaggaaatttatcaggtattgtattgcggaaaaattgcgcgcgaggcagcattgaccttattgggtcgcgcacgcaaggacgaacgcagcgccaactag

SEQ ID NO: 113136 - DNA, 822 bp, Enterobacter aerogenes
atgccgtgtgaagaactggatatcgtctggaacaatattaaagccgaagcccgggctttggccgactgtgagccgatgctcgccagtttttaccatgcaacgctactcaagcacgaaaatctgggcagcgccctgagctatatgctggcgaataagctggcctcgccgattatgcctgctatcgctattcgcgaagtggtggaagaggcctatgccgcagacccggagatgatcgcttccgccgcctgtgatatccaggcggtacgtacccgtgaccctgcggtcgataaatactcaacgccgctgttgtacctgaaaggcttccatgcgctgcaggcctatcgtattggccactggctgtggaatcagggtcgctgcgcgctggctattttcctgcagaaccaggtttccgtctcgttccaggtcgatattcatccggcggcgaagattggccgtgggatcatgctcgaccacgccaccggtatcgtggtcggtgaaacggcggtgattgaagacgacgtatccatcctgcagtctgtgaccctcggcggtaccggtaaaaccagcggcgaccgtcacccgaaaattcgcgaaggcgtgatgattggcgccggggcgaagatcctcggcaatatcgaagtcgggcgcggggcgaagattggcgccggttccgtggtgctacaacctgtgccgccgcataccaccgccgcaggcgtaccggcgcgcatcgtcggcaagccggagagcgacaagccggcgatggatatggatcagcattttaatgggattcaccatactttcgagtacggcgacgggatttga

SEQ ID NO: 113137 - DNA, 474 bp, Enterobacter aerogenes
atgctgaacatcgtgttattcgaaccagaaatcccgccgaacaccggcaatatcatccgcctgtgcgccaacaccggcttcaatttacatatcattgagccgatgggctttacctgggacgataaacgtctgagacgcgccgggttggattatcacgagttcaccgccgtacagcgccacgcggattacgcggcgtttgtcgccagcgcgaagccgcaacggttgttcgccctcacgactaaaggcacgcccgcccacagcgcggtaagctatcaggatggtgatttcttgatgtttggtccggaaacgcgcggcctgccggccagcatcctcgatgccctgccggcggagcaaaaaatccgtattccgatgatgccggacagccgcagcatgaacctgtcaaacgcggtgtcggtggtggtgtatgaagcctggcgtcagttgggataccccggcgccgtgttgcgccgctaa

SEQ ID NO: 113138 - DNA, 1185 bp, Enterobacter aerogenes
atgattatttccgccgccagcgactatcgcgccgccgcacagcgtatcctgccaccatttctgttccactatatcgacggcggcgcctacgccgaacataccctgcgccgcaacgttgaagacctctccgacgtggcgctacgccagcgcattctgcgcaatatgtcggatctgagcctggaaaccacgttattcaacgaaaagctggcgatgccaacggcgctggcgccggtcgggctgtgcggcatgtacgcgcgccgcggcgaagtgcaggcagcgggcgcggcggacgacaaaggcatcccgtttaccctctctaccgtttccgtttgcccgattgaagaggtcgccccgaccatcaaacgcccgatgtggttccagctgtatgtcctgcgcgatcgcggatttatgcgcaatgcgctggagcgcgccaaagccgcaggctgctccacgctggtctttaccgtggatatgccgacccccggcgcgcgctatcgcgacgcccattctggcatgagcggcccaaacgccgccatgcgccgctactggcaggccgtcactcatccgcagtgggcatgggacgtcggtctcaacggccgcccgcacgacctgggcaatatctccgcctacctcggcaaaccgaccgggcttgaggattacatcggctggctggcgaataatttcgatccgtcgatttcatggaaagacctggagtggatccgcgacttctgggacggcccaatggtgatcaaagggatcctcgacccggaggacgcccgcgatgcggtacgcttcggcgctgacggcattgtcgtctccaaccacggcggccgccagcttgacggcgtgctctcttccgcccgcgccctgcccgccattgccgatgcggttaaaggcgacatcactattctcgccgacagcggtatccgcaacggtctcgacgtggtgcggatgatcgccctgggcgccgacagcgtgctgctgggccgcgcgtatctgtacgcgctggcgacccacggcaagcagggggtggcgaatctgctcaaccttatcgagaaagagatgaaagtggcgatgacgctgaccggggcgaaatccatcagcgaaatcagccgcgattcactggtgcagaatgccgaagcgctgcagaccttcgatgcgctcaagcagggcaacgccgcgtaa

SEQ ID NO: 113139 - DNA, 774 bp, Enterobacter aerogenes
gtgaaagtgatgccaaaacgcctggctgacgacgtcgcaaatcgcgtccgggcgctgatagaagaacaacagctggaggcgggcatgcgtttgcccgccgagcgccagcttgccgtccagctcggtgtttcacgcaattcgctgcgtgaagcgctggcgatgctggtcaacgaaggggtgctgcttagccgtcgcggcggcggcaccttcgtgcgctggcagcacgagccctggtcggagcaaaacatcgtccagccgctgaaaacgctgctcgccgacgaccccgactacagttttgatattctcgaagcccgccacgctattgaagccagcaccgcctggcatgcggcgatgcgggccaccgacgccgaaaaagataaaatccgcctctgttttgaagccaccctcagcgatgacccggatctcgcctcacaggcggatgttcgcttccacctggcgatcgctgaagcctcacataatgtggtgctgctgcaaaccatgcgcggtttcttcgagcttctgcaatcctcagtgaagcagagccgccagcgcatgtatctggtgccgccggtgttcgcgcgtctgaccgaacaacatcaggcggtaatggaagcgatcttcgccggcgacgcggaaggcgcccgccaggcgatgatggcccacctcggttttgtccacgccaccattaaacgttttgatgaagaccaggcccgccaggcgcgtattacccgcctgcccggtgaccacaatgaaaattccagggagaactcgtga

SEQ ID NO: 113140 - DNA, 1656 bp, Enterobacter aerogenes
atgaacctctggcaacaaaattacgatccggctggtaatatctggctatcgagccttatcgcctcactgccgattctgtttttctttttcgccctgattaagctcaagcttaaaggctatatcgccgccacctggaccgtagccatcgcgctgcttgtcgccctgctgttctataaaatgccggtcgatcgcgccttatcgtcggtggtatacggcttcttctacggcctgtggcctatcgcgtggattatcatcgccgcggtcttcgtctataaaatctcggtaaagaccgggcagttcgacattatccgctcgtcgattctttcgattacaccggaccagcgcctgcagatgctgattgtcggcttctccttcggcgccttcctcgaaggggccgccggtttcggcgcgccggtggcgatcaccgccgcgctgctggtcgggctcggcttcaatccgctatacgccgccgggctgtgcctgattgttaacaccgcgccggtggccttcggcgccatggggatcccgattctggtcgctggccaggtgaccagcatcgatagcttcgccatcggccagatggttggccgccaactgccgttcctgaccattatcgtgctgttctggatcatggcgattatggacggctggcgcggggtgaaagagacgtggcctgcggtgatggtcgcaggcggctcgttcgctatcgcgcagtacctcagctctaacttcctcggcccggaactgccggacatcatctcttcgctggtgtcgctggtatgcctgacgctgttcctcaagcgctggcagccggtacgtatcttccgctttggcgatatgggcgccgcgcaggttgatcaaaccctggcgcgcacgcattacaccgccggtcaggtcattcgcgcctggtcgccgttcctgttcctcaccgccaccgtcaccctgtggagcgtaccgccgtttaaagcgctgtttgcgccgggcggggcgatgtatgacttcgtggttaacatcccggtaccgttcctcgacaaaatggtcgcccgtatgccgccggtggtaagcgccgcgacgccgtacgccgcggtgtataaattcgactggctgtcggcgaccggcaccgccattctgttcgccgctatactgtctatcgtctggctgcgtatgaagccaaaggatgcgctgaccactttcgccgggacgttgaaagagctggcgctgcctatttactccatcggcatggtgctggcgttcgcctttatttcaaactactccgggctgtcatcgacgctggcgttggcgctggcgcataccggccacgcgtttaccttcttctcgccgttcctcggctggctgggggttttcctgaccggttcggatacctcgtctaacgcactattcgccgcgctgcaggcgacggcagcccagcaaatcggcgtctccgatattctgctggtcgccgcgaataccaccggtggggtgacaggcaagatgatttcgccccagtcgatcgccattgcctgcgccgcggtaggcctggtgggtaaagagtcggacctgttccgctttaccgtcaagcacagcctgatattcacctgcatggtgggcctgattaccaccctgcaggcttatgtcttaacctggatgattccgtga

SEQ ID NO: 113141 - DNA, 363 bp, Enterobacter aerogenes; identical to SEQ ID NO: 87596

SEQ ID NO: 113142 - DNA, 225 bp, Enterobacter aerogenes; identical to SEQ ID NO: 87597

SEQ ID NO: 113143 - DNA, 600 bp, Enterobacter aerogenes; identical to SEQ ID NO: 87598

SEQ ID NO: 113144 - DNA, 1149 bp, Enterobacter aerogenes
atgaaagcattacattttggcgcaggtaatatcggacgtggcttcattggcaaactgctggctgacgccggtatctcccttacgttcgccgatgttaatcaggtggtccttgatgccctgaatgcccgtcatagctatcaggtccacgtggtgggtgaaaacgaacaggttgataccgtctccggtgtgaatgccgtcagcagcattggcgatgaggtggtggatctgatcgccgatgtcgacctggtgaccaccgcggtcggccccgtcgttttggagcgtatcgcccctgccatcgccaaaggcctggtgaaacgtaaagcgcagggtattgaacgcccgctgaatatcatcgcctgcgaaaacatggtacgcggcaccagccagctgaaaggccatgtatttaacgcgctggcggaagaggacaaagcgtgggttgaagcacatatcggcttcgtcgactccgccgtagaccgcatcgttccgccgtcggcttccgccacccacgatccgctggaagtcaccgttgaaaccttcagcgaatggattgtggataaaacccagtttaagggcgagctgccgaacatcccaggaatggaattaaccgataacctgatggcatttgtcgagcgtaagctattcaccttaaacaccgggcatgctataaccgcctacctcgggaaactggcgggccatcaaacgattcgcgacgcgattctcgatgagcacattcgcgccgtcgtgaaaggcgcaatggaagagagcggcgcggtgctgattaaacgctacagctttgatgcgcagaaacacgcggcttatatccagaagatcctcggtcgctttgagaacccgtatctgaaagatgatgtggagcgcgtcggccgccagccgctgcgtaaattgagcgcgggcgatcgtttgatcaagccgctgcttggcacgctggaatacggcctgccgcaccggaacctggtaaaagggattgccgcggccatgcatttccgcagcgaagacgatccgcaggctcaggaactggcggcgctgattgccgaaaaagggccacaggccgcgctggcgcagatttccggtctggatgcggcaagcgctgtagtggcggaagccgttaacgactacaacgcggtaaaatga

SEQ ID NO: 113145 - DNA, 1911 bp, Enterobacter aerogenes
atgtcatccgatatcaagatcaaggtgcaaagctttggtcgtttcctcagcaatatggtgatgccgaatatcggcgcgtttatcgcgtgggggattatcaccgcgttatttatcccaacagggtggttgccgaacgagacgctggcgaagctggtcggcccgatgatcacctacctgctgccgctactgatcggttataccggcggtaagttggttggcggtgaacgcggcggcgtcgtcggcgctatcaccaccatgggcgttatcgtcggcgcggatatgccgatgttcctcggctcaatgatcgccggcccgctcggtggctactgcattaagaaatttgacgcctgggtagacggtaaaatcaaatccggtttcgaaatgctggtgaataacttctccgccggcatcatcgggatgatccttgccattctggcgttcctcggcatcggcccggcggttgaagtgctgtcaaaactgctggcggctggcgttaacttcatggtggcgcacgacatgctgccgctggcgtctatctttgttgaaccggcgaaaatcctgttcctcaataacgcgattaaccacggtatcttctcgccgctgggtattcagcagtcccatgagcttggcaaatccatcttcttcctgattgaagctaacccgggtccggggatgggcgttctgctggcgtacatgttctttggccgcggcagcgcgaagcagtctgcgggcggtgcggcaatcatccacttcctgggcggtatccacgaaatttacttcccgtacgtgctgatgaacccgcgtctgattctggccgttatcctcggcggtatgaccggtgtcttcaccctgactatcctcaacggcggcctggtctccccggcttccccgggttccattctggcggtactggcgatgacgccaaaaggcgcctacttcgctaacatcgcggccattattgcggcgatggcggtctcctttattgtctccgccattctgctgaaaaccagcaaagtgaaagaagaagacgatatcgaagccgcaacccgtcgcatgcacgacatgaaagccgagtccaaaggcgcggcgacgccgctggcggcgggcgacgtggctaacgaccttagccacgtgcgtaaaatcatcgttgcctgcgacgccggtatgggttccagcgccatgggcgccggggtactgcgtaagaaagtccaggatgccggactgagcaatatctctgtcaccaacagcgcgattaacaacctgccgccggatgtcgacctggtgatcacccaccgcgacctgaccgagcgcgccatgcgccaggtaccgcaggcacagcatatttcgctgaccaacttcctcgacagcggcctgtataccagcctgaccgagcgtctggtagcggcgcagcgccacatcgacaacgaagtgaaagtcaccgatagcctgaaagacagctttgataatactgacaaaaacctgttccagctgggtgcggataacatcttcctcgggcgcaaagcggcgaccaaagaagaggccattcgcttcgccggtgaacaactagtgaaaggcggatacgttgagccggaatacgtgcaggcgatgctcgaccgcgagaagctgacctcaacctatcttggcgaatctatcgcggtaccgcacggtaccattgaagcgaaagaccgggtactgaaaaccggcgtcgtcttctgccagtatccggaaggcgtgcgcttcggcgaagaagaagatgaagtcgcgcgtctggtcatcggtatcgccgcccgcaacaacgaacacattcacgttatcaccagcctgaccaacgcactggatgatgaaaccgtgattgagcggctggcgaaaaccaccagcgtcgaagaagtcctatcgttgctgaataaataa

SEQ ID NO: 113146 - DNA, 366 bp, Enterobacter aerogenes
atgtttctcaattattttgcgctgggcgttctaatcttcgttttcctggttattttttacgggattattattttgcacgatattccgtacctgattgcgaagaaacgtaatcatccgcactccgatgcgattcacgtcgcggggtgggtcagcctgtttacgctgcacgtaatatggccatttttatggatctgggccaccctctatcagccggagcgcggctggggaatgcagcataagccgaatgacgcagggactgatggcgctgacagcgagctggcgcagctcaatcagcgtatcgctgaactcgaacataaaatcgcgcatctgcagccgacagcgccgccatcctcgacggagaaataa

SEQ ID NO: 113147 - DNA, 1137 bp, Enterobacter aerogenes; identical to SEQ ID NO: 111388

SEQ ID NO: 113148 - DNA, 609 bp, Enterobacter aerogenes; identical to SEQ ID NO: 111387

SEQ ID NO: 113149 - DNA, 1389 bp, Enterobacter aerogenes
atgtctaccgatactcgcgcgctttatacccggcttccggccattgaccgcttacttcgcgatcccgcttttgctttactgctcgatcgccatggccattcgcaaatcgtggcgcttctgcgtcagatgttggatgaggcgcgggagcatatccgccaggcgcaagcattgccagagtggtgcgatgactggccgcaggagaccgccagtcggctgaaccttagtcagcagagcgcgctgcgtccggtattcaacctgacgggcaccgtgctgcacaccaatctggggcgcgctatccaggcggaagccgcggtacaggcggtggcgcaggcgatgcgcgcgccggtcacgctggaatacgatctcgacgatgccggacgcggtcatcgcgaccgggcgctggccgatctgctgtgccgcattaccggcgcggaagatgcctgtatcgtcaataacaacgcggcggcggtgttgctgatgctggcggcgacggccagcgggaaagaagtggtggtctcgcgcggcgaactggtcgagatcggcggcgcatttcgcatccccgacgtcatgcgccaggccggttgtctgctgcatgaagtgggcaccactaaccgcacccacgccaaagattattgtcaggctatcaatgagcagactgcgctgctgatgaaagtgcataccagcaactacagcattgaaggctttaccaaagcggtcgatgaggcggagctggcggaagttggccgcgaacatggcgtgccggtggtggccgatctcggcagcggctcgctggtggatttgagccagtacggtttgccgaaagaaccgatgccgcaggaattgattgcggcgggcgtgaatctggtgagcttttccggcgataagctgctcggcggaccgcaggcggggattatcgtcggcgatcgggcgctgatcgcgaagttacagagtcatccgcttaagcgcgcgctgcgggcggataaaatgacgctggcggcgctggaggcgactctgcggctgtatctgcatccggaagcgctggccgacgagctgccgacgctgcgcctgctaacccgccgcgccgaggatctccgccagcagggcgagcgtattcagcctgcgttagcggcgcactatagcgattttgatgtgcgcgtcgaagcgtgtttatcgcagatcggcagcgggtcgttgccggtcgaccgactgcccagcgccgcgttaacctttacgccgtgcgatggtcgcggcagccagctggaagcgctggccgcgcgctggcgcgccttgccgataccgacgatcggcagaatttatgatggccgcttatggctggatctgcgctgtcttgaagatgaaccccggtttatggagatgttattgagatga

SEQ ID NO: 113150 - DNA, 1860 bp, Enterobacter aerogenes
atgattattgccaccgccggacatgtggaccacggcaaaaccacgctgctgcaggcgattaccggcgtcaacgccgatcgtcttccggaagagaaatcgcgagggatgactatcgatctcggctacgcctattggccgcagcctgatggccgggtgttaggttttatcgatgtgccggggcatgaaaagtttttgtccaacatgttggccggcgtgggcgggatcgatcacgcgctgctggtggtggcctgcgatgacggcgtgatggcgcaaacccgcgagcacctggcaattctgcagttaacgggaaaaccgacgttaaccgttgctttgaccaaaacggaccgcgtggacgcggcgcgggttgccgaagtccgggcacaggtggaatccacgctgagcgagctgggattcgacgacgtggctttcttcgccaccgcggcgacggaaaacctcggcattaccgaactgcgcagccatttgctccagctgaccgagcgcgcgcatccgcaacagcagcgttttcgtctggcgctggatcgcgcctttaccgttaagggcgcggggctggtggtgaccgggacggcgctatccggcgaggtaaaaatcggcgataccctctggctgaccggggccaataaaccgatgcgcgtccgcgggctacatgcgcagaatcagccggttgaacaggcgcgggccgggcagcgtatcgcgttgaacatcgtcggcgacgcgcaaaaagaggatctcagccgcggcgactggctgctctcggcgcagcccgcagaaccttgcgagcgggcgatcgtcgagctcacctgtcacgcgccgctcatccagtggcagtcgctgcatatccaccatgccgccagccatatcaccggccgcgtttcgttactggaaggcaatctggccgagctggtgctggatacgccgctgtggctggcggataacgatcgcctcgtgttgcgcgatatctccgcccgtttgacgctggccggcgcgcgggtggtgacgctgaatccgccgcgccgcggtaaacgcaagccggagtatctgcagtggctttacacgctagcggcagcgcagggcgacgatgcgcaggcgttggatattcatttgcagcgcgatgcggtgcgtcttgacgagtttgcctgggcacggcagctgagcgccgacggcctgacggcattaattaaccgtccggactacctgcaggccgggaatagcctgcttagtgcgccgctggccgctcgctggcagaaaaaactgctcgacgcgctggcccgttatcacgaccagcatcgcgatgagccggggccggggcgtgaacgtctgcggcggattgcgctgccgatggaagatgaagcgctggtgctgttattgattgaacagatgcgcagcagcggcgtcattcaaagccatcacggctggctgcacctgccggaacataaagccgggtttaccgatgagcagcaggccatctggcagcgtgcggaatcgctcttcgccgatgagccatggtgggtgcgcgatctggcgcgcgatctgaacgtcgaagagtcgttgatgcgcgcggtgctgcgccaggcggcgcagcaggggatgattacggcgatcgtgaaagatcgttattatcgcaacgatcggattgttgaatttgcgcaattgatccgccgcctggatctgcagcgtggttccacctgcgcggcggattttcgcgatacgctgaatattggccgtaaactggcgattcaaattctcgaatatttcgaccgcattggctttacccgccgtcggggcaatgatcatctacttcgcgatgcgctgttattccctgaaaataaaaacggcgaataa

SEQ ID NO: 113151 - DNA, 1152 bp, Enterobacter aerogenes
atggctgcatcgactttttatattccgccagtaaacgttattggcgctggttctgttactgaagcgatgaatactatccagcaatacggatatcgtcgggcattaattgtcaccgacgcgatgctgaataaattaggtatggcgggtgaagtacaaaaggcgttacaggagcgggatattttcagcgtggtgtatgacggcgtgcacccgaacccgacgactctgaacgtcgaaagcggtctggcgctgctgaaagagaataactgcgactgcgtgatttccctgggtggcggttccccgcacgattgcgcgaaaggtatcgcgctggtcgcggcaaatggcggcaacatccgtgactatgaagtggtggaccgttcggcaaaaccgcaattgccgatgatcgctatcaataccaccgccggtacggcttccgaaatgacccgcttctgcatcattaccgatgtcgatcgccacatcaaaatggcgattgtcgataagcacgtgacgccggttctgtcggttaacgactcctcgctgatgatggggatgccgaaatcgctgaccgccgccaccggtatggacgcgctgactcacgctatcgaagcctatgtttctatcgcggcgacgccgatcaccgatgcctgcgcgttgaaagcgatgaccatgatttcgcagaatttaactcacgcagtggaagatggcggcaatgaacaggcgcgtgaagcgatggcctatgcgcagttccttgccggtatggccttcaacaacgcgtcgctgggctacgtccacgcaatggcgcaccagctgggcggcttctacgatctgccgcacggcgtctgcaacgccgtactgctgccgtttgtgcaggagtacaactgcagcgtcgccgccgcgcgtctgcgtgactgcgcgcaggcaatgggcgtgaacgttgccgggctgaacgataagcagggcgcggaagcctgcatcgcggccatccgcgagctggcgcgtaaagtcggcatcccggccggtctgcgcgatctgaacgttaaagaagaggatatcccgctgctggccagcaacgcgctgaaagatgcctgcggtttaaccaatccgattcaggcgacccacgaagagattatggcgattttccgcgccgcgatgtaa

SEQ ID NO: 113152 - DNA, 489 bp, Enterobacter aerogenes
atgaaccggtttattatcgccgatgcgcaaaagtgtatcggctgtcgaacctgcgaggtggcctgcgtggtatcgcatcagcaggatcaagattgttctaccgtttctgcaagacgctttacgccgcggattcgggtggttaagagcgatgagctatcaacggcgacgctgtgccgtcagtgcgaggatgcgccctgcgcgaacgtctgcccggaaggggcaatacgccatgaaggcgacgtctggcgagtcgagcaacggctgtgcattggttgtaaaagctgtatggtggcgtgcccttatggggcgatgacggtgatgttgactgacgaaggcgtgcaggcgctgaagtgcgacctgtgcgcgcaccggcaaacggggccggcgtgcgtagcggcctgcccgactcaggcgctgcgctgtattgagcccgccgagctggaaagattaagcgccgagcgccgccgttgggcggcgcaggcaatgtaa

SEQ ID NO: 113153 - DNA, 1257 bp, Enterobacter aerogenes
atgacattttcacttttcggcgacaaattcacccgtcattcaggcatcacccgcctgatggaagacctcaatgacggcctgcgcacaccgggcgctatcatgctgggcggcggcaaccccgcgcaaatcccggagatgaatgaatacttcaatagcctgctggccgatatgctggataacggcaaagcccttgatgcgctttgcaattatgatggtccgcaagggaaaagcgagcttctgaccctgcttgcgcaaatgctgcgtgaagaattaggttgggagatcgaaccacagaatattgctctaacaaatggcagtcagagcgcgtttttctacttatttaacctgtttgccggccgccgtgccgacggcactacccgtaaggtgctgttcccgctgacgccagaatatatcggctacgccgattccgggctggaagaggatctgtttgtcgccacccgccccaacattgagctgctgccggaaggccagttcaagtatcacgtggacttcgaacatctgcagatcaccgaagagacggggatgatctgcgtctcccggccaaccaacccgaccggcaacgtcattaccgacgaagagcttattaagctggatgccctcgccaatcagcacggcgtcccgctggttattgataacgcctatggcgtacctttccccggcattatatttagcgaagcgcgcccgctgtggaatccgaacatcgtgctgtgcatgagcttatccaagctcggcctgccgggcacgcgctgcggcattatcatcgccaacgagaaaatcatcaccgccatcagcaatatgaacggcattatcagcctcgcccctggcggcattggcccggcaatgatgtgcgaaatgatcaagcgtaaagacctgctgcggctatcggagacggtgattaaaccgttctattatcagcgtgttcaggaaaccatcgctaccattcgccgctatttgccggaagaacgctgcctgattcataaaccggaaggggcgattttcctctggctgtggtttaaggacctgccgatctccaccgagctgctgtatcagcgcctgaaacaacgcggcgtgctgatggtgccaggcgattacttcttcccggggctggacaagccgtggccgcatacgcatcagtgcatgcgcatgaactacgtgccggacccggagaaaatcgaggcgggagtgaaaattcttgccgaagagattgagcgcgcctggcaggagcaagacgcctga

SEQ ID NO: 113154 - DNA, 2040 bp, Enterobacter aerogenes
atgaaactcgctgcgcttgcctcgctactgctgcccgggatggcctttgccgcctggacaaccgctgacttccccgccttcactgaacaggatgcaggccgtttcacgacgcaaaatgaggtgacgaagggtacccgccctttgcggataagttttgaccaacagtgctggcagcctgcgggggcgataaaactcaatcagatgctgtcgctggaaccctgccgggatacgccgccgcagtggcgcgtgttccgtgacgggcgctatacgctggaagtcgatacccgctccggtacgccaacgctgatgctgtcgctggcggaacagcacactaccagtacgcagccgctgttgcgccagtgtcccaaatgggatggtaaaccgctgacgctcgacgtcggccaaacgttcgctgaaggaagccaggtccgcgatttttatagcggtaatatcgccacggtgaaagcgggcaaaatcacgctgcggcccgccgctggtagtaatgggctcctgctgcttgaacaagcgaatagcgccgccagcgcgccgtttaactggcacaacgccacgatctattttgtcctgaccgatcgcttcgtcaacggcaatccggccaacgacaacagctacgggcgccataaagacggtatgcaggagataggcaccttccacggcggcgatttacaagggctgaccagcaagctggattatcttcaacagcttggcgtcaacgcgctatggataagttcaccgctggagcaaattcacggctgggtcggcggcggcaccaaaggcgactttccccactacgcctatcacggttactacacccaggactggacccgtcttgacgccaacatgggcgacgaagcagaccttcgacaactggttgatgaggcccatcggcgcggtatacgcgtgctgtttgatatcgtcatgaatcacgccggttacgccacgctcgccgatatgcaggaatttcacttcggctcgctgtatctgaaaggcgatgaactgaaaaaaacgcttggcgagcgctggaccgattggaaaccggcgtcggggcaaagctggcacagcttcaatgattacatcaacttcagcgataaagcaggctgggaacaatggtgggggaaaaaatggatccgcaccgatatcggcgactacgacaatccgggtttcgacgatttcaccatgtcgctggcgttcctgccggacctgaaaaccgaatcgacgatcccttctggcctgccaaatttctatcgtcacaagccggataccgccgccaaagagatagccggctacacgccgcgcgactatctgacccactggcttagccaatgggtacgcgactacgggattgacggtttccgcgtcgatactgcgaaacacgtcgaaccggacgcctggcagcagctcaaaacgcaggccacggccgtgctggcggaatggaaaaaagcgaatccgcagaaagcgctggatgatgcgccattctggatgacgggcgaggcctggggtcacggcgtaatgcaaagcgactactatcgccacggcttcgacgcgatgattaatttcgattatcaggatcaagcggcgaaagcggtggactgtctggcagacatggacgccacctggcagcagatggcggacaagctgcagggtttcaacgtgctgagctatctctcctcgcacgatacccgcctgttccgcgaaggcggcagccgggcggcggaactgttattactcgcgccaggcgccgtacaactcttctatggcgatgaatcttcgcgcccgttcggccccacgggctccgacccgctgcagggtacccgctccgatatgaactggcaggatgttgccggcagcgcatccgataatgtcgcgcactggcaaaaaatcgcccaattccgcgcccgccatccggccattggtatgggtaaacaacagacgctgacgctagagcagggctatggtttcgtgcgtgaaagcagcgctgatagcgctgataaagtgatggttgtctgggccggacagcaatag

SEQ ID NO: 113155 - DNA, 564 bp, Enterobacter aerogenes
atgccttacattacaaagcaaaatcaagcgatcacggcagatcgtaactggcttgtctctaagcaatacgacggccgttggtcgccgagcgagcaggcgcgtctgaaagatatcgcctcacgttataaagtgaagtggtctggcaatactcgccgtataccatggaactcgctgcttgagcgcgtcgacattattccaaacagcatggtggcgaccatggcggcggcggaaagcggttggggcacctcgaagctggcgcgcgtcaacaacaacctgtttggtatgaagtgcggcggcggcaattgtcgcggtgcgatgaaaggctactcccagtttgaatcggtcgagcagtcggttcaggcttacgtaagaaaccttaacacgcatccggcttattcatccttccgtaagtctcgcgcacagctgcgtaagacggaccaggaagtgactgccagcgcgatgatccacaagttgaaggggtactcgacgaaagggtcgagctataacaactatctcttcgctatgtatcaggacaatcagcgcttaattgccgctcatatgtaa

SEQ ID NO: 113156 - DNA, 1179 bp, Enterobacter aerogenes
atgtttgaaaagcgtcaccgcattacgctgttattcaacgccaacaaagcctatgaccgtcaggtggttgaaggcgttggcgaatatctgcaggcatcgcagctggaatgggatatctttatcgaagaagattttcgcgcacgtatcgaaaacatcaaagagtggttgggcgatggcgttatcgccgattacgacgacccggagatagaaaaactgctggcggatgtcaaagtgccaattatcggcgtcggcggctcctatcaccagccagaatgctatccgcctgttcactatatcgccaccgataatgccgcgctggtcgaaagcgcattcctgcatctgaaagaaaaaggcgtgaaccgtttcgctttttacgggctaccgacatccagcggcaagcgctgggcgagggagcgcgaacacgccttctgccagctagtcgccaaagagaaataccgtggcgtggtctatcaggggctggagaccgcgccggaaaactggcagcatgcgcaaaatcggcttgccgactggctgcaaacgctgccgccgcaaaccggtattatcgccgtgaccgatgcccgcgcccgtcacattctgcaggcctgtgagctgctgcatattccggtgccggaaaaactgtgcgtcattggcatcgataacgaagaactgacccgctacctctcccgcgtcgcgctctcttccgtggcgcagggtacccggcagatgggctaccaggcggcgaaacttctgcatcgattactggaaaacgaagcgctaccgctacagcggctgctggtgccgccgatgcgcgtcattgagcgacgctccaccgattatcgctcgctcactgaccctgcggtgattcaggcgatgcattatatccgcaatcacgcctgcaaaggcatcaaggttgagcaggtgctcgacgccgtcggcatctctcgctctaatctggagaaacgctttaaagaagaggtcggcgagaccatccacacggtgatccacagcgaaaagctggaaaaagcgcgcagcctgctggtctccaccacgctatcgataaacgaaatttcgcagatgtgcggttatccgtcgctgcagtatttctattcagtgtttaagaaagagtacgacgtgacgccgaaagaataccgcgatcggcacagtgaagtgatgatgtag

SEQ ID NO: 113157 - DNA, 1182 bp, Enterobacter aerogenes
atgtcgaaaaacacgtcgtctgaaatcaaacttacgccatccgcccctgccgcttttccggcgctgaaagggctcaatctccaggttttcgtgatgatcgccgcgattatcgccattatgctgttctttacctgggttaccgacggcgcctatctgagcgcgcgtaatatctccaacctcctgcggcaaaccgccatcaccggcatcctcgccgtcggcatggtgttcgtgatcatttcggcggaaatcgatctgtccgtcggctcgatgatggggctgctcggcggcgcggcggcgattttcgacgtctggctcggctggccgctgccgctcaccatcctcgttacgttggtcatggggctgctgctcggcgcgtggaacggatggtgggtcgcctatcgcaaggtgccctctttcattgttacccttgccgggatgctggcgtttcgcggaattttaatcggtattaccaacggtaccaccgtctcgcccaccacgccggcgatgtcgcaaatcggccaaagttatttaccggacggcatcggctttggtatcggcgttattggcatggcggcctttatcatctggcaatggcgcgggcggatgcgccgacaggcgttagggctggcgaccaccagttctggcggcgccgttggccgtcagaccatcatcgcagttatcgtgctgggcgctatctggttgctcaatgattatcgcggcgtgccgacgccggtgctcatactcgccgccctgctgctggcgggcatgtttatggcgacccgcaccgcttttggccgtcgtatctatgccattggcggcaatctggaagcggcccgcctctccgggattaacgtcgagcgcaccaagctggcagtcttcgctattaacggcctgatggtcgccatcgccgggttgatcctcagttcgcgactgggagcgggttcgccttccgccggcaatatcgccgaactggacgccatcgccgcctgcgtgattggcggcaccagcctggcgggcggtatcggcagcgtggcaggggccgtaatgggggcgtttattatgtcggcgctggataatggcatgagcatgatggacgtcgccaccttctggcaatacatcgtcaaaggcgccattttactgttggcggtctggatggattcggctaccaagcggagaacataa

SEQ ID NO: 113158 - DNA, 567 bp, Enterobacter aerogenes; identical to SEQ ID NO: 113029

SEQ ID NO: 113159 - DNA, 951 bp, Enterobacter aerogenes; identical to SEQ ID NO: 113030

SEQ ID NO: 113160 - DNA, 996 bp, Enterobacter aerogenes
atgaagataaagaacctttgccttacgctctgcgcctcatcgctccttctcgccagcatggcgggcatggctaaagaagttaagattgggatggccatcgacgaccttcgtctggaacgctggcaaaaagatcgcgatattttcgtcaataaagcggaatcattaggtgccaaagtatttgtgcaatccgccaatggcaacgaagaaacgcaaatgtcgcaaattgaaaatatgatcaatcgcggcgtcgatgttttagtaattattccttacaacggccaggtgctcagtaacgttattaaagaagcgaagcaggagggaattaaagtcctcgcctacgatcgcatgattaataatgctgacatcgatttttatatttctttcgacaatgaaaaagtcggtgaaatgcaggcccaaagcctggttgacaaagtgccgcagggtaattatttcctgatgggcggctcgccggtggataataacgccaaactgttccgcgccggccagatgaaggtgctcaaaccttatgtcgatgagggcaaaattaagatcgtcggcgatcagtgggtcgacggctggctgccggaaaatgcgttaaaaatcatggaaaacgcgctgacggcgaataacaacaaaattgacgcggtagtggcttccaatgatgcgaccgccggtggcgctatccaggcgctaagcgcccaggggctggcgggtaaagtcgccatttccgggcaggatgccgatctggctggcgtgaaacgtattatttccggcacccagacaatgaccgtttataaaccgattaccacgcttgccactagcgctgccgaaatcgccgttgaattaggcaatgaccagcaacccaaggctgacgccacgttgaataacggcttaaaagatgtcccctcgcgcctgttaacgccaattgaagtcaataaagagaatattgacgccacggtgattaaagacggtttccacaaaaagagtgaactgtaa

SEQ ID NO: 113161 - DNA, 1323 bp, Enterobacter aerogenes
atgcagacctatttcgatcaactcgatcgcgttcgttatgaaggccctaaatcgactaacccactggctttccgtcactacaatccggatgaattagtactgggtaaacgcatggaagaccacctgcgtttcgctgcctgctactggcacactttctgctggaatggcgcggatatgtttggcgtggggtcctttgatcgtccatggcagcagccgggcgaagcgctggaaatggcgaaacgtaaagccgaagtggcatttgagtttttccataagttgaatgtgccgtattactgcttccatgatgtcgacgtttctccggaaggcgcttcgctgaaagagtacagcaacaacttcgcgcagatggtggacgtactggcggaaaaacagcagcagagcggcgttaaactgctgtgggggacggcaaactgctttaccaacccgcgttatggcgcaggggcggcgacgaaccccgatccggaagtctttagttgggcggcgactcaggtggtcaccgcaatgaatgcgacccacaagttgggcggtgaaaactacgttctgtggggcggtcgcgaaggctacgaaaccctgcttaataccgatctgcgccaggagcgcgagcagattggccgctttatgcaactagtggttgaacacaaacacaaaattggtttccagggcaccctgctgatcgagccgaagccgcaggagccgaccaagcaccaatatgattatgatgcctccacggtttacgggttcctgaaacagtttggtctggaaaaagagattaaactgaatattgaagccaaccacgccacccttgccggccactctttccaccacgagatcgccacggctattgcgctgggcctgttcggttcggtggacgcgaaccgcggcgatgcgcagctgggctgggataccgaccagttcccgaacagcgtagaagagaacgccctggtgatgtatgagatcctcaaggcgggtggcttcaccaccggcggcctgaactttgatgctaaagttcgtcgccagagcaccgacaaatacgatctgttctacggccatatcggcgcgatggacactatggcgctgtcgctgaaagtcgcggcgcgcatgattgaagacggcgagctggataaacgcgtggcgaaacgctacgccggctggaacggtgaattgggccagcagatcctcacaggccagatgaccctgaccgacatcgcgcactatgcgactcagcataacctggcgccgcagcatcacagcgggcatcaggaactgctggaaaacctggtaaaccattatctgttcgataagtaa

SEQ ID NO: 113162 - DNA, 1455 bp, Enterobacter aerogenes
atgtatatcgggattgatttagggacctcgggcgtaaaagccattctgctcaatgaacagggcgacgtactggcgacgcataccgaaaaactgaccgtctcgcgcccgcatccgctctggtccgaacaagatcccgaacagtggtggcaggcgacgaataccgcgatgcaagcgctgggcgcgcaacactccctgcgcgaggtaaaagctttaggcatcgccgggcagatgcatggcgccacgctgcttgataaacagcagcgggtcctgcgtccggcgattttgtggaatgacggccgctgcggcgaagagtgcatgctgctggaagaaaaagtcggcacttcgcggcaaatcaccggcaacctgatgatgccgggttttacggcgccgaagctgctgtgggtacagcgtcacgaagccgaaatctttaaacaggtcgataaggtcctgttgccgaaggattacctgcggctgcgcatgagcggtgagtacgccagcgatatgtccgacgccgccggcacgatgtggatgaacgtcgcgcgtcgtgactggagcgatgaaatgctcgccgcctgcgggctcagccgcgacaatatgccggccctctttgaaggctgcgaggtgaccggccaactccgcgcagaggtcgctcaggcgtggaatatgccgcgggcgctggtggtagcgggcggcggcgataacgcggcaggcgctgtcggcgttggcatggccgatgcggggcaggcgatgttatcgctggggacctccggcgtctatttcgccgtcagcgatggttttctgagtaaaccggaaagcgcggtgcatagtttctgccacgcgctgccgggccgctggcacctgatgtcggtgatgctcagcgccgcgtcttgtctggattgggcggcgaagctgaccggccttggcagcgtaccggcgctgatcgccgcggcgcagtcggcggatgacaatgccgacccggtgtggttcttgccttatctttccggcgagcgtacgccgcacaacaatccgcaggctaaaggcgtgttcttcggccttacccatcaacatggtcccgccgagctggcgcgggcggtgcttgagggggtgggttacgcgctggctgacggtatggatgttgtgcactcctgtggtgtgaagccagacagcgtcacccttatcggcggcggcgcgcgcagcgcatactggcggcaaatgctcgccgatatcagcggacaacagctggatttccgcaccggcggcgatgtcggcccggcgttaggtgcggcaagattggcgcagctgggcgtacatcacgatgcggctttctctgacctcctgccgcagctaccgctggagcaggcgcatctgcctgatgctcaacggtttgcccgttatgcgccgcgtcgtgaaacgttccgccagatttatcagcagcttaagccgctgatgtcataa

SEQ ID NO: 113163 - DNA, 378 bp, Enterobacter aerogenes
atgaaattaaaacgtacgacggcaagattagtcatgctgctgggctcgctggtttatctcatcggcatctggcgaacgtgcccgctgttcagcggtaaaggctattttcttggcgtgctggtgatggggatgtttgctgtcctcacccatcaacgaacggagcaggaagcgcagcgagatgatgattttatctccctgtgccggttggttctgttgctatcggcaggattgctgttggtcggcgcctggtttgttccggcgccgtggcgcgaaaaaagtatttacgtgatggcatggtttgtctgtatgtacggtgcgtcagcaacgtcttatcccgctaaagtcgcggataaagcgcgcaataactcagtggaataa

SEQ ID NO: 113164 - DNA, 996 bp, Enterobacter aerogenes
atgcaggaaaaaataagctggattaccaacttgcgcggcatagcatgcctgatggtagtaatgattcacagtaccacctggtacattacccatcctcatagcatcagcttgttcgaatgggatatcgcgaatctgcttaactcggcatcgcgggtcagcgtcccgctttttttcatgatttcaggatatctgttttttggcgaacgcagcgcccagccccgccattatctgcgcatcgcgctgtgtattctgttctatagcgcgctggcgctgctctatatcaccctgtttacccacatcaacgttgagctgtcattaaaaaatttactgcagaagccggtgttttatcacctgtggtttttctttgccattgtggtgatttatctgctctcgccgctgattcaggtgaagcaggtcagcggcaaaatgctgctggcgctgatgctggtgattggcctcatcgccaaccccaatatggtaagcatcaaggcgggcggcattgaatggctaccgataaacctctatatcaacggcgataccttttactacgtactgtacgggatactgggccgggcgatcggcgccatgaataccgacagaagaggattgaccctgatgtgcgcgctgctgtttaccgccgcggtgtgggtcatttcacgcggcacgctgcatgaactgcaatggcgaggcgattttggcgatacctggtatctgtattgcgggccggctgtgtttatctgtgcaatctcgttattcaccctgggcaaaaacatcctcaatagccgtgagctcccgggtatcgcgttaatctccagacattcattaggcatttatggctttcacgcattgtttattcacgctctgcgcgccagcggccttgagctaagccgctggcccttgctggatattgtgtggattttcgccgccgcgctgttgggtagcctggcgctgtctacgctggttcagcgaattgatcgccgtcggttggtgagctga

SEQ ID NO: 113165 - DNA, 300 bp, Enterobacter aerogenes; identical to SEQ ID NO: 87619

SEQ ID NO: 113166 - DNA, 912 bp, Enterobacter aerogenes
atgcaaaagtttgataccaggaccttccagggcctgatcctgaccttacaggattactgggctcgtcagggctgcaccattgttcaaccactggacatggaagtcggcgccggcacatcccacccaatgacctgcttacgcgcgttggggccagagccgatggcgaccgcctacgtacagccttctcgtcgcccgaccgatggccgctatggcgaaaacccgaaccgcttacagcactattaccagttccaggtggtgattaagccgtccccggacaacattcaggaactgtatctcggatctctgaaagagctgggtatggatccgactatccacgacatccgcttcgttgaagataactgggaaaacccgactctgggcgcctggggattgggttgggaagtgtggctgaacggtatggaagtaacgcagtttacgtactttcagcaggttggcgggctggagtgtaaaccggtcaccggcgaaattacctacggcctggagcgtctggcgatgtacatccagggcgtggacagcgtatacgatctggtctggagcgatggcccgctgggtaaaaccacttacggcgacgttttccaccagaacgaagtggaacaatccacctataactttgaatatgcggacgtagacttcctgttcacctgcttcgagcagtacgagaaagaagcgcagcaactgctggcgctggaaactccgctgccgctgccagcctacgagcgtattctcaaagccgcccatagctttaacctgctggatgcgcgtaaagccatctccgtcaccgagcgtcagcgctatattctgcgtatccgcaccctgactaaagcagtggcagaagcttactatgcttcccgtgaggcccttggcttcccgatgtgcaacaaagacaaataa

SEQ ID NO: 113167 - DNA, 2070 bp, Enterobacter aerogenes
atgtctgagaaaactttcctggtggagatcggcaccgaagagctgccaccaaaagcactgcgcagcctggctgaatccttcgctgccaactttactgcggaactggacaacgctggcctcgcgcacggcgccgtcgaatggtttgccgcgccgcgccgtctggcgctgaaagtggcgaatctggcagcctcgcagccggatcgtgaagtcgaaaaacgcggcccggccattgcccaggcgtttgacgctgaaggtaaaccaagcaaagcggccgaaggctgggcgcgcggctgtggtattaccgtcgatcaggctgaacgtttgaccaccgataaaggcgaatggctgttgtatcgcgcccacgttaagggggaaagcgcgcaaacgctgctgccgaacatggttgcgacctcgctggctaagctgccgatcccgaaactgatgcgctggggcgcttctgacgttcactttgtgcgtccggttcacaccgtgaccctgctgttgggcgatcaggttatcccggcgaccattctgggtatcgcttccgaccgtatcatccgcgggcaccgttttatgggcgagccggaattcaccatcgacaatgccgaccagtatccgcagattctgctggagcgcggtaaagtgatggccgactacgccgagcgtaaagccaaaatcaaagcggatgctgaagcggcggcgcgtaagattggcggtaacgctgacctgagcgaaagcctgctggaagaagtgacctcgctggtcgaatggccggtagtgctgacggcgaagtttgaagagaaattcctcgcggtgccatccgaagcgctggtttacaccatgaagggcgaccagaagtacttcccggtttatgcaaacgacggcaaactgctgccgaacttcatcttcgtggcgaatatcgagtccaaagatccacagcagatcatctccggtaacgagaaggtcgttcgtccgcgtctggccgatgccgagttcttcttcaataccgaccgtaaaaaacgtctggaagataacctgccgcgtctggaaaccgtgctgttccaacagcagctgggaaccctgcgcgacaagaccgatcgcattcaggcgctggcgggctggattgccgagcaaatcggcgctgatgttaaccatgcgacccgcgcgggtctgctgtccaagtgtgacctgatgaccaatatggtcttcgagttcaccgacacgcagggcgtgatggggatgcactacgcgcgtcatgacggcgaagcggaagacgtcgcagtggcgctgaacgagcagtatcagccgcgttttgccggcgatgcgctgccgtctaacccggttgcctgcgcggtggctattgccgacaagatggacaccctggcgggtattttcggtatcggccagcatccgaaaggcgataaagacccgtttgcgctgcgtcgtgccgcgctgggcgtgctgcgtatcatcgttgagaagaacctgaatctcgatctgcaaacgctgaccgaagaagcggtgcgtctgtacggcgagaaactcactaacgccaacgtcgttgatgacgtcatcgacttcatgctgggacgcttccgcgcctggtatcaggacgaaggctacggcgttgacactattcaggcggtactggcgcgtcgtccgacccgcccggcggatttcgatgcgcgcatgaaggccgtgtcgcacttccgtacgctggaagagtcctccgccctggcggcggcaaacaagcgcgtatccaacatcctggcgaaatccgacgagaccctgaacgatatcgttcatgcctcggtgctgaaagaagcggcggaaattaagctggccggtaatctggtggtgctgcgtgataaactccagccttacttcgccgaaggccgttatcaggatgcgctgattgagctggctgcgctgcgcgagccggtagatgagttcttcgaaaatgtgatggttaacgctgaagacaaagatgtccgcatcaaccgtctgacgctgctgtccaaactgcgcgagctgttcctgcaggttgcggatatttcactgctgcagtaa

SEQ ID NO: 113168 - DNA, 1620 bp, Enterobacter aerogenes
atggctcattgtgcccacaccccctcttttgttttacatcaggtcacctgtcagttcgcgacgggacagacgctttttggcccgctgaatttatcgctggaaccgttgctttgtggccttgtcgggcgaaatggcgttggtaagacacgcctgttgcgtctgctggcgggccttgattctccttccggcgggcatatcgaacggtcagccaccgttgcctgggtggcgcagcaaccgaccctcaccgccgggacaaccgttgcctcgctattgggttatgcgtccctattcgacgccctgtcccgccttgaacagggaaaagggctggcaaatgacttcgaactgttggatggccgttgggatctgcccgaccgcctgagttcagccttctgcgatgccgggctcccggcattcgccgccgatcgtcctgccttttcgctcagtggtggcgaacgaatgaaggcgctactgtgcggcgcattcgtttctggcgcggactatctgctgttggatgaacccaccaaccatctcgatcgtctgggccgggagtggctgtatcaacagctgaaactctggcggggcggggccttaatcgccagccatgaccgtgaattgctggccctgatgccgaggattattgagctgacgccggcggcgctgcgcaactacggcggcaattatgctgaatatcagcagcagcgtgaagcggagcaacaggctgcccgctcggcgctggaacatgccgcaatcgaacggcggcgcacccgggcgcggatgcaaaaggagcatgatgcggcccagcggcgttcggcgcagacgctgcgtaccgtcgatacgctgaatatcgcctctttcgagcgtgtgaagtacaaaggggcggcaaaagagcgtcctggcacgctgcgccgtcagcatcgcgaacagaactgtagtctgaatgccgctgtgcaccaggcacgggagcgggtagaagaagataatccggtgatgttcacactgcctggcagtgaagtggctgccggcaagcaggtactggtgctggaatcgctgcagttggctcactcatcccccgcgccgctcgactggcgggtggatggcccgatgcgcatcgcgctaaaggggccaaacggctgtggcaaaacaacattattgaaaaccctgatggggctggagcaggcaaccgctggcgacatccggctgtcggtgagtgcggcgtatctcgatcagcatctgacgcagctggatttatcattgtcggtgatggcgcaccttaacctgggcgataccccactggatgagggagtactgcgtagccgtctggcgcagctccagttgggagctgacaaggtcagtcttccgctggcggcgttaagcggcggcgaacgcctgaaagcggcgcttgcctgcgtgctctggcggcgggactcaactcaattgctgctgctggatgagccaaccaatcacctcgatctggcgtcgacccaggcaattgaaagcgcgctggcgacgtttcccggcgcgatgctggtggtatcgcatgacgaggcatttttacagggtctgaagctgacccattgtctggagtggggggaaacgggctggcattttgccgccctctga

SEQ ID NO: 113169 - DNA, 213 bp, Enterobacter aerogenes; identical to SEQ ID NO: 87623

SEQ ID NO: 113170 - DNA, 291 bp, Enterobacter aerogenes
atggaatataaagatcccgtatttgatttgttgagtaacctggaacagattgtttttaaagaccagccgcaaacggctacgcacgcccctaccccaagcgtttttaatgaattcgaacggctgcgtaagggcacaggccttaagacagatgatttcgccaatgctatgggcgtcagcgtcgcgatggttgaagagtgggaatcgcgacgggtaaaaccttcatccacggagctcaaattgatgcgcctgatgatggccaatccacagctctcaaggcagctaatagattga

SEQ ID NO: 113171 - DNA, 1359 bp, Enterobacter aerogenes
atgaagaaaacaaccatcgatattcaggcttttatcaacgaacatccattcacgaagtaccaatggatgattctcgccttatgttttattaccgtcgcgatggacggatttgataccgcgattattggttttatcgcctcagacctggtacaggaatggggggttgagaaatccgcgttgggcccggtaatgagcgccgctctggtcgggctcgccgtcggcgcgctgacggccgggccgctcgccgatcgtattggccgcaagaaagtgctgattatgtcgatcctggtgttcggcggctttagtttgttaaccgcgtttgccagcagccttaaccaactgacattattgcgcttcctcaccggattgggcttaggcgcggcaatgccgaatgccgcgacgctaatgagcgaatatgctccggaacgccgccgcgcgctgatggtaaacctgatgttcgtcggcttcccaatggggtcgtcgctgggaggttttctgtcggcctggatgatcccgcattatggctggcaaagcgtgctggtgcttggcggcgtgatgccgctgctgctggccgtggcgttaatgttcctgctaccggaatccgcacgctatatggtcgtgaaacggcagccggcgcagcggatcgccgccatcctgaagcgtatcgcgccgttgccggatgcggttgaatttgagctacgtgaagcaggccaggtgaaggaaaagtcagccattggcgtgattttctccccgcgctacgccgtgggcaccgtgatgctgtgcctgacctattttatgggattgctgattttctatctgctgaccagttggctgccgctgcttatccgcgagaccggcgcctcgatgggccaggcttctatcatcaccgccctgttcccgctcggcggcgggattggcgtgctgatcctcggcgcgctaatggataagatcaaccctaacaaagtggttgccgtcggctggctgctcaccggcgtctttgtttgcctggtgggtttctcaaccagcaatctgctgttgatgggggtaatggtgtttatcgctggcagcattatgaacggcgcgcaatcatcaatgccggcgctggctgccgggttctatccaacccagggccgcgccaccggcgttgcctggatgctcggtatcggccgcttcggcgggatcctcggcgccttcagcggcgctttcctgatgcaggcacaattgtcgtttgaaaccatcttcacgatgctggcgatcccggcgtttttatccgccatcgccctggtagtgaaatacaaactgagccagcgccaacctgccgttaagccaaatgacggtaaaaacctacagaaagcctaa

SEQ ID NO: 113172 - DNA, 711 bp, Enterobacter aerogenes
atggcgacaggaaagtcctgctctcgctggtttgcggccgttgcggccatattaatggtggttagcctgagtgggtgttttgataaagaaggcgatcagcgcaaagcgttcatcgacttcctgcagaatacggcgatgcgtagtggcgaacgtctgcctacgctgaccgccgatcagaaaaaacagttcggcccctttgtgtccgattatgcggtgatttacgcttattcacagcaggtcagccaggcgatggatgcgggtctgcgcccggtggttgatagcgttaacgccattcgcgtggcgcaggattataccactcagcgtgagccgctgcggcaggctaacggcgcgctgggcgtgctgagccagcagctggaaaacgccaaaatgcaggcggatgccgcgcatggcgcgctgaagcaggctgatgatcttaagccggtttatgaccaggtgtttaataaagtcgtgacggcgccggcgaatgcgctgcagccgctgattccggccgcgcaggtctttactcagcagctggtgcaggtgggtgattttgtcgctcagcaggggacgcaggtgagcttcgtggctaacggtattcagttcccgacgtctcagcaggcaagccagtacaatgcgctgattgctccgctggccgctcagcatcaggcctttaatcagacctggacggcggcggttaacgccacgcgttaa

SEQ ID NO: 113173 - DNA, 972 bp, Enterobacter aerogenes; identical to SEQ ID NO: 105949

SEQ ID NO: 113174 - DNA, 1281 bp, Enterobacter aerogenes
atgaacagttcaacaaatgcagcaaaacgttggtggtacatcatgcctatcgtgtttatcacgtatagcctggcgtaccttgaccgcgccaacttcagctttgcatcggccgcgggcattaccgaagaccttggcatcaccaaaggcatctcatcgctgcttggcgcccttttctttcttggatacttcttcttccagatcccaggagcgatttacgctgaacgccgcagcgtgcgtaaacttatctttatctgccttatcctgtggggcggctgcgcctcgctaaccggcgtggtgcataacatcccggcgctggcggccatccgctttatccttggcgtggtggaagctgcggtcatgccggcgatgctgatttacatcagtaactggttcaccaaatcagagcgttcacgcgctaacaccttcctgatcctcggcaacccggtcaccgtactgtggatgtcggtcgtatcgggttatctgatccaggcctttggctggcgtgaaatgtttatcattgaagggatccctgctgtgatttgggccttctgctggtgggtactggtgaaagacaaaccgtcgcaggtgaactggctggcggaaagtgaaaaagcggcgctgcaggaacagctggagcgcgaacagcagggtatcaaagcggtacgtaactatggcgaagccttccgttcacgcaacgtggtgctgctgtgtatgcaatatttcgcctggagcatcggcgtgtacggtttcgtactgtggctgccgtcaatcatccgcagcggcggcgaaaacatggggatggtcgaagtaggctggctctcttcagtaccctatctggcggcaacgattgcgatgattgccgtctcctgggcttccgataagatgcagaaccgtaagctgtttgtctggccgctgctgctcattggcgggctggcgttcatcggctcctgggccgtcggcgccaaccatttctgggtctcttataccctgctggtgatcgctggcgcggccatgtatgccccgtatggcccgttctttgcgattatcccggagatgctgccacgcaacgtcgccggcggcgcgatggcgctgatcaacagtatgggagcgctgggttctttctttggttcgtggttcgtcggctatctcaacggcgcaaccggcagcccgtccgcctcgtacatttttatgggtgtggcgcttttcgcctcggtatggcttactttaattgttaagcctgctaagaatcaaaaacttccgcttggcgctcatcacgcctga

SEQ ID NO: 113175 - DNA, 750 bp, Enterobacter aerogenes
atggccagaaaaatcattgtcgtcaccgccgcttatggcaacgaccacgttaaagcgcttggcgggcagtccgccgtattaccctttatcgccggttccggcgccgatggcgtggaaattcgccgcgagttgttcagcgcggcggaactgaagcagttgccgacgctggcggccgacattgaaaaacaggggctgctggcctgctactccgcgccacaagcgctgttcaccgacaacggcgagctcaatccccatctcccgtcgttacttgaagaagcgcaaaccctcaacgccctgtggctgaagctctccctcggtcatttcatccataaccaacagctggagacgctgcgcgacattctgagcgccagcggcatggcgctggtggtggaaaatgaccagaccgattgcggccaactggcgccgatgcagcgcttcaaagccgcctgccgggtccatcagatgccggtgacgctgactttcgacatgggaaactggctgtgggtcggcgattcgccggaagaagccgcgcgccatctcgcccccgctgtcagctatattcatgtgaaggcggcggagcctcatcatgagaagtatcgcgccgtcccaccggaccaggcggacgctcgctggctggcgctgctcgataacctgcccgccgacgcgccgcgcggtattgaattcccgctggtcggcgaagacctgaccgccgtcacccgccattacgttgatctgttacgcgaggattaa

SEQ ID NO: 113176 - DNA, 663 bp, Enterobacter aerogenes
atgaaaaaacgcgtactcatgattgctgctatcgttagcggcacactggctatttctggttgtactaccaacccttataccggcgaacgcgaagcgggaaaatccggcatcggcgcgggtatcggctccttagtaggcgcaggcgtcggcgcgctctcctcttccaaacatgaccgcggcaaaggcgcgctgattggcgcagcggcaggcgcggcgctaggcggcggcatcggttactacatggatgtgcaggaagcgaaactgcgcgaaaaaatgcagggaaccggcgtcagcgtgacgcgaaatggcgataacatcgtgctcaacatgccgaataacgtcacctttgacagcagcagcgccaacctgaaacctgcaggcgccaacaccctgaccggcgtcgcgatggtgctgaaagagtacgagaaaaccgccgttaacgtcgtcggctacaccgacagcaccggcagcaacgatctgaacatgcgtctgtcgcaacagcgtgccgacagcgtcgccagcgcgctcatcactcagggcgtagcggccaaccgtattcacactaccggcatgggcccggcgaacccgatcgccagcaacagcacggcggaaggcaaagcgcagaaccgtcgcgtggaaattaccctcagcccgctgcagtaa

SEQ ID NO: 113177 - DNA, 2331 bp, Enterobacter aerogenes
ttgccaacttcatctgcaactaaaaccatcttaaccgcggcccactgggggccaatgctggtggagacggatggtgaaaatgtgatttcgtcccgcggcgcgctggacacccccttcgccaactcgctgcaaacggcggtgcgcgaacaggtgcacagtaaaactcgcgttcgctatccgatggtgcgaaaaggctatctcgcctcgccgcaacagccgcagggcgtacgcggccaggatgaattcgtgcgggtaagctgggagcaggcgcttgatctgattgatgcccagcatcgacggatccgcgaaagctacggcccgcagtcgattttcgccggttcctatggctggcgttctaacggcgtgttgcataaggcggcaaccctgctgcagcgctatatgagtcttgccgggggctataccggacacctcggcgattattcaaccggcgcggcgcaggcgatcatgccttatgtggttggcggtaatgaagtttatcaacagcaaaccagctggccgcttatcctggagcacagcgaggtggtggtgttgtggagcgctaatccgctgaatacgctgaaaatcgcctggaacgcctcggatgaacaggggatcccctggtttgatcgcctgcgccagagcggcaagcggctgatctgtatcgatcctatgcgatcggaaagcgttgatttctttggcgaatcgatggaatggatcgcgccacatatgggtactgacgtcgcgttgatgctggggatcgcccataccctggtcgagcatggctggcaggacgatgaattcctcgcccgctgtactagcggttatgacattttcgcccgctatttgagtggtgaaagcgatggcgtcgccaaaaccgccgaatgggcggcggcaatctgcggcgtagcggcggataaaatccgcgagctggcgaaacttttccacgaaaacaccaccatgctgatgtccggctggggcatgcagcgtcagcagtttggtgagcaaaaacactggatgctggtgacgctggcggcgatgctggggcagattggcacgcccggcggcggttttggtctttcttaccactttgccaacggcggcaaccccacgcgccgcgccgcggtgctggcctccatgcagggcagcgtagcgggcggcgtagatgcggtggaaaaaatcccggttgcccgcatcgttgaggccctggaaaaccccggcgcaagctatcagcacaacgggatgacgcggcgctttcccgacatccgctttatctggtgggcgggcggcgccaactttacccatcatcaggataccaaccgcctgattcaggcctggcagaagccggagctgattgtgatttccgaatgcttctggaccgccgccgcgcgccatgctgatatcgtcttaccggcgaccacttcgtttgagcgtaacgatctgaccatgaccggcgactacagcaatcagcatctggtgccgatgaagcgggtggtcgcgccgcgcgatgaagcgcgcgacgatttcgatgtttttgccgatctgagtgaacgctgggaggcgggcggccgcgaacgcttcaccgaaggaaaaaacgatttgcaatggctggagaccttctaccagattgccgcccagcgtggggcgcagcagcaagtgacgctgccgccgtttgccgaattctggcaagcgaaccagctaattgaaatgccggaaaacccggataacgcccgtttctcccgcttcgcggcatttcgcgcggacccgcaggctaacccgttaaaaaccgcgagcggaaaaattgaaattcactcgccgaccattgccgggtttggctatgccgattgtccgccgcacccgatgtggctcgaacctgacgagtggcacggcaacgccgaggtgggtcagctgcaggtgctttccgcccatccggcgcaccgcctgcatagccagttgaaccagacttcgctgcgtgaacgctatgccgtcgccgggcgcgaaccgctgactatccatccgctggacgcgcaggcgcgcaatatcgccgacggcgatctggtgcgggtgtggaattcgcgtggtcaggtactggctggcgcagtggtcacggaaggcattcgtccgggggtgatttgcctgcatgaaggcgcgtggccggatatcgaccccgatgccggcatatgcaaaaacggcgcggtgaacgtgctgacgaaagatattccgacctcacgtctgggcaacggttgcgccgggaatacggcgctggcatggctggaaaaatatgacgggcccgcgctggcgctcagcgcatttgatccgccggccaatgcataa

SEQ ID NO: 113178 - DNA, 564 bp, Enterobacter aerogenes
atgcaacgttgcggatgggtaagccaggatcctctttatatccagtatcacgataacgaatggggagtcgccgagagaacgccgcaaaagctgtttgaaatgatctgcctcgaaggccagcaggcggggctctcgtggatcacggttctgaaaaaacgtgaaaactatcgtcaggcctttcaccagttcgacccggttcgcgtagcggccatggatgaagcggacgtcgagcgcctgctgcaggatgcgggcattatccgccatcggggaaagatccaggccatcatcggcaatgcgcgggcgtttctcgccatggaagccaacggtgaagcattcagcgatttcgtctggtcgtttgtcgataatcagccgcaaattacccatgcggcgacgctcgccgaaatccccaccaccacaccagcctccgatgcgctatctaaggcgctaaaaaagcgcggctttaaatttgtcggctccactatctgttattcatttatgcaggcctgcgggttagtcaacgatcatgtgaccggctgctgttgctaccccgggaggccagcatga

SEQ ID NO: 113179 - DNA, 648 bp, Enterobacter aerogenes
atgataataaagaaatgcaatggcctccggggtgggttgatcccggcgtgcatcactatctgggtgtcgtgtgtttcaggtgcttatgcctggcaacaggaatatatcgctaacgatacaaaaagtaatacgtccgaacgctatacatgggatagcgatcaccaaccgcgttatgaagatattctcgccgagcgtatgagagcgtcagaagccccagcagggctggcgttgaatcaggccctggcgccgcctgatttgagtcacggcatgagcgtcggatggaactattcactggccagcggcgtgacctccgggccggtcgccagcttgcgtagcgatctcaatccgccgccagcgacgcgtcgcgcgggcgaaagtatttacgtcaacacgctcggctggcgtatggactatcagcagctgtggggcgtgcatccatgggcgcaggtgagctataaccagtctatctctatcgacaacaatgcgtcgattagccgtggcaaagacggtagctggggcgacgttacgctgggcgccgatatgccgctgggttcgcatctggcggcatgggccacgctttcgcaggcagataatgtgccatcgggtgaaaatacgctgtatctgatgggggtcagcgccaatttctaa

SEQ ID NO: 113180 - DNA, 1206 bp, Enterobacter aerogenes
atgaacgctgcaaacactcaatatacccgttggctcacgctgattggcacgatcattacgcaattcgcactgggatcggtttatacatggagtttgtttaatagttctctggccaacaaactggacgagccagtaagccaggtggcattttccttcggcctgttaagtctagggctggcattatcctcttccgttgccggtaaattgcaggaacgctttggcgtgaaacgcgtcaccatggcctccggcatcctgcttggcgccggctttttcctcactgcccatgccaacagcctgatgatgctgtggctgagcgccggcctgctggtcggtttggcggacggcgcaggctatctgctgacgttatctaactgcgtgaagtggttcccggagcgtaaaggtctgatttccgccttctcgattggcgcttatggccttggcagcctcggttttaaatttatcgatagtcacctgttggcgacggtcgggctggaaaaaacctttgttatctggggcgctattgtgctggtgatgattgtctttggcgcgatgctgatgaaagatgcgcctaatcatcccgcgacgaccaccgcgaacggcgttgtcgaaaatgatttcaccctcgctgaatccatgcgtaaaccacagtactggatgctggcggtgatgttcctgacggcctgcatgagcggcctgtatgtgattggcgtcgccaaagatatcgcgcagggcatggtacatctcgacgtggcgacggcggcgaatgcggttaccgtgatttctatcgccaacctgagcggccgtctggttctgggcatcctgtctgataagatctcccgtatccgcgtgattactatcggtcaggtggtctctttggtcggtatggcggccctgctgttcgccccgctgaatgcaatgaccttctttgcggcgattgcctgcgtggcctttaacttcggcggcaccattaccgtcttcccgtcgctggtgagcgaattctttggcctcaataatctggcgaaaaactatggcgtgatttacctcggcttcggtattggtagtatctgcggttcgctgattgcctccgtgttcggcggcttctatgtcaccttctgcgtcatcttcgctctgctgattttgtcgctggcgctctccaccactattcgccagccgaaaagcgaaatttatcatcaagcacacgcctga

SEQ ID NO: 113181 - DNA, 1692 bp, Enterobacter aerogenes
atgaaatacattaaaacgatgtcgcagcagaagctaagtttttggcttgcgctgtacatcggctggtttatgaacgccgcggtgtttttccgccgcttcgatggctacgctcaagagtttaccgtctggaaagggttgtccgggttggtggaactggtagcgacggttctggttactttcttccttctgcgcctgctgtcgttattcggccgccgggtatggcgcatattagcgacgctggtggtgctgttttccgcggcggcaagctattacatgaccttcctcaacgtggtcattggctacggtattatcgcttcggtgatgaccaccgatatcgacctgtcgaaagaggtcattggctggcatctgatcctgtggctggccgcggttagcgctttaccgctactgcttatctggagcaaccgctgccgtaagacgctgctacagcaggtgaaaacgccgggtcagcgggcgaaaaatatcctgatagtcgtgctggccgggctgatggtctgggggccgattcgcctgctggaagtgcgccagaagaacgtcgagcgcaattcagaagtcgatatgccgagctacggcggcgtgattgccaactcttacctgccttctaactggctgtcggcgctcgggctgtacgcctgggcacaggtggatgagtcgtccgataataagtcgctgattaaccccgcgaaaaaattcacctacgtagcgccgcaggatcttgatgatacttatgtggtgtttattatcggcgagaccacccgctgggatcatatgggtattctcggctataaccgtaataccacgccgaagctggcgcaggagaagaatcttgtcgccttccgcggcacctcttgcgataccgccaccaagctgtcgttgcgttgtatgttcgtgcgcgagggcggggcggatgataatccgcagcggacgctgaaagagcagaatgtgtttgctgttctgcaccagttaggctttgccggcgacctgtacgcgatgcagagcgagatgtggttctacagcaatacgatggccaacaatatcgcctatcgcgagcagatcggcgccgagccgcacaaccgcggcaagaacgtggatgatatgctgctggtcgatgaaatgaagcgcggcatggagcaaaacccgagcggcaagcgtctgattattctccataccaaggggtcgcattttaactatacccagcgatatccacgcagctttgcgcagtggaaaccagaatgtgtgggggtggacagcaaatgttcgaaggccgagttgattaactcctacgataacagcgtcacttatgtggatcactttatcgtcagcgtgctggaccaactgcgggataaaaaggctatcgtgttctacgccgccgatcacggcgagtcgattaatgaacacgaacatctgcacggcacgccgcgtatgatggcgccgccggagcagttccgcgtgccgatgatggtctggatgtcggataaatatctggagaacccggatcacgccgcctcctttgcgcgcctcaagcagcaggcggcaatgaaggttccgcaccgtcacgttgagctgtatgacaccattatgggttgtcttggttatacctcgccggatggtgggattaatgaaaacaacaactggtgtcgcgtgccggcttcgaagaaagcggcgaaggaatag

SEQ ID NO: 113182 - DNA, 1608 bp, Enterobacter aerogenes
atgagtatttccttgaaaaagtcagggatgctgaagcttggtctgagcctggtcgccatgaccgttgccgcaagcgtacaagctaaaaccctggtttattgttctgaaggttcgccggaaggctttaacccacagctcttcacctcgggtaccacctatgacgccagttcggtgcctatttataaccgtctggttgaattcaaaaccggtacgactgaagttattcctggtcttgctgagaagtgggatgtcagcgaggacggtaaaacctataccttccacctgcgtaaaggcgtgaagtggcaggataataaagactttaaaccaacgcgcgagcttaatgccgacgacgtggtgttctccttcgaccgccagaaaaatgacaaaaacccgtaccataaagtctctggcggcagctatgagtacttcgaagggatgggtctgcaggacctgattagcgaagtgaagaaagtggacgataataccgtccagttcgtgctgactcgaccggaagcgccattcctcgctgacctggcgatggactttgcttctatcctgtcgaaagagtatgccgacaacatgctgaaagccggcaccccggaaaaagtagaccttaacccaatcggcaccggcccattccagctgctgcagtatcagaaagattcgcgcattctgtataaagctttccctggctactggggcaccaagccgcagatcgatcgtctggtcttctccatcaccccggacgcttccgtacgctacgccaagctgcagaaaaacgaatgccaggtgatgccgtatccgaacccggctgacatcgcgcgcatgaaggaagataaaaacatcaacctgctggaacagccgggtctgaatgtgggttatctctccttcaacaccgagaaaaagccgctggataacgtcaaagttcgccaggcgctgacctacgcggtgaacaaagaagcgatcatcaaagccgtttaccagggcgcaggccagtcggcgaagaacctgatcccgccgaccatgtggggctataacgatgacgttaaagactatacctacgatcctgagaaggcgaagcagctgctgaaagaagcgggcatggaaaaaggcttcaccatcgacctgtgggcaatgccggtacagcgtccgtataacccgaacgcgcgccgtatggctgaaatgatccaggccgactgggctaaagtcggcgtacaggccaagatcgtcacctacgagtggggcgagtacctgaaacgcgcgaaagcgggtgagcatcagaccgtgatgatgggctggaccggcgacaacggggatccggataacttcttcgcgaccctgttcagctgcgccgcggcgaaagacggctctaactactctcgctggtgctataagccgtttgaagacctcattcaaccggcacgcgccaccgacgaccacaacaagcgtattgaactgtacaaacaggctcaggtagtgatgcatgaccaggctccggcgctgatcattgctcactccaccgtttacgagccagtgcgtaaagaagtcaaaggctatgtggttgatccgcttggcaaacaccacttcgataacgtctctgtcgaataa

SEQ ID NO: 113183 - DNA, 1020 bp, Enterobacter aerogenes
atgttgcagtttattctccgacgtttgggactcgtcatcccgacatttatcggtattacccttctcacctttgctttcgttcatatgatccccggcgatccggtgatgattatggcgggcgaacgtggtatttcccccgaacgtcacgcgcagctgctggccgaaatgggccttgataagccgctgtggcagcaatatgcccattatatttggggcgtactgcacggtgatttagggatctcgctgaaaagccgaattcccgtgtggcaagagtttgtgcctcgcttcaaggccaccctcgaactgggcgtctgcgcgatgattttcgccgtcgccgtcggtattccggtgggcgtgctggctgcggtaaaacgcggctccatctttgaccacactgccgtggggctggcgctgaccggctactcgatgcctatcttctggtggggcatgatgctgattatgctggtttcggtgcagctgaatctgacgccggtctccgggcgtatcagcgatacggtattccttgacgataccctgccgctgaccggttttatgctgattgacaccgccatctggggcgagcagggcgactttattgatgccttaatgcatatgatcctacccgccatcgtgctgggtacgattccgctggcggttatcgtgcgtatgacccgctcatcgatgctggaagtgcttggcgaggattacatccgtaccgcacgcgctaaggggttgacccgcatgcgggtgattgtcatccatgcgctacgcaacgcgatgctgccggtggtgacggtgattggtctccaggtgggcacgctgctggcgggcgccattctgaccgaaaccattttttcgtggccaggtttaggccgctggcttatcgatgcgctacagcgccgcgattatccagttgtgcagggcggggttctgctggtggcgacgatgattattctcgtcaacctgctagtcgacctgctgtacggcgtggtgaacccgcgtatccggcataagaagtaa

SEQ ID NO: 113184 - DNA, 903 bp, Enterobacter aerogenes
atgtcacaaattacagaaaataaagttgtcgccgcaccggtgccaatgaccccgctgcaggagttctggcactatttcaaacgcaataagggtgccgtcgtcgggttggtgtatgtggcggtgatgattatcatcgcggtatttgccaactttctcgccccttataacccggcggatcagttccgtgattcgctgctggcgccgccgttctggcaggatggcggcagcctggcgcatctgcttggcaccgatgacgtgggtcgcgacattctctcacgcctgatgtacggcgcgcgcctgtcgctgctggtgggctgtctggtggtggtgctgtcgctgatcctcggcgtggtgctggggctggttgcaggctatttcggcggggtggtggactccatcatcatgcgcgtggtcgatatcatgctggcgctgccgagcctgctgctggcgttggtgctggtggctatcttcggaccatcaatcgtcaatgcttcgctggcgctcaccttcgttgccctaccgcactatgtgcgtctgacgcgcgcggcggtgctggtggaagtgcaccgcgattacgttaccgcttcccgcgtggcgggcgccggcgcgatgcgccagatgttcgttaatattctccctaactgtcttgcgccgctgattgttcaggcgtcgctgggcttctctaacgccattctcgacatggcagcgctggggttcctcggtatgggcgcgcagccgccgacgcctgagtggggcaccatgctttccgacgtattgcagttcgcgcaaagcgcctggtgggtagtgaccttcccgggtgtggcgatcctgctgacggtgctggcatttaacctgatgggtgacggtctgcgtgacgcgctcgatcccaaactgaagcagtaa

SEQ ID NO: 113185 - DNA, 984 bp, Enterobacter aerogenes
atggcgttattaaatgtagataagttatcggtgcatttcggcgatgagaatgcgccgttccgcgccgtagaccgcatcagctatagcgtgaagcagggcgaagtggtcggcatcgtgggggaatcgggttccggtaagtcggtgagctcgctggcgattatggggctgattgattaccccggccgggtgatggcggacaaactggaatttaacggccgcgatttgcagcgaatttcggaaaaagagcggcgccagctggtgggggcggaagtggcgatgatcttccaggatccgatgaccagcctcaacccgtgctttaccgtcggctaccagattatggaagcgattaaggtccatcagggcggcaataagcaaacccgccgccagcgggcgatcgacctgctgaacctggtgggtattcctgacccggcgtcgcggctggacgtttatccgcaccagctttccggcgggatgagccagcgcgtgatgatcgcgatggcgatcgcctgccggccaaaactgctgattgccgatgaaccgaccaccgcgctggatgtgaccattcaggcgcagattatcgaactgctgctggagttgcagcagcaagagaatatggcgctggtgctgattacccacgatctggcgctggtggcggaagccgcgcataaaattatcgtcatgtacgcgggtcaggtggtggagaccggtgatgcgaaagatatcttccgcgcgccgcgtcatccttacacccaggcgttgctgcgggcgctgccggagtttgcccaggataaagcgcgtctggcgtcgttaccgggtgtcgttccggggaaatacgatcgtccgaatggttgcctgctgaacccgcgctgcccctatgccacggataaatgccggagcgaagagcccgcgcttgcggatctcgacggcggccgtcagtctaaatgccactacccactcgatgatgccgggaggcctggattatga

SEQ ID NO: 113186 - DNA, 1014 bp, Enterobacter aerogenes
atgagtacgcaaaaggccgccacgcaacaaccgctgttgcaggccattgacctgaaaaaacactatccggtgaagaaagggctgttcgctccggaacggctggtgaaagcgctggacggcgtctcctttactcttgagcgcggtaaaacgctggcggtagtgggggagtcgggctgcggcaaatcgacgctgggccgtttactgacgatgattgaaatccccaccggcggcgagttgtattatcaggggcaggatctgctcaagcacgacccgcaggcgcaaaagctgcggcggcaaaaaatccagattgtgttccagaacccgtatggttcgctgaacccgcgtaaaaaagtggggcagattctggaagagccgctgttgattaacagcagcctgagcaaagagcagcggcgtgaaaaggcgctggcgatgatggcgaaggtgggcctgaaaacggaacattacgatcgctacccgcatatgttctccggcggtcagcgccagcgtatcgccattgcccgcgggctgatgctggatccggatgtggtgattgccgatgagccggtctccgcgctggatgtttcggtacgcgcccaggtactgaacctgatgatggatttgcagcaggatttagggctgtcctacgtgtttatctcccacgacctgtcggtcgtcgagcacatcgctgatgaagtcatggtgatgtatcttggccgttgcgtagagaaggggaccaaggatcagatctttaataacccgcgtcatccgtatactcaggcgctgctgtcggcgacgccgcgactgaacccggacgatcggcgcgagcgcatcaagctgaccggcgaactgccgagcccgctgaatccgccgccgggctgcgcctttaatgcgcgctgccgccgacgctttggcccatgcacccagcttcaaccgcagcttaaggattacggcggccaactggtggcctgctttgccgttgatcaggatgagaatccggagaaagcgcgggcgtga

SEQ ID NO: 113187 - DNA, 1680 bp, Enterobacter aerogenes
atgaccaaagcaaaaactaccgctacgccgcttccgctatggcagtactggcgcggcctgtctggctggaacttctattttctggtgaagtttgccctgctgtgggcggggtacctgaacttccatccgatgcttaacctggtgttcctcgcctttctgctggtgccgatcccccgagaaaaactgcaccgggtacgccactggatagcgattccgctcggctttgccctgttctggcatgatacctggttaccgggtccggaaagcatcatgagccagggttcgcaaattgccggtttcagcgccgattacatctgggatctgatcacccgctttattaactggaatatggtcggcgccttctttgtgctgctggtgctgtggctattcatcagccagtggctacgcgttaccgtatttgtttcggctatcatggtctggctggttatcagcccgttgctgccctccttcaccttatggcctgccggtcagccgaccacggcagcggccacgccggcggcaacaaccggtggaaccacaacagccgcggcatccaccagcgctgccgccagcggcgatatcccgccgcagaccgaaccgccaacctcggctaacctcagcaactggctgaaaactttctatgcttctgaacagaaaagaaaaacgtcattccccgctcagcttcctgaggatgcgcagccgtttgatctgctggtgatcaacatctgttccctgtcatggtcggacatcgaggctgccgggctgatggatcacccgctgtggaaacatttcgatattgtcttcaaaaacttcaactccgcgacctcctacagcggcccggcagcggttcgcctgctgcgcgccagctgcggccagctatctcataacaacctgtatcagccatcgggcagcgagtgctatctgttcgaaaatctggcgaaactgggctttacccaacagctgatgctggggcataacggcgtattcggcgacttcctcaaagaggttcgctcactcggcggcatgcaaagtccattgatggatcagagcggtttgccggttatcctgcaaggcttcgacggatcgccggtttacgacgaccaggcgacgctcgatcgctggctacaatccaccgagaagcttaacacgccccgtaccgcgaccttctacaacacgctgccgctgcacgatggcaaccattatcccggccaaagcaaaacggcagactataaagctcgtgcgcagaaattctttgatgagctggacgccttcttcaccgaactggaaaaatcggggcgtaaagtgatggtggtggtggtgccggaacacggcgccgcgctgaagggggataagatgcaggtttccgggctgcgcgatatcccaagcccatcgattactaacgtccctgcggcggtgaaattcttcggcatgaaggcgccgcaccagggcgccgcggtggaaatcacacagccttccagctacctcgcggtttctgaattggtggtgcgcgccctggacggcaagatgtttaccgaagataacgtcaactggcagcagtacaccgctaacctgccgcagaccgcggcggtatcggaaaactccaacgccattgttattcagtatcagggcaaaccctacgtgcagctcaacggcggcagttgggtgccatatccgcagtaa

SEQ ID NO: 113188 - DNA, 198 bp, Enterobacter aerogenes; identical to SEQ ID NO: 87645

SEQ ID NO: 113189 - DNA, 1557 bp, Enterobacter aerogenes
gtggatattgtatatacgttgggtatttcatcgttatgggacgaagtatgccatatgcccgttggcggggtgtggtggcttaatgtcgaccgctatgccgacgccgtcagcctgatgaatcaaacgctggaaagccaggcgcaggacagcaaagtcgccgccatagtgatgggaaaaaaccctaaagaagtcatgtcattaaaaaaagatcgcggccctaataaaatcgcattattcaccatgcccgatcgcccggaaggcctgaaggagttgcaccgcgacctactttgttcgatggaacctggcaattatttatttattctgctatgtacagaaaattcctggcaaaatataaaaacagaagaattactccgttgggtagaaaaatcaaatcgatgggccaaatatcataactgctctcttatgatacttaattctgctaacgataccgacaaacaactttccccgttattacgccagtatcgagccctttccgggctggcgagcattcgttatcagggcgatagccatctatttgatatcgcatggtggggcagtgagaaaggtattagcgcgcagcaacagttggttattttacacgatgatgagggctggcgactggcgcaaaacgaagaagcggtggtacagccgcgcagcgacgaaaaaatcgtcctcagtaatttgcgcgtgctggaaggggcccccgcgctttccgaatactggacgctgttcgaaaccaatgatgccgtctttgaagccggtcgtaccgcacaagcggccaccttgctattttccatcacccagaacgaacaaatagagcagctcggccgctatatccataccctgcgtcgccagcgcggcagcgccctaaaaatcgtggtacgtgaacaaacgccgagcctgcgcaccactgatgaacgcttgctgctaagcagcggcgccaacatggtgatcccctgcagcgccgggctttcacgctgcctgacgctcattgaaagcgtgcaaaagcagaaatttactcgtcacgttccggaagacttcaacacgttgttgacctggagccggccgcttaaacttcgcggctatcaaaagtgggacgccttctgtgaagcggtcggtaatatcatggccaacacgctgctgccgccggatagcaaaggggtgatggtggcgttacgccctgcgccggggctacgcgttgaacaggcattaaccctgtgtaaacctaaccgcatgggcgatatcgtgacgatcggtaataatcgattagtgctgttcttatcgttttgccgggtaaatgacctcgacaccgcattaaaccatatcttcccattaccgaccggagacattttctctaaccgtatgatttggtttgaagacaagcaaatttcagcggaaatcctgttgatgcggggcctctccccggacaactggaacacgccgctgccaattaccataggcaaaaacgaagcccttaacgttaagcacgatgggcgccagtggcggcgaatcccggaaccctggcggctctccaccgacggagaaccgcggtcatga

SEQ ID NO: 113190 - DNA, 189 bp, Enterobacter aerogenes; identical to SEQ ID NO: 87647

SEQ ID NO: 113191 - DNA, 738 bp, Enterobacter aerogenes
atggcgattctgggattacaaggcatacgcggcggcgtaggcaccacctccattaccgccgcattggcctgggcgctacagctgctcggcgaaacggtgctggtggtcgatgccagcccggacaatatgctacgcttttttttcaacgttgatttcgaccatcacaacggctgggcgcgctcgttgattgacggtcgcgactggcgcgacgccggactgcgctacaccgcgcatatcgatcttctgccgtttggccgcctgacccctggcgaacgtgagcacgttgataagctgagtccgaccctggaacccatcgcagcgcaaatcaaattgctcgatcagcaggggagccaccgctggctgctgcttgatattccggaaggctactctccgcttacccgagaactgctgagcgtctgcgatcgtgcgctacaggttgtgcaccccgacggtaacagtcatatacgtctgcatcagcaggcgctgcctgccaacgcggatattttgattaacgacctacgtgtcggcagtcagctgcaggaagatctctatcaactgtggctggaaagccagcggcgtattttgccggtcacgattcaccgcgatgaagcgatggcggagtgtctggcggcgaaacagcctcttggcgaatatcgccaggattcgctggcggcggaagaggtgctgacgctggccaactggtgcctgctgcactatgccagggagggggcggcatga

SEQ ID NO: 113192 - DNA, 2619 bp, Enterobacter aerogenes
atgatccgcctgagtacgttgctgctggcgccgccgatgggcgagcgcttgagtgaacgttatgatgactatcgtcagcatggcgcgtcggtgctttcggcttttctcggttgcctgtgggcgtcgctggcgtgggcattcatgccgcttgagacgccgcgctggcaagctattcgcgaacaccatggcgactattttccgcatattaatccgcatcgcccacgcccgttagatccgctgcgctatttgctgcagtcgctctggctgctggcgacccgggtgccggaagcggataaaaaaataaactggcgctcgctggcggcgctggaaggggttcacgggcgctacgcgcagtggctggaaaaattaccggagaaggtcaacacccgtaccggccatctcgataagcagaaagagcttgaacatctgcatccgcagttgcggcggctggtacttggcaccattaccttcttctcgctgattctggcgctgttgtgtatcacccagccgtttaacccgctgtcgcagtttatcttcctgctgttactgtggggcgtcgcgctgctggtgcggcgtattccggggcgtttctccgccctgatgttgatcgtgttgtcattgaccgtttcttgtcgctatatctggtggcgctatacctccacgctgaactggaacgatccggtcagtctggtgtgcgggctgattttgctgtttgccgaaacctacgcctggattgtgctggtactgggctatttccaggtggtgtggccgctgaatcgccagccggtgccgctaccggaagatatgaacgaatggccgacggtggatatcttcgtgccgacctacaacgaagatctcagcgtggtgaaaaataccatctacgcttcgcagggtatcgactggccgaaggataagctcaatatctggatccttgatgacggcgggcgcgaagagtttcgccagttcgcaaaagatgtcggcgtacattacatcgcgcgtaccagccacgaacatgccaaggccggtaatatcaacaatgcgctgaagtatgcgaaaggcgagttcgtctctattttcgactgtgaccacgtgccgacccgctcgttcctgcagatgaccatggggtggttcctgaaggataaaaagctggcgatgatgcagacgccgcaccacttcttctcgccggatccgttcgaacgcaacctgggccgttttcgtaaaacgccaaatgaagggacgctgttttacggcctggtgcaggacggcaacgacatgtgggatgcgacctttttctgcggctcctgcgcggtaattcgccggggcccgctggatgaaatcggcggtatcgccgttgagacggtcaccgaggatgcccacacttcactgcgtctgcatcgtcgtggccacacctccgcctatatgcgcatcccgcaggcggcggggctggcgacggaaagtttgtcggcgcatatcggccagcgtattcgctgggcgcgcgggatggtgcagattttccgtctcgataaccccttattcggtaaagggttgaagctggcgcagcgtatctgctacgtcaacgcgatgctgcactttttgtccggtataccgcggcttatcttcctcaccgcgccgctggccttcctgctgttacacgcctatatcatctatgcgcccgcgttaatgatcgcgctgttcgtgctgccgcatatgattcatgccagcctgaccaactcgaagatccagggcaagtaccgccactccttctggagtgaaatctacgaaacggtgctggcctggtatatcgcgccgccgaccttcgtcgcgctgattaacccgcataaaggcaagtttaacgtcaccgccaaaggcggactggtgaaggatgagtatgtcgattgggttatctcccgcccctatatttatctggtgttgctcaatctggtgggtgtagtggtcggcatctggcgctttatgtacggacccgagaacgaaattttaaccgtctgggtcagtatcatctgggtgttttataacttaatcatcctcggcggcgccgtggcggtgtcggtggagagcaaacaggtgcggcgttcgcaccgcgtagagatgtcgatgccggcggcgattgcccgcccggatggccacctgttctcctgtaccgttcatgactactcggacggcggcctggggataaaaattcacggtgaagcgcgggtactggaaggacaacacgtgaatctgctgctcaaacgcggacagcaagaatacgttttcccggtacgcgtcgcgcgggtgaacggcggcgaagtcggtctgcaattgctgccgctgacaaaccagcaacatattgattttgtgcagtgtacgtttgcccgcgctgatacgtgggcgctttggcaggatagcttcccggaagataagccgatggaaagcctgctggatatcctcaagctggggttccgtggatatcgtcacctggcggagttctcgccgccgtcggtgaaggttattttccgctcgctcacctcgctggtggcctggattgtatcgtttttaccgcgccgtcccgaacgcgccgcggcggtgctttcggcagaaccggcaatggctcaacaatga

SEQ ID NO: 113193 - DNA, 2307 bp, Enterobacter aerogenes
atgagcagttggtaccccttcgcaacattttcggctccggcgacgccgccggaggccgtggttgccggagctccagcgacagcggctcagcaagctccggtcattaacgatggccagccaacggcgacggttatcgatcctgccgcgccggtggtggtagcggacaatattccctctcgcgatgtgaagctgacttttgcgcaaatcgcgccgccgccaggtagcatggtgctgcgcggttcgcatcctgagggcgccgtagagttcggtatgcgcagcgatgaggtggtcgccaaagcgctgctcaatcttgactacacgccgtcgccatcgctgctgccggtgcagtcgcaactgaaggtttatcttaacgacgagctgatgggcgtactgccggtcaccaaagagcaactgggtaaaaaagtgagcgcccagatccccgtcgatccgctgtatatcaccgattttaaccgcgtgcggctggaattcgtcggccactatcgcgacgtttgcgaaaacccggcgagcagtacgttgtggcttgatatcggtcgtgagagctcgttggatttaacctatcagtcgctgcaggtccgtaacgatctctcccacttcccggtgccgttctacgactcgcgcgacaaccgtccgctgacgttgccgatggtttttgctgctgcgcctgacgtcatacaacagcaggcggcggcgattgtcgcctcctggtttggcagcaaggctggctggcgcggccagcagttcccggtccacttcaatgagataccggaacgtaacgctatcatcttcgcgaccaacgataagcgtccggacttcctgcgcgaccatccgccggtgaaagcgcggactatcgaaatggtcaaccatccgagcaacccgtacgtcaagctgctggtgatcttcggtcgcaacgatcaagacctgctgttggcggccaagggcattgcccaggggaatattttgttccgcggcgatagtgtcgtcgtggatggcgtgaaagagttgaaggcccgccagccctatgacgcgccgaactgggttcgtaccgacaggccggtgactttcggcgagctgaaaacctatgaacagcaactgcaatcaagcggcctggtgccagattcgattaacgtggcgctgaatctgccgccggatctgtatctgctgcgcgctaacggcatcgatatggacctgaagtatcgctataccatgccgccgatcaaagatagctcgcggatggatatcagcctaaacgatcagttcctgcagtcgttcagcctcaatagctcgcaggatgtgaataagctgattttacgcctaccggtgctgcaggggttactggacggccagaaccaggtgaccatacccgcgctgcgcctgggcgcgatgaaccagttgcgcttcgatttccagtacatgaacccgatgcccggcggcaacatcgataactgcattaccttccagccggtgcagaatcacgtggtcatcggcgatgactccaccatcgatttttcgaagtattaccacttcctggcgatgccggatctgcgcgtcttcgccaacgccggtttcccgtatacccgcatggccgatctctctcagacgctaatcgtggtgccgaaaacgcctgatgcgggccaggtggagacgctactgcaggcggtaggcggcatcggcgcgcagagcgggctggcggctatcaacttgcagatgaccgatgacggcaaccagattaagggcaaagatgccgacctgatgctgattggcgctattccgccatcgctgaaagacgatagcaaaatcaatctgttggttgaggcgaccaaaagctgggtgaaaacgccgatgcgtcactatgacctggccagcatctacccggacgatgacgcccgcacgccgcatacgcgaaccgacatcacctcttccgggccaatggcggcgattatcggcttccagtcgccatacaacgaccagcgcagcgtgatcgccctgatggccgatagcccacgcggcaacgagctgcttacaaacgccttaaatgacagcggcaaacgggcggcgatgttcggttcggtggcggtgattcgcgaatccggcgtcaatagcctgcgggttggcgatatctattatgtcggccatctgccgtggttcgagcgcatctggtttgcgctctccagccatccgatactgttggcgattctggcggccgtcagcattgtgctgctggcgtgggtgctgtggcgcatgctgcgtattctcagccgtcgccgtcttgatcctgatgatgagtaa

SEQ ID NO: 113194 - DNA, 1113 bp, Enterobacter aerogenes
atgaacgcatttcgtggggtacttctctcggtattgatgctggcggcggggcaggttagcgccgcctgccagtggcccgcctgggagcagtttaaaaaagcgtatgtcagcgccgaagggcgggtcatcgaccccagcgatgcgcgcaaaatcaccacctccgaagggcaaagctacgcgctgttcttcgctctcgcggccaacgatcgccagggcttcgataagctgttccagtggacgcagaacaacctggcgcagggcgatctgcgcgcccatctgccgggatggctatgggggaaaaagagcgaggatgaatggacgctgctggacagcaattcggctgcggattctgatttgtggattgcctgggcgctgctggaagccggacgcctgtggaaggttgataactatactgaggtaggaaaagcgctgctggcgcggattgccgatgaagaagtcgctgatgttccggggctcgggccgtcggtactgccggggaaagttggtttcgcggacgacaagggctggcgctttaatccaagttatctgccgccgcagctcgccacctactttacccgctttggcgcgccgtggccgaagatccgcgacagcaatctgcgactgctgctggaaacggcgccaaaaggcttctcgccggactgggtgcgctatgagaaaggtagcggctggcagttgaaaaccgataaaccgattattggcagctatgacgctatccgcgtctatctgtgggtcggaatgctcaataacgccgataaacaaaaagcgccgctgttggcgcgtttcaaaccgatggcggttcagacgatcaaacagggattaccgctaccgccggaaaaaaccaatatcgccagcggaaaaacgactggcgaggggccggttggcttctccgcagccatgctgccttttttacaagatgacgacgcccgcgcgctacaacgccaacgggtcgccgatcattatcccgacgcggacgcctactacagcgcggtgctgacgctgttcggccagggatgggatcaacatcgttttcgtttcgccgcgggtggcgaattacaacctgactggaaccaggcatgcgcaagttctcactaa

SEQ ID NO: 113195 - DNA, 3486 bp, Enterobacter aerogenes
atgcgcaagttctcactaagcttcatcacgctgtctgtcggccttggcctgttgccgctggcgcaggcggagaatacccctgcgcagcagcatctgctggaacaagtgcgtctcggcgaggccagcagtcgtgaggacctggtgcgtcagtcactttataggctggaactgatcgacccgaataaccccgattatcttgccgcgcggacgcgctatctgctgcgccagggcgacaccgccggcgcgcaaaagcaactcgatctgctggcaaagctggccccggaatcgtcggcgctacaagcgacgcgcaacgagatgaagatcagtaccggtagcggtcgccaggcgttgcagcaggcgcgattgctcggcgttgccgggaaggtcgatgaagccgtcgccgcctatgaaaagctcttcggcggcgtcccaacggataccgaagctgctatcgaatactggacgctggtggcgcgattgcccgctcggcatagcgaaggcgtcagccagctgaaaaaacttaatgccagtactccggataacgtcacgctattgacctcgctggcgaagcagatgttttcagataacaagccgcaggagggcttcgcctatctggaacagatggcgcgttcggcctcaggccgcggaattgcggctgatatgtggctcggcgaaattaaaagtatgccggtcagcagaggcagcgttcaggcactacagcgattcctgctccagttccccgccggttccgctgccgctaacgcccgggtgttgctggcgcagcagcaaactcaactgcaagacccagccttccgcgccaaaagcgaagggctggcggcggtgaaatccgggaatgcggcgcaggcggtggccgatctgcagcaggcggtacgcgcggatgcccgcgatagcgatgccgtcggcgcgctgggcgccgcctactcacagcgcggcgatcgggcgcgggcggtggcgcagcttaataaagcgatcgcgatggatccgaaaagcccgaatcgcgataagtgggacagtttgctgaagaccaaccgctattggttgttgattaaacagggcgataacgcgctgaaagcaggccaactggcgcaggcgcaaaatgcgtacgcccaggcgcagcgggtggataacaccgacagctacgcggttctggggttaggcgatgttgccgcggcgcgcaaagatgacgccgccgccgaacgctactatcgccaggcgttacgcatggatcgcgacaataatctcgccgtacgcggtctggcgaatgtttatcgtcgtgaatcgccggaaaaagccagcgcctatattgccagcctccccgccagccagcggcgcagtattgatgatatcgaacgcagtcttaccaacgatcggctggaaaaacaggccgaagcgctggaaagccagggcagctgggcgcaggccgcggaggtgcagcggcggcgtctggctctggatcctgaaagcgtgtggataacctatcggttggcgaaagatctggtcagcgccggccagcggccggaagcggacgcgctgatgcgtaacatggccaaccgcaagccgggcgatgccgaacgggtttacgcctacggcctctatttgtccggtaataatcaggatgatagggcgctggcgcaaattaacgcgctgccgcgcggacagtggaccgataatattcgtgaactggaagggcgtctgcaaagcgacaaagtgatgcgcgaggccaaccaacttcgcgatagcgggcaggaagcgcaggccattgccttgattaaacagcagccggaatcgatccgctacgatctggcgttggcggattgggcgcagcagcgcggcgatagcgcagaggcgatagcccagtaccatcgggtgctgagccagcaggctgataatggcgatgcgcgtcttggcctggcggaagtctatctcgccgagggcgataaaaacgccgcccgcgcgcaggtcgcgcagttgaaggatgcgaatacggaatcgatcaacatgcagcgccgggtagcgctggcccgcgccggatttgacgataccgcgggcgcgcaacaaatattcgaccgcatcgtgccgcaggcgaaaagccagccgccgtcgatggaaagcgcgctggtgctgcgtgatgccgcgcgtttccagacgcaaagcgagcaaccacagcaggccctggaaagctataaagacgcgatggtggccgctggcgtgacccgcgttcgcccgcaggataatgacacctttacccgcctgacccgcaacgatagccaggatgactggctgaagcgcgggatccgcagcgacgccgccgatctttatcgccagcaggatcttaacgttacccttgagcacgactattggggatcgagcggcaccggcggttattcggacctcaaagcgcacacaaccatgctgcaagtggacgcgccgttgtatgacgggcggatgttcttccgtaccgatgtggtgaatatgaacgccgggtcgttttccactaatagcgacggcggctactcgccgagttgggggacctgtggtgaaattagctgctatggcggcagtaaaaatcagagcgacggcggcgccagcgtagcggttggctggaagaacgacacctggagcggcgatatcggcaccacgccgatgggctttaacgtggtggatgtcgtggggggactgagttatagcggcgatgccggcccggtcggctataccgtcaatgtccaccggcgacctatttccagctcgctgctctccttcggcgggcaaaaagataatcctaacgacggccataccggcactacctggggcggcgtccgcgccgccggcggcggcatcagcctcagctacgataaaggcgaggctaacggcatctggtcatcgctgggggctgaccaactcaccggcaaaaacgtcgaggacaactggcgcgtacgctggatgaccggttactactataaagcgatcaatgaaaataatcgccgggtgaccgtcggcctgaccaatatgatctggcactacgacaaagacctcagcggttacacgctgggccagggcggttactacagcccgcaggagtatctctccttctcggtgccggtcatctggcgtcagcgtaccgaaaactggtcgtgggaactcggcgggtcggtgtcgtggtcccattcgcgtacgcaaactcatgcgcgctatccgttgctgaatttgattccttcacagtatcgctacgatgccagccagcaaaaagaagagggcggcagcagccagggtttcggttataccgcacgggcgctggtggaacggcgggtcaccggcaactggtttgtcggcgcggctgtggatattcagcaggctaaagattacaccccgagccacgcgctgctgtacgtgcgctattctgcttccggctggcagggcgacatggatatgccgccgcagccgttggtgccttatgcggattggtag

SEQ ID NO: 113196 - DNA, 2007 bp, Enterobacter aerogenes
ttgcgcgtcagccgctcacttacaattaaacagatggcgatggtcgcgagcgtgtccatggcgtttgtcctggtcttttgctctattttgctgtttcactttgtgcaacagagtcgctataccacggccacgcaattagaaagtatcgcccgttccgttcgcgagcccctgtcggcggcaattttgaaagccgatattcccgaagcggaagccattctgggccgcattcagcctgctggcatcgtcagccgggcggatgtggtgctaccaaatcaatttcaggcgctgcggatgcgctttattcccgaacgcccggtgccggtgatgatcacccgcctgtttgaactgccggtgcagatatccctgccgatttactcgcttgaacgcccggcaaatccgcagccgctggcctatctggtgctgcaggcggattcctatcgcatgtataaattcgtcatgagcgcgcttgcgacgttagtgactacttacttacttttggtgtttattttgacggtggcgcttacctggtgcattaaccggctgattgttcgcccgctgcgcgccatcgcccgcgagctcaacgatattccgccgcaggagcggctcggacatcagctgagcctgccgcgactgcaccaggatgatgaaatcggcatgctggtgcgttgctacaatcgcaaccagcagtctttgctgcgccagcatgatgagctatcgctgcaatcgacccgtttcccggtgtctgagctccccaacaaagcctttttgatggcgatgctggagcagaccacaacccgtccacaaccctcggcgctgttggtggtagcctgtgagaccctgcaagatgccgcgggcgtgctgaaagagagccagcgcgagatgctgctcctgacgctggttgagaagctgaaagcggttatcccacccaatatggtgctgacgcaggtgagcggttacgatttcgctattttcgcccccggactcagcaagccgtgggaagcggtgtcgttaagtaagcaagtgcttacttctattagcgagcgattgccgctgcacggtgtccagctgcggccctgcgccagtgtcggtatcgcgatgtttaatagcgaactgagcgctgaacagttttatcgtcgggcggtttccgccgcggtgacggcgcggcgcaagggcaaaaatcagatcgagttctttgaccccgagcagatggaaaaagcccagcgtcggttaatggaagagcacgatatcctcaccgcgctcgagaatcagcagttcgccatctggtttcaaccgcaggtggatattgccagcggcaatatttgcggtgcggaagttctgctgcgccagcgtcaggccgatggcggttggtcgctgccgtgcgatctgattgagcgtattgaaaactgcgggctaatggtgccggtaggctattgggtgatggaagaagcctgccgccagctggcagcctggcagcagcaggggatcatgctgccgttgtcggtgaatgtctcgttactgcagttgctgcatcctgaccgcggcgttgagctgctggcactcattgaacgctatcgtatcgccccgggcaccctggtgctggaggtgacggaaagctgccgtctcgacgatccgcaggcggtgattgacctgctgcgcccgctgcgcgacgccggcacgcgtattgcgctggatgatttcggcatgggttatgccgggttgcgccagttgcaacatatgaaatcgctgccggttgatatcctgaaaatcgacaaggcgtttattgatatggtgccggatgataccagtatggtcccggcgataattcagctcgcacgcgggctcaagctgcggatcgttgctgagggcgttgaaaaagaagaacagctgaaatggttgcaagcggctggcgtggatgtcgctcagggttacctgtttggttgcgccttgccgctggaaagctttatgcagcgcttcctgcaggccgataaggacgatgcaagtttgtaa

SEQ ID NO: 113197 - DNA, 1287 bp, Enterobacter aerogenes
atgaaactctctctcttcaaaagcctctatgtccaggttttatcggccatagctatcggtattttgctgggccatttctacccggaacttggcgcgcagatgaaaccgttcggcgacgccttcgtaaaactgattaaaatggtcattgctccagttatcttctgtaccgttgtaacagggattgccgggatggaaagcatgaaggccgttggtcgtaccggtgcggtggcgctactctactttgaagtggtgagtaccattgcgttgattatcggtcttatcatcgtcaacgtagtgcaacccggcgcgggcatgaacgtcgatcccgcgacgctggacgcgcacgctgtggcagtctacgccgagcaggctaaagatcagggtgttgtcgccttcttactcgatattattccgggcagcgtgattggcgctttcgccagcggtaatattctgcaggtgctgatgtttgccgtcctgtttggctttgcgctgcatcgtttaggcagcaaaggccagctgattttcaacgtcattgaaagcttctcgcaggtcattttcggcatcattaacatgattatgcgcctggcgccgatcggcgctttcggggccatggccttcaccatcggtaaatacggcgtcggtaccctggtacagctgggccaactgattatctgcttctacatcacctgtatcctgttcgtagtgctggtactgggttctatcgcgcgggccactggatttagcatcttcaagttcattcgctatatccgcgaagagctgctgattgtactggggacctcttcgtccgaatccgcgctgccgcgaatgctggataagatggagaagttgggttgccgtaaatcagtggtggggctggtgataccgaccggctactcctttaacctcgatggcacctccatctacctgacgatggcggcggtgttcatcgcccaggccaccaatagccatatggatatcttccatcagatcaccctgctggtggtgctgctgctctcttcgaaaggggctgcgggcgtcaccgggagcggatttatcgtgctggcggcgaccatctctgcggtagggcatctgccggtggctggactggcgctgattctcggtatcgaccgctttatgtccgaagcgcgcgcgttgaccaacctggtaggtaacggcgtggcgaccgtggttgtcgcgaaatgggtgaaagaactcgacgccaaacagctcgatgatgtgttgaataaccgcgttcccgcggacaaatcgcaagaattatcctcgtaa

SEQ ID NO: 113198 - DNA, 1500 bp, Enterobacter aerogenes
atgcagggcacaaaaattcgactcttaaccggtggtttgctgatgatcgcgacggccggttctgtgcaggcagaagcgctccagccggacccggcctggcaacaggggacgttggcgaacggtttttcgtggcaggtactctccacgccgcagcgccctagcgatcgcgtcgaagtccgcctggctgtgaatattggctcgctgagcgaaagcactcagcagagcggcttcagtcatttcattccgcgcctggcgctgacgcaaagcggcagcctcccgacgatgcaggcgcgttcgctgtggcagcagagtattgacccgaagcgtcctctgccgccggcgatcgtttcttacgatttcaccttgtttaatctgagtttgccgaacaaccgcaacgacctgcttaaagaggcgttgaactggctggcggacgctaacggtaaattgagtattacccaacaagccgtcaatcatgcgctgcagggcagcgatatggtggcgacctggccgctggatacccaggaaggctggtggcgctatcgcctgaagggctcaacgatgctcggtcacgatccggcggcgccgttgaagcaaccgattgatattaaacagctgaaagaattttatcagaaatggtacaccccggatgcgatgacgctgattgttgtcggtaacgtcgatagccgcagcgtcgctgagcagatcaacaaaatcttcggcgaactgaaaggtaaacgcgagaccccggcggcggtaccaacgctatcacctctgccggctacgccggtcagcatcatgaccgatgccgtgcgtcaggataagctgtcgatcatgtgggattccccatggcagccaatccgcgattccgccgcgctgcagcgctactggcgcgatgacctggctcgggaagcgctgttctggcacgtgcagcagaacctgagcaaaagcaacgtaaaagatattggcctcggttttgattgccgcgtgctgtttcagcgcgcccagtgcgcgatcaatatcgactcgccgggcgaacgcctgaacgccaacctgagcgcggtatcgcgcgagctggcgaaggtacgcgacaatggtctgcctcaggaagagttcgatgcactgattgcgcaaaagaatctcgaactgcaaaaactgttcgccacctatgcccgcacggataccgatatcctgattagccaacgtatgcgttcgctgcaaaatcaggtggtggatatcgcgccggagcagtatcaaaagctgcgccaggagttcctgaactcactgacggtcgacatgttgaaccagtatctgcgccagcagctgtcgcaggatatggcgctggtattgcagcagccgaaaggcgagccggagtacaacatgaaagatctgaaagcgacgtgggaaaaactgatggcgccagcacccgctgcggcggtgagcgctacgccggatacggttgatgcgcataacgaggcgacggatattcccccagcgcagtag

SEQ ID NO: 113199 - DNA, 162 bp, Enterobacter aerogenes
atgagagggttcctgaaaaggaactttctcatattttataataaatcaataatatatatccttagcgtacgttttcgttccattggacctcaaaccccttatagtaaggagacgacagatacacagtcgaaaaacagtcgtgatgccatcatggggatttag

SEQ ID NO: 113200 - DNA, 480 bp, Enterobacter aerogenes; identical to SEQ ID NO: 105188

SEQ ID NO: 113201 - DNA, 162 bp, Enterobacter aerogenes
atgctccaccgggttcagaagtgtctttatcagaccgccgctttcaggctgatcgaataccgctacgacgtcgccggcgcgcagcttaaacgacaaatcaaaatcatcattaagctcacgtccattcaggcgaaccttcacattattatgcagcctgagtga

SEQ ID NO: 113202 - DNA, 327 bp, Enterobacter aerogenes
ttgtaccgtctcgtagtcgtcctgcaaagagggatagacataccgctcacgcactttgacgtagtttgcggccatcgccttttgataggcttctgttgcggtcaggctggttttcgatgtccgggtaacgtgttccacccgtcctgtgtggttatccaaggtatacagctcaacgtccgtctgtttcagcggcaacatcacgaccacggcgacgagcgccagtaccgcaatcagcagacccataccgccaacaacaaaaccggcttttgtggcgcgtttatcccgctcaatcatttgctgctcaaaagtgcgggattcagctattaa

SEQ ID NO: 113203 - DNA, 486 bp, Enterobacter aerogenes
atgttgtcctgggcggaacgtttggtttctttaactgctcccccggccagcttcccggcaccaaaagcagcagcaccgatacctacagcggccagcccctgcatggatacggtagcactcgccccggccagtgcagcagctactttagcggagatatacaccagtattgcggcgcagaaaccagcaagacagacttgtgcccctaattctacgatatttgccttacccgcttgtgcggtggcttctgccattctcgacgttaaaaaatttataacaatacgtagagataaagccgaaaatagtatcgttaatatcgccgcaaaaatgttttgtagccagttgttgaacatcggacgcagaaaaccatacatcaggcaaaatatgaaaatgggggctgtaatgctcagtaatagaatcattacttcagctatcattgaaacaaaagctgtaataagcattaaaataaatatgccaagccagacataa

SEQ ID NO: 113204 - DNA, 168 bp, Enterobacter aerogenes
atgagcaaacttgggattaatggatttggtcgtataggacgtttagtacttcgccgcctgttagaagtaaatagcccgctggaggtcgtggccatcaacgatctcacctcaccgaaagtcttagcctacctgcttaaacatgactctaactacggtcctttcccatga

SEQ ID NO: 113205 - DNA, 726 bp, Enterobacter aerogenes
gtgattgttgaatgtaccggtttctatacgtcggcggaaaaatcgcaggcgcacctgaccgccggcgcgaagaaagtgctgatttccgcccctgccggcgagatgaaaaccatcgtttatcacgttaacgacgacaccatgagcccggatgataccatcatttcggttgcatcctgcaccaccaactgtctggcgccaatggctaaagtgctcaacgatgctttcggcattaccgtgggcaccatgaccactattcacgcttataccggtacgcaatcgctggtggacgggccgcgtggcaaagacctgcgcgcctcgcgagcggcggcggaaaacattattccgcacaccaccggcgcggcaaaagccattggtctggtgattccggaactcagcgggaaactgaaaggtcacgcccagcgcgtgccgactaaaaccggctcagtgacggaactggtttccgtattggcgaagaaagtcaccgctgaagaggttaatcaggccatgaaaaatgcggcggcgaacaatgaatcttttggctacaccgaagaggaaattgtctcctccgacattattggcagccatttcggctcaatctatgatgcgactcaactggagatcatggaagccggcggcgtacagctcgtgaaaaccgtggcctggtacgataacgagtacggctttgttacccagcttgtccgcgtactggataaattcgcgaagtaa

SEQ ID NO: 113206 - DNA, 1107 bp, Enterobacter aerogenes
gtgactgacgactcttttgcgtttcaaaaagcattccttaaagcaaatgaggccggtggcggaacggtatacttccctccgcccaaaaaagaatatttgctgaggttcccggtatttatctttaacaatactgaagcatatggcgacggtaaggatacgcggattgttttcgagaatccggtgttcagtaaaggacgtggtggtttcgtcatcggctcaagcctggaggcaaacagagacctagcgttaactcggtttagtaacaaatcgctgtcgactacaatcaataacaacttcaagaatcctgttcaacggcactatatacgcgacacaccagagttggctcaggcgaaaggaagtagcctacacgatatctatctagaggcgagattcaccgcaggctcagaaagcagctggggagggtacggaattaatttcgtaaacgccattgactgccatgctagcaacatctgggggaaaggatggacgcaacttattggaatgggttctgacactccaccagaaacaccttcaaaccataattgcagcgcgaaaaacttgtatgttctagagccagacatggtcaggacatattactcgatagggtttatggctaactctagcaattgcacgattcaaaatgcaaaacaactaaaaccaatgtcagagggaagtaaaaacggcagtggcgtagcgttgaacttttgcgaggattgcatcatttcagacatagatattcctgaccttggaagaactcaaacctctgagggtgttcttataaacaattcttctggttgtttgattcagaacataaatatcggcaatgcgaaaaaagccgtgtcaacattctttaaattcaaagatactcaaaaagaatttaaaccgaatatgataaagaacattaaaggttcaaattgcgacattgtattgtctgtatactctaaatttaacatcataagaaatatcaagggtgagaattctggaagggttatagccttgatgaatactaatgcagcgcgaaatgttataagtgctcctgaggcggacatctccaccccaggaaaagcaccgattactacactaatgaaactgaataaaatagaatag

SEQ ID NO: 113207 - DNA, 1110 bp, Enterobacter aerogenes
gtggctaaaaataaagcggcaaacgccggggttgatgcgttaacaggttttgagtttcaaagaaactgtgcattgtatcttttgttagataatttcaattcttttatcaataaagagttctttatttgtatcgaacatcacgatgattttctattttgttataaaactgattgcttaagttatataaacgagatacatgcctatcaagcaaagaaacttagcgggaaaatatggactatcgattctaggttttctgagatggtatctaaaatactattggtgggcgaaaacttaagaaatgatgcttttgaaaaaagtgaagattataaacaccagctaacatttatatcaaatacagaaatagaattaaaatactcaccgtcaaaggcgttaaaaaaagaaggtattactgaacagatattaaggattaatgagcaaaactctatctgtgcttatgatgaattgcataaaaatattcagaataaaattgaagagaaagttacagatatttgtaatgaagaatcttctgttttccatcgtaaagaactaagtaacctaaaaattcagtgggtagattttccaagaacagctgcaaaacaaaaagaatcgcttattggacttatgtcaagaaagttttctcatatagctgactcgaaagcagccatcgaggtaatacttgctctatttagaaatgtggaaactgtatataatcaaggacaggaaatatgtctactcgatccaacaaaaagggttgaaggcgaagaagttaagaaagttatgaatataattgattcacagcaaaaggcattcgactattggcgtgacgaagcacagcaattctcaatgaaattcagaataccacttagcatacagaaaaatcatgaaaactatatactaaactcttttgaactactcaaggatatgagtaattacgattatcaaatcattaaagactttgttagaaataatgattacacaactcaatatttttctcttcaagacgcattaactgcatatgttgataatgttagaaaatctcattctataaacctagataatattgatacattttttgcagttctgtgttcatacgttgagtgctacgattaa

SEQ ID NO: 113208 - DNA, 687 bp, Enterobacter aerogenes
atggaactgaaaagaaataccctggcatgcctggtcctgattgcatcaggcctgtccctgtcggcccgtgcggcagacagttttaatattaacgtgaccggtgttatcagcccggccgcctgcgaggcgaatattaccggtggcgaaaccattgactacggcaccattccggcaaataaattgtctgcagatgccgtgactttattaccggcaaaacagaccgccttcaccattacctgtgatgcgccggcgaaggttggattccggaccgtggataaccgttcgtcatcaaaaatgcaagcgggcccctcgattcagtttgattcggggagtagctggaaccgagaatatttaaacggacttggggtggatggacagggaaataacattggcggatggagcactgaaattgttagcctgagttcagacactgtcgccactccggcatcgatatattctacagacaatggaattacctgggtcatacgtggaaacccatttattcttttgagtgacactggaataataaatacaatttcaacggcggatgctgtaactccagcggccttcagcacgctcaccggcacgctgacagtgcaggcggttatcaatccggcctccacactggacctgtcgcagcccgtcacccttgacggttcggtgacggtggaaatggtgtatttataa

SEQ ID NO: 113209 - DNA, 201 bp, Enterobacter aerogenes
atgagcaagtatccaagggttggcagcgtgtcagccaaaagcaaaaacacctctgctaaatgcaaatgcggtgcagtggcgaagtataagaccatcatcgaagttaatattttccgtggcgacgacgaagtggtttggtcttgtaacgagcacaagaaggactgtgcatttctgaccggcggacaaggcggtgcagcatga

SEQ ID NO: 113210 - DNA, 1041 bp, Enterobacter aerogenes
atggcttctgacattcaaaaaatacttgataaccactctaaagttgttgaggaaggatacatagctacaggagagctgaagtatgataattatgctgtgacaacactccgtggcggtgtcggtaagtcgactctatcatttaatttggcctatgagatatctcgtaaatacccccttctcatcgctgatctatgcgctcaaactaacttaacggagaacttactccgcggggctgagcacaaagttgatattcttaacgcacttcagcctgccttgcttggtgctgcatttggtgaagtacctgacgatatttcttatcgtgttagcaactactgcgaatcatttaagggcggtaaatccacatatgtaattcctggaagtgcggaactgtttgcctttccttccactctgtatcagcaattacaaattgcaaatgctcagaacaactcaactgcagttaaaaatcttcttgagatacttgataaggtactgaagaaagaaagaaaagataaaaaccttactaagacattaatggataccagtccattttatgctggcggaacacatcttgcgtggtgtgcagcagatgctgtaatcattcctgtgcgagtagatgaacactctatcgagtccttaaaactcactcttgaccttctttccaacaaaacgaaagattataaaatctgggatgaaagggctggtggaagaaaggctccaaaagtagctgccattgtgatgactatggcaggtgcaaaaagtcagaagaaatttactcccgatagcgcatcaagaatgtacatagaaagggctctatctgttgcggaacaataccctgaccttttcgattttgaagacccaagagatgctttttcaattacagatgactttatgtctactgggcgcataagcggagctaaaggaatacctatcgcagagctaaaagtgaactcattccactcggtagaaggaaaaagactacaggtcaacagctcagctgaacgatataaacgcgaactgaaatatctagtcagtattctttaa

SEQ ID NO: 113211 - DNA, 306 bp, Enterobacter aerogenes
atgccagcagactgggaattagatgacgaagtagagaggatcgaagaagagaagcgatggagcgacgcaaagcttgccgcaaagctagttatcagggggcgtgaacgtgattctgcagtcgctgccattaaagaagtgaacgccaatcgagagcattatagaaatgacccaggtgttcacatcgtgggtgatgaagatcagcctagtgtatggacgctggcagaatgcaactaccctgcggtagaaggagagtttaaccctcaacaggtgcataaaatcgctcaagagctaattgacgatttttaa

SEQ ID NO: 113212 - DNA, 477 bp, Enterobacter aerogenes
atgactgatatcaccgaactggcgcagagcaatgagttgctcatcgcaaacggaaatgaaaccgccaaccttttacgccacctggcagataacgaaatcgactccgactattttgccgttgtatcggagtgcgaaagctacgggaaagaaactgacgctgagttctcaatcacggagtttgccctccgtgctgctggctacgttgatgcgctggtggaggcgctggagcttaaggaagagcagcgcgctaactggttccagatggcgcagaaattaggggaaaacttggatgcggcagagaagcgcatcgccgagctggagtcccgcaccgtcaccgtgaagttgccggactatcggcatgagcgattctgggattctcgctgcgaagagttcaaccctgtcgagtatcaggcggcatgtatcgagatgtggcgtgaagaaattatcgcgcagggcatcaagtgggaggctgagtga

SEQ ID NO: 113213 - DNA, 132 bp, Enterobacter aerogenes
atggacaaatgcaacgctctgctttatgccatggtgattggcttcggcctggctgctggtatccgggtttatattgcctgggaatcattaatcagtctggcgtggggggcgttccggctaaatctccagtag

SEQ ID NO: 113214 - DNA, 288 bp, Enterobacter aerogenes
atggttaaggtgttggtttatggtggtggtcacaatggttctgttcgtgaggttgagtccgtaaattcaacaataagaatcacccgaggagactgggttcgggatcgcgatgagtatctgcatggtggaaaagttgaaccggtaaattacgatgaagagttttcaatacgtgagtttgaatatggtgaagggcaagtatatttgatcgccgaacatggcgtaaccattcctgatgaagaaatcagaaagcgtattgacgtgatgcgcagcttaaagtcgctgccatga

SEQ ID NO: 113215 - DNA, 135 bp, Enterobacter aerogenes
atgagtgaattcaatattgcagccaaaagccaagaggaacgcgacaaggttaacgttgaccttgcggtctccggagtggcgtacaaagagcgcatgaacatgcctgtagtagcagaagttgtgctgcgcgagtag

SEQ ID NO: 113216 - DNA, 483 bp, Enterobacter aerogenes
atgaataccttcatcgtcgatttgctaaaaaagatctggctgcctgtttttgtgctggtcgtgatctctcttctggcgtggagggtaggttactaccgcgacaacgccatcacctacaaagatcagcgcgataaggccaccaaaaatcttaacctggctaacgccaccatcaaagacatgcagacccgccagaatgacgttgccaccctggatgccaagtacacgaaggaattagcagatgcgcaaaacaccattagcgatttgcgtcgggatgtcgattctggcgctaaacggctgcgcattgccgcaacctgccctgaagtgtccaaaaccacctccgccaccggcgtggatgatgcaagagcccccgaacttactccagacgctagaaggaattatttcgatcaccgggacgaaatcgccaccgtcgacaaaatgattcacggcatgcaggactatattgccacacaatgtctgaagtga

SEQ ID NO: 113217 - DNA, 225 bp, Enterobacter aerogenes
atgcttgagaaatactacgcacacaaacatagtgttggtaatcacaccgaagagcaatggaagcggcttgtagttgttcaggctgctcttgaagtagcaaaagagtccgctggggctacaacagcatgtgtgcgcagcgataaagttgagaatgatctcgactacgcagcccaaaaaattgaagcgttagcagatgcaatccaatcagcccttgagaaagagtaa

SEQ ID NO: 113218 - DNA, 309 bp, Enterobacter aerogenes
atgccgtgggacaaaatttatgatggccatattttaggtgatcacattactgtagagcagtgggtagataacgaagaaattgaatatcgcccaataaaagtcaaggcgacagacagaaatactccaacgctaatggacccaattattgagccaggcagcgtgcaattcccaccaccaccaaatgatccttcaaagcgatacacatccgagtacgaaagtattgaagacatgatttcaaaatttgctgaagaaaccggtagaccaagcacatttactgatgaattaaaaaaagcaatgcatattgactaa

SEQ ID NO: 113219 - DNA, 180 bp, Enterobacter aerogenes
atgaaagtagcgatcgaagtaaacggcgaggttatatggttccggaatggtgaaacactcgagggaatggcttgcacctcttacgtgaaggacggtacacagcagaaaatcattaccgccctggatgatgccttaactcaggcaaagagtgagatgctagtatttgataatgttgattga

SEQ ID NO: 113220 - DNA, 708 bp, Enterobacter aerogenes
atgagaaaattatttgctactcctgcccttatacttattcttgtctcttgctcagcactagctgatggttttggtctaaatgtaacacgtgttatttttaagggtaatagtgatagcacaacggttgtactcagaaattcctctgcaaaggatacctatatagttcaagcccgtgtaagtaaaactgtagatggatttgaggagacacccttcaatattacaccacctatatttcgactggaacctgagtcgacaaacaatctaaggataaagctcaatgggaataataaattatccaaagaacatgaaactgttttttacctcaatactcgagcgataccagcaagtgtgaagaaagacttgatagatggagtaaatcgtgttaccggtacagcacaatttggcgtcggtactattattaaactattttatcgccctaaaagtttgcctggttcatcagaagaagcacaaaaaaatatatctttccagacagtaccaagtggtttaaagattaaaaataactctgctttttatgttagtttttcaaagctaagtttagcaggagaatcattgctaagaaaggacgcaccaacaatgattgcaccatattctgatattatttatgttacaaataaaaagtcaggaaaggtcatttggaatactataaacgattttggtggtgttaatatttatgaaacggctttgtaa

SEQ ID NO: 113221 - DNA, 483 bp, Enterobacter aerogenes
atgactatttacagtggaattcaacaaaaacttaccgagtacagagcacaacaaggcatctactggactgacattgagcagagaataaacaattttggtactgatttggtttcatatcttggagtcgaaggatttggcttgtgcgatagccgcgataacaaatattccgtcgtcacagtaggtatgaaggatggggataatgtagagaaagttccccctttccttatggaaaagattgaaggccaagtgaactctttgcacttctacttgcaggttaatttatcggaatttggcagtgaaattttagattgtgcaatgacttttgaatgttatttccgtaaagagcgtggtgattattttattaacatttccggtaaagatattgaatgcagaagtgttaacgacaaatgtgatttcacaagtgtatttgactatatagttaaaaagcttgaagaatttgtcgataagtcacgatacgagtaa

SEQ ID NO: 113222 - DNA, 519 bp, Enterobacter aerogenes
atgagtgacaatcaaaccacgaatgcccaggatccttttgattcatttgcttttaacgacccttttagtcttttaggaaatattgactcagctaatgttattgccttttttgggttaatttcacgcattgagtatgctgtcatggtgcaggggtttgtagacaaccgcgcagggcagagaatgaatattaattggatcgcatttgccgagagcatgaagaataagctacttgctttggggtctgagaaggttaatcaaagcgtgcgatatctgtgtgtagagcctcctttacagtatatgaacaccgctgaatggaaaaaaaggaattataaacacggtttagcgcttgattcacttgctattctggcagcaaaagacgtgaggaataacttgttccacgggataaaacttaacaatccagaacatgctaggaacaatgagctgatagaagcggcaattgtagttttccgaggttgcttgatggcgtgcccggaactcaacgtctattacaattcataa

SEQ ID NO: 113223 - DNA, 444 bp, Enterobacter aerogenes
atgagtagagaagatccgcagttacgcattaggcttccaattgaacttaaagagaaaattgaagactctgccaaagctaacaaccgttcaatgaatgctgaaattgtgcaaagacttgatagtagcttttttgctgaagtctcggatgatgaggttctctctgcggaagaagctattcaaattgtcagcaaggcaagggatgagctgtcagcggtaattttcaaaaggaccttctctgaaataaataaaaaagtcagaattggacacaccacctttcatatccaccttgatgatttggagcttgatggcctaagcgatgaagatttcgatgccgtcttccaaaatactttttttagccttaaaaaattgggttacgagatttgggagaaaacttgggatgcatcagggtttaccgctgagataccagaaaaaaagcccacctga

SEQ ID NO: 113224 - DNA, 984 bp, Enterobacter aerogenes
gtgaaaagaaaattcatacacgaattcgcttttggatacttaaatagttttacagcaatggttactgctcagcaactgacgtctgatgcaaaaatgaatttagagcaagaaaaacaactttcaaaatgtcatatatactttatttgcgctcgcccaagcttttatttcattgagaatacaattaagcatgaaaaaaacaccctttcaggagagatagggtacaaaatagatggtaaagaaagcaggttccattttgaatacgactggatattagaagacgatgcaattgatgtaatatgtaaatatccattccgagaagttattagtataaataatgcgggggaagaggtaacttacatctctgcatctatcattgccaccttccattcaagtaaattagattgcttctctgatctgtcctcctatgaggttctttatatcggacaagccgtaggtaaaaatggtagcaggaacgcagttgaacgtttaaggaaccattcaaaattacaaaagatattggcgcaaacgcattatagcaagccagatcaagagattatgctttttatgtatgcctttgagcatgaacaagtattttcatctctagatgggagatctggattaattgatgatacggatagcgatgacatgagatttaagttagcattaaaaaacctcccaaaccaaaatcaagccatcaatatgatcgaagctgctttgataagatattttcagccagaatataatgaaaaattcaaagagagcaaaatatcacctaaattgaaagcattagcgaaatgctatgacttagatatgtctggaatcgttgtggaaattaatacagaaaatcttttttactcattatactctaaaaaaattaaaaaaaactatcatcacattgtgaagatagatttagtttctcatcagcaaagattatccttctttcgaccaactggattcaatgctctaccagacattattgaatga

SEQ ID NO: 113225 - DNA, 2916 bp, Enterobacter aerogenes
atggcctttaacccgccgctgggatcgaccaacgccgatgtttttatgggcaacgttcaacgcctggatgaactgattaacggtcctgctgccgacgttcccgaccgcgcaggcgacccgctatattcctggcgtctaacccgtcagagcctgattcctcttagtcgccagtacatgacacttgcagacgcacaggcggatattgccaatattcctgatggctcagcgacctacgtacgcagtgctgacgggagttcacttgcggatgaatatatcaacaacagcggaacgctggaggcaaccgggcgtaaaatgccgtcacaaagtggtattgccacggcgattaattatttactgagtggtatttatccatctgacgtatcctcttcatgggaaattaccaagaattttgtcattttcagggatggcacttttgctgctaatgacgcatgggatggctattttgttccctgcaaagaaggcgatcaggctgattattttggtgttatcaacacagtaacagctggagaaaaaaccgcttggctgattcagtgcgacaataacaaaaactacgttcaggttctggcggaaaccgtttcgacaggggttgcaactgagcagggaactgtacacggcgtggcaactcaggacgggtatatttatgttcgcgtgcgtaatagtgtaaacccgaactggaatatcaactttctcaaaaagcatttgattaccactgatgactatttgaacggcatttctcaacttaaccagggactttggccggaaagtgcatcatctgtctgggaaattacccgccagtttgttttgttttctggcggtctttccggctcttatcctgaatgggatgcgtattacattccttgcagcaaaggagaccaggctgaatattctggcattattgatctggcaaccgcagggaccgttacggcatggctgattcagtgcgataccgacaaaaagtacgtgtctgatttagcggtcaatgtcactactggtgatgcaacaaggcagggcacggttagaggaacggctatccaggatggttatatttatgttcgggtaaaaaatagcgggaatgctgggtggtatatcaatttcatgaagaagttcttagttgcttcttctgatgttggtatagctggcggggttgctgaatatgacgttttaaaagctatcggggataacggtcagtccattgattacaccaaaaacggcaattactatgtttttggcacagttatgctgtatgacggcacagttaacagcaatgccggtaatgactggctggcgtattacctgccagtatcaaaaggcgatcaagtcacgatgtccggcatctacggttcagcgaccgtcggccagcaaatggcatatttcattcagctggaccatgacaaaaattttgttgcgcccctggatatctatatcagtaccggcgcttctgacgtccagttaacccgcagcgttatcgcttctcaggatggggtgatgtatgtcagggtgcggcgtgtactgggtggcgtcgaacaggcatacagcgttacagcattccagcgcagctacaagctgctgcaggacctgtacgctctgcaaaatcaggttgatgacctgattaataacggggcagtgcagacgcctgtgattggtgcgactctggagcagttacccgtaagactggataacagatttaactacaacgccgccgtatatattcaggataacgttgtcactgccgggaattacactttcgcagttggtacacgtgggaaccgtcatcccatcatcatgcgcaaagagaatctcaccggagtgtggacatatttcgaccttcactatgtcaccggaaaccctttagcatcgccaaccgaagaagatagtcataacgtttacagcctgggcgtgacgaaggatggttatctaattgtcagcgggaatatgcacgccaaaccgtgccgggctgttatatccaatgctccatatgacattacggcatggacggcaatcagttataccgcgtcagcggaggtaacctatcctcggtttgtcaattacccggacggaaccacgcaggcattctggcgacaggggctatcggctgctggtcagtattattcagccctgtttaatgacacgaccagaacgtttggacctgtattccagattgcagcaacagacctcaacgcgaacgcctatgaacaacgcctcggtattggccgggatggttcgctgcacttctgctttggcctacgcgtcaatgcgaacacagcagatgctaaccgcggcctgtactatgcgaaatcgatggataagggactgacatggacaaacgctgccggcactgtaaattaccctgcaccactgacagaagccaacagcgagaagatcgctgatatcgctctgtattctggttatgttaatcagaatggcggcgcgtgtgattatgacagccactaccacacttgcctgtggcagactgatgagaataaccatacgcaaatcgctcatatctggtttgacggctcagactggcatgaggaattcgtttcaaagttcacattcaaggtcaatactacaaagcctctactggacggttcccttagtcgtccggccattggctgcaacaagtatgggaaaacatggatattctatcgaacaaccgaaatggggcgcgatggagagatcagggcaatcgatgtatctgagccaggtaacccggtagaacatatcgtcaccgggttcaatatggggacactagaactggcggtaaataccaatactctgatgaacgataaccaattgctgatgctggcaactcgcggtgcaattggttatgcggaccctatgtactctcgatacacagatgaaccaggatatttgttagtggcagtgatgccgtaa

SEQ ID NO: 113226 - DNA, 4008 bp, Enterobacter aerogenes
atggcctttaatccgccgctgggatcgaccaacgccgatgtttttatgggcaacgttcaacgcctggatgaacttgttaacggtcctgctgctgatgttcccgatcgcgcaggtgacccgctttattcctggcgtctaatccgtcagagcctgattcctcttagccgtcagtacatgacgctggcagcggcccaggctgatattgcaaatatcccgaatgggtctgctacctacgtgcgtagtgctgacggtagttcacttgcggatgaatatatcaacaacagtggaacgctggaggcaaccgggcgaaagatgccgtctcaggtagcgttagaaaatgcaacagaccctcttaagggacccgtacatcttctcaatgaaagtgccgggtatttttcggagcatggtagcgcatcagttaatatcgcatccacagtgatgcaacgggtatccgacatcgtttcctcaggaacaaatctcctgaatatagacagtaatggcgtattagtgatcaacaaaattgttgatgcttctccgcccaatattacgctgactgtaaaaaacaacgatgtagaagttctgtctctgacggtgttgcctggtgaaacgttgcaggctggcaaggttgaatccccgtggtttctcgtatccacgctgggtggcaaaactccgtcacaggtaatttttcaggaatctgtcgcccggattattttcacaaaagaggattttcccgatatagaaggggtggataacactaccgggctgtatcgtgttgcagataaaacgtacagttttgctcctgaaacggcagaaggcgcaccgttctcatctgtaccatgcgtggccaacactaatgcaggaggtgttcagtttgcgatccccgtatcgctgattactgctgcagggtatccactgacgcaggaaggcgtcaccgggtattttctggccaagtatcctgagcttaatatctggtgccgcccaaacagttcagacgtccgtcgctggcattacaatggactgtctcttgtaccgctttcatctggcagtgtggaaatcactgtggattcgtcggtgagtgctgttgatgtttctgtgtactcatccccactggtcaaacgcgcgtcgccggtagtggttaatgagggcatgttcagaaacgtggcggcgtaccgtaatctggtgtactccgggcacactggtgaagtgggagaggtgagctctccggttgggtcgatgctcagctttgattccctgtcggcatccacggtggcggcatcaggacgattgaatattctggtgaatgaggcgctggccgcttcagtttttttccccggttatggttcagttctttctggcgacggatcgctgattgcgccatttgacaccttttcgctgagtgaatgcgcacaataccgcgtggcggaaatcactgataccgtggcgcgtatccagttcacgataccgcaacgcatcactggggcatttaacaccattaccacggaatacgtaattgacaccgcaggggtgtttgcgccatcgacctataacgtcgcctccaatgtgacccgcaacagtgtcagcgccaccacgtcggtaacaccgcgggtgatccagctctgtctcatgattgctgacattgttgcggcagggtatgactataccgacccggcgagcatcgagtcgtacgcatttgagctggcccgtcgtagccagttcctggtgtataccgggatcacaaaaacgctgccggacatggggaaatatttttcccgcgaactctcggcaggtcgggtctcactgacctatgaaaacaacaactgcgccgggttcctgaccatcaaaaacggtcagtcactgaaacccgtggatgatggtaagtacattttccagtctgccgatatcctcaatgatacagcatacgactattccggttttccgctggagttgaaagttagatttgatccgggacaggttggtccggataactcattgtatcttgttgatggtgaaggaaatgaaattgcctgccagttcgccgacgaatttaatcctaatctgcgcaatccggcaaacatggggtttaactatgacggttctctggcatgcggttcagtgctgttttatgacaacctgccagcaggtgcgcggaaatactaccagttgaaggcatattcccgcccgcggctggcggtagacctgccggttatcacgcaagatctgtccacgctaacgattggtttcggcggttatacgtttacgtttgacctcgcccgcaactggcaactgaatactgttgccgacccggcagggaacgtcacccgcgtgcagcacggcaatttctttgctgcctacgataccgccgtggtgcagtcagtttttctggttaacccgtccgcgcgagtggtgtcagtggggcccgtgtttgttgaggttgaaacggtagcgtttaattccgcactgggcgctgtacttccgaaaacgctgaaggccacaacccgtacccgcatctataaaaacgggcgcctgcatttcaggtcaaaatttaccgccgttgatgagattgcagtcaataagctgtggggaacgcacggacgtatttcactacctgatttcgctatcacgccagatgtaaaacggttcttcaccctgctgcatgaggacggtaataccggcaacctctggacgttctgcctgttgcgcggcacgggagatacgcacagggatggcgtccagtacggaccaaacagaccgaattactggaatgtgtcaaacccgtcaccaggcacaaccaggctttatggtggttggcagtttaccaaagcgagcgactattcgcttctgaactggcctgtcgataagggatggacctgggtgactgagttttttgttgacccggagagccggtacaccaccgagaatgacatgctgacgtttatctataaccgccctgttggacggtttggatcgccagtctatccaggcaccctgcggcgtcgtttattccgtcattttgaggattactgcgcgggttcaatggagtggtttcgcagcccggaagcgatcccgtacggcggctccagttcggtgactaaccggtattactgccacacctgggatatttaccagtattacgtttacggaaaaggttcattgcagggggtatacaccaacttcaaactttactgtgagaccgtatggcagagctttgacaacatcggcaatgcctacacgtctggtcagatggggttgcagtttgcatcacgcctggtgctacctgcgtttcactggctgtataaggctgcattacgggacggtaacgaagtgataaaggcgtctgtttctgctgctatgaccagtctggcaaccgccatcaaagtttatctggatacccatgatggcgtagcgctgacaacgacaggtggaggtaacggaaattccaactcaaacgctaccgggatgcgtgctcttgcgctggctatctggatggggggtgataccgatggctcattgagagcagcatttgataagtgcaataccctgttaagtggtgggtcgtataactatgttgctggcgtctttacggagcaagctggtgatgttctgaatgcatataactggcttcattatcaggcatatgcagtgaacaattatctgattgcctgtgacctgcttgatataactccaacgttggatatgagcaattattttatgcaggcacagaacggcagcggcggggttaatgaaatcccttattctatctccgagagtcgccggggtcagttgaatacgattacgtttgtcacctacccctggatacgaaccggcagggcatcagcgatggtggcaatggagtcagcctggcagcaacttgaggaacagcataattctcgcgcaggaatgacgcagcgaatctatgacttcaacccgctgacgagttcgacggcgcgttatgaagtgtcgttcaacgtggccgtactggtagacacgatattatcgttcaacaactag

SEQ ID NO: 113227 - DNA, 189 bp, Enterobacter aerogenes
atgtggttaaaatggggcaagaatgggacaagaattgaaactgtggggcatgactgggacattttacagcatgcgaactttaccgaatttcatatgatgttgaatttcaatgcattgaatagtctaaagaaaacacatgctcttgggcgttctttagtgatttttaaaactcccgtatcacgcagttaa

SEQ ID NO: 113228 - DNA, 831 bp, Enterobacter aerogenes
atgagtatggatctcatggtccgggccatgaaaatcaaggtcggaaaccccttgcgcaaactggtccttctcaaactggctgacaacgcaagcgaccagggtgagtgctggccgagttatcaacacattgctgatcaatgcgaaatcagtaagcgatcggtgatgaatcacatcgaggcgctttgtgaaagtgggctcatcaaaaaagagtgtcggacagggccaaaaggtaattccagcaacatttatcgccttgatttatgtagtgcaacagattcaccagggggtagtgcaaatcgttcactacatggtgcaggaggttcactaggtagtgcaacagattcaccagggggtagtgcaggagctgcacccagaatcagtcactcttttgaaccagtcaatgaaccagtcaatgaacctataaaacatacaggcgcatcggctgacgcctctgcacctgagcgttctgcaaaacaggattattcccctgaatttgaaacagcctggcaggcatacccaaaacgcgctggtggcaactccaaggctgcggccttcaaagcgtggaagacccgcctgaaagacggggttaaacatgaggacatgctggcgggtgttaaacgctatgccgcctacgtccgagcaacgggcagcatcggcacccagttcgtcaagcaggctgcgacgttcttcgggcccgatcgccacttcgaagaatcctggcaggcaccaatcgatcccggaggtgggcgcagcggcaccgttgctcgcttatccgggctggggcgcatgtctgatgagtttggcgaatctggtgaaaacctgagtttttga

SEQ ID NO: 113229 - DNA, 879 bp, Enterobacter aerogenes
atgttgaatttgaaccagcgcaaagagcgcgaagacctgagagcacaacgagaaaaactcggtgaagaactgcttttcgctgaagagcataaactaccatggggttacgaaggctgggagtccaaccataccagcactgtgtcatgtccgtctcacggagactttgagcgcttcactctggtgggcaaagattttcgaggaagtgaaaacattaagcattcccgttgtccggcatgcatccgggcggagcaggaaagtatcaaagatagtctgcgcaaactccgtgttgccagcctgctggacgatgcaggaatcactcgccgctttgccgactgtgagtttgacaattatctggagatcaatcctgaagcctcccgtaacctcgtagcctgtaaacgttacgcaaacaattggccggatgttctaggcgccgggaaaaatctggtgctgaccggcagctgcggaacgggaaaaaaccatctagcggtatcactggcaaaaagcattattcgtaaccatcttgccagcgttgagattacggacgtcatgcgcctgactcgcacagtgaaaagtacctggcgtcacaatactgaggcaaccgaagagagcgtactggatcattatgcttcgcttgatcttctgattatcgacgaggttggtgtgcaatttggcagtccagcagagatgaccattctgcatgaagtgattaatgcccgctatgaaagcgttttgccaaccattctgatcaccaaccttcctcctgaacagttgaaggagtttatcagcgaccgtatttttgaccgggttactgatggcggccgtaattacctggtattcaactgggctagctttcgcgggaataacggagcgcaggcatga

SEQ ID NO: 113230 - DNA, 1380 bp, Enterobacter aerogenes
atgacaccagtatggaaaaatgaagatctggaaggggcggttattggcgctttgtttttgcgcggtgccgaccctgaggtactggatattctttcccaccttccagaaagtactttctctgttcgtcagtacagggaaattttctcgggtatctgtcgtcaggctcgtggcggcggtgtaattgacccgctgctgctatgcgaaactctgccggcgcttcagaccactatcctggaaactacccgtgtcagttgggcaaagtcggcgctggtatcttacgttgacgttctgcgccgtaacgctggtgtgcgtgatgctgaaatagcactggaaaaggcgttggcgcaaatcaggagcgccaacaacggtgactctgctcttgctgcgttggaagcagctaagcaggctgtatcggccatcgatatttctgctgataccgtacaaccggtccatatttccgatctgctcgccgcggtggccgatgaagtggaatcacgaagccttggaagggaagagacccgtagtttgctaacaggcattgaagaacttgatgcgaagactggcggcattgaacctacggacctggtatttattgccgcgcgtccatctatgggaaaaactgagctggcactggatatcatcgacaaagtatccgctcagggtcatggcgtcctgtttttcagtatggaaatgtccgacacgcagatcgccaaacgcatggtatctgcagcggggggcatgccgatgtccaggcttaaagccgtagacaaatttgaggacgaagactgggccaggttctttaacggcatggagcgaatggctacccgcaacatctggattaccgacgccaccggcctgactatcgagcagatccagcaaaccgcaacacggtaccagatagcgcatcctgaaatcgcactggtggtcatcgactatctggcgcttatcaaaattcagagcgctgcgcgttacgacctggccgtaggtgaagtctccaaggggcttaaaaacttggctaaatccaataaaacccccgtccttgcactgagccagctgtcgcgaggcgtggaatccagacccaacaaacgccccatgaactccgacatgaagaactccggagaaattgaggcggatgccgacctgattctgatgctgtatcgcgatgaagtatataacccggaatccccggcgaaaggtattgccgaaatcaacgtgaccaaacaacggaatggtgaactgggaacaatttatcgtcgtttctacaacggacattttctgccaattgaccaggaagaagcccgccagcgctcaacgtcgcaaccaaaagcacatcaacgccgttatacgaaagggagtcggattgggcatgaagatttttaa

SEQ ID NO: 113231 - DNA, 867 bp, Enterobacter aerogenes
atgacaaaaacagaaatagtaaaggcagtgactaaatggttcgacgttgacaagtatgatgtgctgaacgagctgactgttgaacagatatacatagaagtagaaagacgtgttcttgcttacaatttgctcacccaatacgattcgcttaaaccccaacttaaagctcttgttgatgatcatgagcagaagatacagtccgggaaagtcctctttaatgaggacgctaaaattgacaagccagaagaaatcctttcatcaagctacatagcaaatccacttactattgctggtgcgaaagatgtcattggggctgttgatatggtgaatagacttattggcccgcaagaagaggctaagaggtcaaggcagctttcgcaataccttagtcaagcgggcatcagtaaagatgtcatgtttgttgaaattcatctctcagaggcttctacagaagacatcattgagcatctaaaaacgatgataccgcgatggaagaaggagcttaaggtgaggccccatgaagaaagaggttatcgttttggggtcggtacgatcaaaaaagttatgaaatataatcttataccgatgtttgatctcatgttctgggagaaaaagaacaacgccaaaattggtataacgctgctgacgaggctgctttaccctcatctgattagtgaagataaccgcagtgaaggcatggtaaaagatactgattatcctttagctgtaggttttatgaccaaccagagctacatcaaatcgttaggcgattttatagttaaatacgactctgacagggattggaaagtgtggagtttcatcaactactacttacccgaagacgagcaagaagaacaagaaaagtaa

SEQ ID NO: 113232 - DNA, 219 bp, Enterobacter aerogenes
atgaatacgaatgtagtatcaaacagtaaaagacttattcgtttacaagaagtattaaatcgtactggtttatgtaaagcatggatttatcggttgattagtcgtaatgaattcccggcccaagtaaaacttggtgaaagagcaatagcattcttagagagtgatattgataagtggattgatgaaaagatttctttatcacgtaataaagtagcataa

SEQ ID NO: 113233 - DNA, 297 bp, Enterobacter aerogenes
atgtctaaaggaagtattgctagtaataaatcaactgaactgttctatgatcttgcctgcaggtcatttaccgcaagctggaatatgttcatggaagtcaatggtgatgggaatgccaatgattatctggatgatcctgagttcatgagtccatttattatttatgttattgaccatattcagaataactttgaaagattcacagcccaagaaggaaacagtggtgatattaatcaagttaactttgaactagtcgctgccatgttagttgagtattcagaaggttttagaaaataa

SEQ ID NO: 113234 - DNA, 264 bp, Enterobacter aerogenes
atggtaaacaacaacgaacaaagttctatggcaaatacaatatctgtcgcagtaagtatgttgtgcgaagaaaccccaaaagtaatgaatgctattcaagagcattttgaaatatttgttgccattacgggatattcagtagaagaaatcatggatgacagcaacttgcttgacgcgttaaatcgatttattaataacgaactagttaatgatttagggttggaatattgttccgttatcataaatatcggttataacaactga

SEQ ID NO: 113235 - DNA, 1398 bp, Enterobacter aerogenes
  misc_feature (1384)..(1393): n is a, c, g, or t
atgattaaaaaagatagtcatattactggattggacactaatacctttttcgaggaaaacgcaaaaaaactaaaatctttatttcctgaaattttttttgataaccatattgattatgacgtattgaaacagattttgggtgataactctaatagtcaagatgaacgctatgggtttaattggaatggaaagcgtcgtgctcgccaacttgcattaacgccatcaagagggaccttacgcccaattatatcagaaagtcttgaatgggatactacacgtaatttaatgattgaaggcgataaccttgaggtattgaagcttttgcagaaaagctattcagggctagttaaactaattttcatagatccaccttataacactggcaaggattttgtttatcctgataatttcaaagataatttgaaaaactatctagaactgacaaatcaatttgaaaatggtatccaacttacctcgaatgtcgaaaccagcggaaggtttcatactgactggctgaatatgatttatccccgtttaaaacttgccaaaaatctacttaaaaacgatggggttatattggtaagtcttgatgataatgagtctgcaaacctgaggcaagttatgaatgagttattcggggaagaatcatttgtcggagtatttccttggcgctcaagaacagcaaaagctgatgttccttttggcgtttcaaatgatgtcgaatggatcatcgcttatgctaataaagattttcgtgcaggcagagagggcgaacgtaaatactataagacagatgattttgaggatagatggcgccttcaagatttaaccaaaaatacaaccaaggaacaaagacctaactcttattttactatagtcaaccccaaaaatggggataagtatcctgccaacgagacaaggacatggtctgtaacggcagatacaatccctgagtatctatccttgggaaaaattgtctttccgggtgattatgaattcttgaaattatctaaacctgcattccgagtcttcgagagcgaagacaaggaaaaagcaattagaaaatatggaactgatgttcttaaaatgtcagtttccacctatttaccagagaaagaagtgggtaggacggaacatggttcaaaagacataagagatctttttggattgcaagtgtttccctaccctaagcctgtatctttgcttgaattcttcattaagaatatgacaaatgaagatgatattattcttgatttttttgctggatccggtactacaggtcacgctgtatttaaagtatgtgctgaggaattgaaatctcgtagatttatacttgtacaattacctgagaatctgtcggatactaataaagagcaaaaaacannnnnnnnnntatga

SEQ ID NO: 113236 - DNA, 291 bp, Enterobacter aerogenes
atgctaaagcgtggcattgacttgagtgtaaacattgaaacccgtcagtttgatggattaaccgtttcttgcgttgacggtggcaaattgtttacctgctttgctaaacaaatccctgcatcttcagtagaagaactgaccaaggggatcatcgactggcataagagtttgaaggctggcaaagatactgtctgctatttccttgatgacgcatttgaaaataacgttgctaaaacaaatctttgcgccattctggaacagcatggcctgactaacctgcacagcctgtaa

SEQ ID NO: 113237 - DNA, 471 bp, Enterobacter aerogenes
ttgctgagaattcaggcgaagttctttatcaagatgttcacgaattgtacgcctaatcatatgacgctggatgagcatcgggtcaatatcacccacgacatcacccacttgcatatagtaggtattagaaggcgtctccaatgtcagatagccttctttgcccgtgcggatctcacttatcctgtatccctgataaatatcacgccccgtttcgtcatcaagtgtcataccgtcatgcacggtaatttcagaacgatttacgcccctttttttatcggctatatcaacaataacagtcgcgctaatgctattcttcttactgttaatactgaccagttttacataggggctattacttgcattttggacttcaagcccggcaacttcgatttgtttcaccagtttttgattgtaggcatcaatggcatcgaggcgatacaccatatgatgtttatgcacgtgtgtcgctga

SEQ ID NO: 113238 - DNA, 651 bp, Enterobacter aerogenes
atgaactcgatctcttgggtgattttcatggggctgctgataaacataccatcactgattccgatgctgtttctaaataagatatcaaagaaggtgaaggtatcgctggcattcagactgtttctgcttaacgctttcttggtgctgtcccttgtgacgctatcgcagaacaccacgcaaaaatacgggctgtttcctgtatggctggtcgttgttgctattgggctgtttgtggtcacacttcttccaacggtgaaattcatgcgtaagcatttaaccgtaggtaaaagcagggctgttaccctcacatcattcctgattgtctatgccatcagatttaatggcgtgttttcagatgcgtatggaagtggatatacgattaacggttataacacagtatggacattcttcttcctgtttgcctgcctattggcttatctcggttgttccgggaacagagaaaactatggtacatgtatacctccagccactgcgcagcctaatggtaataaatcctatgcttcccaatcagagattgataccgatattgctgtgaaaggatcaagtgtgttgttcgatccaaatctggatattgtggaacaacagcgttatcgggatgctattgaaaagcggaataatgatagcttgtaa

SEQ ID NO: 113239 - DNA, 555 bp, Enterobacter aerogenes
atgcgtaaatttttactcgtagcaggtcttgctgctcttttatcgggatgtggtgaaaaaggcgactttgagaaagcgatcaactcgaaaatttcacagtcaaagctgtgctactcactgaaggacaatgatattgtgttcaataaaggtttccccatccgggttaatcacggctatcgttctgccggatacagtgccagtgatgaaatcttaaaaggtctggctaatcagggactgcttgatgtttctcaacaagctaatggtttcagtagtgtcgatgttctggaagtaacagacaaaggccaagaggttgagttttgggaccgtgagaaaggtgcctgtgtcggtcaccgtgccgtagctgaggttaaaagctggactgaaccgagtgagggtaatggcgttaaaatgacgcaagtgacctatacgtggaaactggatggcgtgccgggctgggttgataaaaatgccttctctggcgtgaaagggatgtctgaaccagaagaagccaaaattgttctggtgaacaccaataacggctgggtcgcaaggtaa

SEQ ID NO: 113240 - DNA, 336 bp, Enterobacter aerogenes
atggccgagaataacggcggctataaggcggtgaacttcggttataccgacgatcgcgtctacagcaagctgaccagcgataacccgatcgatctggtgcgctatcagctggcgaactgctacatgggccgcgccgggttgattaactccggcggtgcggcgggcggcgaaaccgatcttgccgatgcggtgcgcacggcggtgatcaataaacgcgccggcggcatggggctgatcctcggtcgtaaagcctttaagaaatcgatgagcgaaggcgtgaagctgatcaatgcggtgcaggatgtctatctggacggcaaagtcaccatcgcataa

SEQ ID NO: 113241 - DNA, 954 bp, Enterobacter aerogenes
gtgcgcctgttcgacccgttcttccaggttggtaccggggtgcagcgtaatttccagggaaccggcctgggactggctatctgtgaaaaactcatcagcatgatggatggcgacattgacgtggaaactgaacccggcatggggagccgtttcaccattcgcattccgttatacggcatgcagcagatgccgccgctgttggccgaacagcacagcaacagcacctgttggctggcgattcataatacgtcactggcgctgtttatcgaatcgttgctgcaatatcatggcctgacggtacggcaatttgctggccagacgccagccgctgacgatattttattaaccgatgatgaactcagcgggcgttggccgggaagcgctgcggtgatcttctgccgtcggcatatcggtatccccgttgagcgcgcgccgggagagtggttgcatagcgtcaccacgccgcatgaacttctgccgttgctgggacgcctgctgcatctggcgctggcggtagaagagaatggtccggcgctgtcggcccacgacgcgccaacggtcagcaatgacgacatgatgattctggtggtcgacgatcatccgattaaccgccgcctgttggccgatcagcttggctcactgggttatcaatgcatgacggctaatgatggcgtcgatgcgcttaacgtcctgagtaaacaacatattgatattgttctcagcgacgtgaacatgccaaacatggatggttaccgtctgacgcagcggatccgtcaactggagatgacgctaccggttattggcgtcacggctaacgcgctggcggaagaaaaacaacgctgtctggagtcgggaatggatagctgtctgtcaaaaccagtaacgctggatatcctcaagcacacgctggccacctatgccgcgcaggtacgtaaagccagaaaaacaagctga

SEQ ID NO: 113242 - DNA, 303 bp, Enterobacter aerogenes
atgcctgaaaatattgtatgtgtatttgaatatggtatcgatcatccagggttgcgtatcatgagtattggtcgcttctatgggatgcactatcgaatcgatagtaacggctgttgggaacgtgttattcatgaggaagactgcaagtgtggctcagaacatattgacaatatatccttacttggccgggttgatgtttccttgaggaacaagttactagaaaatatcggttcagatttatatgttcagaaaggtattgacccgacctctgacaaattggctacatggggggaaccatactag

SEQ ID NO: 113243 - DNA, 378 bp, Enterobacter aerogenes
atgaccggcaactgcgcggcgctggcggcgctggcggatgaaccaggctatgcgcaaatcaacaccgccgacgccgaacggttaggcatcgaagatgaagcgctggtgtgggtcaattcgcgtaagggccgcatcatcacccgcgcgcaggtcagcgatcggccgaataaaggcgcggtgtacatgacctaccagtggtggatcggcgcctgtaacgagctggtgtcggagaacctgagcccgataactaaaacgccggagtacaagtactgcgcggttaacgttgaacggattgccgatcagcgcgcggcggagcagtacgtgatcgaggagtacaacaagctgaaagcccgcctgcgcgaaagcgcgatgggttaa

SEQ ID NO: 113244 - DNA, 435 bp, Enterobacter aerogenes
atgcgttgctgcacaaccaagtctctgcgcgggattaaagataaccagcgtctgctgatacttttctgtaactcatattcactgagtgtaggcgtatacgattaccggcgggttcatggcgatctgaacgaaatcggggaaacctgcggtaaaaaccgggtgggccgcatgatgcaactgaaccggatcaaagccgtacgaggctataaagctcctagtcatatcgctggccgaccttcagtggttgcccctaatcgcattcagcggcagtttaccgttgcccgggccaatcaggtctgggtcaccgattttacttacatccgcacctggcagggatggttgtatctggcggtagttatcgatctcttcgcccgtaacgtggtgggctggtcgatgaaacgaccttatcatgagaactggcgctggatgcgctga

SEQ ID NO: 113245 - DNA, 1251 bp, Enterobacter aerogenes
atggcaacagagcaaccggcaatcacccgcgccacattcgatgaagtcattctgccgatttatgcaccggcggagtttattccggtgaaggggaaaggcagccgcgtttgggatcagcagggcaaagagtacgttgattttgccggcgggattgcggtgaccgcgttgggccactgccacccggcgctggtggcggcgctgcacgagcagggcgaaaccctgtggcacaccagcaacgtttttaccaacgagccggcgctgcgcctgggtcgccaactggtggacgctacttttgccgaacgcgtggtgtttatgaactccggtacggaagccaatgaaacggcgttcaagctggcgcgtcattacgcaatcactcgccatagcccgtacaaaaccaaaatcatcgctttccataatgccttccacggacggtcgctgttcaccgtctcggttggtggtcagccgaaatactctgacggttttgggccgaaaccggcagatatcgtgcatgtcccatttaacgatctcgaggcagtgaaagcggtgatcgatgaccatacctgcgcggtggtggttgagccgattcagggcgagggcggggtaatggcggcgacgccggcgttcctgcaggggctgcgcgaactgtgcgacaagcatcaggcgctgctggtatttgatgaagtacagtgcggtatgggccgtaccggttcgctgttcgcctatatgcattacggcgtgaccccggatatcctgaccagcgcgaaggcgctcggcggcggtttcccgattagcgcgatgttgaccaccaatgaaattgccagcgccttccatgccggttcccatggctccacctacggcggcaatccgctggcctgcgcggtggcgaccgcggctttcaacctgattaacacgccgcaggtgctggagggcgtgaatgccaaacgggcgctgtttgtcgatcacctgcagcagatcgatgcgcagtttgatctgttcagcgacatccgcggcatggggctgttaatcggcgccgcgcttaagccgcagcatcatggacgcgcgcgcgatttcctctatgccgcggcggaggccggggtgatggtgttaaacgccgggccggacgtaatgcgctttgtgccgtcgctggtgattgatgatagcgatatcgccgaagggatggcgcgatttgcgcaggcggttaaaaacgtgcttagcgctgagagatcccctcataatttccccaaagcgtaa

SEQ ID NO: 113246 - DNA, 228 bp, Enterobacter aerogenes
atgtctgagcaagaaccagcagcagtaattgatcaattaaaaattgggactgataatagcgaccttaattctcttggcgctgaagtaacagctatgaagattgcaataggtctcatttttcaaaaaatgccaaatacgcatagagacgcatttttacttgaactccgtcagttggacaatccttggttgaatggattagccaaccaattggagcaatttaaggtttaa

SEQ ID NO: 113247 - DNA, 135 bp, Enterobacter aerogenes
atgtcgttaaaaaaaagagtgggtaggattgaaaaagaactaatcgaaatcaaaaaggcggtcaaaactaaccccgcccaagaaattaaatttgtggcatatgaatttaagattttattaggtattaaaccttaa

SEQ ID NO: 113248 - DNA, 264 bp, Enterobacter aerogenes
atgaaaatcgttaacgcagaagaaaagcacatccccgctatacgcgatatctacgcccatcatgttcttcacggtaccgccagctttgaaactgaacctccggatacccacgagatgcttgcccgcctgaaaaagatccgcaatcaggagctaccgtgggttgtcgcgttagaggaagaaaaggttatcgggtattgttggggtcgtttgcgggagagggcgaaatcctacgctaaggctttggccaacgatattctccggtaa

SEQ ID NO: 113249 - DNA, 324 bp, Enterobacter aerogenes; identical to SEQ ID NO: 38924

SEQ ID NO: 113250 - DNA, 1080 bp, Enterobacter aerogenes
atgaatagttggattcctatgttgcaagatgccgcagagatgtttgtttttctggctgttgagctttcattgctgtttattgtcattagtgccggtgtgagcctgataaggcaaaaagtcccggatcataaaattcagcagatgatgggggcgagaaaaggtaaggggtatctgttggcctcgttgctgggagccgttacccctttctgtagttgctcaacaattccaatgttgcgaggattgttgtctgcgaaagcggggtttggtccgacactcacttttttgtttgtttcaccgttgcttaatcccattatcgtgggactaatgtgggttacctttggctggaaagtaactttgctgtatgcgatcatcgctgccggtgtttcagttctttccagtattatactggattatttagggtttgaacgtcatattgttgaatacaaaaattcagtatcaggtagttgcgccaccaagtgcggtgattctgaagcttcggtaaaaacgagttgctgtacttcatcagcgaaccccataattaacttaaggacggtaaagaacgagcagaacgtatcaacgtgttgttcatcaatatcatctgaacaaccagctgttagctgttgcagcagcgagaatctgggcaatgtgaatctcacaccgaataccacctctggcccaataaagttagctatgaaagatgccttacagcagtttaaggatgttctgccttatcttttgttaagtgtattaataggttcatttatttatggctttatcccttcagagtggattgcagctcatgccggagcagataatcccttagccataccgctgagtgcagttgttggtattccgttgtatatacgcgcagaggccgtaataccacttgcatcagttctgatgactaaaggtatgggcctcggagctttaatggccttgataatcggtagtgctggagcgagtctgacagaagtaatattgcttaaatcaatgttcagaatgcccatgataatcgcatttctgacggttatcttaggtatggcaatccttatgggatatttaacgcaatttttgttttaa

SEQ ID NO: 113251 - DNA, 618 bp, Enterobacter aerogenes
atggggaaatatcaggaagaaaagaaaacacccatcattatggtgaaaaaacgtcgcactcttttacccccttccttatctgaaaaaacaggtgttatcgcacgttcagagacagaaaagatggaagaatcagtctctgaggggatcagttcgcctgccgtcgatactcatacccctgatgctcctgcctgtaagaaaaaaaagaaaagacgccgttttccacgccagcctcattggactcatgaatttactcacgattgcgtggaaaaagtgaagtctctgtttccccatcttcgcgcagaaggcggaggatttcttccactgaaaattggcataaccaatgattttgccgcattcctgacagaacaccctgagacagaactgacactggatgaatggtcctgtgcaatatcctgcatcaccacccgacaggtatatctgcagcgtactgctgtcgcaggtatccctcgttatggactggatggactaccagcaggtcaggtatcagaatgcgatgcgctgaatgccagacgctggctggcagtaagggaacaacagaagctaaagatgaaaaccatgcaggaacagtccgcgtcaaccgaaaaaactgaacggtaa

SEQ ID NO: 113252 - DNA, 1557 bp, Enterobacter aerogenes
atggcagaaaaaaataaaaaaaccattactggtcaagtcttgaactccattaaaattaacaaactaaaatgtataaatggattaaacgagattatttttaaacctcatgcgttaaccgcaattttaggtccaaatggaagcggaaaatcaacaatactccatgctatagcaagcatatacatgcctgaagaaggtttccccggtgaagaccatcggttaatgcatttttttccacgcagcccacatgctgaatggaacggcagtgacttcattgtaaatttaacttatcgtaaagatggggtaatgattgaaaatgaattgaaaaattatggaaaagcagatattcgaggctcacgatggattcagatttatgctcgtcgtcctttaagagaagtttactatcttggcattgataaatgtgttcctataatagaatcagaaaaaaagaataatattcagtatgaaaccagcagtgtcagtaatgatttaataacaaacattcttcattacgcctcctatatacttaataaaccatacacaagtttcaatcagcatcaacaacccaatggaaaaatattgattggagttgagtcagggggactggcctactcatcattgagtatgagcgcaggagagcaaaagatatttttaattctggaaacaatattgaaagcggacaagaacgccttaatattaattgatgaattagatttattgttgcatgacgaagcattgaaaaagttaatagaagtcatatcatctcatgccaaagataaaaacaaacaaatcatctttactacccatagagaaatgataaccactttatcagacaagataaatataagacacgtcgtaaacattcaaggccgtagttattcatttgaagaaacaaaacctgatgctataaacagattaacaggtgaatcaacgacgcctattgaaatatatgtagaagatgacttagctgttgccataataaataaaatatgttcttcacttaaggccagcaaatatgtaaaaatatttaaatttggcgcagcttcaaacgcattcactctacttgccagtacccttattcgtggtgacaatctatctggtaaactttatattcttgatggcgataaatattccacagaaaatgaaaagaaaactgctcttgataaagttttcaccggcacagaatcacgaacttatgagttaaaagcggcagcggaaggaaaagtaaaacaatttaatctcccaaatggggttaagcctgaacaatacattcattatcttattacaaatgtctcactggacggattgggtggcgaatatttagaaataatcgaagcagcaagggatatcagagttgaacttgatgctcataattatatctcgaatattttaactaaattgggcattgatcgtccgtccgggttaacacgagtgatggatctggcctccaggcatcccgaatggcatcagtatgtgagtgaagtcactgactggttacagcccgtagtttctgatttaatggaacgattacctgagaatgatacagtagatataacttaa

SEQ ID NO: 113253 - DNA, 591 bp, Enterobacter aerogenes
atgacccagagccgccgaccgtcgccactgcagcggagagtgctgattgtgctggctgcgcttgatgaaaaacggccgggccccgtgctgacgcgggacctggaacgggtgctggagcgaagcggggaagccccggtctacgggccaaacctgcgcgcctcctgccgtcgtctggaggatgccggctggctgcgtaccctgcgcgccccgaatctgcagctggctgtcgagctgacggacgccggccgggccgtggcacagcctctgctgctggcagaacaggaccgcctccgggcagaacagcgtgcggcagaagtcgtcgtactgccgctggtcccggcagcaggtctgcccgcagacggcacttctgccactgatctggcggtgcagctgaacggcataacgtatcaggcctgccgtggggattttgtggtacgtctcgacggcagcacctgtctgcagttatggaataaagaaggcagggtggtacgcctggagggcgatccgctggaagtggcgcagtggctgcaggcctgtcacgatgccggaatggaggttcgtgtacaggttaatgaaagcgtcaccccgtaa

SEQ ID NO: 113254 - DNA, 258 bp, Enterobacter aerogenes; identical to SEQ ID NO: 28312

SEQ ID NO: 113255 - DNA, 291 bp, Enterobacter aerogenes
atgagcgtcaaaatcacaggtttagacaaaatgcagaaacagctaaaagaggttgagagagcaacagaggcattaaacggaagttatgatgtccacttcgatgctaacgatcctgtcagcattgagaacgcgattcaggaagcctattccatggtgtacgaacgcgcttctggttatgccactaatccgatggtcagcccattaatcgaacacatgaaagaaaatctgcgccaacagattctggacagagcagaacaacaaagacaggagagcgggcaggatggcaattga

SEQ ID NO: 113256 - DNA, 900 bp, Enterobacter aerogenes
atggcaattgatatctttcagtcacttaaaaattgcgtattcgaccttcagcgcgctgacgttcagaactatcagcaacctcttaagcaattggcccggctcttgaactcagagaatctgcagtcagttaatgcacatctgacccgcaatgttgaacttgatacctttctggccaggagtgaagatactgaatccagcatggctggttccgctgttctacagtggcctgatgagcccgctgatattttgggcctgaagttgctgctgatcgagaaaatggcagacgataacaatttttcctttaatttctgtcatacatttttctatgatcgaaacattattgaatccattcgaaaattcacgtcgtcattagttgccccgttcgtgcgcgattaccagttgtatgtggaaaaccaacacgatcctgagcctgcagtgtttcggccggtttcccgaaaaatttttattgttcatggccatgataatgatgcccttcagtctgttgcccgttttatatcccggataggtcttgaggaaatcattctttcagaacgtcctgacggctccaggacgattatcgagaaatttgaagcagagtcaggggatgtcagttttgccatcgtgctgatgacgcccgacgatagcggcagtgctctggcatctgaaagcacacgtctccgcgcacgccagaatgtcctgtatgagctcggatatttcgccgggaagcttggacgcgggaaagtacttgtactcaggaagggagatatcgaaatcccttcagatcttgccggggttctctataccgagcttgatgagcatggtggatggaaacgcaaactgctgagtgagcttgcgtatgccggtgttccttttgacaaggataaagcattaagcgcctga

SEQ ID NO: 113257 - DNA, 414 bp, Enterobacter aerogenes
atgttttttattgagaatgaaggtcaggctgtcgccggaacggattactggcagtctgtacaggcgcaggccggatatgtctacctcagctggaatgccggcgcagccaggctgcttgtcccggatgcggcaaaacatttactcagggagatgcggggggctgagtacgtcatcatcagtaagggaacgctgcatggccgcgatgcgctggaactggtatttgaagacggcagtgatgcgccgtttgtgatccacatgctgagtgagcagtgcgatcgcctgctccccgaaaacaaccagggagggggttttgttgtcaccgtccggacgcgtggcggtaaccagctccgttatccgggaaagtaccgtgttgtggaaaacctgcccgacgtttccccgtggagtgaacactga

SEQ ID NO: 113258 - DNA, 645 bp, Enterobacter aerogenes
atgcctgttattgctaatacgcatcccaaaggtggtgtgggtaagacaacttcatccgtaaacattgttggtgaaatgaagtctgatacagttgatctggatactcataccgggctttctatcattctggggctgagacctgaaggaaaagaaatttccgtgaaagtacccaaaacagtggatgagttaatcgaaattatgactccctacaagaacagcgataagacgttacttattgactgtgggggatttgactcagatcttacccgtactgcgattgcctttgcagactgcgttattgttccttcaaaagactccctgactgaacgtattggtttgatgcattttgatggagtactggacgaaatcagctctatcatggggaccgatataactgctcacctgtatctctgtaaagttaatcctaacaagaagaaattccctaagcttgatgcaatcctgccatcgttcaaacatctgaagctgatgaagagccgcatttctgctcgtgcagaatttgaggatgtcattgagactgggatgggaatcactgagtctgttcatgggcgctattcggcaggaggtaaggaagttattgccctgatcgaagaaatcaatcatctgattgaaaataacaaacagtaa

SEQ ID NO: 113259 - DNA, 981 bp, Enterobacter aerogenes; identical to SEQ ID NO: 8542

SEQ ID NO: 113260 - DNA, 417 bp, Enterobacter aerogenes; identical to SEQ ID NO: 8543

SEQ ID NO: 113261 - DNA, 942 bp, Enterobacter aerogenes
gtgagtaagaagaaaaacaccacaacgcccacgccgcatgatgccgcgttccggtcgttcctggcgaatcccgacgtcgccagagattttctggaactgcatcttcctgcggagtaccggcagttgtgcgacctgtccacgctgaagctggaacccgccacctttgttgagccggacctgcatcagtacgccagcgatatcctctggagcgtgaaaaccaccgggggtgaagatggttatgtttatacgctcatcgagcaccagagcaccgaaaatctgtacatgccttttcgcatgttacgctacagtgtggcggcgatgcagagacatctggagcagcacaaaacgttgccactggtcattccggtgctgttctatcacggtgagcgcagcccgtacccgtacagcatgaactggctggactgttttgagaatccggcgcttgcggctaaaatatacacaaagccgtttccgctggttgatatcactgtcgttgatgacaatgaaatcatgaaccatcgccggatggccgcactgacgctgctgatgaagcatatccgtcagcgggatatgctgatgtgtctggacaacctggtcagagcactgcaggacatccaggatgaagagcagattacagttcttttcaactatctgcttaatggcagcgaacatgtaacggttgaatttttgcagacgctggcgcagcgactgccgcagcacgaggacagcattatgacactggcagaacgtcttaagcaggaaggtatccagcaaggtatccagcagggtatccagcagggtatccagcagggagttcagcagggggcgcttcaaaaagcacgggaaatcgcccgggagctccggaacgcgggaatgccggcagcacaaatctgtcagctgaccggactttctgaagctgaactgaagaacatcactcactga

SEQ ID NO: 113262 - DNA, 171 bp, Enterobacter aerogenes
atgacgattgcagaacgtcttatacagaaaggttttgaaaaaggtgctcttgaagtggcgcgggaaatagcctgccggcttcgggatatgggctggacgccggaacggattcaggaggccacgggactttccggtgaagaactgaaaaaactgtttcctgatgagcagtag

SEQ ID NO: 113263 - DNA, 648 bp, Enterobacter aerogenes
atgaaacaccggacctggatcactgaagctttacgtcttcactttgaagaacatttaccccgggttgtggccgggcgtcgcctgggtgtaccaaaatcaacagtttgtagtatgttcgtgcgctttcggagagctggcctttcgtggcctttgcccgcaggcatgtcggagcaggaacttgatgcctgcctttacggacaattttccacggtaccagtcgtacgtcctgaaagcaccgttatatccgaagcccccatggtaaaaaaacgtccccggcggcccaacttcccttatgagtttaaaatcgccttagtggagcagtcactgcagcccggagcctgtgtggcgcagatcgcccgggaaaacggaatcaacgataacctgctcttcaactggcgccatcaataccggaaaggtggcctgctgccttccggaaaaaatatgccggcactgcttcccgtgacgttaacgccggagccggataataaaatcccggcccccgcacaggaaccagagcagataaatacaccgtccgacagtctgtgttgtgagctggttctgccggccggaactctcaggcttaaaggtaaactgacgccggcgttattacagacacttatccgcgaaataaaagggagcagccactga

SEQ ID NO: 113264 - DNA, 348 bp, Enterobacter aerogenes; identical to SEQ ID NO: 7898

SEQ ID NO: 113265 - DNA, 1572 bp, Enterobacter aerogenes
atggacacctcacttgctcatgagaacgcccgcctgcgggcactgttgcagacgcaacaggacaccatccgccagatggctgaatacaaccgcctgctctcacagcgggtggcggcttatgcttccgaaatcaaccggctgaaggcgctggttgcgaaactgcaacgtatgcagttcggtaaaagctcagaaaaacttcgtgcaaaaaccgaacggcagatacaggaagcacaggagcgaatcagcgcacttcaggaagaaatggcggaaacgctgggtgagcaatatgacccggtactgccatccgccctgcgccagtcttcagcccgtaaaccgttaccggcctcacttccccgtgaaacccgggttatccggccggaagaggaatgctgtcctgcctgtggtggtgaactcagttctctgggatgtgatgtgtcagagcaactggagcttatcagcagcgcctttaaggttatcgaaacacaacgtccgaaacaggcctgttgccggtgcgaccatatcgtgcaggcaccagtaccttcaaaacccattgcacgcagttatgccggagcggggcttctggcccatgttgtcaccgggaaatatgcagaccatctgccgttataccgccagtcagaaatataccgtcgtcagggagtggagctgagccgtgccacactggggcgctggacaggtgctgttgctgaactgctggagccgctgtatgacgtcctgcgccagtatgtgctgatgcccggtaaagtccatgctgatgatatccccgtcccggtccaggagccgggcagcggtaaaacccggacagcccggctgtgggtctacgtccgtgatgaccgtaacgccggttcacagatgcccccggcggtctggttcgcgtacagtccggaccggaaaggtatccatccacaaaatcacctggccggttacagcggtgtgcttcaggccgatgcttacggtggttaccgggcgttatacgaatccggcagaataacggaagccgcgtgtatggctcatgcccggagaaaaatccacgatgtgcatgcaagagcgcccacctacatcaccacggaagccctgcagcgtatcggtgaactgtatgccatcgaggcagaggtccggggctgttcagcagaacagcgtctggcggcaagaaaagccagagccgcgccactgatgcagtcactgtatgactggatacagcaacagatgaaaacactgtcgcgtcactcagatacggcaaaagcgttcgcatacctgctgaaacagtgggatgcactgaacgtgtactgcagtaatggctgggtggaaatcgacaacaacatcgcagagaacgccttacggggagtggccgtaggccggaaaaactggatgttcgcgggttccgacagcggtggtgaacatgcggcggtgttgtactcgctgatcggcacatgccgtctgaacaatgtggagccagaaaagtggctgcgttacgtcattgaacatatccaggactggccggcaaaccgggtacgcgatctgttgccctggaaagttgatctgagctctcagtaa

SEQ ID NO: 113266 - DNA, 210 bp, Enterobacter aerogenes
atggcaaaaacaaaacaggaatggttatatcagttacgtcgctgttccagcttaaagacacttgagaaaattattgctaaaaaccagggcactttgacctcagataaaatagaaacattcaactctgcagttgatcatcgccttgcggaactgacaatgaacaaattgtacgacaaagtaccggcttctgtctggaagtacgtaaaataa

SEQ ID NO: 113267 - DNA, 615 bp, Enterobacter aerogenes
atgattggagcatatgcaaaccgtggcggcacccattctaaaaaagaaacatgcgtgatcgcattcgcacttttctacattattttcgccgtcccattactaatcatttggaatacacctaccagttggggactagcagtaatcccaactggattcctgctatactccggatataaaaatggaagaaagaaaagagcaatcgtaaataatatcctagaacagataaagactgaatatcatgatgtattcgatccagacccatcttacgaacacaaatcaatatcatcattatatttcggaattgatatcaaaaaaggtactgcgttatatattcggctttaccccaataaaacattagatgtcattggcattgatattgataattttacacggacagtagtaagagaaaactgtatggaaatacacacaaagtatgtcaatatgccaatgttagaattgcctattggtgttaactctgctcgttctattgcaaacacattgcacgcaatggcaagtcgaggatatgattaccctgtcgactttcctcgcctgattcaggaaaagcgtaaggagtgggagcagattgcaggtatgcctgtagctgaagtattttaa

SEQ ID NO: 113268 - DNA, 2169 bp, Enterobacter aerogenes
gtgaaaattttacttcgcgcactctgtgcaggccttgctatatcctcactgccggcaatggcttcagtgacctatcaggatattgtgtctgccgcaaccaatcctgacgatctgtcccgtcaggcgctggtcacgatattcggtgatgtggtcaccaatccactgtcaaccagcgcccccaccctaatcggaagcatgttcggggcgttcaacagtatcatcgccgtacttgccgttgtctggtttatgttcattggtatccgtcatgttgtgcgttcggggcatcagggacaggtattcagcaccggacgcgatgtcgtcggcacactgagtgtcgttgcaggttttctgatgatcgttccaaccggaaatggctggagtctcgctcagctcattatgttatggggcgcatcgataatgggggttgggtccgccaatgtgatggttcaacttgccgctgataatatcgcaaatggttattcaatgactgtacagccagttcaggcatccacacgaacagcagcgcgtggcatttttgaaatggaactgtgtaagtatgcggttaacgcaggactaaatgattttaatcagacggccaaatcctcgacttcactgatgacagaatcagctaaaaccgccagtggtaattacactgtcacggtatccaatggcagcggtatctgtggtacagccagcctgtcagtagaaggaaacggaacaacagatcaatcgacgattggaaaattctttaatcccttcagtaaaaacgaatacagcggtgttatctcagcacaacgtgcagccatggataatatgattagcgacatggacaacgctgccagtgagtttgtgacaacatttctggaaaaaagaaattctggcaacggcacattgccggatatcgagacacggattcagagagcagccgacgagtatgagcgtgctgtacaaaaatcgctacctattgataacggagaacaatccaggaaagaagctctcaagtcttatctcacaacctatggatgggtaacgcttggcgcgtggtatcagacctttgccactgctaaccagcgtctggcagagctggctgacagagctccagctgtaacttcaatgtcatcacttggggaagttggcgatactgatttatttagtgctgttatgggggcatacaagactcaattgcagaattcaacttataccccacctttaggtactataacttcagcagacgaacaactactttcaaaaacaagcacgccacaagatgctttaatcaagcccacagagaagtttgggcaatggcttacgaacaatattgccaccgagtggactgattcgggtacaagtagcaatcaagttaatccactgataaaaatgaaaaatattggtgataaaactatggtcgctgcagagggtatttggattacttatacatctgctagagttattacttcaggaactgggagttctatatttggtaaattcatagatttgacgacaagtgctatttcaacactaaatgccttacttgaggccttagcgccccccgtatactttctgttactactgctgttttgtgcaggattctctttatctatttatttaccatttattccgtttattttctggatgactgggattggtaactgggtcattagtgtattaatcggatgtacagctggacctctgtggggggcaactcatctaggcacatcacaggacagagggagtcgtgctgcctacggttatatatatttaatagacagcatgataagaccacctatcatggttttcggattcttttttgcctctgtagccattatagcaataggtactatattaaactttttattcggtgctgcactgaccaatgtacaaataagttcatttacaggtatatttagcctcgcaggtttcttacttctttatgctagaagttgcacaaccattgtagccgcagcatttgccttacaagcatacctcccagaccatgtaattaatttcctaggaggacgtgatggtgtaaacacgcttggcaatatggctggttcaataaaagagatttttgctggcagcaatagaaacataagacacgcacctaatataagagaggagcaaattaaaaggatgaataacgacaacaataaggatggaataaagggataa

SEQ ID NO: 113269 - DNA, 453 bp, Enterobacter aerogenes
atgtcagtatttggtgatgacgatcatagtaataacggtaacgggccagagcagcagattgagcaacgtgtagaatattctcgttcagatgttgcaaccactcggcgtgccttatctgatcttgagcaacaatcctcacgacttggcgagcaaattcagcgccagatggctacagctaacactgctacgccggaagaatttcgtagagcttgggagaatcggagccagttgaatcaagtgaacgagcagataagtgcgatgagggaaacgatggaaaggatgatgcctggcacaggtaatgctcgtctctcgaatgaagaacgaacacaaatccagggcctttatgcctccggtctgtatacacagacagagttagctaatcaatatggtgtatctcagcctactataggtgatgtcgttcgtcgtggcagggaagaagataacaccaattaa

SEQ ID NO: 113270 - DNA, 483 bp, Enterobacter aerogenes
atgataaaaatagatgagttagaagaagcaatttcaacttttgatgatgtttctgatattgatgttaataataaaggtgttactttcaaatatcaaggtgttcatactatcgttaatacatatgagggtgatagagtctcgtcaaataaaatagttgtcatgaactcttttaaatctccagaatctattgacagtaaggttgctggtgaaaaactcgctgagttagttaatatgacatctttgtcaccagctaaaactacttatgtgcacttctctgatgagggcggggcgttcatatgtagaaatatattctcagacaaaatgaatacattgaagtatgatgatgatttttccaggaaattatttatatctaatttgaaggtggtaattcttgggatgatgctggagaattatagctgtttttatgatattaaagctgaggcttctagattaagtggggggcagggcgatgaaagtaaatga

SEQ ID NO: 113271 - DNA, 828 bp, Enterobacter aerogenes
  misc_feature (812)..(821): n is a, c, g, or t
atgagcaatgaggcacttcattggtcaattgactctatggtcaaaagagatacgactgtattcagttacggttgggtcttcaatgaaacaaagagcattcagcgagttacattgcttcagattgatcaagatggttccgttactaatatcaatgtcgattatggtaagatcagagacgatgttgcctcttatttttcacaatttgaccatgccgccaactcaggttatgtagtttacggatcattcagtactttaccatcagcatatcgattacaattactttgtacatatcaggatggtacatcggaatgtattgatattccagaaagtcattatattcattcgaatagtgaagaaaacaaagccatcttatctaagaaggtggcttttaagcaaatgttagtactgatcaaacgaggtttgatgttgctcaaaggtggtaatatatcggtcctttgcagcaaaataaaacgttatcgttcccatataccagtcaaggaattaaaaatatcaagtgatatatccaaaatattgaccctcaaggaaagagaaaaagtgatatttttccttgaccatgatttaggtggtggggctaatcattatcggaatcaattgatacatagtaaaattgcagagggttattctgctttagttcttgcctttgatataaagacactttcatataagttgcttgtgatgagtgaaacgtgtgatgctgcatataaaataccaaacgaacagtttatatttgatatgttgagtgtcttgactatcaaggaaatagtctataatacaggtgtgtcttttataannnnnnnnnntttataa

SEQ ID NO: 113272 - DNA, 492 bp, Enterobacter aerogenes
atgattactgtttattgccagaagttagatagttcttggcttacccccgaaatttatggaattttgggggtagtcctaggggcgagtatctccggtctagttgcatgggtcattcaacgttcaaataataaaaatactcaggcgatagaaagcaaaaggaatagtgttaaaatctatactgacttctttttaaaagatattattgactttatagacgctgaagttgcgtatatgcagcatatttatgtttccggcgctaaagaaattaacgagtttcctccgcatcaaaaaattatgtatgcggtagatacttcaattcgaatgtttaaagacgatacacttaacgaagagtataaaaattttgtactgcaaacggctaaagttcttagcaaagttaagggcgatgataatcaatcggcattaaatgaaatgattgctgcccgagagatggccgcatcgttaaagttaaaaatatataataaattcagctaa

SEQ ID NO: 113273 - DNA, 531 bp, Enterobacter aerogenes
atggaattaacagtttctatatcaacggtcatcacggcttgtttcggatttttaggtgtatatgttttgatgccattcgcgttaatagggagggatattttattaataaaatttattaataaagtgcttctcaacgatgatttttggcaaaatgtaagaattatggagagtgataaggctcactataactatttttattcaaaaggcaccactattaactatcctgtcaggaacggttctaccacatacaaaatagacggtaaggaagttagtaaagagaagttcgaaagttatgaaaaaaatagagagtttcactatggacgaatgaattcaatttggaagcgcattgctttaaagaataatatcgcagtaaaaatgtttaagtattttaagcttgatgaatacaatgattttctcgaaaaaagatcagccgccttttatgagctagctatgaattttattaaacaaaatgaaaataacattcaggctgagcagcaagtaaattcttctaaaaatgatactcctcagtaa

SEQ ID NO: 113274 - DNA, 207 bp, Enterobacter aerogenes
atggcacaggttaatatgaacttaagaatcaacgctgaaataaagaatgcttttatggccgttgcaaaaagcatggactgtaaatccggtattttatgcgccagaccgttaaacggcagcacaatacctggctccgtgaccaggctgaagaaggacatcagctactcgaatgcggtaatgtgttcccaccccagcgggaacagataa

SEQ ID NO: 113275 - DNA, 234 bp, Enterobacter aerogenes
atgcaattcttacagaatatccccccttatctgttttttacgggtaaaggaggcgttggatttgcccctatatttccagacatctgttatcacttaacccattacaagcccgctgccgcagatattcccgtggcgagcgataacccagcgcactatgcggatgccattcgttataatgctcgaacgcctctgcaaggttctttgctgccgttaacccgtctggtttgggcatga

SEQ ID NO: 113276 - DNA, 321 bp, Enterobacter aerogenes
atgcttgaagccaatatttttcagcgtaccaatctcagtaaatccaacctgctgatggactttcagcgaaccttgattattgctatcgccgacaatagcaatcatctgccgatagccgtgagtttttgcccaggaaatgacgtagcgcagcaacgcttttcctgtcccccgacgctgtgcgtccgggtgaatataaatcgaatcttcgagagtgtggcggtaggcgtagcgttcacggtaacgagtgagataacaaggggtcgtttgcgggagggggcggaatcctacgctaaggctttggccagcgatattctccggtga

SEQ ID NO: 113277 - DNA, 276 bp, Enterobacter aerogenes; identical to SEQ ID NO: 19894

SEQ ID NO: 113278 - DNA, 858 bp, Enterobacter aerogenes
gtgagatttcagtttattacggattaccgtggctctctctcacgttcacgcatatgtcgtttgatgggcgtaacagatcgtggtttacgcgcatggaaacgccgtcctccatcactgcgccagcgtcgtgatcttatacttctagcgcatatacgtgagcagcatcggttgtgtttggggagctatggtaggccgcgtatgacagaagagttgaaagcgctgggcctgcaggttgggcagcgtcgggttggacgtttgatgcgccagaataacattacagttgttcgaacgcgtaaattcaaacggacaacggatagtcatcataccttcaacattgcaccgaacctattaaaacaagactttagcgcaagcgcacccaaccagaaatgggcaggcgatatcacttatgtttggaccagagaaggatgggtctatcttgctgttatccttgacctgtattcccgtcgcgtgattggctgggcaacaggtgatcgattaaagcaggatcttgcattaagggcactgaatatggcgttggctttacgcaaaccaccaccgggttgtattcaacacacagaccgtgggagccaatattgcgctcatgaatatcaaaagctactgctcaaacatcaattgctgccgtccatgagcgggaaaggcaattgttttgataactccgcagtagaaagcttctttaaatcattaaaggctgagttgatttggcgcagacactggcaaacaaggcgagatattgagattgcaatcttcgaatatataaatggcttttataatccacgccgaagacattcaacactcggctctgatgaatcccctaatgattttggtaaaaatcattaa

SEQ ID NO: 113279 - DNA, 168 bp, Enterobacter aerogenes
atgcatacccgcttcgatacgatgcgctttgcgcgtaagcgtaatttttccacccgttacagtttgctgtggcataacagaaccgtcggctaccacatcaacaatctgcccttcgagatgcgaaaagccagaccataccgcggcgccttcatcgctattcccggttga

SEQ ID NO: 113280 - DNA, 498 bp, Enterobacter aerogenes
gtgattattaataccgaagtttctgatgatgcagttcttgccgctcaggttaacggccgacactatcgacttagcggtagtaataatttcattcctttgccaccttattcagattataaagttgagttaatgaatgacaaaaattcacaggatagctttgatattgtaactgagcgtataaagaattttaccttatacccagggaatgtggctttgtatactccgcagataaaacaaatgataactgtatttggaaggatgacaactcaggatggtaagccaataccaaatgcctctgtccgtaatcatattggccatacttatacagacggagacggaaaattttcaatggatgtcgataaacgttttcctgttgtttcattggcaatgcatgataatgccatttgtgagtctgaacttgatttacggaaggcccgaggggttaaatgggttggcaacgtaatttgcgagaaacaaaccactttggcccagcgttaa

SEQ ID NO: 113281 - DNA, 468 bp, Enterobacter aerogenes; identical to SEQ ID NO: 103228

SEQ ID NO: 113282 - DNA, 570 bp, Enterobacter aerogenes; identical to SEQ ID NO: 94783

SEQ ID NO: 113283 - DNA, 612 bp, Enterobacter aerogenes; identical to SEQ ID NO: 94343

SEQ ID NO: 113284 - DNA, 807 bp, Enterobacter aerogenes
atggaaaacattgctgaccaaacatatattgtggaaaatgtggttgagttttcaccacaggaacatacgctttattcgaaagttaatggaaacaaagtaaccttactagcatctgcttcagaatgttttttatgcttgcttgagaatcatggagaactcgttaccaaaaaagagctgatccatattggctgggaacagtacaacctacatgtaagcgacagtacttttaatcaaaatatttttacacttcgtaaggcattcaaagattgtggactcaaccatgaaattatcagaactatacccagaaaaggcctgatggtatccaaaacgattaatataaatttactaataataaaaaatgaattagtcgattacatgccagtttgcaaggattcaaaagaagttgaccatacttcacctacaaaatatcaaaaatactctaaatttatttaccgtataacagcgaagctacaattaaacatattcattataatccttattattacctgtgcaagcggcatagttaatggtatttatttcacgttaccaacatcatatctttctaactatagaactattttagagggagataattgtcatgttaaaattgatattctaagaagcgccctaattgattacaaaaaatttatttcatcatataacctccattgcaaaaatagtgaatacatttatttttcaacatatcaatatgttccgagaatctctgtatttaggtgtaaccatgaatttcgtgaacatcatcgaaatgattgtgtgtcgtggtattttctggataaaaaaatatga

SEQ ID NO: 113285 - DNA, 651 bp, Enterobacter aerogenes
gtgggcgaggacggaaaactcagtattgaaagctcagcccgcaaactggcggagaattactctctacttgaaaaacgcatgggcagcggtgacgcgccgccaaaaactgctgatgattacgccccagaggtaaaggctgaaggtttcaactgggaagaattcaaagctgacccacgcatgcagtcgtttatgaaatcggcgcacggcaaggggatcaccaacgaccagatgagtttcatcatcagcgagtatgcgcaaatcgccccgtcgctggttaacggtgcagcggaacttgatgctgaatccgccaccacgcagctgcgcgaagtctggaagacagacgccgaatttaacaagaatatcggcctggccttccgcgcgttcaattccctgaccgatgaaggcgatcgcggccgcatcgatgaaatcggaaataacccgatggtgatccgcatgctggcgaaaattggtgcggaaatgcaggaagacgcgccagcgggcgcagacagcaacccggcagagcagcagaccatccgagacctgatgaagtccgaagcgtacatgaatccgaagcatgccgaccatgaacgcgtatctgcacaggtgaaagcgtactaccagaagcgttacggcgatcaaaccgtagcgtga

SEQ ID NO: 113286 - DNA, 198 bp, Enterobacter aerogenes; identical to SEQ ID NO: 93669

SEQ ID NO: 113287 - DNA, 978 bp, Enterobacter aerogenes
atgaagggaatgcagaagattaaaagaggaaaatgtttctcaggaattattcactatgctttgaaatcagtatctcatcataaaactgtaccaagagtaatcggtggaaacatgctgggaagctctactactgagttaatcgatgaatttaatacagccaaaaagcttcgtgaagatgtagtaaagccagtgtggcacaattcacttcgattaccaaaaggtgatacgcttacagattatcagtggtcaaatatcgctgatgattacatggcacgtatgggtttctcgggaacacatctcaaatgctatgttctacatgatgatattaacggtcaacatatccacattatcgcctgtcgtattgatctcaatgatagcagactctacttaggtaaaaatgaaaatctcatcagtacgcgtattatccaggaactggaagaagattataaattaactcgaactaaagggccatcagctactggagcaccatcatctaagtcgaaaaataaaaaaagtcgtggtgaggatatgttggaaaaaagaactggtaagtcatgttctaaagtcataatccaggaagctattcaaaccttgcttgtcaaaagtctctcgactatagaatttgtacatcaactcaaagaaagaaacattgtggctattccaaacatctcatctactggtcgtatgaatggcttctcgtttaaatatggaaatatggctttcaaagcatcgcaattaggaaaaatctactcatggtctgctttacagaataggatcaattatattccagatcgcgacaacgcttttcttttcaatttaaaagtatcttacagtgaaacacctgatatgataatcccttcagggattacaatagaagaggttaatcctaggattgaagtgcctgcactttgtaaaacttctgataacgattataccaaaaaatgtaccaaaattaagcttcgaaataccaaagtttag

SEQ ID NO: 113288 - DNA, 600 bp, Enterobacter aerogenes
atgaagaagttagctatggcattgattgcagcttctgctttgggaactgttcacgtagctactgcggatacgcggactgcaaatgcgacggcctcctgggatgctaaagcaattaaagatacaaacagcatgttagttgtaactccattaaagtcactgacttttaactatgcacagggtctggagcgttttaatactcaagatggtgcgtttgacatcactattgcaggtcaatctggtgctagtgattttaaattaacatcaaagattatttctaatactctgacgcgcttaagtgatgattctgccctgactgtgggtgttaagtggaatggtacagaattgtcggaaggtgtggatactgtcatggttgatacttcaaaaggtattagcgctggtttatctccactggccgttaatagtgcttatgctggttcaggccgtaccagcacccagggtgtctttgcgtttaatgtttctaaagcgactgtagcaggtaaagatacgctcttcaaagacctgactgatggttactgggacgggaatgttaatgttgaatttactgccacttgggacggtacatttactccagctaaataa

SEQ ID NO: 113289 - DNA, 165 bp, Enterobacter aerogenes
gtgagcgataagaaacaacctctgaccctggaacaacaggaattcattttcaaaaccaaagcggaattattggcggagcttattcagatcaaaatccctggtaaatccgatgcggaagaattggccgaagtggtcaatgccgcattcgacaaactaacagcttaa

SEQ ID NO: 113290 - DNA, 651 bp, Enterobacter aerogenes
gtgggcgaggacggaaaactcagtattgaaagctcagcccgcaaactggcggagaattactctctacttgaaaaacgcatgggcagcggtgacgcgccgccaaaaactgctgatgattacgccccagaggtaaaggctgaaggtttcaactgggaagaattcaaagcagacccgcgcatgcagtcgtttatgaaatcggcgcacggcaaggggatcaccaacgaccagatgagtttcatcatcagcgagtatgcgcaaatcgccccgtcgctggttaacggtgctgcggaactggatgctgaatccgctaccacgcagctgcgcgaagtctggaagacagacgccgaatttaacaagaatatcggcctggccttccgcgcgttcaattccctgaccgatgaaggcgatcgcggccgcatcgatgaaatcggcaataacccgatggtgatccgcatgctggcgaaaatcggtgcggaaatgcaggaagacgcaccggcgggcgccgacagcaacccggcagagcagcagaccatccgcgacctgatgaagtccgaagcgtatatgaatccgaagcacgccgaccatgaacgcgtatctgcgcaggtgaaagcgtactaccagaagcgttacggcgatcaaaccgtagcgtga

SEQ ID NO: 113291 - DNA, 630 bp, Enterobacter aerogenes
gtgatagccggattcgcgcacaatgatcttgccgctcacttccacgttgtacgatgcaaagcgcaggtttttagccaggcgcgcattcaccacgtagttttcgcgcgggaaaatgcagtgcaggaagtcgaatttgtcatccggctttttggcggctgcatcgcgtatttttttgctgaccttatcctcgccaaattctttaatcgcctgctctgcggtgagctggtagcggcgataaatcgtgtccacgatgccgtcgcggcgggtggatgtgacgtagcactgcgccagcggccactgctggaacgagaatccgccctcttcgcggtcttcgtcgatgtacagcgcgaaccagccggcgcacaccacatcgagattcgcctcatagccttcggcgtcgaagttagcggcgtggatgttttcccataccagcgttgcgcaggtagacaaccacgcggcggcatcatccggcagcgattcgctatcgaggttaagccactgcgcgtttgccggggtcatgccggacatgagagcagacgccagcatgcgggcgctgtcggtggccgtgccgtcaagcagccgtgccaccttcgactttgcgctctgtgcgtccagcacctcatcggatag

SEQ ID NO: 113292 - DNA, 774 bp, Enterobacter aerogenes
atgcacagcagatttacaccaggctgcagcggttttggtggtgacagctggatcgcctgcggatgcagaatccagtttttcgtaggccagccacttaaagcccagccagttaccggacaccgcaccttcctgcagcattttcaccgccataaaatcggcgctggtcagcgtggtatcgctgaggatttgagtcagcatgtcggcgttgtaggtgatatacagctcttcaccgttctgttcgtcgcactcgttacggcggaacatggcttttgcagcgatcagcttcgctttggtcatcccggtaccgccggcgacgattttctgcgacgctggcaacgcaaccggagcgtacgcgccagtgtcagaggttttgcgcagaacggtatcgagcagcgcacgatagataacatcgtcttttttgcggttggatgcggccagcgtcagctgcaaatatggcccctgtgggtcagccagcagtttgcgcaggtcgcgcttttccaccggcacaaatacgccatagtcggccatcagtgcattacgggtgccagcatcaggcagatcccagacggtatcaccgaaacgcgtggtgatctgctgcatctcgatagtacccatatcgttgatggtgaacgacgcaccggtaatgttgccacggtcgaaaacagcagcttgcaggcgggaatccttctgctgtgcggcaatttcgaaagaatcatggaactgctgaacatacgcagcgctgagagatcccctcataatttccccaaagcgtaa

SEQ ID NO: 113293 - DNA, 651 bp, Enterobacter aerogenes; identical to SEQ ID NO: 113290

SEQ ID NO: 113294 - DNA, 603 bp, Enterobacter aerogenes
atggttacattttcagtatttgctgagaaggtttcaacccctgcgactgcccgagtcttacaggatggatttcctggtgaaccacaggctttagcatctatcacttctgatttatttaaagagtatgaacgtactaacaaagttggcgcgctgatcttttattcgtggggaatgctgcgacaggcttactattatcagagtatcaatgatctcattaacgcttctgaatatgcaaagacgggctttttttatcttgatgaagcggtagataccaatgaagacaacatgctgattcgatacttacgtgccagagttgatgcctggctaccagtggggttagggcgctgtgtgattaccatcgaggatactgacctactgctgaagaataaagataaatttagcagtgagatcattggtaatatactaataatgcgtttaagggcccttcataattgccatatgaaacagcaggaaaaacagctcgttgatcatctgcggagagttaatcagcagcgtgaaattgattttgaaaataacgaaatgccggcttgggaaatggttgaagtattacagattattgttcccgttattaaaggtgaatga

SEQ ID NO: 113295 - DNA, 2490 bp, Enterobacter aerogenes
atgactaccaacaagaggcatattttattaaacggctatgtttcccccgaaaactatcgctctaggagcaatggtcgtagtccccaagtcccaactcgtgatcgagcggtacatggtatatcattactaaatcagtatagccgtatattgaatcattatgatgaaagaccgaggcttccccctgttactgatgaaaaagggatttatgttaggctaatcagttttgaacaatgcgatcttcctatagataaaatcgataatacttatttcaagctttgttctttagttaaatcaaataatcgtgaaactgcgattatatacattaatgaaaatgacagaactaaattcactaaaaaaataaatgactatttgaatccatcgaaggatggtatcgagttccctagaaatcatttgttaattgatagcatacaaaatatcgagttagcagatataacttctttctggacagataaaaaagatcttattccggatgatcacggtgttgaaaagtggtttgagctttggcttaagggtaataaggaggatgtgctaaatattgctcggcgtttatgcgaaagaattaatggaaggctcgggaatacttctattaattttttcgatactactgttgttcttatccgtacgagtctatcgagattaaaagtttgtcctgaattaatatctaatttaaaagagataagatcagcgagggatgatatatcagttatagtaaattccttacctacagaacagcatcagtgggcagaaaatgttgctgcaagaattacgcgtaacaatgaagctgatgtttctgtttgtatattagatacaggtgttaactacaataatccactattatctagatttactaactcatcactggcagctgcttgggacatatcttggccacttttcgatgattataatcaaaggccttataatgaccacggttccagacaagcaggactatgtgtttatggagatttcctgtctgttttattgaacgatcaggacatttcgattccgtacaatatcgaatcaggaaggatactacctccaagagctactaatgatcctaatctttacggagctattactacaggaacgtcaagtcgtctggagctggaaaacccgaactggcgcagagtttattcgcttgctgtgacagcagagcctaatactcttggaggccaaccgtcctcatggtctgcagagattgacaagtttagttttggtttagaggatgatatccgcagattatttataatttctgcgggtaactctcaacctacaaatttagaattagattattgggattcagtgactcttgctgaaattgaagatcctgctcaatcttggaatgcattaactgtaggggcgtatactgataaaacaacccatacagaccgcgaatatgatggttggtctcctttcgctatgtcagaagatattgcaccgtcatctcggtcatcggtatcctggggatggaaaaagcatgccccatataagccagatttagtagaggaaggcggaaacaaacttttatcacctagccgtgatgaaatcacaaatacaattgaattatctttgctcacaacctctggcagggcaacaaatcaattgtttgaagttaattcagatactagcgcagcctgtgctctagtatcaaaacatgctgctatgctaatggctcagtacccagaatattggcctgaaactattaggggattacttgttcatacagcaagatggactagtcgtatgcacgaacgatatagaacagaacgtgcacaggggacaccaaaatcggctaaagaaagcttattaaggatggttggttatggagtacctaatttaaatcgagcaatgcatagtgcggaaaatgcacttacattaatatctcagtcggaaatcaccccatttaaaagagatggttctactgatcctacattgaatgaaatgcatctgttttcactcccttggcccgtagaagctcttcgcttactaccaccagaaacaaatgttattttaagaatcacattgtcgtattttattgaacctaatccaagtcaaaaaggattcagacgacaatattcgtatcaatctcatggattgagatttgcagttattagacctaatcagaccctcgaaaatttccgtgcttcgataaaccgtaatgcgaataatgaagaatacaatggacctgaaggagatgcgtcaggatggtttctggggcctcaactcagagttagaggttcattacactcagatgcttggaaaggcagtgctgcagatttaacagagatgaatactatcgctgtctatcctgttggtggatggtggaaatatcgtactgcgcaggatcgctatattaacaatgttaaatatagtttattggttagcatagatgtaccagatgagaacattgatatttacagtgagattcaaaacattattcaaattgataatcaaatagatattgaacattaa

SEQ ID NO: 113296 - DNA, 606 bp, Enterobacter aerogenes
atgatggaagcaagaaataacgtattaatgatttcaggcgcgagtccaaatgccggaaaaacatttgtaagttcgaatcttgcagctatcatttctcaggctggaaaaaaagtcctatttattgatgcggacctacgcaaaggttattcacataaattatttgacgttgataataacaaaggcctttctgaatatttatctggtagagcttccattacaaatgtcctaaagccgctcccagcattcggttttgatttcatatccagaggcattgtgccaccaaacccagcagaacttttgatgcataggaattttggtgaattaattaattgggctaatgaaaactatgatttggtaatcgtagatacgccaccaatattagccgtaacagatgcagcaatcatcggcaattatgtcggaacgacattgctcgtaactcgttttgaacaaaataccgccaaggaaattgaagttagtattaaacgattcgaacaaagtggagttgtagttaaaggttgtatccttaatggcattgtaaaaaaagcaagcagctattatggctatggttatagccattatggatattcttactcggatgataaataa

SEQ ID NO: 113297 - DNA, 909 bp, Enterobacter aerogenes
atgctcccccgttctgaagatatgcgtgaaatgctaatgaggttagctcttgatattcaagagcgcggtggtgcaggtgttgtttcagtagaagcctgtcaggattcattctgcaattttttaactgatgatattaatgggcctggtcttaagaagtatgatgcaaagtatcaggctcagattataacagattatgctttatctggtttaggattaatgattgaacggtctccaaatgaattgggattttttcatctcacaattcaggaatatctcgctgcccaagctatgctccgtaaagaagaagaagaacaactcaattggcttattagggtttggaatcttcctcaatggcatgaggttatccttgcatggtttagcatacgtggaatggatcaaggaaagggagcaaatcaacgcgcgattgattttttaaaagaatcggtaattactccatgggaaaatattcaattgctggttcttagaacagaactggctgcaaatgattttggactatctccaagggaagctcgtgctactattgagcaagcagcaaaagaaatagaaataaccccttttagaaaaattaggttagtactttcaggatatatcgcgcaagggcttcgctcgtcttctgtgaatagtatctgtgaggcttatataacaaaatggacacagaccagagacgaatggtgtaaagccaggctttttcgtacattatgtggttggaagccctcaggcgatttattacaagccttaaaattgggtttgcatgatgaagatctcaaatgccgctgggcttctgcagaaagccttgcaaaactgtactctggtaacgatgaggtaaagaatgatctatcacctgtctcttatacacatctgacgctgccgacgagcgatctagtgtag

SEQ ID NO: 113298 - DNA, 261 bp, Enterobacter aerogenes
atgacaacgatgaaagctagacccagttttgttgcggaaattcttttaaatgagtatttgaaacctttagctatgtcttcacgtgacttagctaatttgatgggagtaccttatagcagaattgacgatatattacgacactctaaaactataagtaatagagagggggaattactttctaaaatcttcaatactgatagcgatttttggataaaacttcaagaaaactatataaatcatacatgcaaattccataaatag

SEQ ID NO: 113299 - DNA, 816 bp, Enterobacter aerogenes
atgatgatgcataaaacttataccaaaatcgcttttgcgctgggcgcgctgctgctgaccgcccaggttcaggccgaccagttagccgatatcaaagccgccggggtggtgaaggtcgccaccttcgacgctaacccgccgtttggttccgtggatgccaaaacccatcaactggtgggttacgacgtcgatttcgcgcaggcgctggcgaaatctcttggcgtcaagcttgagctggtggccactaacccggctaaccgtattcctctgctgcagtccggtaaggccgacctgatcgtcgccgatatcaccattaccccggagcgtgcgcaggtcattgatttctcaacgccctactttgtgaccggccagcagttcctggttccggctaagtcgccggataaactggatgactacagcaaagcgcgcatcggcgcggtaaaaggcaccaccggcgaacaggcgctgcaccagcgcttcccgcagtcgcgggtgctctcctatgacgatattccattggcgctgaccgccctgcgaaacggcaacgtgcaggcgataacccaggacagcaccattctcgccgggctgctggcgggcgcgccggataaagccaactttaaaattctgccggatttgctgagcaaagaagagattggcgtcggtgtgaaaaaaggcgagccggcgctgctgaaagcggtgaacgacgagctggttaagctggaaaaatccggccaggcggcgaaaatctacgacacctggtttggccctggcaccgcctctccgcagccgcgcgcctttaccatagaagcgaaataa

SEQ ID NO: 113300 - DNA, 567 bp, Enterobacter aerogenes
atgagcaggcttttttgcatctgcggcccgaagaggatgagaacctccgggggggaggttcgactcgagcgtagcgagagaacgttgcgtcagcaacggcccgtagggcgagccacgaagtggcaagtcatcctctatcaccgaccaaattcgaaaagcctgctcaatgagcaggcttttttgcatctgcggcccgaagaggatgagaacctccggggggaggttcgactcgagcgtagcgagagaacgttgcgtcagcaacggcccgtagggcgagccacgaagtggcaagtcatcctctatcaccgaccaaattcgaaaagcctgctcaatgagcaggcttttttgcatctgcggcccgaagaggatgagaacctccgggggggaggttcgactctagctatttccctgattgcggcgcaagcgccttatcagggctacgtccgtacagcgcttgacgaacccggtagcccggctcagcgcagcgcaagccggggcgaaaaccccgccataatcacaaaaatcgcatttccccgcgtatctcgccagctgttcgctgttttgtga

SEQ ID NO: 113301 - DNA, 798 bp, Enterobacter aerogenes
atgaatgatgtctcgttatccattgcaagaaatatgtttcatcttcagatttatgaatctgacggacaacgctttgaagacttgttttctaaaattatgtatcataaatcaccgggttttcaacagataaagccttatggtaatgttggagacagaaagaatgatggtttcatcagaagtgagaacatctattatcaggtgtatgcgccagaggatgcttccaataatattttaactaccgtcaaaaaaataagaaatgacttcaagggattgttaaattattggcatgatgtatgccctattaagaaattctactttgtcttaaatgacaagtataagggggctttaccacagttacatagagaaataatggcattgcaaattgattttaacttggtagatgccggtgttttagtggcaaaagaccttgagtttgatctcttcaacttgcgggatgatatgatcctttcaattgttggacacattccacatattgataatgaagaatatatgtttgtatccggttttacttgctttatctctgcttggattaatttcgaaaggaccgcgagaacaaaggttttatcaattaaaccaagcggccggactcttatcgttagagagttaataaaaattttaatggattttaaaataatatctgagttggactttaattttattatggatatttctaaaaaaaggaattctcttgtgcatggagattctatggtaattcctaagaaaacagacattgatcatttaatcatcattactgagaaaatacagggttcaagctag

SEQ ID NO: 113302 - DNA, 318 bp, Enterobacter aerogenes
atgtttcaaaaaaacttgtcctatagccctaatacttgggtacatataaagcgaattgatcaggagctgaagattacgactcaccagaatcaaaacggtaaatactgtctcgtagccctgatctgtagtcaaatagccagccgtatatggggccggtatgagatccagaaagcatgggaggagactagggtcgtggtacgtgtgtatatattaatcaataaggatcagttcacaatatttactaagggggacgtagaacggcataaaaactggactgtggttaatggcaaaatagtgaagtttgccggcagcatgtga

SEQ ID NO: 113303 - DNA, 2340 bp, Enterobacter aerogenes
atgaactggcaaatatccaaaattgagatttcaagttttaaagctttcaaaaaaatccatctggatttcgggggagcatcacttttgaccttggatggtcccaatggatttggtaaaacaagcatattcgatgctattgagctattgttaactggcagaataaaacgaatttgccatttatttacaaccttaatgatgggtaaacgaacgaattatgaagataatctgctttggaataatcgttcaggcaataatgaccttgcaatcaaaatcgagtttattaatggttcaaggaggcttattctagcaagacatactcccgcctcaaactttgacgagaagtcaaataatagagcggaccaatttacccaccttacgctttacgagctaccagagttcacgtcaaacaactatgtagcagaaaatattcgcgacgaaaacttcattgaggcactttttggcaaaaacttcaaagagaatttttcatatttaaattatttggagcagggccaaaatcagctcctgcatacgcgagtagacaaacgtaaagaggcattgaacaatctcttcaatattagtgacataaaggcagagactgataactgcaaagctatctccttgcggcttacaaagttcattggcgatcctaagcgtgctgcagatttatcaagattagaaatagaggccagttcacttaagaaaatgattcaagctgacttgggaacaattggatacaaaaaaatctccacttcagtgctgcaaccaggctgggacaaagagaatcctttccccacctactctatagaaattcagagagaatacattgagagtatccacagccttcaaaggctggctctgctaaagagtgcaataaagatcagagataaaaatgaatcgattgaaaattttattgaacttaacaaggactccataaaaagcttggctcgttttggcaatgatttgaacaagctggatgggcttgaagtcatcaaaaaagaattgaatgaacttctcaaacgtgaagggattataaaacgtggcgcaacagtcattaatgccgatgaggctaggagtcttattggatgggcccaagggcgtttggaatggtttcttgggcaaatagttatccgtgacacacttcaacaaaagagcaattctaataccaatgctgtaaccgagttgaatcgtctaaaagcagaactagttactgagcatactaaactctatcctgacgatcaggattgtccgctgtgtggtgcggactggcaatcccatgacgctatgttgaaaaagattgaatatcgaacaaagcaaatcaatgacgcgctaaacgctgatggccagacccttataactctcataggaataatggctacagaactgtccataattgacgctcagctccagattcggaaagctcagctatcagtcgactacaacagcgccttacacaacgcactgctccgtgataaagctcggttgcctactatttaccaactcgtctcccgctttcaagctttaggtgtacaactaaaccattcgttctccgaaaatgaggaggaggtggacactcgaattcagtctcttacagatttcatcagaagccagaaaacagctgagacagaacctttgccgcaagattggagaaaggtcatcatggctgtcttcaaagagctgcaggacttctatattgttgagcctcagttgctgaaagacaaagaactgtatgtctcagctaaagcaaacgaggcacaaagcaaaaggctcaagcaatgccttgatgagctagagatcattcagcatgaaactaaagcggcacagatagctaaagaaaaagtcaataacctaaaggctactctggagaaaacagaacgcagctactccgaacaaacaattgctgaaattgaactgattttccatatatatagcggacggcttatccaaaactatcagcgtggtttaggtctgttcattgaaagcaaggatggcaaagaactcaggttccttacagccgaaaaatctgagtatgatgcaattctatcaatgagctccggtcaggtgtctgcgctcagtctagggttttttctttctttgaatcgggtttactcaaacgtaccgctgatactgatcgatgacccgtcccaatcgctggatgaggtgaatattgcctctttaactgatcttcttcggtgtgagtttagtaatcggcagttgatcgtttcctcgcacgagaatgatatctcctcttatatgcgataccggtttgccaaggccggcctgaacacccgatcgttgaacatgcaacgcttggctaaggaagctctagtctctgcttgctga

SEQ ID NO: 113304 - DNA, 666 bp, Enterobacter aerogenes
atgataattgacctcatacatcaagctctagatgcacacaatttctttaaagtacatgagaacgatacaacaagcttctatgttcgagaaaacggtacggcgatacgatttgcagtattgcacaggctagataatttgatgaagcctagtgatcttaacgcaaccatcaaccagtccgcgcctgtggcatttacatctgatccagcatttaaaaagaattgcgatttaatatgtattcatcacctcgacaagttggccgaattcaaaaactatgaagaacagattttcgaaatcgaagaagatccgcacttctataaaaaatatgttctttactatagcgacacagaacttgaggccataaaaggatttaattttgccaaattaaatgaattgatttcagataaaaaacaattcgatgcttacaaaaaagaacccacagcagccactaagtatagcgcagttgccaaaatattcattaaattaccttttttggaacttaatattaataaagtggaacttgttcctctccgtttgcaaattgaggaagctgtggctgaagctgaccttactaagacgtataaaacgatacaaaaatacggccaattaaatgcagaagatttgatcaaggaactgattagcgatgaactggcaaatatccaaaattga

SEQ ID NO: 113305 - DNA, 1227 bp, Enterobacter aerogenes
gtgagcgacgaggaagcaagcaagtatccgcatagtgctatttccacttggagcggatttgtctaccagggcaaggtggcactctatcattgcctcaaattaataaatacaggtgatagtggattcgagttacaactggatagcacagacgatttcgctatttacaaagatgataaaatcatcagtgcccatcaggtcaaagcaaaaataggcgattatcgtagtaactataaggatgctctagaaaaatcggccgtaatagaactagatagaatcgcagggatcaaaagatattttcatatatcccaacccataaacgaccatagtgattacataggtacaaataatgaacgggttgagttttatttgtatggtgaatattgccactgtgaacttgacaaaatagaagagctaaccaaggagattattaaagagatctatgttcgccagtccgtggtttttgatgatggccttatagatgcaaattattgtttcctatcagataaaattagctcacatgcactagccattcacacaaaaatacaaaataatggtgatgctcaacgtaaagcagcgtatgagtatcgagtgtctgcagaaagtattcttgctgacataacggacgcgaatccatatgaaagaaaggactattacgcggtcgatctaaaggcgcgcctctatactcatttggaagaaaggctcgcagaaacactcccgggtatgtcagacgcgacttacaaaagagcaagacatatctatgaacttataagaatctctgagggcagcgatttcaaaacactctgccaactgatgaagccttcagaaaagttttcacgcattcagaactcagatatacgccgctatacggatctcgtgcacactttcaacattgaaccaattttaaaacgattaccgcattatttagacagcgacaataaattctacgcaccaacggcattatatttgccagaaccaacagataaaaaatactgcacttctgatattatctcagaaataaaaaataacgatgatctaggcaggcttttattcgaatttaataatcttattgcagccaaggctcatgagagtttcacaattgacactaattatactaattgctccgatataacttccatcgatgatcaagatcgcatcgatagtaatattactaaaagtttatgcatcagcattttaacaaaagacgacgcagaggcccgacttaaatga

SEQ ID NO: 113306 - DNA, 921 bp, Enterobacter aerogenes
atgatgaatagaaaaataatagcgttgccaagttatgctcctgcaacatctaatttaaaagatatagcttttaacccgatagaaattagacaccttcttttttactttgatgaaattatttatccgtcatggaatatggcgggaccttcatataatgaagactcagaaatcacattgctaacagaacaagggattattgaaaggatagaaataaatacacctattcaagattattcgttaatgggtaaaggtgagaattacccacttaatcttttaaatcatctggtttttagaactgagtgtggtatgttgggagattatgatctatatgatggcattaatgaactgtttcatgaacgattaaatttattatctagcgatgatattttatttttatcttcaaactgcttaaaaatgtctaaactagatatcggtgatgatctcggattaaatgctaagttgataggacttctcccggtcccttcattggaagtgaatattaatgatattattgaattcaaggataaatatagaaaagaatatataagattgcataattcaattgatagtgcggctcaggatattttatctcgcaatacaatatcgagtatgaaactaaaaattgaagaaattaccgataatgttaatgaggtggtttctttatctaagggtggtttttttgggaggctaagagttaattttactttgaaatttccaatccaaactcttgaggatttattcgatttgtctaagtctgctttagatatcaatggaagtaatggtattggtggttttttgagtcatttagttggtagttctattggtatgaatgttgagcggaatagtattcccaaaaatctagagaaatatatgtatgtttcacatatgaaggattattttggtttgttaaatgaaaagtaa

SEQ ID NO: 113307 - DNA, 225 bp, Enterobacter aerogenes
atgacttctatctactcaaatgactaccagatggtgattaaggccctccgggatgcgcggatcgcctgtggcatcactcagcaagaggttgccagtgctttcggaaggccgcagtcatttatcgcaaaggtagagagtggagaaaggcgactggatgttgtcgagtttgtacgtttttgtcgcgcagtgaatgttgatcctgcaaggattctggatatgttgtga

SEQ ID NO: 113308 - DNA, 1152 bp, Enterobacter aerogenes
atgtccctccctacaaattttaatgatattcttcgtgtttttgaaaaagattacgatacagccaaagaagataatgccctaagtgcacgcggccaatttatgcaactttacccccttaatcgcctaaaaaaaatgacgcttgatgattatgtcatcggcaaaggtacagcttcattttgtgcttgtgttgaagtaaaaaccagaacatgggcaaatatgcaaggtgcgacggcgctcaaatttggtatttattatggaaaatcaaaatcagatccaaccgtccgctatcgttttactcagaaatttggcgatgatgatagtactaataaagaagttttcgctaatgttaaagacgctttactagacctaatacagtcagggaaagaattagattttagagcgattgacgagaaccccctatcccaaatgtttaaggctaaaatattgagcctttactttccagaacactttataaacatttgcagcaaagatcatcttaaagacattgctatgggaatgggtataaaagagcaacagtttattagtaaatatcaacatttgttattcaagaaaaaactagagcataaaatcacccgaaactggagcaatccaaaatttatgtccttcctttatgcccagttcatacgtaaggatcttagcagcgctcctgctgtgatagttaaaaaaccacaaaaaagaaatcatcccgaagtcaactttgaagaaataacggacaatcgtgatttaataggcaaaaaaagtgaagaatatgcattaaactgggaaaaaaaccgcctaatcggtctcggctattcaaaactggctgaggaaatagatgatcgccgtaatcgtccaacttatggttacgactttctttcttttaatgccccaggtgatgagcgatacatcgaagttaaatcaattggccgggatggaaaagagggagcattccgttttttcctctcaggaaatgaactcaccgtttctaattttagtaaccacaagaaaaactattatttttaccttgtacagtatgggaaagatggagagccatgcaatctatatgtaaaacatgctcaagatctttacgctaagagtgaaatgtccccttgtgcttacgttgttcggttcgatctggaagaaccagcttaa

SEQ ID NO: 113309 - DNA, 2289 bp, Enterobacter aerogenes
atgagttacgatttcagaaacctttcatccgcagactttgaggatcttgttcgggatcttatcggaaaagaagaaaggcttcgctttgaagcattctgtgtggggccggataatggtattgatggccgacacgcatatgctggaaagaatgtcatcctacaggcaaagcattatgaagggtcgtcgttcagtaaactgatgaccactatgaagcgtgagcgcttgtcgatagataagctagcccccacacgctatattctagcaacctcctgtaagcttactccagcgaataagggcaatctcgctccgctcatagggccgagcttgaaatccgaggcggacatttgggggccagaagacataaatggtctccttcgtaagtaccctgaggttctcaagtcgcatatcaagctgtggctatcgggggcgggcattttggagcaggtcgtacgcgccgcagcccatacttttgcggcgttgacgatggaagagatcgaacagaaggttcgtgtttacgcatcaaatcccagcttcggcgagtcattagtaacattaaagaaatatgggcttctcatcatttctgggccacctggtgtaggcaaaacaacactagctgaaatgctttgctacacctttctgagcgacaaatgggagctagtccctatccgcagtctggaggacggcttttctgccattatcgatagtaaaaagcagatctttcttttcgatgatttcttgggaaaagttgccctcgataggcaggctttggcgcataaggattctgatttgatgcggttcatgaatcgggtgcgccgctcgccgaacgctcgttttatcctgacgactagggggtacatatttgaggaagcccggagagtctccgagtaccttggcgatcaacgccttgatgtgacgaagtatgtgctcgatgttggtgtctatactcgccgaatcaaggcacggattctctataatcacctgcttgtgtcaggaactcctaaatctcacatccaagcacttttggagagtaataagatcgcgaaaattgttgatcataagaattataatcctcgcatcattgaggctatgaccgatgcattacgtaccaacgatataaaatctaccaactatcccacagtctttattgacgccctgaataatcccagccagatttgggacactgctttccgtacgcacattgatcaccgctgccaacaccttctgattgcgatgtttttcctttcggaatacggcgttgcctttgctgatcttcattcatctttcgataaactgcataccacgatgagcactgcttacggtttgccacatgggcctaaggattttgaagaagcccttcgtattctggaaggtagttttattaaaatcataaacatcagaaaacctgtagtctcttttatcaatccttcgctcaaggattatctctcaagctatttgtttgatatagacttccttattcgtctcgttcccacggcagcctcaattgattggttgttgaggctgtggaacttcgtacatacacttggactcagtgaggtcgatcaagcgaagatcgccagagcctgcattggcatgcttgagatgatcgaaacgcgtcctccctggcgcccgaaagctggtgattccctctcacttgaatacaatgacgtcgcaaactccaagcggctccaaatactaatggattggtggcaactcacaaacgaacaacgatttgccgacagtataatgacgattgctcgcaatcccccgcagggttttagtacatggttggatggagagattctgatcgagttcttttctctgcgggatcaaaagagctatagccgacaatttatttacgaagatgaattattagagctccttgaagaggaactcacagatactataagctgtagttcaattgacatgctttccacgtttattgatgcggtggacgcagcaaaaggtttgccttctagcattacccttgccttaaggagtgcggtgctcgaagagttcgagtataatactagtcgcgtttaccaggatgacagtgagtcttccttatcggatcggatcgacgctcttaaaaaattcgctccgcgttttggtgtgcccgataatgtattggatagagccatctcagatattgaggagcgcataagcgaaatcgaagaccgcagtagtattgcctcctctccaagtttcccgtcgtccaacaacaagtatgaacaggagacgtttgacgattgcgctcttcggaatcttttcataacccttttggatcgctag

SEQ ID NO: 113310 - DNA, 2058 bp, Enterobacter aerogenes
atgaccccataccttatttgtaagtttgaaaagcagaccctaactaatttagttaaagagtcttttaaaacggaatttcctgatatttttcataaacagcaaattgattatatctatcgctatttaaaggatgcgggctgtgaaactgtgatccttgaatatgattatatagataaggattatttggaggattatgctagatactatgtgaagggttttaataactctggatatagatcagcgagattgcatttctttgctatgatgtttgatcatagcgatattgatggatatttattcagagggctgaacaaaaaggaaagatctcagcttcaattgtcctatttaggctttatggtaattaagccactaccaaaaacatttattggccggacatgtttaagagtttatcacagtattagttctgatataaacaaaaaatgtctttcacgagattattcagttgatttatttggtattcaattaaagattagatctatagctttccaggaacaagataaagttatttcggcttgtgcaactacttctatatggtcagcgttacatgcaattcaatggaaaaatgtcaaggatattccttccagaggcgtaataactacaaatgccataaaccatattaatgactctagcaatagttttccaaataaagagcttaccaataagcagattttaagggctatagattcagaacagttaaaacatcaaactgaatttttgaagggtaaagagcaggatgtattcttcaataaaattagagtatatattaatagtgggttgccgcttttgttaggtggtgacatctttacttggtcagactctgaagatattcaaagaaaagctggccatgctgttactatactggggtataagagttccggaaaacgtgcgttgtatattcatgatgacagattgggtccttatgctagagcaacgtttaaagatgtatcatctaaaaaattgaatgatgattccttagctagttggggattagtgcttcaggaaaagaatgatgagggtgggtggcgtgatcctcatgaaatattaataccaaatatattgattacagtccagtatccaaaggttcgcttgccttataattatgcaaataatacgtgtcgccttattcagactatatatagtgattatattcaaagggttgcagggaaggattgtggattgacatatgatgttgagttgcgtgaaatatcttcaataagacaggattttataaattacaagtttgattacaagtctgaattgaagccatcaaaatccaattattttttgaaaaattcgcgcgttgactttttgtcaagaagttatgcaagatttcaatgggtagcgtcatttcagataaataggaaagatatatttaagataatgtttgatgctactgacattcctcaagggaatgccgtttcagcaataatctatgaaaatatggattattgcgatgcaatttttgatactctgagaaaaattgtcaaggtagagccttatttgaccactgtttctacttttaaaacagatgaacatttctttaattcatttttaaagaagataacagaaaatagagatagctactcaaattatttggattcacagtttgggaagttgagagcaccaaaatcattgaaatccggagagtttttaaatggacgcgtacatgaaaacactaccactatgaagttttatggtaaaagtgagaagacccttgctagtatatgctctgggttgagaaataatgacgataagtcattccttatttgggcgattggagatgatggggctcttttcatcgggagtgaaattgatgacaatggtcatccaagtttaacgggctttaaacctgctaggatcgcgggtgaaattcttaaggttaatggtgttttgtcgattaattccaagtccggtagatatagcagagattataaaaacaaaactgagttgctaaggaatgcggttggaaagtttaaatctgtttttcaagaaaaagattttgatatgaaggtattgaaattcacgcctgttaaataa

SEQ ID NO: 113311 - DNA, 174 bp, Enterobacter aerogenes
atgagcattctagagttgttaagcatagcaagcgcggcaagctctgtggttatcactgaggctgatgctgaagcaattaaagagaagattagcaaggtcgaagatgagtttgcgaaagagtctctctcttcttctattgacgatgcattattgtcgaagacctatagcctataa

SEQ ID NO: 113312 - DNA, 828 bp, Enterobacter aerogenes
atgtccattcatgaatgggtaaacatggaatcgaacgaaccaggaaagctgatttggcatgtcgcctgcgatgaatcagggatagatggtcagcgattttatggatttggtagcttatggatgaaataccagaggcgtggcgattttgcgcgtattgtccgcgaacttcgtgagaaacataactgtagcgatgaaattaaatggcagaaagctcattccaagcgtaacgctgcattctatcaggatttaatcgagactttcttcaaacacccttggctagcttttcattgcatagtggtggaaaagtcgaaggtagaaaaatctttccacggtggcgactatgatcttgcaatgcgtaagcattttggcaagctgatagagactaaaattggcaatgtcatcaaagcccaccccgacagagagtgtgagtttcgtgttgaagtagatccattaccatcccgctacaaaaaagctgatgaagaattccttgtaatcaccaaccacactttggcacgtaggtttgggcgcaaagatattatcaaaagcgtagtaagcaaagactcaaaggcgtcagaacatattcagatagcagattttttgctaggtgcggtcatgtgcgcttatcaaggtaaagcaacttctgaggcaaagctggccgtcgcaaacaaggttgcatcctacttgggatgggactcactgatgcatgatacttggccaacagaacgtaaattcaatatttggtttttcttcgacaggtcaaaaggaccaagggatattgtcacccaagaagtcaagctcacttacgcccttcccaacacacgaaaatag

SEQ ID NO: 113313 - DNA, 531 bp, Enterobacter aerogenes
atggataacggatttatcacaaaagaattgggtgagaatcatccatatcctgaagagctatttgaaatagccatgaaatttactatggctttttattatagcgaaaagcatttcttttcgagattttgcagcattagaaacagcgaccaatacagtaaagatatccttgatatagtcaaagacgattgcaacccagaaatcactgatgtttttaaatattttaagtgtagatatgtcagtggtgatcgagccagagagcgattgcatgccctcaccatgcaggaggaaggtgaagatctttctggatgggctgaaaagattgatgcctatttaaacaatgctgaagggaatgttgaggcaatgttgtcggtgtgcttgatggtcgttattaggcttcgacacaatcttttacacgctaacaaatatgaagtcatgagtggggagcctaaagaacaagaagaattaattggtaaaggatatagcctactcgcgagccttttatcagcaagaaataaaagaaaagctgtttga

SEQ ID NO: 113314 - DNA, 1056 bp, Enterobacter aerogenes
atggattcgttaacaaatgttatagatagagcaggtaaagttcaaaacggcgaggctatagagccaaggacaaagaagtttaattcctatgcagtcagtaattttcgtggaggaatagggaagtcaacattgtcttttaatttggcttacgaaatgtcggcagaggatcctactttagttttagatctttgtcctcagaggaatatgacgcaaagccttcttggagaagacctgtctgtatttgaaaccacaatctatgatgcattattgtcagaaataacaaatacaggcgaaatagatcttgaggaattagtattacgcgtgacctcagggaacaatgcatttttaggttcgaatagaaagaaaagctacattatccctggttctcaagagttgttccttttcccatcacttctttatagtcagctggcacaatatcaacaacttggtggaactagaggtaaagctccaagtgccaaagtgttaaatgcaatttcgaatatcattgatattgcgaaagaaaaaactaaagcaaaaaaaatactcatggatactagcccattctttgggggagcaacgcacttatcctggtgtgccgcagaagcgttaattataccagtgcgtgtcgatcagcattcaattgaagctttaagactaacccttgacatgctagcaaatgaggatagtgagtttcataaattcaatcgccaggctgggctaaataacataccgaaagttcatgctgttacaatgactcattgcggttggagccgacaaaacaaaaataacccagatagctcaaccaagtattttcttcaacgagcactagaaatagccaaagaatatgagcatttattttctgagaatgaatgcgaaaaatgcttctatcttcttgatgactttctatctagcggccgcatttctggaaaacaaagaatccccttgtcaaaactatctgcagggaaaaaatttacagtagatggacaaaggcttgaagttaacccgtccattgaaagatacaaaaaagaaatgaaaaacttagcattcagcttgtaa

SEQ ID NO: 113315 - DNA, 741 bp, Enterobacter aerogenes
atgactgagcgcggaatgatttttaccggggaaatggtgcgggcgctgctgagcggccggaaaactcagacgcgacggattatgaaacctcaaccagaaccatgtccacgtggaggtcactggtggccaagcaatgtgttcaaaacaatgcttcatatcgaagaaaaaatgcagaacggtaaaggtggctggggtgggcttgttggcgatgcatgcccgttcggagacgtcggcgatcgcatctgggtgcgagaaacttggggagcagtcagccacgaacttgatgaggatggtcgaatccaaccatggacgccagaccggccggctacggttattcacgaaatgccgtttggcaacggctattactctggtcacgctatttatgcagctgatggcgatttcacctggggtgatgacgatggttatgaagatggtcgttcgtgctggaaaccatctatccacatgcctagagccgcaagccgcattctgctggaaatcacagacgtgcgggttgagcggttgaacgctatcagcgaagaggatgcgcgagcagaaggcattattgacggtggctgtctgaattgcggggaacctgagccatgcggatgcgccaatccagagcctgatgctaccgatgcttttgcctacctgtggcaatcgatttacgggcaggaaaactggaatgctaatccctgggtttgggttatcgagttcaagcgaattgaggagcagacagcatga

SEQ ID NO: 113316 - DNA, 228 bp, Enterobacter aerogenes
atgaactgggagcggatgcagcgcggtgtggcgtcattttctctgcaactggcagaaggccgcgcggatctctatacggaaatgcccgtgaaggtcaccggctttaaacaacctattgatgatgcggaatggaccatcaccacgttaacgcacacggtaaacccggatagcggatttacaaccagcatcgagctggaagtgaaaattgatgatttagcaatggactga

SEQ ID NO: 113317 - DNA, 558 bp, Enterobacter aerogenes
atgaatttggaaaaaggtggtagagaagccattgaaagaatggttgaagcctatggatacaccaccaggcaagctttatgcgatcatttaggcgtatcaaaaagtacccttgcaacaaggtatatgcgtgactcattccctgcagaatgggtgattcaatgcgcattggagacaggtgcctcactaaaatggttagtttcgggcgaaggggttaagtttgagagcaataaaagtgatgtagtcattgtccccaaaaagaatttactggatggtaaaatgctcgatgccagccatctcttattcgacaaagcctttttgcccaatgacattgttaaaccactttttgtgcaagatgaagggaaatcgtacatcgcagaggaaagttatcctggattttcagatggaaaatggttaatcaattttgataaaaaatttttcataagagatgtcatccaaattccaaacaataaaatcagagtaatcagcaacggtatttcatttgatagcaaattaagtgatattaaattaatagcacgtgtaaaaatatcaatattataa

SEQ ID NO: 113318 - DNA, 1593 bp, Enterobacter aerogenes
atgagtgagaaaacgtataatttagcagttgtctttttaacctactctctttggccagttttgggcattgttgccattatcttatttcgcacacaaattaaagcaattctaactaatatcggtggggcaagcagcgtaaaactgaattcaccagtgctaaatattgaagcgactacatctgttacccttcaaaatcaagaaaacaatgatgaagcatccgaaccattagaaaacaccaacaaaaatattcagatttcatcagatgataattctgaaaattcttggtttaaacacgttaacgacctatttgaaaaaggtaaacacattgaggcaagtgagtatttttataactttatcaaaaataaaaatggcagtgtggactaccctaaggaacatgcctttttcttatatttgcaatacacttacattttaagttctgatgtacttaaagagataacaagttgcatcgaacaaactaatgatattgaaaagcgttctatctatattaactcttatatatcctgccttgatcatacaaagcaatatagaaaggcaatatcttttctcgaagcccaaataaactccatccatgagttaaagaacaaggcgcatctaacccttagattatcctatttatacgctgaagatagcgagttagtgaaggcgcaagatataataaccagacttatttcagacattgataaaaacccatatcctgatatggatatacatatgagtgatgcgtataaccgtttatccaaaatcgagaaaagcaaaggcaacgaattcaactgtgccctatgcttagataaggcagtggaatactccccatcagatatcgacacaatgttcactgccgcatatgagtcctccaccgtagaattatctgcattagaggtttcaaattacgaaacactaatatcattagacgccaaaaatgacaccgctattaataatatgggtgttaccgcaggtacttttgatttaaaactgacatctggaggttactatactgacgcaaaaaatcttgggaatacattagcaatgtccaacatcggatattccctccttagtgttgggctttatagtcaagcagaagacattgttcaattagcgctctctaaaaccaaccctcatgataacattcataagttgaagtcacagataacaatcaaaaaagacgatgaatcaaaaaggtgggaactgatcaaaaaacaagccaaagaaaagcaaagagcaatacgaaaatatacatatgaatattatagtaaaaaattaccttttcctcttggccaacattgggttgatgatgaaggagttaaggtttctattcagcaagaaaacaataatataaaaataacttgggaatcagaaagcaagaccattgagttaaatggttcctcccataacatgacgtttaaaggcaaatattcatcaagactaatcgaatcacgaagatccatattaaattacggtgaaaaagatattaatctcgattgccttggatactataatgaaacagatgattctatcattgtaatttcaactcaagctgataatgaattttcagcaattcttaagagatgcaattaa

SEQ ID NO: 113319 - DNA, 249 bp, Enterobacter aerogenes
atggataaaacctctatcgtgctcccacgcggtcaacttacccacgttctgcgccatacgtttgcagcacactttatgatgtcaggtgggaacatccttgcccttcagaaaattctcggccaccacgacataaagatgaccatgcgctatgcgcacctggctcccgatcaccttgaaacggccctacgctttaatcctctggcaaccatgggtcaatcatccttagatgcagctcacgtgcgcgcctga

SEQ ID NO: 113320 - DNA, 387 bp, Enterobacter aerogenes
atgttgcttaaagataagaccgtggtgattttcggcggcagcggcgcgattggccgcgcggcggcgctcgccatggcgaaagaaagcgcgcggatctttctgaccgccaggcaggcggataagctggaaaaggcggcggctgagattcgcgccgcaggcgggagcgtcgagaccctgcaactggatgtgctggatggcgggcaaaccaccgcgcaggtggccaacctggccgggcgaaccggcgggattgacatcgtagttaatgccaccggctttctccacaatcaggggaaaacgctggcacaattatcccttgccgagtatcaccagggttttgtcccctttcttgatgcccaatttactattgcccaggcagtggcgccgtga

SEQ ID NO: 113321 - DNA, 1848 bp, Enterobacter aerogenes
atgatggggaagagccaaaacaagcttaaccaactcgacaacatcatcacttcacttgataccgcaaacttcacttttcctgatattgcttccggtttggccggtacgactgatggccagtacttcagagttccacagggtgctgataacgtcgttgggtttatctattacagaaacagcgctggcgctgaaattgaagtggcatcgcttgcttcaggggagatcaccaaacttctgggtaaggataacagccaaaaattagctgcattcactgatgatgagggaaccagcgcgcttgcccttgatgagcgtggcgggattttcattgcaggttcaccggaagacatccgaaaaaaccttgagaagacaggttatgaccgcgcgcctgccattctgaaaatttcagcagcagatggcgctgtgcatgggtttatggatgaattcggcggcgtgcagctacctggactgcaggggagtgttcaggagaatatcaaaaggctgaataagcgactatctgcgcatttaaaacgccgcatggttcttgatgccagagagtgtgggcttgacccattttcatctgaggaccagtggtatcccctccagcgcgcgacaaactggcttggggccaatggtggcgggaccgtttatataccagaaggggcatatcggatttcccgtccgattacgccggtatcgggtgttggttatatcggtgccggaaaaaagaaagcacgtctgctgccattcaaagcaacctcgccgtttgcttaccgtggcaatgaaaactatatcgataacctgctgtttaccggattcacgattgacggtgagaatcagacgctaaatcccacatctggttacctgccagaaattaaagcgatatttatccagtactggtcaaacagcattattgacgatatggaaatcattaatatcggcgcgaccgggctgggtgtggatatgcattacaactgccttattacgcgcaatattgttgaaaactgtggccggctggccgaacagggctggctgggggcttcaggtatcggcatcggaaccggcttcctgaacagtgagccgctgtttgtttctcagaatttgtgtaagggcaataaaaactacgggattttttacgagcctcaacgagggagtggaaccgcgcaggacattatcactacagataatgtctgtatcgggaattatgcggggatcgctgactgtggcgtggaaggactcatcgtctctaacaaccagatgcgcggtaatacacacggtttcctgatgtatcccggcacaaataacgacggcaagcctggcagacgcgggcgccttcagggaaatattatcaggggaaatactgaaaacggtgtgaccgccgtttgtaccaaaaccgatccactattaggtgagtatgctttttccggtaaccatatttatgagaacgggaaagacggtatcaatatgaattacagtcattcgactgttaagaatatgaataatgtcatcagcaataacgaaatttatcgcaatggcagacacggtgtctctctggaagatggtgacgtggtgaatatggatattatgtctaaccgcatctacgataacggccaaaccgctcagggaaacgccattaatattctggttcctgtgtctctctcgtctatcgctaataacaaaattcgtgataccagcacatccccaactcagcagtacccgatatttgcaacgggaaacatgaccgatgttgatatctctttcaaccattgtgcaggcaacgcacagaatactttcgccctcactggttcgcaaattcgcgtgaccaaaaacatgaatgcaggagttgagtaa

SEQ ID NO: 113322 - DNA, 1401 bp, Enterobacter aerogenes
atggcgactttagtgaaaagcaccagtaaatttatcgggcgaaaagcggttcctgccgatgctccgctaccggataatgcgctgatgtatctggattttgagaacggcgtttttatccgtcgcgcagcgaatggagcactgttccgaagcaacgtcttaacggatgtcatgtcgttctcgcgcaacactggcgccacttattttggtgatgatggattactgaagtatgccgcagctggtgagcctgttatcgaatacggtcagaacaccctggaatgtaagggggtcagatccgaagtcacggcaacgaacaggattatcaacagccagaacttttccgcctcaaactggagcaaaaccggggtggacattatcgataacgattcagtagcccctgatggtaataaaacagcaagtaaactgatcgagtcagccggtggttctgaaaccgttcactccctgtccaccactctgagttatgctgcagtcatcggccagccttacaccttcagtattttcgcaaaggccaatactggttctgtcatgcagattgcgctccctgcgggtgtggttgccagtccgcaatttgctaactttgacctggttaacgggaagattacgcgctcgtctccgctgatagtgcaaaccaatatcgagaagtgcccttcaggatggttccgctgctcaatcaccatcaatccgacagctgctggggagcctctgttcacgctttgccttaccggcggtaattcagcggctgatgccttccctgcttatagtgcttccaccctcggatctgtttacgtctggggttcacaggctgagcgtgcggcgggctatacgtcgtatattcctaccgttggcgctgaggcaaaccgcgacgctgacctgttgacaacgccatcggggtatacgctgattgactccacgaaaggcgcattctttgtctctgtcgttcatgcacatagcctgaaattgttatcaacagcctatgcgtctctcgcctgtgctgttgtgctggacaatattgttgaaggggctcattaccggctcgcctggcggaccagggataatatgaatggacaggctgcatttgctgaactgaatgcagcaggtgggactaacgtttcagtgaacatgccgccacttattgccgtatctgattctgagcaggccgctttctgcacattcagtacaagcctgctatccatgaaagctttcgacgggcaaatctggaataccacatcacctgcagccatgccccctcagctatcgcgcatttgtctgggacgttcctatataggcgcgaataactggtttaatggctatatcaaaaaatttgtgtactggccggaatatctttctgaacaggaagcggaagaatatttcaacgtgttgtga

SEQ ID NO: 113323 - DNA, 594 bp, Enterobacter aerogenes
atgattgggatctatttacctgcctttccgttccgaggcgtaaaagcgccgtatttatggttattatataaagccatgacagttattaaagaaccgttggcattaattactacgcaagattatttgttaccttataccaagtggcaaggcgagggacgctgggaggttactaatgatggccagcagcgtttaggttacgaacttcctgatttttcttctcgccaaaaagataacgtctatattgttagtgaagaatcattatctgatgcgttaattgagtgtggcggcaatagcaatctactttttaaaaaatttctgactgagattattcctagttttaaagatgctttgattgctgccttacaaaatgcaaataacatagaatgtattctgactatatgtaattgtccatcattaaatgcagcagcagaaaaatataatattccagttataaatattgagttaggtcctttacgttccccaacctatctgtttactggttattttgactttactggcgttaacggaaatactgaagctgaaaaaagatactttgcagctaaacaacaagcggaagaaaaaccaatgggataa

SEQ ID NO: 113324 - DNA, 321 bp, Enterobacter aerogenes
atgatgcacacgacgagtgagccatttgcccccttttttaaggaccctgtagagctgaacatgatttccttgaaatcaaaattgattatcattctcacggaattaattcgtgaaaaaggatggtcgcaaaaagtcacggccgagaagcttggcgttagtcagccaagagtcagcaatctgatgaatggccaggtgtcaaagtttgcgatagacatgcttttagaaatgctctgcaaaatcggttttgttatggatgtgtccttcaggccgcacgacacagaaagccctatagaggttaaggtaaaaaaagcagtggtctga

SEQ ID NO: 113325 - DNA, 324 bp, Enterobacter aerogenes
atgaaagaagtgatttatgttggcggctcagaaaaagacatgaagaagtcattttcgcaagccattttagaggaagctctggttgagattgaccgcttaaaatacggactctcaccactcaggaaaacgaagcccatgaacgggctcggaaaaggggttcttgagtggataaagaatggaaagccagcttacagactggtttatgtagtaggtaaaacggcaatttacatactacatgcattctcaaaaacttccgatggaaccccgaaatccgaagaggacactataaaagaaagatacaaacaagtgcaaaaagacgtgtaa

SEQ ID NO: 113326 - DNA, 570 bp, Enterobacter aerogenes; identical to SEQ ID NO: 92007

SEQ ID NO: 113327 - DNA, 807 bp, Enterobacter aerogenes
atggtgggctgggcgggggtccgaaaggacgccggtatccgtttaggccggtacgccaactccgttcagttcaccaccagtaattggcgttgcggtggtgataactctactaagcggggtatcacaatgaacaccaaaccttccattttcaatttcgaatcagactcagctattcgcgccattatgatcgatggcaatccttggttttttgcctctgatgtttgccgggcgattggcatcgcaaaccatcgtgatgcagttcgcaaacttgatgatgacgagaagggggtcggctcaaccgacacccttggtggtgaacaggaatcagttatcatttccgagtccggcctctacaccttaatcctccgttgccgagacgcggtgacgccgggcaccatcccctaccgattccgcaaatgggttaccagtgaagtgcttccgcagatccgcaagacaggtcgttacgttcgcgaagaattatcaccggcggataaagctcagaaggttgtggccagttttatgccagccattctggaggcaatgaaggaaggggataagccttcatacagctacccactcaagccgggataccgtgagatgatccattgccctgagggtgttgtcggcctggcggagaagtcactactgatgaacctgctgcagcagcttgatgaagatggccacgacgtcgccggcgccgcggcggaattcacaacaatggtgagctatattgttggtgttagccgatgcctgcaggacatacgcaaccacgcgcagtacatcaacaagaacgcttctgagttctga

SEQ ID NO: 113328 - DNA, 309 bp, Enterobacter aerogenes
atgagaaaaatatggctaatatttatcatgtttcctttttttgcacaggcagatttatccgccagttcttactatcagtgcataaaagataacgtaatgaagtacagcaaaacaaatgagtcagcagaatcaattgcatctgcttctgtaacatcatgtggttcagagttggcagaagtattaaaaagttcagccccattcatggatgcgagcgcagaagcaaaatctaaattcattgctaacatgaaagcacaaggtaaagaggcaggaataaaatatgctatggatgaaaaacttaaaaataaatag

SEQ ID NO: 113329 - DNA, 216 bp, Enterobacter aerogenes
atggatgattttaaagacctgtggataagcgcagatgatcacccgccagagaatcaggaaggcaggtggtcaaaagatgtcatagcgctaagtgacactggagacgtgttcaggctggcttgtatgggcggctcatggcaaagaactcaggcatttattgactcagggtcaacgaaggtaactcactggatgccgctgatttatcctgacgtttaa

SEQ ID NO: 113330 - DNA, 1074 bp, Enterobacter aerogenes
atgaccaaatcaaccataaccagagagccaattactcacgacctgaaaatttacccggagttcttctctgctgtgtgtgctggcgttaaacgtgcggaactgcgtaaaaatgaccgtgattatcgtgttggcgacactcttcacctgatggaaactccgcgcggtagttgtcatcaaacgggagagtttatcaatgtgaaaatcacccatatcgctgacgttggcgaatggacgccgggttttgtcatgctgagtattgagcgagaggcaatggaccgcaaggccgcaatggacagcgagccggtgatattgtaccgggagcgcaatccttacaacggcttaaccacgggttggcaagagctcactgaaaatgagctctcatttctcaaagagaatgctggggaaaatgcagagtttgtaacgctctatcgccacgctcagccagcgccggtagtgcctggagaagtcgccagtgcaatcgaggcattgaaacgcactctggttgactgcaatcgctacaactactgttctgatgcagttgcgcgtgtagagagcgcctgccgcgccgcaatgctccaggctgaacctgtaacgacggctaacaagttgggcaactctccggtaattccggattgttggtgccgcacatgccgccctgtggccttgaacgatacgcgctttgtagtgtgcccagattgcgggaacaagagatgccccagggcaaatgaccatagaaactcctgcaccggcagcaatgagccaggtcaggaaggaagtgcatacccagccgacccgcacgccacccccgctctggacccggagcagagcgtcgttaccgtgtcggatacatggatttcggtaagcgagcggatgcctaaagtaggcgatgaaattctctatttctgtcaagaggatgggatgaaagactgcggcattgttagttcatctaatttcagcggcaaaggtgataaacagctctatgtttatactgcttggggtgaccttcattttggagtagagataacccagtggatgccgcttccagccgccccgcaggaggttaaaggtgagtaa

SEQ ID NO: 113331 - DNA, 663 bp, Enterobacter aerogenes
atgagcatttatcaacgcataaacggggatgagtaccgcaacgcgtgggtagtaggtgatcttcacggctgctacaccaatctgatgaacaggcttgactcagtctgtttcgacccagcgcatgatctgctggtttctgttggcgacctggttgaccgcggggctgagaacgtcgagtgcttggacctaattaatcagccgtggttccgggctgtgcgcggcaaccacgagcagatgatgctggatgccataaccggcactggtagctttgggcactggatgtcgaatggtggtggctggtggcacaatctggactacgagcaggatatgcgcctgaaatcgctgctccccagggtagcagagcttccgctcatcatcgaggtggataagggcggcaagaagttcgtcatctgccacgccgactaccagcacggcgaatatgagctcggaaaaccggtagacgccgagcatgtgctctggagccgggagcgcgtcagctcttcaatggatggcgtgcgcttcgatatccacggagctgacctgttcattttcggtcataccccagcgcatacaccgctacgctactgcaatcagctctacatcgacaccggtgcggtattcaccggtaaccttactctatacgaattatctgggggtaagtaa

SEQ ID NO: 113332 - DNA, 258 bp, Enterobacter aerogenes
atgagcaaacaaacaggcggaccagccttcccggttgccgatggcgccgcacatcggatagcaatgcaggtggccggcgacgatgaagctaaatacattgccgaatcagcaaaggctctctcaggaatgacgctgcgcgattacttcgcagccaaggctatgcaagcaatgataacagcacatgagccagatggtgcgattcctggatgggcatatggaatggcagacgagatgctgaaagctcgggagggtttatga

SEQ ID NO: 113333 - DNA, 270 bp, Enterobacter aerogenes
gtgagcccggagtcctttaccttcgccgagtcggcctttgtgctggcgatcgtggtgctggggggtatgggctcgcagtttgcagtgatcctggcggctattctgctggtggtatcgcgcgagctgatgcgtgatttcaacgaatacagcatgttaatgctcggtgggttgatggtgctgatgatgatctggcgcccgcaggggctgctgccgatgacgcgcccgcagctgaagctgaaaaacggtcaggcgaaaggagagcaggcatga

SEQ ID NO: 113334 - DNA, 909 bp, Enterobacter aerogenes
atgaaaccgatgcaaattgcgatggcgcttctttccgccgcgatgttctttgttctggcgggcgtctttatgggcgtgcagctggagctgaatggcaccaaactggtggtcgataccgccgccgatattcgttggcagtggattttcatcggcaccgcggtggtctttttcttccaactgctgcgcccgctgttccagaaagcggttaagaacgtttccgggccgaaatttattatgccggcgattgacgggtcgacggtcaagcagaagctgtttctgatagccctgctggtgattgccgtggcctggccgtttatggtgtcgcgcggtacggtggatatcgccaccttgacgatgatttatatcatccttggtctcggactgaacgtggtggttgggctttccggcctgctggtattgggctacggcgggttttacgccatcggcgcctatacctttgcgctgcttaaccactattacggtctcggtttctggacctgcctgccgctggccggcctggtttccgcggcggccggcttcctgctgggcttcccggtgctgcgtctgcgcggcgactatctggcgattgtgaccttaggcttcggcgagatcgtgcgcattttgctgcttaacaataccgagatcaccggcgggccgaacggtatcagccagatcccgaaaccgactttctttggtcttgaatttagccgtaccgcccgtgaaggcggctgggataccttcagcaacttcttcggtctgaagtacgatcccagcgatagggtgattttcctctatctggtagcgttgctgctggtggtgctcagcctgttcgttattaaccgtctgctgcggatgccgctcgggcgggcgtgggaagcgctgcgtgaagatgaaatcgcctgtcgttag

SEQ ID NO: 113335 - DNA, 423 bp, Enterobacter aerogenes
atggaaaatgaaaccctcggttcacgtctgttaagacgccgcaaagagctaaaactgtcgcaagctgcattaggaaagcttgtgaaggttgcgcacgtcacgatctctcaatgggaaagagatgaaactcaaccaacaggaaagcggttgtttgcactgagccaagcactacagtgcacacctacatggctaatgtttggtgatgaagagcaaacccctgcagaacctatcaccagtgagcagatagagttatctgagcagcataaagaactcattcgattgttcgatgcactccctgaatctgaacagaatgcacacatggaagagctgagagctcgcgtggacaacttcaaccgtctatttaatgaacttcttctagccagaaaacgtactaaaaaaaataaccccaccactagctcttaa

SEQ ID NO: 113336 - DNA, 336 bp, Enterobacter aerogenes
gtggcgccgggcgagattgaggctgcgcgggcttacggcttttcgtcagttaagctataccgctgcattattttgccgtcggcactgcgtattgcgctaccggcgtacagcaacgaagtcattctgatgctgcactcgacggcgctggcgtttaccgccacggtgccggatttgctgaaaattgcgcgtgatattaactcggcgacctatcagccgtttaccgctttcggcatcgccgcggtactgtacttaattatttcgtatgtgctgattagcttgttccgcaaggcggaaaagcgctggttgcagcatatcaaaccctcttcgacgcactga

SEQ ID NO: 113337 - DNA, 1233 bp, Enterobacter aerogenes
atgacgatcaagggcaaaggaacaaattatctttacgtaaacagcgacgggatttatatcatccagctacatatccccgtctacatgcgccacctctggaacggtcgcaagatgcttaaaaaatcaacaggcacacgcgatattgtgctggcacgtcgattccgcgatcagtacctaatggagttcaggagactacaggcacagcttaaccccaatgcttacctactgaaaattcagtcagcaattaccgatctgcgtttcgttggtgctgcatctaccaatctcgttcaagattttcagacagccgccaaagggaagcctacaacgccaaagttaaaagacctttgcgacgaatacatgaaggtgtactcagacaggcggagctattcaactcttcagaagtcggcgcgcgctgtcgaagcttttacaaaatccatcaaaagaccagcaatcacaattggcggtattggtcgacgtatggtgacggagttcctagaggctaaccaaggcaaattttcacctcaaacgttgcagaactggctaacctcgttggggagtctgtacgagttcgccaaacgccgctacgatgcgataccagacagcaacccttttcacggtcataatcttgaagcgcggcgcacaattgaaagctatcagccgtttgagcctgaacaactgcaaacccttatcagagaagcggatgacgttctacgcgatgtcatactgattgggctgtattcaggaatgcgacttgatgagatcgccagcatcaagcgggatgaaattgtaatattggagggtgtcagatgtttctttgtcagcaagtccaagactgtagccggggtgcggcatgttccgatccactcgctactgatggggattgttgataagcatctggcaaataacagcggtgaatatcttctggctcagtctaataacatcattcggaaggatggcaagcggggtccgtggtacagccaaaagttcacccggttacgtgacagcgttttgccaaccgtgacagatcggcagtgcttccactccttgcggggtcacttcattacctgcttagaccgtgcgggagtgcctgaacagcgtatcggtgccattaccgggcacacagagcagaaagcgaaaaccgaagcattccgcacctatagccaaggggctagcatggaagagttagcggggtatgtagagctggtaagttacgatattgtggtcaaactttaa

SEQ ID NO: 113338 - DNA, 762 bp, Enterobacter aerogenes
atgttcaactttgataaatttgatctccgcgcccttcttggaccacatgaattttatgttttacaagccaagcagcggctgttatctcaatttaatgatatatcgagagaagctgacgaagtagaaaagcagcactacgagaaactggggaaattcttcgacccggacagagacgacccggcagattcatatgaggcagcgtatcaagaaggcatctcacatttcatcgcgcttgatgaaatgcggaacactgtgactttggctatgacagcgagtgtatttcatcaatttgataaagcactacgtgagaagatggctcgtgagtttagccactggcaaccagcagcggttgaccaacttatctggagtgttgatttccctaaattagtagagttactggaatggacgggcatcgacataaaatcaaagccattctatgaaaaaattgaagcatgtcatctgcttgtaaatgtttacaagcatggtaaagggcggtctcacactgaactcgctggtaaatacccgcaatactaccccaactacacgccaggagcaggtagaagaacaacacttccacgacctgaacaacttgaggtgagtgaagcacagtttaccgatattgctgatgctataagagatttttggctcaacattcctcaatctcgtaatgagtcacacttgcgcgatcagccggaatggtttgataaagaaatgaagcgctttgatcgttatctgaataagaatgctacgaagaaaccataa

SEQ ID NO: 113339 - DNA, 126 bp, Enterobacter aerogenes
atggtaattgttttccctttcgccgagggccaaaacatgtgggagtgccttagtctagctggcctggaaatatcctactggcggaccatcagcggtgctgggccgtacgattcggtggttcaataa

SEQ ID NO: 113340 - DNA, 210 bp, Enterobacter aerogenes
atgaagaaagttttactatgtgttgtggcactgctgccgctggcggctcatgctggcaaaatcaccatgagcaaccccgacgaacaggagttacagggcgggaagcgtctttgcacttatgagtcgtcacagtatttgtttacgctggtgacgcgctcgcaaacctgcccgtattcgaagacgttctcaacctcggacaacgaaaagtag

SEQ ID NO: 113341 - DNA, 702 bp, Enterobacter aerogenes
atgaatgctgctatccaatctatctgctacaacatttcccaacatcctgaaattcgtaacacatcgttgaaacgttcacatgttcacgaggtggtttctgctcttttaggctatgccagccatgcggcactgacccaagaaagtaaaaaatctcaagacgacaagaagcctctgtatgaatttagcctttcggaggcagaatatattgttctgaatttgcctcaaggcctggaaagagcgctgaagtttggcgtatctgatgatgcctttcgtatcttcatctcagaattaaagtctggcttgtctgcgaaggtatccgaatcagtggatgatttttatgatgaccatattcgggaaatcctcgcagaagagataaatcaacacgcgctagattctggggagatggccgagagtaacgcttacttcgactaccttcctgacatggattataagcttgaaaccagtggcaatctctggacttcagttgatgaatggtcaattgcagatactggtacgctctcaggcgaatacgatcctgagggggatcggatgtataacggacataccttaaatgttaaaggtaagttcatttttgcaaaggcaggtcgtgctggcctagtgttgttagatgatagcactgaatgctttatatggcctgatgagtcttggcgcgattatgaaccgttagaggcagaaggttaa

SEQ ID NO: 113342 - DNA, 717 bp, Enterobacter aerogenes
atgcagaccccgcacattcttatcgttgaagacgagttggtaacacgcaacacgttaaaaagtattttcgaagcagaaggttatgatgtattcgaagcgaccgatggcgcggaaatgcatcagatcctgtctgaaaatgatatcaacctggtgatcatggatatcaacctgccaggtaaaaatggtcttctgctggcgcgtgaactgcgtgagcaggctgacgtcgcgctgatgttccttaccggccgcgacaacgaagttgataaaattcttggcctcgaaatcggcgccgatgactatatcactaaaccgtttaacccgcgtgaactgactatccgcgcgcgcaacctgctctcccgtaccatgaacctcggtaccgtgagcgaagagcgtcgcagcgttgagagctacaagttcaacggttgggaactggatatcaacagccgttcgttggtgagcccaaacggcgagcagtataagctgccgcgcagtgaattccgcgcgatgctgcacctctgcgaaaacccgggcaaaatccagtcgcgcgcagagctgctgaagaaaatgaccggtcgcgagctgaagccgcatgaccgtaccgtggacgtgaccattcgtcgcattcgtaagcatttcgaatccacgccggataccccggaaatcatcgccactattcacggtgaaggttaccgcttctgtggcgatctgcaggaataa

SEQ ID NO: 113343 - DNA, 711 bp, Enterobacter aerogenes
atgaaacgcgccgtagttgtcttcagcggaggacaagactcaacaacctgcctggtgcaggcactggaacagtatgatgaagtgcattgcgtcacttttgattatggccaacgccaccgcgccgagattgacgtggctcgcgagctggcgctaaaactgggcgcggtagcgcacaaagtgctggacgttacgctgcttaacgaactggcggtgagcagcctgacccgcgatagcattccggtaccggattacgagccggatgccaatggtattccaaataccttcgttcctggtcgcaatattctgtttttaaccctgacggcgatctacgcctatcaggttaaggccgaagcaattattaccggcgtttgcgagaccgacttctccggttacccggactgccgcgacgaatttgttaaagcgctgcaccacgcggttagccttggtatggcgaaagacattcgctttgaaacgccgctgatgtggctcaacaaagccgagagctgggctctggccgattattggggccagttggatctggttcgccgcgaaacgctcacctgctataacggcatcaagggcgacggctgcggccagtgtgcggcctgcaacctgcgctccaacggcctgaatcagtatctgggcgatcaggccggcgtgatggcactaatgaagcaaaaaaccggtctgggccaggggcacgaagcttaa

SEQ ID NO: 113344 - DNA, 636 bp, Enterobacter aerogenes
atggccgattctgaagatcgtcgaccattccctccagtcaacttcactggcgataactcccggtcatacatcgctattattccagcgaatgaggtctatagctgggttagtgataacgttttgatggagggcgggcatctctataatcccgaccattaccaccttcacgccgctgatatcgcatttatgtgggcatctaatgtctttgaaaagaaaggtcgtgccgttcttggacagtgtgaagaagtgatgctacgagccggaggatggcagaagtcccgcatggagcagcagatgtatgaatggtttggtcgcataccgaaattcatcatcaccctagctgccgactactgcgagcaatgcaacgatcttgagttctgcgcactggtggagcatgagctttaccacatcgcccaagcgactgatgaatttggcgcgcctaagttcaacaaagagaccggaatgccggtgctgaaacttcgcgggcatgacgtcgaggaattcgtcggagtggtccggcgttacggtgccagcaaagacgtgcaggaaatggtggatgcggctaacaagcctgcggaggttgctcatatcgatgttgccagagcatgcgggacatgcatgctgaggctggcataa

SEQ ID NO: 113345 - DNA, 339 bp, Enterobacter aerogenes
atggatggcaaagtgggtaagcctaccgaaaatatccaaacttttacggttaaattggaaatagatgccacagatgctcagaaagccattgatgaaattaacaaaaagataggggcgtttatggcatgtgtggaagtagcagatccagtattccgcgtggcttatttcagaaaaacgggcggtcatgtcctgggctttcaggctgaagaagagatcaagccgagtggtggtttttttcactcgaaagcaacgccagatctaaaaggaaaggtattggttcgtatagaagaagtttctcacattgtctgcgagccatacgagcccaaaactgaagcttga

SEQ ID NO: 113346 - DNA, 240 bp, Enterobacter aerogenes
atgaaagcgcttggcggggccattcagcaactagcaaaagagcgtgggatgtctctttctgcgctggcggacaaaattggtataaaccgtaaaactctatattcctgcattcatggcaatcctcgcttgtcaggcttacagcgcatcgctgatggtcttggatttcgtctgtcagacattattgctattgcggaagagattgaagcgctggctgcagaacagcaggaggtgaaaccataa

SEQ ID NO: 113347 - DNA, 141 bp, Enterobacter aerogenes
atggacgataagcaagagtgcatgttttgcaatgggcatggcgttgtcgaagagtggagtgagtcgctcaacgactggaaagatgaaacttgccaagagtgcggtggcactggctttgaagatgatcaggaggggctatga

SEQ ID NO: 113348 - DNA, 714 bp, Enterobacter aerogenes
atgaacgatattaccgaactggcgcggaaagtaataacagaagtttcggcgattgatgatacccaatggtatctggctaagccttcagaaatcaggttgctggtagaggcgctggagaaggcgcagcaggtagacgaagaactttgcaagctcctgcctccaggcgttgagtacatggacccgccagacggaggcgacgtcacgccgcttgaaggagttcgtcgtatggttgctgattaccgccagcgcatagcggaattgcgggagtggaatgccggtctggctcaggagtcattcgagcgtcagcagtgtatttctgaaattgaacctattcgcgctgcagccgaaaaactggttcgctgcaaaggtcgttatcacagcgagcagaactatcgagcactggcggcgctgtttggcgtgacgactccagacctgccgccgctggatggagagtcccgcaccgtcaccgtgaagctgccgccactaaatgatgacctgatatctatccttggccgacctaacttcatgtgcgcccacttggctgaactcctgcgtaaatccggcgaggatattaagcggaaatcagaacatgaacaggcggcggttattcattggttcctcggtatttaccttgagcacgctgataaatgggaaggcgttgcgaaatctgacatgcaggctcgtgccgctggcatcaagtgggaggctgagtga

SEQ ID NO: 113349 - DNA, 351 bp, Enterobacter aerogenes
atgagttgcggatatcaaggttatgagtttggtgcccattacccggacagcctttgctgcgatggttatctctgggattgcgatgcatacgatgatggcatgttgactagtggcggtgaaattccttgccccgtctgtaaccgtaagcaatggctggctttctaccgcgatgaaatcattgagtgcggtatggaacaagcagagcgcaagaatggacctaagaccgtgaaatatggcggcttccctgatccggtgcgtggtgatgcaaaggctatgcgtactattcgtcgctggctgcgtcgggggtggtaccagggaagaaagttcaatgcgacagcacaaagtgaatga

SEQ ID NO: 113350 - DNA, 1440 bp, Enterobacter aerogenes
atgaaagccgcttacttgcacgcatataatccaacattgaggattgcagttacatttcaatcaagagctttgtaccaacaatttaatagattgattgataaattctatttccaacataccaatgacgatccagattataactttttgaaaattcgccatgcttggggaagtaataaagaaattggaatctattctgaaatatgcaatcaattaggtattgagccattaagtttctacgctgcacaacaaaaatttggatatgacaacgcattttcaggtgcatgtgaagaagctttaaaatattctgaacaagtagatgttgaaccaatctatgattatgtacttattgatgaagcacaagatttcccatcagccttctttaaattagtctacaaattctcaagtgagaaaaaaagagtagtttgggcatatgatgagttgcagaatcttggcgattttacaatgctaccgccggaagaattatttggtgttactaaactaggaactccagaagtcacacttgtgaatgaaccaaataagcctcagcaagatataatgcttccaatatgttacaggaacccaccttggacactttctttagcattggcgctagggttaggtatttatcgtgagggtggtttagtcaaaatgttccatgacccatctttctggaaaaacattggttatgaagtggttggtggtcggttagaattatctaatcttgtaaacttgcaacggagtagtgacagaactccagattatttcaatagattattgacaccaaatgattccattaaatatcaatcatttgatgatcctcaagctcaagccgaatgggtagcgaaggatatattgactaatttgatggaaaatgagctagagcctaccgatattttagtagtgttcccaaacgcttatacgttaggcagtgcatcagcatatctcatgaatgaactaagaaaatatggtgttaattgtcatgttgctggaaaaaacacaagcagagatgtaatttttctagacgactcaatcgcgataactcatattcatcgtgctaagggtaacgaagctcctatggtatatgcaatgaattctaattattgtaattccggacttgaactaggaaaaaaaaggaatgcattatttaccgctatcacaaggactaagtcttggctgcgtataacaggtgttggcgagggtatgcgggagttagttcaggaaattgataaagtatttgaaaaagattttcgtctagaatttaaatatccttctatcaaagagttagaaaagcttgatagtgcttatcaagataaaactgatagtgaaaaacaagaaatatacgaagggtttggacagctgaaaaagcttaaagctatgtttgaatccggtgaactttcgattgaagatgtgccgccagacttgagagactttttcgagtga

SEQ ID NO: 113351 - DNA, 675 bp, Enterobacter aerogenes
atggaaattaaagaacaacaattagttcaagcgataaacgatttaatttttcgctggcaaaaaaaagggttagtatatgactcaagaacacattctgcttttaaaaaagcaggtggtcttaacgaaataacttgggggaatgatgggtttgttttgaaagatgaacaattttcatcattttcggagtactgtagtttagttgaaaatagacaatactctatgttattaaatgatggttcattttttcagatatcgtatactttagaacgctcaaagattgttaagcataggctatgttggtatccatgcccaatagagctagatacaagtattcttgatgaaaatgatatatcagatattgttttagataaaatgcaatcagttgacttatcatcgctcaagtgtcgtagcccaatgaggtttgattacgcaccaatacaaacaaaaataggacattcttcagtccaccttcatttgagtgaggaaaactgtcggattcctgtaaaaacgccactttgtttaaggcaattcatgacatttatcgtcactcatttcttcgaagtgttatcccgtgataaaagtctatatagtgatattgttacttgggatagtattgatacactaagtgacttagaaaaaaaatcacttcatataaatatttttaaaggcctctga

SEQ ID NO: 113352 - DNA, 537 bp, Enterobacter aerogenes
atgttcgtcgccgagctgtccgaagcctttaacggcatctctcagcgcctgatccccggcgctgtgctggcgattgactgcgccgctatctatagcttcgcgccgaatgccgtggtctggggctttatgtggggcaccatcggccaactgattgccgtgggtattctcgtcggcgttggttcctccattctgatcatcccgggctttatcccaatgttcttctctaacgcgacgattggcgtctttgctaatcacttcggcggctggcgcgcggcgctcaagatctgtctggtgatgggcatgattgaaatcttcggctgcgtgtgggcggtgaagttgaccggaatgagcgcctggatgggcatggcggattggtcaatcctggcgccgccgatgatgcagggtttcgcctcgatagggctggcgtttatggccgtcattattctgatttcactggcttatatgttcttcgccggccgcgcgctgcgcgccgaggaagacgcggaaaaacaactggcagaagcctctgctcaataa

SEQ ID NO: 113353 - DNA, 1362 bp, Enterobacter aerogenes
atgactcggagtgaaataaacgtctgggatttgagacgaggcaccaatagtcctcgagttgaggagattcgatctgaagctcagcgcgacctttctcgattgattcactcgtctcctttcagacgattgcaatccaagacacaggttcttggtctgggtgaaagtgatttctaccgcacacgactgactcattctatggaagtcgcccaaatcggttcaggtcttcttgctaagctgaaaataaaatataaaggtgaagaggaagagcaatttttaccagataacgatctgatgcaagcagtatgtctcgcacatgatattggacatcctccatttggtcacggcggtgaggtagctcttaactactgtatgctggattacggtggttttgaaggaaacggccagacgcttcgcattctctcgaaactagataagtataccttagaacacggactcgatcctacacgcagacttctgctaggcatactgaaatatcccgttaaatactcggatctagtggttaaaaaagacagtatcccggccactatcggatcgccgaactggctcttcaagtcatctgattttaaacctccaaaatgctatctagattcagaatgcgatattgtagaatttgctctctcaccatttactgaacaggatcggaggctttttacttccgttgaagatggtcaaaccaaatccgatcataaaaaagcttcttataaagctctcgatacaaccatcatggatcttgccgatgaaatttcgtattcgctgcacgatttggaggatgctatttctctcggaatggtgacacgagcaatgtggatggaacatttcagtggacatgaaaccctatttactaactgccatggaaaaacatttgccggaacatgcgaatctgttgcggatagcctttttggtaaaagttacaagagaaaagagtgcatcgggatgctagttcacctgatgattacaagtgttgagcttagtacaaagaatgcagcattcgaatgtggcatgctcaaatataatgcggtccttccggaagcggtcgaagcactaagattgaaaattttcaaactggtcaaaaacaaagtaattaagcatgaaaatgtacagcagcttgaattcaaggggcaaaagttgattgttgagcttttcagtgtactggctaacgatccgtgtcggtttctacctgcctcaacgagggaaatttacgagcagcagattagcttagacgagaaggctggtatgcgagtcatttgcgactatgtttcagggatgactgatgactatgcaacaaagctttatgagaagatccttattccacgcaaagggtctatttttgaccatctctga

SEQ ID NO: 113354 - DNA, 156 bp, Enterobacter aerogenes
atgagaagaacaaaaccttacctgatctacaagaaaaccaacaatctccgggtgatccaacttctgttgggtcataagaaactggaaagcacagttcgttatctgggcattgaaatcgatgatgcgttagagatctctgaatcgattgaagtctaa

SEQ ID NO: 113355 - DNA, 1245 bp, Enterobacter aerogenes
atgaatactaaacttttagcctatttaaacaatgagttacatggagtgtggatagatagtgaaaatcgcaatatccacataatacttaaatcaagcattcctataattaaatccgtctggtcaggagcacctatccatcttttggtaggtttatctactaaaaaaaatatactagtgatcgggatgttgattgaagataatgtcgataatccatttttactggcctatccaccaagagaggaagatgaaatcaaagggctggatttgttattgtcaggtgattatgatggtattcaattaacattttttgattcgcatacaatgcgtgttatggatctgaaaataaaagtttcgggaaatttatcggataaatatttaaaaaatttttgtgctaattcctattctctcaattcaggatttagggaaggcaatgaagcaatggatgaattctgcaacaatgctttgactggtaacgagaaaatattcagtctgccactaagtgtaatcgataaaaaatcttaccttgcaagtgttcatgaaccaaacgataccgaattaacatatgaatttagcgccagcaaaaacggctctgagggatatgagcaggaagctcttataaatcatgctttgcggcaaattttttcacctgaagaagtgtttttttctccctatgttattgagggtaataaaaaaagagaactagttgatattcttgttgtagaaaatgaccacgtattatctatacagtctaaagcatcatcattgattgaaatgggattaaaatctcatgaaaagctttgtggcatgtataagaaaaaagcattgcaaggtatcgatcaggttaaaggcgttatcccaattctaaataatgatgtggttattagtcatgatgggatggaacatttaataaagagaagaaggggtgtttatcatttggtgataatctcagatcttgttttagagaaagaagatgctgaaaagatttatgacgaaattagcaaccttaaagagtcaaaaggggcgagagttttagttatgagtcttgatggtcttgtgaattttataaagctatcaagattaaataaaagaatgttttgggaaatgctggagactaaatacaagttcagcataaaaaaccgtacaattctaattagagacatcgactctagccaagagaataatctaccattacttgccactgatcaatacctatcacttcttcgaggtaagggaaaattaaaataa

SEQ ID NO: 113356 - DNA, 2220 bp, Enterobacter aerogenes
ttgaaccgcctgcgatttggctacggtagacttattgagaatttgcagaccaccatggcgaaggtcgtcggtgccagctacggggaaaaggagatcatcttgttagtaaatattgacttcgacaatcaatcgacagttgccagtatttcgttggaaggttgggatcaaccgcttgtcgaattcctctcacggtattttaccatccaagaagacattcttcgtttggactactcccacctatcaactaagaacctcattacagctaagagttggccttatagatcgcaaacagagcgtgagcactttacgttcgaattcaaggatgcggcacagcaggggcagatagcgctgaccttaaaaattctcggacacggatccgcggggatcgagaagtcgtcctctatcttggacccaaattcttacctgcacgctcaggatatcttctgggagggcatacttaatggcgatcctccgggcttacgtgaaatcattgtggcggaaatcaagtcaagtgcgatttgggttgaatggttgctcgctaaccgctcatattctcggaataagtatttggatgatcagcagatcatgaaggcgttggtggtcaatacgtccgaggaagattgcatctatgttcttgatctagtcgaccctcatctggggggggatccttgggctttcgaacaactggtccagcagcattggcagcctgtacgcgactacttggaaaaaaatatcaacaggacgtcggactattcaaaccgcggaatgactgagttgatctcctctctatatgcgaattcgccgacagtgcagaattcccggtgggcttgcgaacaggtttttgaacgagcagatccgtcagtatttcctgagctaatccaacattgtcgcgcgatattgccggaggatgtacgtaatctgttcctgcgctggaacatcatttcgaagaaagagaagaaagacaatatcaagcattgcgttgccaaagccttctcgagtcttgctacattgtacgtggacaccataccctcggacctcgcgcttgcggctgcttggcacgagtttggagacccagcgcggtctagtcagcaaagcgtcgttgccagcctcagagaactaccatcccaggcgtgggatagagaaacgctgtgggcccaattaggtccgtccgcccgcgaggcctggcggcaggatctgttcgatcgggttaatgaggaacctgagttagcccaagggctcctcaattttgcctgcctttggctcgagcagacggcattcgccgaagtcgagccagtgcttttgcgattgatggatgacgaggagcatctggcgtttgcgaatcggcttgtcggcactgatgtaaggcaactgcaactgaggtgcaagggactagtgcggtccaagcaaggtgcactggacctagaggggccggtaggtcggagcgagggtgccgctgtgttgcctagcgtaggagcccaaacttggctgggcgacccttcggtggagcgcatcatctatagggcgcttagccagattgaggaagaattttgttgcgaatatccggatacctggggagaggacgaggaggcccatacggcgcgcctcctgagtctgacaaaggtggcgattagcaacgtgagtagccagttgcgccaactctcggctacgacgcgggcgacgtatccgagcctgacagtgaacgtgcgtcaacccagtaagcgggaggaaggggcgaacacacaagccggtgctccgctgggagcagacgtgctgttcctgagccgtatcgtggacaaggggaaaacagtggtccagcgtgcgacccttatgcaggtgaaaaagcgcaaaggcactaattcgggacaggccttcagttcgacggtaggcattaacctgaagcagtgcgaggacatactcaagcagtcagaacacgcctactacctattcacgactccggcctcgcctcgcccggttctctgggttgccccagcgcggctcgtcagaaatttgacccaattgcacacgagcaaatccacggtttcggtgatgcaggtgcgcgacgccagctgctcctacgcggatttttttctgcacgagcttgttggcctgtgggctggcgacgagcatgaggacatcatcgccgtcgccaacggcgatcctcggcttgggcgaacacctcgccacattgttgaaatcgaggttcgccgccaatctgattaa

SEQ ID NO: 113357 - DNA, 1512 bp, Enterobacter aerogenes
atgaacaaaaaaattaaaaacacaaataatcaagagctaaacctgcaatttatgctgctgccttgtcacatcaggcattgggtctcgcatttacaccaggtaacgagagtagctattgagataatagttgttacgttattggcctttttagggttggcttgtcaggatctctactgtgttcagttagagaataaacagcgatctttcctgacattatatctgctgttgctttcaagatctggcagtggaaaatcgacaatattcaggctattgaagaagccagttgcacaattggaacgtgagtttgaagacgattatcgtgcagagcttgagatatatagtcgaaatattattctttgggaggcacagtttaaagtatttaacaggctttataaaaaggcgttgggcgagggcctggatacaactgaagcggctaagcaacttaaagagtgtgttgatcgaaagcccaaggcaccagtaagaaaaaccattatcttaacaaatccgacacctgaagcactcgcaaaagcaatcggacagggatatcaaaacaaggcgctcttcaacgatgaagcaacagcactgtacaagaagctgctcattaaccctgcactattcaacacattatggtgtgcagacaaagtaacaatagacagggtatctagtgaaagttttgttattgaaaattatgtgttttcatctttcttaatgatgcaacctcagccctatgataatactcccagacagaaaatggacaacatcagagatactggcctgcatgcccgcaccttgatgatcgatatggagcagattacagaagcatgcaccatcgacagtcattttgcacatgctgagtcagtgcttactgaactgtattcactcatgatgcggcttatgaaagctggtgttgaacgaagagatagtgacgatgaatatattgcacttaccctggctccggatgcacaggtactgtatgaagcaacattgctgcatttgcagcatgagatgaaaccaggaggcctcttgtatcactatgatgatataggcgctcgtattcttgagcatagccttaagttggccggtatttttcaggtctctggtgaccctgattcgacagtaataacaaaggaaaatttatcatcagctttagatctgacggactggttcgtcaatcacgctatcacaaaaattgattcaacaagagagctaagtgatgaagagaaaattttgttctggctagagtcgaatcttgtaaaaaatgaaaattacgatttcagaagaaatgacattatcaaaaaaggacctttatcaatcagatgctctgcgcgcttgatgcctgcgctggctaagcttgagaagaaagggaaagtaaaattattcgaagaagaaggtgtgaattatgtcaaatttactggctcaaaaatggaagctgttgaactggcaaagaaaaccaatacgccaatctaccagtcggggccactggctctgaacaagttagccataggtgaataa

SEQ ID NO: 113358 - DNA, 222 bp, Enterobacter aerogenes
atgtcgaatattagtgaacaaaaagcacaaccgctacgcatcctgcgcatgactgagttgacagtgatactggggatctctcgctcaagtatctacgagaaattgaatccgaaatccaggtactacgatgcccagtttcctaaaccggtccggttaggggctgcatccgtggggtggcgatcgacttcgatagacgagtggatcgcttcccgaactgtttaa

SEQ ID NO: 113359 - DNA, 5112 bp, Enterobacter aerogenes
atgagtctagaaataaaaaaacaaagtaacccgttttctactggcggtgggggagttaattttgaaacaagagttcaagcagctttcgcactatccttattgactaaatcttgtgttccttgtttgagtaactacatgagggctaaagagttaaaattccagaacaaatatgatggtgtaaatactgatgattttgtattgactgccacagacaactcaaataatgaaagtaagatctttgctcagattaaacatgaaataactattagtggctcatcaaactcagtatttgcagaagttataaatagtgcttgggcggactttaaaagtgtgggctttaagtcagaaagagattctatcgcgttaataacaggtaatttaccaaaaactgacataaataatactttgccgttacttgaatgggctaagttttcatcgaactcagaagattttataaagaaatctcaaacccaaggatttaccagtgaagcaaagctcgaaagattagggatatttagagatcagcttactcatgcgaataacggggtagctatctcagaagaagaattgtggtctttcttaaaatcgtttcagattttaccttttgacttagatgcagaacattcaatcgtagcaaacttactttgctcattgattcagtgttactcagacgtattaccttctctagtcttagctagacttgtttcctgcgttcaaagtttcaaccagaatgcgggggttttaactcaaaataatataccagaagacgttaaaggattatttaataaatcaagccacttatatttcgagaatgacttgataaagctttatgagcgcagtcagcatatttttgaaggtatttctacaactataaatggactccatgttgataggacagaacaactagcagcactatctaactgctatagcgatagtgagtttgtatttgttaccggtgcaagaggggctggaaagtcaggcgttgttaaagattttatcacaacaaaaaatttagatattccagtcttctacttaagagctgaagatttagataaaagtaacttaaatgaagttttcacttccatgggaattacatcttctttgggagaaattgaaagtcatttctcattgcttcacgaaaaagtactcgtaatagagtccctagaaaaagttttagagctaaattatccaaatacttttgttgagttattgcaatacattagaaaacagtctggttggactatcattgcaactggtcgggactatgcttatcaacaattgttatttaatttcctacagccttgctctataaattttagcagcatgaatattgaagggcttgaagatagtcaagtcgagcaagtttgcgagcatattccagagctaaaatctttagtatctaataactcattagtagaactactaagaataccattttttattgagattgctgtaagagctataaaaaatggcgctcaatttgggattggagatactgaagaagactttagggatacagtgtggcggactgtcgttgcaaaagaagttgatagaaagtcagggatgccagatagaagaagagcaacctttattaaaatagcaatagagagagctaaaaagatgctttttggtgtcagagcaagcggttttgacccggaagtaatcgcaaagttggaagaagacaatttgatctacagagatcaaaaatcatcttgtgtaagtcctatgcatgatgttttggaagattgggctttagaggagttcatcgatagagagcattttgataattctcataatgttgcaagctttttgttaaatataggaaatgaacctgcgataagtagggcattcaggttatggctgtataggaagctaaaatttgatgatacaactaatgaattcgtagaaggtttattatcttcggacgagatagagagttattggaaggacgaggcaatttctgcaatcatgcagcatgactctcccgggatatttcttaattcactcaaacgccaacttcttaaagatgattgtgctcttttgacacggttttgttttattctcagaataacgtgtcaaagaccaatatctctacacaacggactattgataaaagataaaaaatcgggattgctcaaatcccttttcctgaaaccatatggagaaggttgggaagcactattccattttatttatcaggaaagagataatttgagtagtcctgtgcgcactcaagttattgaattaatagatgaatggactggtctcattaatatacatgatgagttgccaaaagcgtctgaaaaggttggttttttaagtttatggctccttgaaaaggttaaagattcatatcgtggtgaggggcaaagaaaaaaaatattaaatgctttattaaaagtttcaacggctattaaagatgattttgatgaattgatgaaacaggacgttttcacctcaaagataaagcctagacgattaagttatgttgatgaactgagtagtttggcacttataggcttcaatgttcctgtgttgtgtaagttttatcctgacttcgtagttaaactttcaatgcatgagtggctgttggaagaatccgaagagaacgattatggctacgggtcatatcgagtagacgtagaggaatcatttgggctagatacagaacgagattttttccctgcaagcggtgccaaaggccctttcaaatatcttcttcaattcaagccaaggctaggcttggatttcattattagattgtgcaatttgacagcacaaaaatactcagaatcggatttttctaaaactcaagacaatgaagaagacactatttacgccttcgaaacagtagctaaacaagtcgatataaccttgaatgatggcacagtagttaaacagtatgcatctccccacctctggaagggatatagaggacagtctacgttgccctacttattacagagtgctcttatggcattggagaactggttagttgagtacgttgaaaattgtggtaagaataatgaaatagattggatttttgattatgttcttcgctctagtaattcagtaatgcctacatctgttttatcttctgtggccacaggcttccctaataaagtaggtaaagcagcctttcctttgcttaaaactgctgatttataccatttagatttgattcgaatgacacaagaaatgggtggaaatgagatgcatttctttggtcttaatagggatgcattgtcgaaaatatacctagaagagagaagagaagcagcacttcgaccatggagaaaagagtcattagaaaccttattaacaaggcttcagttcgtaaatgagttaagggatgatattttaaaaattgttgatgaactgaaaaatgaagctactgcaagtaatgaaaaaagccttcggtatatggtgcacagagtcgatacaaggacttggaaagtagttgaagacaaagaaaatgacagagtattgtttcaaagctcatcagagcttccggaagatttaaagctggatcaacaagaatttaatgaaaagcacgcaatggataacaccgtaactagtttaaacttatggggtaaaaaactattcgatgagcaattactagaagaaaaatacttctcttcatatcaggatgcattaatagctactaagggattgctcagcgccctccaaaaaggtgaagtacacaactttgctgatatggcggttggcacaatcacaactgttgcagcggtttgtgttcgtgatgttcttttagaattgagctatgaagataaaaagtggtgcttagaaatcatcctagaatcaatattcatgcacgcagacaatatgaatgggacagctgcacatgataagactgattattatggctctggagcatgcgcatttgtcttacctaagttatttgatttagatctagattcagaacaaatagaatatttgaagtttgcgttagctacagcattaacgcatgagaacctgaacgttagtgcttgtgctgctaagggagtaagagagtttctttggtctagagacgctgaattagcatcccgttgtataggtggaatagttgagtatgccagattacgaagggaagatagtgaggtacgtaggttttatcatttacaaggtgctgaattgcaagccgcactcgaaaaatggaatgatcttttaacaagttttcgtaacgacttgattgagggaaagtttaagctttcagttaacgatatatctttggaaagccactgttcgtggtttattcatttaccaatgctaatggttccttactgtactaaggatgagatacaaattcagttggtcaataggttaatgagttttgtatttgatacggagtatcaaaaccatcgttcgagtgatgatgaaaaaataaatcatgaaattaaaaagcagattcaagactgtctctctgaacatgttgtttcttcaagaaaaaataacttcatgccctttaaagatctattggtgttagggtgtacaaaagctcccggcttcatttattctttaacactctcctatcatgtcgctgtagaaaaagaaggtgattatgatgctatatgggcactttggtgcctgttagcaccagaagcacacaagatagctttgaatgatgttaatgatcgttatatcggtttacagaatgacctaaatcagctcctgcgtggaatgatgtatgcggattgcccttggcaaggacatgagaatgaagagaaagatatgaagcgaggtgctaaatatttgctcgattttgctaggcaatctgcacataatagccatgtgtttgaagccttgtcttcattgatttataacttctacaacgtattcttcgaagaaggcattctgattttagctgagcattatagtgccaatcgacatattatcgggaagcaagtcaatacagcattttatatagaaatggttgttggaagatttttgcagatagaaaatcgcggaactctcaatagaaaaatgtacgatatatgcctgcttctcttaacaggaattgtagaaactggctctgctagagcttattacttacgtgaagaattgattcgttctcgaaagatttcagcctag

SEQ ID NO: 113360 - DNA, 393 bp, Enterobacter aerogenes
atgttttcttacattatgctcggaaccaacgacctgccacgcgccattacattctacgatccgctgatggaattacttggtcatccgcccgcaggacgcaacgaggaaggtgcatcctggggcacatttagtgcgaacacgactaccggcctttgcgtggggcgaccatttgataaacaacgggcgtccgtaggtaacgggacaatggtggcattgaatgcagtgtccgtagaacaggtacagcagttgcatactctcgctctgtcgcttggcggtacgaatgaaggggggccggaatatcgtccccagtacggtgacggattctatagcgcctatgtacgtgatccggatggcaacaagctagctttcgtctattacaccgcacaatcctga

SEQ ID NO: 113361 - DNA, 162 bp, Enterobacter aerogenes
atgaaaaatagaatcgatgtaagcgtcattatccctgcttacaacgccgctgagaccattgtaagtctggttaataaaatcctcagtgaaacccgcgtggctattgaacttatcattgtcgatgacagttctactgctgaaacagctaacgttctacgttaa

SEQ ID NO: 113362 - DNA, 720 bp, Enterobacter aerogenes
atgtactctcgcaagctcgccaaagctgtcgtgctggatgaccctaatgatgttgaggcctatcttcagcctatgaatcttagtcaaagtgaccttacccatatactcgaacgaggtttatcaggccgttactcaacgactcaaaatcatcctgcaatttcacgtgggcagtatttttatggtgagggagttagcggtgctcgtgagatccttgcgccaaaagggtacaaacggctgtctattcgaaatgttgaattgaccgctaacgataatgttgcaatttacctttgccgtggctgcgatcaaactgggcttcttcatggataccccgaatctcgtttgaagaaaggtgactttacttgcgatctaatggggttgattcgcaataataccccaggacaaggcgatctgatgctcgacgataaccaacttaagttggacctcgctctacccgatggcgatgttgtccctcttctgcctaataaaatcggaatggacttatggtttttactctacgatttttatgaaattgatgactttcaacgtgttggtatccgtgcagaactttctcgacctatctcatacaacgataaaaatgtagttaatagcttttcaacgcgtttgatacttgatcttcacgaacctgcgccaattatccagagtaatgacgcaccaaaatttacgccggatattgacctcgacattttaaaagtaggctaa

SEQ ID NO: 113363 - DNA, 1113 bp, Enterobacter aerogenes
atgtttaattcagagcgtttacgtatagcaagagaacgaagaggtctaacacaaagagccttagccgaagcagctgaattgaccagcagaacgatttcgaactatgagaaagcaggtatctttgatgctgtagcgagtgacagtatggataaaatttctgctgttcttggttatcctgttgagttttttctcgatagagatgttccttctctatcagctgaatcggtcagttttcgagccatgactaagctaagcgcacaaaaaagagattccgcgctcggtgcaggaaaacttgcccaagaattatcgatctggattgaagaacaattcaaattaccgaaacccaatgttcctgattgtagtttcgatggttattcggaacctgatcgtgccgcccgagccgtgagagaacattggggagtcggtgaattatcgatctctaacttaattcatcttctggaagctaatggtgtacgtgtgttctcactcgctgaaaactgcattgaagttgatgctttttcgttttgggtcgacgaaaaaccgtttgttcttcttaatacaatgaaaacaccggagcgtagccgctttgatgcagctcatgaattaggccatttagttcttcacaaacattcaagcaataatggcaggcaagccgaactagatgccgaccgctttgcatcagcttttttgatgcctgaacgtagtgttttggcgacagtgccaagaatgccatcgctggatctacttatctcaatgaaaaaaaattggaaagtatcactcgcagctttggtccgtcgtacattcgatataggtttatcaactgaatggcattatcgacagttatcaattgagttagcacgacgggggtatcgaaccagcgaaccacaaggcatggacgatcgtgagagatcacttgtattagaaaaagtgttttcagcgctgcattcacacgggataaaacgtagtgagatccttgagcagcttcggtttcctgctgatgaagtaagtgctcttacttttagcaatagattctttatggacatcatcgatggggaaggtttagctggaaaagaaataagtaaacgtccttcacacttaagtgtagttaaataa

SEQ ID NO: 113364 - DNA, 1065 bp, Enterobacter aerogenes
atgcgttatgatgcaccggagatttatcaaagagaaattgcggaacatccagaacgtcgtataggatattggagaagctcatttagtagtaatctaggagcttcttgctatgcatcatcagatggctgggtattgcctaatagtgttaatctcaacgacttcttcctaatatcatctcaaaaatataatgcggaatcaatgcgtcctgcaaaagtaatgacaataaataatacgtcatacattttatcagaggatatagttgcttattttcctatgagtcattactttaaatccagaatttgtagtagtcttgctttacttgaggaagaagatgtttggccaccagatacttttaactggttggatgcttcatttagctattcaccatatcatgaatttctttcttcagcgattcctgaaaattctcgtgctacacagtcccgtatagatgagtgtttgatagatcctgatggtacaattatcataattaatgatggaagttttcgacatttattatatgatactaagacattgacgttagacagaattagaaagttatataatgatgtcgttgaagagtcaaaccatctcgcgaataatataggtcttgctaataatataaattatcaatgggcttcgcttacagatgagcagtttgaacagctttgttatgacctgatatgtgttcatcctaaattcaattctgagactatcaggaagtatggtaaatcacgttcccgagacggaggaagagatatagaggtttatgatattccccgatctataggtgacaagcctcgaaaatggatttttcagtgtaagttaataaccagttcaaaatcgctttcttcaacaaaattaattgatgttggagatatgcttgatcactatggagctgaaggatttggagtaatgacatctgctccgatcgacgcaacgctttatgataaacttgacgcaatttgtgggaggcgtggtgtagagcagatgaacttttcaatctttgaacttgaacgtacccttagccgtcataataaactacaccagcggtattttggtgattaa

SEQ ID NO: 113365 - DNA, 840 bp, Enterobacter aerogenes
atgtcagtgaagtgcttcatgcggcaggagaaaaaaaggcggcgcaggcgcgtaagcaaaatatgcgatacagaagatattccgcttcctcgctcactgactcgctgcgctcggtcgttcggctgcggcgagcggtgcgggcttacgaacggggcggagatttcctggaagaaacgtaacaggaaagagaaaaggccgcgccgaagccgtttttccataggctccgcccccctgacaagcatcacaaaatctgacgctcaaatcagtggtggcgaaacccgacaggactataaagataccaggcgtttccccctggtggctccctcgtgcgctctcctgttcctgcctttcggtttaccggtgtcactccgctgttatggccgcgtttgtctcattccacgcctgacactcagttccgggaaggcagttcgctccaagctggactgtatgcacgaaccccccgttcagtccgactgctgcgcctgttccggtaactatcgacttgagtccaacccggaaagacacgacaaaacgccactggcagcagccactggtaacaggattagcagagcgaggtatgtaggcggtgctacagagttcttgaagtggtggcctaactacggctacactggaaggacagtatttggtatctgcgctctgctgaagccagttaccaggttaagcagttccccaactgacttaaccttcgaaaaaccgcctccccaggcggttttttcgtttacagagcaagagattacgcgtacagagcacggatctcaagaagatcgtaagaagaaagttaacatgagtgtttttatccctcaaaaagaaggcttctag

SEQ ID NO: 113366 - DNA, 357 bp, Enterobacter aerogenes
atgtcccaagcaactagaaagccatcaactgtaggggatattattctttatgaatacctcgaaccaagtggtttaaaaatcaatgacttggccgaaatgttgaatgtgcacagaaactctgccagtgctttagttaacaataatagaaagctgtctaccgatatggcttttagattggctaaagccttcgataccactgcaaagttctggctaaatatacagcagtctgttgatttatgggaggttactagtagccctcgattgcaagaagaaatagatagagtgattcccgctcatgaaatcatagaaaggaaacacattgttgatagttctgagaagaaacatgctattgcatga

SEQ ID NO: 113367 - DNA, 318 bp, Enterobacter aerogenes
atgcagcaagatcatgaacatgatgattgccgcattcagtttcgagacgattggctataccagttttacaaatatggtaaagccaatcgaaagattccaactgcgattagtgcttcattaggtcgcaagctggatatgctgaatgctgctgataaagttggagatttgcggtctcccccgggaaaccgatttgagaatctcaaccctccattgacagggtattcatccatacgggtgaatgagaagtaccgcttgatatttaagtggggtgaaaacggagtcgaggatttgtatctcgatccacatgattaccgatag

SEQ ID NO: 113368 - DNA, 243 bp, Enterobacter aerogenes
atggctcttgttcgctcaggaaacaaaagcaaggtttttgaggcagatacgaagtttaactcggtttttgacactgaatataagccgggagaaacatgtgaatatgaagggatttataaatgtaccggttgcggtaaagaagtaactatcgcaggcgggaaaacaattccaccacaaaacaaccaccaacatacccccgcgcaagggaacattcgttggcaattgtttgtttatgctcagtga

SEQ ID NO: 113369 - DNA, 249 bp, Enterobacter aerogenes
atggggagacttacgtcgagaatcataccaagtgacatgatcgtcttcgatcagtggttcttccatttcatcagtgatgtaaaccatcttacaggcaaatttaaatgtttcttctttcccaggcctgccgagtacatcaccaaaaccgacttttacaagccctcctatctcatgttgatgagatcgagaaagatcagcatcaacagcactcagatacttgcctgcagcgactttaaaaatgtctcttag

SEQ ID NO: 113370 - DNA, 1437 bp, Enterobacter aerogenes
atgaaagaattgcagccaattgtcaaacagttgatggaagaatctcagcaagcctctcaagcacgtatggcagaagacctcgcacttctcaagcaagttcttgaaatatatgatcaaaaaactgtcgcagaatgcttacgctctgttagtggtaatgactggacaagggaatccattaatcgatggataaatggaaaagtggctcctaagcaacttattgaagttgaagtaaaaatgctacgtaacctgttacctcagcctccctcttgtcatcctaattaccaatttagctttattgatctattcgctggaattggaggtattcgtagcggatttgaatctataggaggacagtgtgtgtttaccagcgaatggaacgagcaagcggtcaggacatacaaagctaactggtattgcgaccctaaggagcatattttcaattccgatatccgtgaaattacattgagtgacaaggctgaagttcctgaacaagaagcttatgaaaatattgacaaaaatattcctcagcatgatgtgctgcttgcgggattcccttgtcagccatttagccttgcaggcgttagcaaaaaaaactctttaggaagagctcacggattcgaatgtgatactcaaggtacgctattcttcgatgttgctcgaataatagcggttaaaaaaccatcaatatttgtgcttgaaaacgttaaaaatctaaaaagtcatgacaaaggtaaaaccttcaaagtaattcaagaagcattagatgagttaggctacgatgtagccgatgcagaatgcacaggctctgcagatcctaaaataattgatggaaaacattttcttcctcagcatcgtgagcgtattgttctagttggctttcggagagatcttggattagctgaacattttactctacaagatattaaaagcttttatcctaaaaaaaggccaatgtttaaagaactgcttgatgatgatgttgataataaatacatcttgacagttaaactctgggaatacctttataattacgctaaaaaacatcaagcgaaaggaaacggctttggtttcggtttagtatctccagaagatgaacaggccgtagccagaacactttctgcccgataccacaaagatggttcagaaatccttattgatagggggtggaataaagctaccggtgaacaaaattttcatgatgaatgtaaccttgttaacagaccacgccgtttaaccccacgcgaatgtgctcgtttaatgggatttgaaaaaccaggtgagtgtaaatttcgcatccctgtatctgatacccaagcttatcgccaatttggcaattcagtcgtagtccctgtctttgaagctgtagctaagttacttgaaccgtacattctaaaagcagtcaacaaaatcgatcaaggtctaaaaaaagctgaataa

SEQ ID NO: 113371 - DNA, 426 bp, Enterobacter aerogenes
atgataataaaaatcaacgcccccgatgaggcagagccctttgacatttatccgcaggccatatatggtctttttgatgagatagaatgtgcattagataaattgaatcgtttgattaaagaaaccgatgataatattgaaagcgaagaactttctgaacttattctacaaaataatactttgacagtgcgtgaactgagtgaaaatctgatcggttttcttgaccactgtacgctacataattgtcttactagtctgaatattcttattcattttctgagatatcctaaagaacctatggtaaatattgtgatgcttgcaggtacaacagacagttcgcaacgtgttagagagaagatatgtaaggcattgcaactcactagcaaaaagcttgctgatcgtaagagggaaggcaatgcagggtaa

SEQ ID NO: 113372 - DNA, 555 bp, Enterobacter aerogenes
ttgctggaaaaggcgatccccttcgagtttgtgaacgaattcccctataacgacgtcaacggtgtggcgcagtacaacccgctgggaaaagtcccggcgttgctgaccgatgacggcgcgtgctggtttgattcgcccattattgcgcaatatctggaactgctaaacgtcgcgccggcgatgctgcccgcggaacctctggcggcgctgaagatgcgccaactggaagccttgtctgacggcatcatggaggcggcgatcgcactggtgcgggaaaaagcgcgtccggcggcccagcagtcagaaaccgaactgctccgccagcgggaaaaaatcgctcgcggccttgatatgttggaagggtacgccgccgacggtaccttgcgtcacggtgagctgaatctggcgaccattactgccgcctgcgctattgcttatctgaattttcgtcgcgtggcgcccggctggtgcgcgacgcggccaaaactggtcaaactggtcgagacgttgtttcagcgatccagttttgcccgtaccgaaccgccagggagttga

SEQ ID NO: 113373 - DNA, 138 bp, Enterobacter aerogenes
atggggggagtcttaggagttaaaggcgcggtgaaagcggtcgagtatgatgcttcgttatcaacaccgtttctctatccggatgatttcgatgtggataagtataagcttaatttcaattttgcgtaccagatttaa

SEQ ID NO: 113374 - DNA, 1404 bp, Enterobacter aerogenes
atggcatcgatcagttccttaggcatcggctcaggactcgacctcaacggtttactggacaaactcagcaaggcggaacaacaacgcctgacgccgtataccactcagcaaaccagctataacgcgcagctaacggcttacggcacgttaaaaagctcgctggaaaaattcgataacctgagcaaggagctggccaagccggagtttttcaacagcaccaccgccaccaaacacgaccagttcaccatcaccaccaccaataaggcggtgccgggcaactatagcgttgaagtgcagaagctggcgcagccgcaaaccctgaccacccaggcgacgattaccgaccaacaagagaaacttggaaccgctggcaacagcgaccgctctattacgatcaccgccggcgacccgccaaaagagactacgattccgctgagcgtcgaccagacctcgctgctggagatgcgcgatgccatcaacggcgccaaagccggcgttaccgccagcatcatgcgcgtcggcgacaatgactatcagctggcgctgagctccaccagcaccggcgagaaaaacaccgtgtcggtgcaggtgaataacgacgataagctcggcgccatcctcaattacgacagcagcagcaacagcggcgcgatgaaacagaccgttgccggacaggatgcggagattatcgtcaacggcaccaaaattaagcgcagcaccaactcgattgccgatgcgctgcagggcgtcaccatcgacctgaaaaccaccaccaaagccggcgaaccgcaaaacctggtgatcggcatcgataaaagcggcaccgccgacaaaattaaatcctgggtcgataactacaattccctgctcgacaccttcggctcgctgaccaaatataccccggtgaaaagcggtgaagcgcaaagcgccaagaacggcgcgctgctcggcgataacaccctgcgcggcattcagtcctcgattaaaagcgcgctcagcgccgctcaggacaacccggagctgaaaggccttggtaacctcgggatctctaccaatcccaaaaccggcaagcttgaagtcgacagcacgaagctcaataaagcgctcgacgagaaaccggatcaggtcgccaacttcttcgccggcaacggtaaagacaccgggatggccaccgaaatccataatgaaatccagaactatattaaagcgggcggcatcatcgagaactcgaccaaaagcatcaacaccaatctcgatcgcctgaatatccagatcgacaccgtttccgacagcattcagaacactatcgatcgctataaacaacagtttgttcagttggataccatgatgtccaagctgagcagcacgggtaactacttacaacagcagttctcgtcccagtaa

SEQ ID NO: 113375 - DNA, 603 bp, Enterobacter aerogenes
gtgagcgatttgtataccgccgaaggcgtgatggacaaaaattccctctggctgcgctacgttccgttagtgcggcacgaggcgttacgcctgcaggtcaggctgcccgccagcgtcgagcttgacgatctgctgcaggccgggggaatcgggttgttgaacgccatcgagcgttacgactcgctacagggaacggcctttaccacctatgcggtgcaacgtatccgcggcgcaatgcttgatgaactgcgcagccgcgattgggtgccgcgcagcgtgaggcgtaacgcccgcgaagtcgcccaggcgatgcagaagctggagcagcatctgggccgcccggccacggaaagcgaacttgcgcagacgctgggtatcacccttgccgagtaccgacaaatcctgctggataccaataacagccagctgttctcctacgatgaatggcgggaagagcagggcgagaatgccgaacgactgctggaagggcacgaagaggccaatccgttgcattatctgctggaggtgggggaatcccgcgttagccagctgcacagccaggcgattaagcgcctgcgcgcgaagctggccaacgaaggctaa

SEQ ID NO: 113376 - DNA, 192 bp, Enterobacter aerogenes
atgaaactgtttgatggtttcaactggtactcccgcgcactaacgtctatgccagacgcattaaatcgtttttgcatcaagcgaagctatattggtcctgaaaaccggtttaacgggtacattaaaaaacagagttactggcctcagtatttaactgagcaggaaatggatgacattatctgttggagataa

SEQ ID NO: 113377 - DNA, 906 bp, Enterobacter aerogenes
atgattaactcaccagttcttgagcttcaggcgttagcaagaaatcgaaacagcgatattattgaagtccttttgaccgctaaaatgatagccgtaaaacttggtttaaaagacctcagtgaatggattgagtatgagatagatggttatcccggagatgttgaagtcccagattacaggtctggtcagggagttatacgttactggaacccctataatgggtggcaaaacatcgagttcaggaatgtacctgcaagtgtcataacgaccgttcagacctttaccctcggtgaatcaatttcatcaatgcaagaggtggatagtgacgatggtatgttgcgtcttgcaatgccgccacatcttgttgaacttattttgaaggggcagcaaatcccatcagaagtttgctggtttttcagtgctaataagctaaagcacattgttacaacggttagaaacaaaatacttaattgggctttagagcttgagtctcaggggattttgggtatgggtctgctgtttactcaaaatgaaaaagatgctgccccaatgacagtcaacaacacaaatatttttaatggggctgttaataacgctggggcaattggtgcgggtaactctggcagcatcaaacaacataatgccattgaagcaggtgattttagttcacttgtccttgagataaaaaattatggtttcaacgatgaagacctgaaagatttgcggcgtattgttgatgaatctcctacgccaataaccaaaggtgagattgagcagtgtttcagtgggtggattggtgccatgacagtaaaggctttaaaaggcggcctcagtatcgcaggtgtttctgcgccggaggttctcactaatgcactgtgtgattatttcaaaatttcagctaaataa

SEQ ID NO: 113378 - DNA, 699 bp, Enterobacter aerogenes
atgagcacatccgaggttttagatttcctaaacaaaaattctggtgcactgaccgttctgttcacagctgttgtgaccatctcaacagttgtttactccattcttacaggaaagctagtttctgaaacaacaaaaatgaggcaagttcagacagaaccaaagatagaaataactatcaaaccttttgattttgcaataaacattgttcgacttcatgtcaggaacattggtcttgggcctgccataaatgtcacatttaatatgaaggtcatttctggtggggaaattgcccaggctctcattgatgagttctctaaagcaaatttcttacagatagggttgaagtatttcggtccggcgcaagaacgctactcacactacactcagttgacacagcaatataatgaaaaaattgagtctattatagttatcgagatttcatatcagagcacaaccggtgttaagtatatagagcagtcaatcgtcgatatgtcagagcttaaaggcgcatatcagctaggaacaccaaacctctattcaatggcaaaaagtctcgaaaaaatccagaaagatatatctcacatcgtcagcggacacaagaagatcagtgctcaaatttacactgcagaagaccgtcaaaaagaggaagaagacctaaaagcgtttatcgaaaagaaccaaaataaacacaatacatga

SEQ ID NO: 113379 - DNA, 912 bp, Enterobacter aerogenes
atgttttggatgccagatttcagcgagttccatcaatttcatgattataaaaacacaggcgcacttaccttagattatctgaatgacagctcaatcattcaaataactgatttagaaggaaaaaaatggcacccttcagactattgctttccaaaagaatttatcgatgaagccttaagtgaatgcgcaaaaaaaataaaaaaaatatttaatgaaaagttaattgttaaaattaatcctgatgattacagagatggttattatggaaaaataaggttactccagcaggaaggtaccctaattgattatacccaagcacagtccttagagagcatcggttttcacaataaaactgagctagcgattgagaaagtaatttcttatgaaaaattctcaccaatattattatcatattatttttcaggattgagggagcgtaatccccttcttagcttcattggctactacaatgtccttgagtattatctagaagaagcccctgctatattaggagcaacctccggcagtgaaagaataaacctaagatctgtactactactcataaccaacactaacagtttacacgaatttctgacaacccattctcgaaatctatcaagaaatatatccaaaaacattatcacatcgtcaggaattgaaattgcaggtgttgtgataaataaagactcgctattactaaataacattagcgattggatttataacataagatgtgctgttgtacactccaaaaaaagtagaaaaggtaaaaccgaagcaatattcgaaccatactcctcacatgctgaaaatattgttaacgcattagaagtaatcaagtggctggctcagagatgcatcctcaaagatcttgaattgactacccagccagcccaacaagaaacaccttaa

SEQ ID NO: 113380 - DNA, 915 bp, Enterobacter aerogenes
gtggaatatttcagcgacaaagaaagaggccccgttcaacggataaataacgaagtaactactaaagtctgggctggacttgtttcatacattaatgttctggcaaacaacggatacttcggtaaagactttcctgaagaatgtcccgatgggcagggatgcgtaggcaccgagctcaaagacctcaaagccgcgttacaggctgagatcccaaatcttgactggccattggcaacagaagttgaatcagaggaatcgtcatcttggtctagggagatgataccttttgttccaaactatctggatgtaatggatttactccagttctgctataaacatgtggccatacctgttaaagggagctatcacagctatttcaggcattaccactttgacgattttcaaattgaagctggtaaagaagaatttagggaaaaggtaaacacgatatttgccagaaatggccttgcttacgagcttcttgtatcaggtgatatcatccgaatgctaagcccggaactgaagcaaatgatggcaagcataagcattcctgtagagaaagagttacgcagcatgctcatgcgcgcgaatgaaaaaataatcaactttgatgtcaccattcgttatgatgcacttaaagagctttgggacttttgggagcggctcaaaagcatatcttatccgactgacaaaagagagtctgtgaagaagttgcttgatgcggcagcccatacatctgaattcagaacggttttagaaatagaggcaaaagcacttacggatattggaaatagttatttcattcgccatactgaaatgaaacagatcaagattcaggaaagtgatcatatcgaatatctatatcagcgcatgttcagtttgatccatcttttactcaaaacacttccaagttga

SEQ ID NO: 113381 - DNA, 1077 bp, Enterobacter aerogenes
atgggtaacttaagacgtaatgctttcaaaatagtagttacgctggataataattcagccaccatcccatctgaatgtcacaatctaaagtacaagttctcaaggagttacttcgatacattagagataaatgaaaataccatcaccatatctggcgacaggtcggacaaacctaatttcgatgaaatattcatcaacaaccagagtgagatttattttcaaatagtaaaatcatacatttattattgcatttcaaatgatagcatttgtgacattttagagattagatgctacgataaaaacaatatcttagaaaaaaaatacacccgcagtggaatacgtaacctccgagcgaggcataacacttccagccttaaaatgataaataaagctaaggctgccgtcatttttgacgcaacaacagatagcactaaatatttttacgccatgacaaccttagttcgttccatttgcagtgacgataataacgatatatttgaaaagttatggaagtcttacaattcaatatatagaagccttagcacaaagaagcaagagtggcagtgccttgaagatatggggaggttaatggttacaacccccacacaatttcctttagctatagatgtcgtcagaaatcttacaagcgctgatatttcagactccattcgctggagaaaaatgttagaaaacaagttcatcacgagaggcgggcaaaacaatcgtgagagcaatttttctgcattcctaactaaatacaatgattttagattgaacgaactatcacttaacagcatagatattgagaaaaacttctgggtagatcaaaacctgaaaactgcgacttccaccgccatacaaaataaaatcgccgctaacgccacccaccacgctgaacttgtggatgttttatgcaacaattatgcatatttcttaagaaataaaacactgcatggagaacaagccgatcactcatttcgatttatacccgacaacaaggaagaaaagtcgttaaaattcacttccaaaatactctttgcagtggtgtgcgacttaataaacagtcatacactttga

SEQ ID NO: 113382 - DNA, 456 bp, Enterobacter aerogenes
atgagtgaattaaccgcgctgcagaagcgcctcgccggtctgattgccagcctgtcaccggcggcgcgtcggcaaatggcagctgacattgcgaaaaagctgcgcgccagtcagcaacagcgcattaagcgacagcaggcacccgacggcaccccgtatgccgcgcgaaagcgccagccggtgcggagcaagaaaggccggattaagcgcgaaatgttcgccaaactgcgcactaaccgctttatgaaagccaaaggcagtgacagtgcggcggtagtggagtttaccggcaaggtgcagcgcatggcacgggtacatcactacggccttaaagaccggccaaaccgtcacagccgggatgtgctatatgatgctcgtcctttgctcggatttgaaaatgtagatctagccatgattgagcaaatcatacacagcgctatcagcaatgaatggtga

SEQ ID NO: 113383 - DNA, 885 bp, Enterobacter aerogenes
atgaaattttatactccattaagataccccggcggaaaaggtaagctatcttactttttgaaagatgtcattgaacaaaactcgttgaatgatggagcttatgctgaaccatatgctggcggggcaggggtagctttagagctattattagaggagtatgtccgaaagatttacattaacgatgcggatttagcagtttattcattttggtcgtctgttattgatgatacagataacctttgtaagcttataagttctgcaaaaataaatatggaagagtggtgttttcaccgttatgtgatttctaatccttctgaatttacaaagctcgaaattggtttttctgcattctttctaaatagaactaatcgctctggtattttaaaggctggcgttatcggcggtaaagctcaaagtggaaagtggaaaatggacgttcgatttaatcggtgtgatcttatatcaagaattgaaaatatagctaattataatcagcgaatagttgttacgaatcttgatgctttggattttcttgatgcgttaaatttcatggatagtgtaggtaaggcagataaaaataaaacgcttttatatttagatcctccatattatattaaggggcaaggcctatataggaatttctatgagcatgatgatcatgttttggttatgaaaaagcttagagggataaatttccctaaatggcttgtctcttacgataatgctaaagaaattaaagatatctatagtggttttcctcaggttgaatactcattgcaatatacagcacaacaaaaaaaatctggggaggaagtgatgatattttctcctagaatggcgatccctgacactcttaaaggtgtctctatgccaatttccgcataa

SEQ ID NO: 113384 - DNA, 1500 bp, Enterobacter aerogenes
atgaatcaaataaaatcaatgaatatcaataagttgttattagatgttgataaccctcgtttccctacatcagcagaaaaccagcgtgatgctatagcaaaaatgcttgagttacagtacgaccgtatctatcgcttggctaaggatattgttgccaagggactggatccatctgaaaatatcttagtctatccaagtgaagaggaagacggatttttcgtggttgcagaagggaaccggcgagttacagcactaaaacttttattatctccgaaattagctccgagcgaaaaagcaaggaaagcttttgaaaaacttaaaattacgcaacccaacgatattaaaattataaataactgcgttctctttgatgatgatgattacgaacattgggttaatgtgaaacacactggacaaaatggtggggtcggtagggttgagtggactgcaccagaaaaagcccggcatatggctcgtatgggtaagcagtcattgggcaaccaagtacttacttttttagaattaaattctgacttctataaagatataatagataaaaagagattgttaagaattacaaacatcacacgtctttttggtgatttaaaagttagagattactttaacttaaaaagtataaatggaatattatattcgtttcagccttatcaacgttttcgtgaacagcttaaaaacatcttgactgtaatggttgaggaggatgaaaaaggtaaggcttgttttacagttaatagaattcgtagtcaggatgatagggttacattcattatcgaacaaaaaattaaggcatctgaaaaccttctgaataaaccgtggagcttacttgatccgtatcccggtgtttctgaagatgatggcaaggttgaattagaagaagatgattcccctaatactaaaggaggtggcgttccaggaggtagttcctttggtgggaaagatgaaaaggatgatgaatattttaaagatgatggtgaaaaggaatctaaacctgagcaggatgaagaaccaaagtcaaaaggcaagggtaagaatccacctaagatggatcgtaataatttaatcccttcttatgtgaaacttaattttagaggtcataaaaagtgttctcgcatattcaatgaacttaagagccatttaacctttgatactacccccaatgcaatttcaatattattgcgcatatttattgatctctcagtaagtgcttttatcgaagataataaaattgaatcgaaggatccgaatagaaacccagggcttcatgataaggttataatgtgtgctaactttcttcgtgataataaaaaattaacaggaagtcaatgcacagctgtaataactcactctagtcaaataactaagaacaatggttctttgcaacagtatgtacataatcctcatttgattctttcgaaagaggctgtgaacactgagtgggataactttgagttgctgctcagccttatctggagtgactga

SEQ ID NO: 113385 - DNA, 339 bp, Enterobacter aerogenes
atggctgaaacctttattaatcctgataagccgtgtattcattgccgctcacttatccgttatgtgtcgtccggtcgctgtgtagagtgctctaaaacacgtagacagccgcctaagcctaagccagagaatgcacgtgtgaccgcttcagcagcaagagcaccgtttcactctgaaggtggcgataaccgaaataacatcattgtgaagctgtctgaagccgctttagatagccttgaccgtgtaggctatgagttggttcagaaataccgtttggcaggttacacgcaagagagagtaaggatgattgctctgtctcacctgcttgaagccgcttaa

SEQ ID NO: 113386 - DNA, 261 bp, Enterobacter aerogenes
atgagtattccaatgaaagggctgtcaaaacgtggcagctataatcatcttactgactcaatggaattcaattatttcaacggtcaagcagaaatcagtgaatcaacttataagttgcttgcttcaggtaataagcctaaaccaactgtgaagccagctaaagcggtcaccacgtacaaggtgaagcctaagccaacgattgaacagcaaagagatgcagccttgaaagaggctattaaacagatggtaagcgggggctga

SEQ ID NO: 113387 - DNA, 576 bp, Enterobacter aerogenes
atgaaagatttagcccatgctgtaaaaattgaatcacccgttgcaagtatcagtcatctgttaccgttcgaacaaaagcagcatattgaaaagctgtatttcccgaaagtacaacaggcttctgaaaagatgtctaaaacagaatctgaatatcaggatgctgtagaatctcgttctgtgcttattcaacaaaagaccgctgaatatctggctaatccgtctgaacgccacggctttaaggttcagccggtatatcccactaaccaacagcaggtgattcagtcaatggctgaacagggctacatggtacacagggtatctattggaatggttacctttattcgtatgccaaagaacgctaaagataatccttatcaagaaattactgataaggctaaagcagaagctgaatcaaccgttgataaggtgattgagcgtttgaaggtaaaagcctctgaagcaattcaccagcgaaacaagattgttattgaagcccgtaaagctctggattcaattaaatcatttgaaagctatttaaacgtgattgtaaccgattctgaagaggtagccgaataa

SEQ ID NO: 113388 - DNA, 1344 bp, Enterobacter aerogenes
atggaatttgagattagtcatgaattcttacggagaatgaaatttaaccttatagaccgtgataaaaccatgcattttcatggcaagtgccctcactgtacaactacgattgagtatcacgaagttcacacttcttcaactacacttccaggaaggagcatcattattcctgatatagaagaggatggagtgatgattgggacctgtgataaatgtgctggaatatttaaagttaacctcgtaaatccagactactctggacctagtagcggttgggagaaaatagatttttatataaattctgacaatgatgaagccaaactgttaaaatacaaagatctaccactgctaacagacttcattgataaaaacactgtattaacagagaggaatacggattacgatttttacaaccaccctctttacatatgtgatgactgtgaagagaatctggaaataatttcatttgagcttctaaagagcaaatgggaaataatagcaaaaaaacactgggagttcacaaactggtccctctctcaatctagagggcttgcgccaaataatatcgtaattaagtttccttttgaatgtaaatgcggaaaaaaacatgatgcaaattttgtaagtagatatcaagaaaataactcattcgaggcacaagcattctcaattgtgaatatatttggttcaagagacctatcagatgtgatttttggcgtttatacgaaaactaccataatgacatggctttataaattgattgctagatggaatttcctttatacaaaaatctacataatatctccttttgttggtcatcagttccttaaaagccaaggaaaagtagattcttggcttaatgtgctaaaccgtttaaacccagaaaatacttccatgttagtaaggaatggtcaatctaaagtgtttaaagagtccttttcaaaaacaaatgaaataagctatgagcagatggaaagttttaacttgggatccgagttgattggcgaattaaaaaataaaaatgatttccatgccaagatatactgtgccattagcaatgggagatgtgaaataatgaatggctcgagtaacctagttgaagggaaatcttatgaagtaattaattttgacgtgatagactcttacacaaaaatatttgaaaaatttttaaagcctctaggcattgataatgtatcgcatgatttatcaggtttaagatcaaatgaatattcgctgatctttgatgaaaataattcattcaatgcatttacacatcatctttatcccgaggattacatcaacttttcaatttttaacatcaatcccacttcatcgcgacgataa

SEQ ID NO: 113389 - DNA, 1083 bp, Enterobacter aerogenes
atggaaaaaaggttatcaggtgagactgactcggtaatagatatgttatttcttgagcttagatgtacaatcacactcggatggaaggagccagaatctaatgatgatataagatccattagttatcacaatagcacttttaataatctcctctacaggaaagctaattttctagcatctaatttcggaagcaatcgatacaatatgccttattggctgcggctcagtcaactcagaattatgagtcacataccaaataagttgatcaatgaagcacagattgacaagatattctttttccctatccaccggagaggcctcaatgcaacaagttgttcaatcaacggacaaaaatacgttacagccaactttggactcaatgggatccttcatgaactgaaccgatttatttatcacttccagtcaacagaaatttatagcctggagaatagagagaagcgtgcgttacctgagataattccagtcgtgttgtattttttaacatcatgtagcccaaggtatttctatccacaatttctttttggcaaatcatgttggaaagtaaaaacttttactgattatcaacttgatttcataatcctacatgaaatatcccatcatatccttgaacaccctaaacgagtcagtttgataaaggattatgttgaacgtcagaacaaaattaagcagtttgaatatgaagccgatacattagcaaatgtacttatggcttcgtcgattataacggagggaaatgacgaaccacgaagtaagcattcagtcattgtttatgcggacgcaattgaggcggtcgagcttctttttgaacatatgaacttcattgaagaaatggaggagatcatacgtcatagatttggggcatttataaatatttcatcgactaaaggtgcacatccggaagcatatactcgcctcgagtattttcatagaatttttgataagaatagacaactctctgaaactgcactgtatgcaaggaatttatataaaagaatgaccaattattgccttgagctttctaatgacgaattggcgtcattgttgagagattatcttgtctga

SEQ ID NO: 113390 - DNA, 705 bp, Enterobacter aerogenes
ttgcttaatctaacggtcggcaccggttacggaaacctggagactattaatgcttcggcaaatactgcagggttgaatctggatgccaatgtgggggggacaggtaaagggattctttatcaactcctgactattcttcctggctcagctgtgacaacaacccttattacgcttttgggattggatggtggtcacaacttaacggtgcagggaactggtgctgcggataccttcaaggtcctgggtaacacggttgtttcaggaggtaatggggcgaatctctatcaactgaaagcgagtaccatcaattcgggtgtcaccatttcggattttaatagcggtaaagatagcatttttgacactacttcaggccttactattaataatgacgccacgcatacccaggtagctgattatggtgtacgtacgacggatgttgttgacgcgttgttgggtacactggttggtggtgtggttggcggcgttgtcggcctgttagggcaaatccttggtattggtggtactggtgatctcacctcgaaagttggggtggcgtcggtggtctggacagataactcccatgaagccagtaactatttgatcattgataacaacaacgaccatactctggatgcgaacgatacggtagtgtatctcaacgggcaaacccatcagcagttggttgatactttgcactatgcataa

SEQ ID NO: 113391 - DNA, 1011 bp, Enterobacter aerogenes
gtgattccgactccgacagtgattccgactctgacagcgactcggactccgacagcgactcggactccgacagtgattccgattccgacagtgactccgactctgacagcgactcggattccgacagcgactcggattccgacagcgactctgactccgacagcgactcggattcagacagcgattctgactccgacagtgactccgactctgacagcgactcggattccgacagcgactcggattccgacagcgactctgactccgacagcgactcggattccgacagcgattctgactccgacagtgactccgactctgacagcgactcggattccgacagcgactcggattccgacagcgactctgactccgacagcgactcggattccgacagcgattctgactccgacagtgactccgactctgacagcgactcggattctgacagtgactcggattccgacagcgattcggattccgacagcgactcggattccgacagcgactcggattccgacagcgattctgactctgacagtgattccgattctgacagcgattcggattctgacagcgactcggattccgacagtgactcggatagcgacagcgattccgattctgacagcgactcggactctgacagcgactcggattccgacagtgactctgacagcgactcggattccgacagtgactcggatagcgacagcgattccgattctgacagcgactcggactccgacagtgattcggactccgacagcgactcggactctgacagcgactcggactctgacagtgattccgattccgacagcgattccgactccgacagcgactcggactccgacagtgactccgattccgacagcgattcggactctgacagcgattcggattctgacagcgactcggattcggacagcgactccgactccgatagcgattcagattccgaaccgcaggcaaatgatgatacgcatacggcagctatcgataccgtag

SEQ ID NO: 113392 - DNA, 372 bp, Enterobacter aerogenes
atgaccaagaaaaaaccggctctgcgccttatcgcaagcgcagtgctgtttgcttgccttagcagcagttcggcgtttgcagccccagccagtgcgccgctttcaccgctgatgaagcaattaaataacggcaattggctaccacaacaggaagcgcaatcgctaagcgatgagctctattatcaggatgctatccacgcctacattcagacgctgcctctgttgaacactattggtttacgcgatggttcagaagcggcattcggcaaaggctacaacgtgctgccaatttggaaggagcgtatggacagccgggcggtggtgcccacgccaaatggtgatgttatctattccatgagctactggatctga

SEQ ID NO: 113393 - DNA, 468 bp, Enterobacter aerogenes
atggcaggagatgttaggatatattatcaaatcgacgataaggagtattcaatagaacaatggttgaatacagacactccagatatcagcgatcccgaagtattggaggctgttatgagtgtagtccctctaggcagggctcccagtatattacgtgtcattgatattggttcgaatggtaaaccagtggagtatgatgaatatcttatcaaagataagttagaaataccgttcggattggtttttaagaaagtaggatatgaaggatggttctatttggctgatgccgagaattatggcggcagatcaggaaccagaattgcgggaaatactattatgttagaagctaattcacgttatgcatttcccggtaaagacaatttcccggttaaagccgttattgactgggacaggagaagtcttaaggccggagaaaaggagttttatttacatccttgctcaccatag

SEQ ID NO: 113394 - DNA, 264 bp, Enterobacter aerogenes
atgcaaactgcaaaatcaaatagccgcttgcgctcagcggcgctatttatcttaatttacgcaatatgcttggcgttagcgcttttcgtccgcccgatttggcttctcattgaaaaactttcttatcgtattgatgatgtcctaaatgctacaggtattgccctggctgatggagagcttgatcctgctggactatgggttatttttggcgtccctcttttagctacttttgttatttattatttgattaaaaagttattttag

SEQ ID NO: 113395 - DNA, 522 bp, Enterobacter aerogenes
atgatccaatgtgaaatggattacagccaggttagtgctgatggtaagacggttaaactgacatgctatggagtcggcacatttgatgttttttcaggtgtgaaccctacaacaaatattgctgaatgtgcttttaaagataaagctgcgcttccccctggcacctattggattgttccccgtcctgtaggcagcttcgctaatagggttcttagttcgattaaggattggcgcaacggcacggatcatagtgagtggtttggcctgtataacaattcaaccatgagtgatcaccttttcgtaaatggtgttaatagaggtggatttcgcctacatcctttacgtccagacggttctggggagtcctggggatgtatcacgtttcatcaaattaaccagtttcaggtgctaagaagagcgttactctcaacaaaaatggttacggttaaaactggggtttcagcatacgggcgagtacttgtcagagggagcactgattatgcaaactgcaaaatcaaatag

SEQ ID NO: 113396 - DNA, 279 bp, Enterobacter aerogenes
atggctaataatttgtttgttacctatgatcttattaaaaccaaagattatcccgccgtgcatgaagctatcaaagcattaggtagttgggctaaagttacagagtctaactggtatgtaaattcgatttattctgcacaagacgctgctaaaaaagttagagccgctatggatagtgacgataagttaatagttgttgatgctacaaataactcagccagttggtataacttaccagttgcagtagaaaatcatattaaagatcaatggaataaatga

SEQ ID NO: 113397 - DNA, 282 bp, Enterobacter aerogenes
atgataactgtgataattgagtatattttcattttcttgtccaaaaaacaattaattaagaatgccagttttggtgttgttattgtcagaggaaaaagtccatttacttacagtctctcccttgaagtcgatttcaagagttttagactgagtttgggaaccgccagtaaacagccccacaacaggaatgaaagtcgttgcattgaactgattgttagacatgaaatatttccattgctcatttccgtcatcgagtgtggttcttgtatcaggctcacctaa

SEQ ID NO: 113398 - DNA, 1158 bp, Enterobacter aerogenes
atgaagggtatgcggaagattcgcaggggtaagaactttgctggtgtggtccaatacgcattgaaaccgggagcacatcataaatgcgatccagtcgtaatcgggggcaatatgctgggtgacaccgcccatgaaatgattgcagagttcgatagcaccaagcatcttcgccaggatgtcgcaaaaccagtttggcacaactcgcttcgcttacctgatggtgaatcattatcgaatgaccaatgggcaaggatagctgacgactacatgaagagaatgggattcagtgatactcatgttcgttgctatgtgcttcatgacgatccggctggtcagcacatacacattatcgcaagtcgcatagacctcaatggagggaagctctacttgggtaggaatgaaaaccttatcagcacacggatcattagtgaactcgaaatcgctcacggtctgacagtgaccaagccagccccttccattacaccaaagcaacagaagcgaagaaaagtttcccgtaatgaacagatgcttgcagaacggactggccttccctcccctaaagaagctctacaacagatacttgataaaagtttggcagatacacctgatcttttaacttttataaaacgactggaagaagctgaagtcggctggacggctaacattgcttctaccggtaagatgaacggcttctcattcgaataccgcgatatcgctttcaaggcatccaaacttggaaaggcatactcttgggtaaatcttcaaaagcagcttaactacaacccagatcacttagaagctctgcgaacaacaaagggagttatccctgctcctgctcctgctcctgctcctgctcctgctcctgcaaaagatgtttcaacaacggatatttcaaaggaaagcataagtgaaaaaattgctgaactcgaactacgactcaaagaagacagaagaaacgaaatcgtagaaaagattcttcaaaaaaactcagtacaacagcaaaagcatctcaggcttatcggctggattccatttctcagaaggctcgcagagcttctcagaagctatgggaagtccattcttcacaaaacccacacacacttctcaaaaattcatgtaatccaacctttaaaaaaggcgagaaaaattcgtttatag

SEQ ID NO: 113399 - DNA, 279 bp, Enterobacter aerogenes
atgattgattttgaacaacacaaaaacattatagaagagtttgttgaacagtactacccactggcgcatagcttgatggttgatagctatattgacccggaagcctattactcaaattatcagatgctactagaagcaataaacactctcccggagcatccagaattctttttagaatggttactaaaagttaatgtagctttgtatattaatctgatggaattgatcgtcatcaccagaactgttcacaacgtctttgaacaagtctcgcctgcatag

SEQ ID NO: 113400 - DNA, 420 bp, Enterobacter aerogenes
atgaaaaaaacagaacaaccaccatttctggcaattgattaccgtattctagcattagatattaaaacagacgtcaacgaaaaaaccatcgatagcagcaccattcttaaactcaaactagtctattcctatctcctggggttctccaaaacttgcagcgaggtttatccagaacaggcaaaaataggtaaaacattgggtatcggttctcggcaggttgttgggagattaatttcgttacttgagtctctgggatggatttcaaaaacatcgagaactggaacatccaatctatacaaggtgaaaaccgtcgagcaaattttagaaggtattccgcgcgaggttgtagaagaggaaaagaaatatcctgaatcaatcccagatatagtattaattgaagatgatggtttaccgtggtaa

SEQ ID NO: 113401 - DNA, 570 bp, Enterobacter aerogenes
atgcaaaataatcaacgatgggagccagactggtttctacagtcactcctgaacaaccatatcgacaaactggtagagcgctattcctgcctgcgggcattccgaatagatctgttttaccaggatcataccgctaagtatttcctgcgggatcaccagcagctcggatgggatatccgaaagctgatgaaccatgtgatgcaactcgaagcgatggtcggtttcttctgggttatcgaatggacagaagaccatcactatcatgcccatgtcgtgttctggctggatggtagtaaaactcagaatacctatccttgggcgcagcaggtcggtttgtactggagtgatatcactgaccgggatggctggtatcaccggtgtgagtttaaagagcattacgaagccaacatcaacattccggtacgttacagcgacccggacagtatcaccaacatccgtcaggtactggcgtatatgaccaaaattcaacaaaaagaggggatgccgttgtttggttgcaacgaagttccaccccgcccaccgacaggtcggccacgacgcaatctctga

SEQ ID NO: 113402 - DNA, 792 bp, Enterobacter aerogenes
atgaaagatgattattattggtgggatctggaggggactgctttcaaaggggtactttatgattcgattaatacatattttctgtatgatcattcctacgctgattggaatgagttctctaaagcagatccccatatggcatatgcgcatttgacctatattagatttaacgcattagaacaacaattcgtagatttaagagtcatccctcaaatgctaggggttaataatttgccattggtttcaaaagtaaaaaatataaatcgatatgattggcttaaggcaattgttgatttggcattatttagattttcaagccttcgcgatataacctttcattttgttaatgaggttttagaacttaatatcccagattactctttaaatattaaacaattcggtaagattattaaagacactcatgctgatattttgagtaacttaaaaataattgattcctctggtggtcctctacgtacagatagaaatacaagagctcataagggattctgtaatttatacactgatgatgatgagatgtttaagaatatgtcgtggatagagggctatggttcacacctagaaggatatgatttaaatgtaatatatgaaaaatcaagagataaaatatacgatcttgtagttaatgaaatacaaagcgctctctcttcttgtaaaaatattgtcgatgagctttatttttattatagagacaggcatgaagagctatctataaagtccagaagtggtgtatctgcacatttctataattatcatggaaagaaggagtaa

SEQ ID NO: 113403 - DNA, 1242 bp, Enterobacter aerogenes
atgaaaaaatatgatcaggttgataaggcttttgattttttagtaggaaaggaaaatcggcaagaattttttactattgctgagttagcagtggctactggttggaaagttcagacatgtaaaacatatccaactaaaagatggagtaaatatatatcaagggatggcgctcaatataccacacttggattaaaatacttaagtaaggaagacttcagaaatcttcatagtcagaagagcgttgaaccggccaaaagtgagcgaagcattaatttaaaaaaagcaagagagttcgctatgcttgctgtttctgtttacaataatccatttacagagtttaaaactcatggttttatagttaatgtggttatagcatatacatcattatttcatgctatattcgcaaaaagaggtgttgattatttttacttgaatgatgatggctctcataaaattgttgatggtgacaaaaaagcgtgggagctgaaaacctgctgtgaaaaatattggcttggaagaaataccccagaaaaatcgaatgtgttttttttaataggtttacgtaatatcattgaacaccgaggtctccctgaaatagatacactaacttttggtgagtgccaggcttcaataaataactttgaagatattctcattaacgaatttggtgatgaaaatgctttaatggtaaacttatctcttgcaatgcaacttacaaggatgtctcagcaagcgcagatcgacgctttgaagaaagtccaatcaaaaaatttcactattgttaagaaatatatcgaggattataaaagagacttggagcaagagatattagaaagtcaacaatatcgactcagagctttgttagtccccttgataggtaaaaaggcatcaagttctgatatttctatagagtttatcaatgttaataatctcaccgaagatgaacttgagaagtttgatactggtattgctttcatcaaaggagtggaaaatcaatttaagttgaaacctaaaaaggtagttgagttggttcaaaaaaaacataagtcttttaatcttagtactcatgcaaagttttggaagcattttgatgtcagaccatctcatgtagataaaactctaaaagggaaatactgtggttatatcgaaggttttgatgggtatttatataatcaggaatgggtgcgtaaaatactaagtgtttattctgatagtaaagagttggataaggttttaggctga

SEQ ID NO: 113404 - DNA, 471 bp, Enterobacter aerogenes
atgctcattatatattttttagcaattcttccagtaaggaatgctatatcttcaatactgggcatccgtttatctattgatagttctacttcttcaccattgcgaatatgtgatatttctgaaagattatctaagcacattgttaaaatatcttttacggctgtcccaattaaagtacttccagcaaagccgtatcctatattcaacaagttattgggattttgcttgaggatactgtcgctaatatcatacaagttgacaggtaaaggaaataatttaggtaacgcgtcagtaattggttctgcaccactacacacaagtgaatctgaaacagcccaaatcccaggaaaaaactcatcttcatcagtattcaaccaacatataatcgatgtcattaaaatccacctcaagcatattaataaagccattatacatcatcagtatcaaatcacccagtgctacattttctag

SEQ ID NO: 113405 - DNA, 993 bp, Enterobacter aerogenes
atgtccgataaaactgagtatttttctaagtttttcgaaattgagaagagagaatcattctcacctaatcaagagatcagtcctgataattttaaagagttggttggctactatgagcttgatgagaatgtttcttgtcaagtgaagaccaaaagagggttttgtcgaaagaatcatatgatcggctggttgggcgtaaccgtcgatggcgtagaggctctcattggtgggcattgtgcacaaacatacttcaaagcggattctagatttactttagaaactaagcgtatcaaaacagaattagatcgtagagaatacgtcactgaattgaaggtatataaagataactctgatacagtttcaagagaactttctgatttaagaatcaatcttatttctgttagaaaaataattgatgttatttataaaactatgccagattgtgtagtacgttttctgcaatcagcacaacgcactaataattgggtaattaatgttgatgttctttaccctgcaaagaatgaagatcaaaagccaacatggcatgtacacacattgcaatcacttaaatcagttagtactactttagaagttatcagtttgattactagggttaaacatttaattaaaacttttgatttgtttcttgaaagtgatctctctgaaatgccaactcctaaattaaagtattatgtcaatgagttacgtgaaaagaaaaattacgaacagctatatgctaaatttatcactgaaactaagaaattcatagaacctaaaaacctagacctacttctgtttatttgtgatgactatgaagataagtttttaactgttagatcgatttttggaataactggttctaaagttagttcagatgcgtatatcaatctccgaattaaaaggattgaagatagggttagcaaacaatttaataattatcctgttcggtcaaatacaaatgctattaaatataaaaacaattcattaggttga

SEQ ID NO: 113406 - DNA, 843 bp, Enterobacter aerogenes
atgacctttaaagttattgcccttgatctcgatggcacgctacttaccccacaaaaaaaaatactccctgaatccttactggcccttcagaatgcccgtaagtctggtgcaaaggtagtaatcgtgaccggacgacatcatgtagcaatccatcctttctatcaggcgttagagctagatacacccgcaatatgctgtaacggggcattgctttacgattacataggaaaacgagtacttacctctgatcctctacttccagatcaggctacgcaacttgtaacgctactagatactcataatgttcatggcttaatgtacgcagacgatgcgatgttttacagtgaagtaactggacatattacacgtactgaaacatgggctagaacgttacctgaacatcaacgcccggtgttcaaacacgttgattctttaggggctactgctcgtgacgtagataagatctggaagttcgccctaactgatagtgatatcgataagttgaaaaactttactcaagtgattgagagggagatcggccttacctgtgaatggtcatggcatgatcaagttgatatcgcccaaacaggcaatagtaaaggtaaacgccttacacagtgggttgagtcacagggtttatcaatgaaggaagtgatcgcttttggagataactttaatgatgtgagtatgctacaaagtgcgggattaggtgtagctatgggtaatgcctctgacgaggttaaagcatgtgcaaatgttgtgattggtactaatactgaatctagcattgctgaaatattaaattgctactttaataatgaaacggtgcaatgtattccgtaa

SEQ ID NO: 113407 - DNA, 570 bp, Enterobacter aerogenes; identical to SEQ ID NO: 10920

SEQ ID NO: 113408 - DNA, 720 bp, Enterobacter aerogenes
atgacaactattaacaagcatgggttatctagaacaattcctgaacctgtaaaactggaggtaaggcagcgctgtggcttcggttgcgttgtttgtgcttctcccattgttgagtatgagcatgtaattcccacatacgctgatgcaaaggagcactctccaaatgcaatagcactactttgtcctacgtgccatgcgaaagtaacgaaacgtctttactctaaagagaaaataattaaagcaatggaatctcctgcagccttacaaaaagggaatgtggccgatatattggacttttctgataggcatccaacaataatatttggtggtgcgacgtttgaatcctgtactgtaccaataatgtttcaaaatgagccattgttaaccattgaaaaagaaaataatgcttttcttatttcgggtaaattttacgatagtcaaggtattgttaatcttgaattaattaagaatgagtgggtttgtagtgcaaggcattgggatgttcaggttgtcggtcctagaataactattatagaaaaaaggaaaggtcctcgtttaattattaaagttgatgcgcctgaaagattgattgtggaaagattagatatgttggttaaggggactcggattgtaggagacgaacacaagctaagagtaggtccacatcaatttcacaactgtggagtttcaaattgcaatattggtttctgctttggctaa

SEQ ID NO: 113409 - DNA, 924 bp, Enterobacter aerogenes
atgaataaaaaatttaccgatgagcagcaacaacagcttataggacatctcacaaagaaaggcttctatcgaggagctaatattaaaataaccatttttctatgtggtggtgacgttgctaatcatcaatcttggcgtcatcaattatcacaatttttagcaaagttcagtgatgttgatatattttatccagaagatctatttgatgatcttttggctggtcaagggcagcatagccttttaagtttagaaaatattctggctgaagctgtcgatgtaataattttatttcctgaaagtccggggtctttcacagagcttggtgcgttctctaataatgaaaacttaaggagaaagttgatttgcattcaagatgcaaaatttaaatcaaaacgtagctttattaactatggtcctgttcgcctgttgcgtaagtttaattcaaaatctgttttgcgttgtagttcaaatgaactaaaagaaatgtgtgattcatctattgatgttgccagaaaattacgattatataaaaaattaatggcatctattaagaaggttaggaaagaaaataaagtatcaaaagatattggaaatatattatacgcagagcggtttctattgccttgtatctatttactggatagtgtcaactaccgcacactgtgtgaactagcttttaaagcgataaagcaagatgatgttttatctaaaattattgttagatccgttgtttctcgtctaataaatgaacgaaaaatacttcaaatgactgatggttatcaggtcactgctttgggggctagctatgttaggagcgtctttgatagaaagacacttgaccgattgcggcttgagattatgaattttgaaaaccgtagaaaatcaacatttaactatgataagattccgtatgcgcacccttag

SEQ ID NO: 113410 - DNA, 780 bp, Enterobacter aerogenes
atgagaaccatttaccaaccttctcgagaacttaaagccttacaaggatgggttctacgtaacattttagataaactgtcgtcatctcctttttctattggatttgaaaagcaccaatctattttgaataatgctaccccgcatattggggcaaactttatactgaatattgatttggaggattttttcccaagtttaactgctaacaaagtttttggagtgttccattctcttggttataatcgactaatatcttcagttttgacaaaaatatgttgttataaaaatctgctaccacaaggtgctccatcatcacctaaattagctaatctaatatgttctaaacttgattatcgtattcagggttatgcaggtagtcggggcttgatatatacgagatatgccgatgatctcaccttatctgcacagtctatgaaaaaggttgttaaagcacgtgattttttattttctataatcccaagtgaaggattggttattaactcaaaaaaaacttgtattagtgggcctcgtagtcagaggaaagttacaggtttagttatttcacaagagaaagttgggataggtagagaaaaatataaagaaattagagcaaagatacatcatatattttgcggtaagtcttctgagatagaacacgttaggggatggttgtcatttattttaagtgtggattcaaaaagccatagaagattaataacttatattagcaaattagaaaaaaaatatggaaagaaccctttaaataaagcgaagacctaa

SEQ ID NO: 113411 - DNA, 429 bp, Enterobacter aerogenes
atgacgcgtgcgctggcagtagtggtggcgctggcactcgttgcgctgggctggcagtcgtggcggcttaacagcgccagccacaccatcgaaacgcagcgcgcggcgctgaaaagtaaagcgcaggaactgacgaagaaaaacagccagcttatcagcctgtccattctgactgaaaccaataaccgggagcaggcgcggctctatgccgaagcagaacagaccagtgcactgctgagacaacgacaacaccggatcgaggaactgaaacgtgagaacgaggatttacgccgctgggctgatactcctttgcctgctgacattatccggctgcgggaacgtccggcactcaccggaggtacagcttaccgtcagtggttgtccgcgagtgacgccgtgtcggctggatcaggcaacgccgcgcactaa

SEQ ID NO: 113412 - DNA, 447 bp, Enterobacter aerogenes
gtggctgaactgcagaaggtggacgactggcttagtgccttactggcgaatctggaaccagtcgcaagaagccgcatgatgcgccagctggcgcaggaactgcgccggacacagcagcagaatatcaggatgcagcgcaatccagatggcagcagttatgaaccgcgcaaggtcacggcgcgcagtaaaaaaggccgcatcaaacgtcagatgtttgcaaagctgcgcaccaccaaatacctgaaaaccgccgccagcgccgactctgccagcgtacagtttgaaagtaaggtgcagcgcattgctcgcgttcaccattatggcctgcgcgatcgcgtcagccgcaaaggaccggaagtgcgttacgcagagcgtcgtttgttgggtcttaatggtgagtcttacgttctaactcgtgatatattgaatagattccttctgtcttga

SEQ ID NO: 113413 - DNA, 807 bp, Enterobacter aerogenes
atgagtgttatgaatccaataagttctaatatatttaatgctgaatttttaaacaccccggcagcggcacttgccgcatggatttccattattggagctgttataactttggtgacgatagttataagagcactattcaaatatagaaaatctcatgatgtaattttgaaaaaatcaggaatacctgcgtttatattaaatttttttcttatacgaatatcattaaaaaggctgcctactatcacatgggctgaaaaatcaatcacggttctcttttcacttctttttttgtgtgcaatttatatttttggtccagttttcatccaagccattagaaccccaccaaatagcacattgctttattggataaagtccggtgaatcattttatatgtcaaaaaaactggcgactgcagctacaatattaaccactcctgattgggaaatatcaaaagatgattgcgaagagtcatcctctgccagtacagagaagtacaaatcattaactatcgaacataaagaaattctttgtaaactactaaccactgatgaagggaatacttacattgatgaagaagtcaagaatttcgttaaagacaaattctttatctattcctttgccccaacaaccatatttattctattatggatttctttgggttttatactgaccattcactattctaaaaaagttaggaaatatattctgactgaacaaaaaaatgcaattcattgggcatatggtgaattcaagacagaaggaatctattcaatatatcacgagttagaacgtaagactcaccattaa

SEQ ID NO: 113414 - DNA, 1686 bp, Enterobacter aerogenes
atgagcacaaaattttataccctgctgacggatattggcgcggcgaaacttgccagcgccgccgcgctcggtgtgcctttaaaaattacccatatggcggtcggcgatggcggcggagtattgccaacgccggatgcaaagcagactgcactggtgaatgagaaacgccgggctgcgctgaatatgctctatatcgacccgcagaacagtagccagattattgctgaacaggtaatccctgaaaatgagggcggttggtggatacgtgaagtgggcctgtttgatgagtccggggcattgattgccgtgggaaactgcccggaaagctataagccgcaactggctgaaggcagtgggcgtacccagaccgtgcgcatggtgctgattaccagcagcacggacaatatcaccctgaaaatcgaccctgccgtcgtgctggcaacccgcaagtatgtggatgacaaggtactggagctgaaggtgttcgtggatgataagatggcaaaacatcttgccgcaccggacccgcattcacagtatgcacccaaagaaagcccgacattgaccggaacacccaaagcgccaacgccagcggaggggaataacaccacgcagattgcgaccaccgcgtttgttcaggcggcactgatggcccttattaatggtgcgccagccacactggatacgatgaaagaaattgccgctgccattaataatgacccgaaattcagtaccaccattaacaatgcgctggcactgaaagcgccgctgttaagtccggcattcaccggaacgccaacagcccccactgccgcacagtcggttaacaatacacagattgccaccacggcttttgtgaaatcggcaattgcggcaatggtggggtctgcacctgctgcactggatacactgaacgaactggctgcggcgctggggaatgacccgaactttgccacgacaatgcttaatgcgctggcaggtaaacaaccgttggacaatacgctgactaatttgagtggaaaggatgtagctggtcttctcgcataccttggtttgggagatacaagcggatacgtgggacgccggctgagtacccgggctttcgcgtcatcaggtacgtataccccatcaccagaaacaaaacggatcagggtcacaataacgggcggcggtggcggagggggtggctgccaggctatatccagtaacgaaacgtttttcggtgctggcggtggggccggagggacagtaatcaccatactgaccccgacacagaatagttatcctgtcactatcggcgcaggtggggccggcggcgttggtgcgacgaacggcctcaagggcggtgatagctcgttcggatcggtaatagcccctggtggtgaaggcggcggaaaagtaggagtcacaaacacaaacggcggtaacggaggcgtaccgaatattggcgatatccgcatcactggtggagatggaggcgacggtcagtccgggaatatcagcgtcagcggtgaaggcggtgcatcgtactggggaggcggtggacgtgcaggcgctggcggtggcgttagaggcagggcatttggttcaggcggaggtggtgcatacgatgcaggttatagcggaaccagtatgacgggcgggaaaggtgctgatggggtttgtattatcgaggagtttgcataa

SEQ ID NO: 113415 - DNA, 240 bp, Enterobacter aerogenes
atgccagatggttcaattgaacagtggggacgaattagttttcctagtgaacacgggcctgtatccgccaatgtttcattcccgattccatttacacagacaccgggcattgtaattgtgtgcgatggtggtttcgggggtgggaatatgtggggggcgaccaactggagcactaccggcttcatagctcactgcaattatggtcttgaaggtggtgcgtttttcgctaagggctggtaa

SEQ ID NO: 113416 - DNA, 567 bp, Enterobacter aerogenes
atgcttattggctatgtacgcgtgtcaacaaatgaccagaacaccgatttgcaacgtagtgcgctgaactgcgcgggatgtgagcggatttttgaggataaaatcagcggcactaagtccgacagaccggggctgaaaaaactgctcaggacactatcggcaggagacacgctggttgtctggaagctggacaggttggggcgcagtatgcggcatcttgttacgctgatagaagagttacgccagcgtggtgtgaatttcagaagcctgactgacagtattgataccagtaccccaatgggccgtttcttttttcatgtcatgggtgccctggctgaaatggaacgcgaactgatagttgaacgtaccagggcagggctggctgcagctcgtgccaaaggcagagtaggtggacgccgtcctaagttgaccaccgaacagtgggcacagattgggcgtttactcgaggccggagaatcaagacagcgtattgcactgatttttgatgtaggcgtttctaccatttatagaaaatttccggcaaataagagcaatgaatccccctga

SEQ ID NO: 113417 - DNA, 1353 bp, Enterobacter aerogenes
atggactttacggaatatcaagaagaaataatcgaagatgttaaatcttgccttgaaagcttacaagtccaacccattttattcatgggtgcaggtatttcacaacgatatataaaagcgcctgactgggaaggtctactgaagcaacttgcggaaatctgccccttgatcaaacgcccttatggttactacagccaaacaaagggtgataacaaaccattgattgctagcgatttttgtgacttctatgctgaatgggcttgggatgatggtaaggatcgctatccagagacatactttgaaggaacgactccaaaagatatttatattaagcatgaaattgcatccattctgaatgaattatcaaactccgttgatttctcgaacatgaaatatacagaggaagttcagaaattaaggaaagtaaaacctcatgcaataatcacaacaaattatgacgacacattagaaaaaatatttgacaattatcaggcaatagttggtcataacgttgttaaagtgaattattcatcttatggcgaaatcatgaaaattcatggtagcagtcatgaagttgaaagtattgttattacaaatgaagattatgttgatttctataaacgtaagaaatatatcagtgctaagttgctaacatattttgctgaacaccctttgtttttctttgggtacagcatcaatgatgaaaacataaaggcaattctctctgatatagatgaaatcatcgctcccaataatgcattgattccaaatatttatcttgtctccttcagtaaggactgcgaagccactggttctcatcagaaggaattgctgaacggtgttggtgagaataaaagcattcgaatcaaggtgatatacgcaaatgattttggttggatttttgatgcgttatcatctaatacaccggaaattagtgttaatccaaaactggtgcgtgcatttctagccagaacgtacacattcgcatcagaatcccttgttaaacaagagcttccttacgattttgagatgttccgcgatattgcagagcatgatgatgcattagcaaaaatgtatggtatcgctgaactcaataatgggcaggcactaaatgctagtttcccatatacaatgtctgatctggcaaggattctcgacatgggatcgtggcactatgttaatcaagaattcgagaaattaagaaaactaaccgacttcaacattaaagcatcagacaacaattatcatgttttcattaaatctgggaaaagtggtgtcggaaaatactcatctgaggcacttgatttattgcgaaaattaataaatggggaacaatttgagttaaacccataa

SEQ ID NO: 113418 - DNA, 1290 bp, Enterobacter aerogenes
atgaatgctaattgggagataaaaaaacttggagacataataacattacagaggggccatgatcttccttctcaggctcgaaaacatggtcaaataccaattatgggatcttcagggatcactggttatcataatcaattcaaagcgaaaggccccggggtaatcatcgggcgcagcggtaattctatgggtcaggtttcttatgtctcagaaaattattggcctttaaacacttgtctttatgttactgattttaagggtaactgcccagagtttatttattactttcttaaacaaataaattttgaacagtttaattctggaagcgcccagaaatctttgaatagaaatgcggtttaccctttcgaggttaaattccctacttcctacaaaattcagtcagcaattgcatcaattctctttgctttagaaaataaaataaagttaaatcaagagattaaccaaaccctcgagcaaatggcacaagcccttttcaaaagctggtttgttgattttgaaccagtaaaagccaaaattacagcgctagaagctggtggttctcaggaagaagcgacgcttgccgctatggcgacgatttccgggaaaaatgctgatgcactggagttttttgggcttgaacaccctggtcattatactgagttaaaagccacagcagaactgtttccgtctgcgatgcagagtagtgagatgggggcgattccggctggatggaggacagatatcgttgatagtattgtcaaccgattaaaagttaaaaatacttttccgcctgattgtattaagcaatttggaaagcatccagtgctcgaacaaggggcaaaagtttatcagggttaccacgatgaagaaccttcatttaacgcatcgttgcaaagcccaatgttcatttttggtgatcacacctgtgtgatgcatttgtctattgtgccatttgatatttctaaaaacacattagtcttagaaggtaagggatttaatacttattggacattttttgccttaaaaggcaagcagaaatttcaagagtacaaaagacattggtcagacctaaaagttaagcaagttattatccctgatgaggctaatggtttgttgttgacaaatttctttggaagtaaatgcgagagtttattcgggttattggaacagaatagaaaacaaaacatgatattacaaaacatccgcgacaccctcctccccaaacttctctcgggcgaaatcaccctgccagaagtggagcagacggtaagcgaggtggagaatgtataa

SEQ ID NO: 113419 - DNA, 978 bp, Enterobacter aerogenes
atgaccactctcgttttttcctattctcatgcagatgaagcactactcaatgaacttcagaagcacctatcccctctgaagcggatgggtaaaattaccacatggcacgatcgccgtatcgttccaggccaagagtttgagcgccagattgatctgtacttttcccaagcagatatcatcttgctactgatcagtagtgatttcatcaattctgattactgctatcagattgaaatggctaatgcgcttgagcggcacaaccggggtgaagcggtggtcattccggtaatcttaagagattgtgcctggcatcagttgccgttcggcagcattatggcagcgacaatcgacggcaagccaattacccgattttccagccacgatgaaggctatgttcaggtcgtcgatgctgtttcccgagccattgccaatttggaagcgaaaaagccacagcagagtgtgcacgctgtagctccggtgaatccgatgcttcaggcagcagataccgtttttacaccgcgttccagcaatctttctctacccaagagctttaccgacctggataaagatcgcgcccgccacgagggttttgagtatgtcgctcgttattttgaaaactcgctggatgaacttaaaaatcgtcatgctgggttagacgttgatttccaacgaattgatgcgaattcattcgcttgctcagtgtatatcaatggtagcaaggttggtcaatgtggcatctggcgtggcaatcaacgccatggaatgggggatatctgttatagccaggataacgttgttcgaaacagcattaacgaaagcctgagccttgctgataatggccaatctctcggtttccgtgctctgatgggaggatttagcagcggtaactcacgagaagagctgctgacgaacgaagggatgtcagaacatctctggggaatgttctttggagtaatcaagcaacgtatgcctcgatga

SEQ ID NO: 113420 - DNA, 309 bp, Enterobacter aerogenes
atggtacaacttaaccttgccaaggtgctgttacttggagacgaaagcaatggatatgtccgttacgaaatattttcaaaagaaggagagcgaccagactatccagaaaaaattatggtttatcgcgagaaggtattggaggtgaacggcgataagtattgggctaaaacggatgaaatcatcagtctggatcatctcggattccgggaagggggatttcaaatggcaattacttaccagatgcgtcctgcgcgggatatgttttcagctatagatgaatgcagaaagcattatagtaattcccagtga

SEQ ID NO: 113421 - DNA, 870 bp, Enterobacter aerogenes
gtggaatattcagtattaaataacgatctgaaaatgccgatggcgggttttggcgtttttcaggtaaccgataaagaagaatgtaaaaagtctgtattgaatgcgattcgtactggctatcgacttatagataccgctgcagtatacggcaatgaagacgcggttggtgatgccgttcgtgaagccattactgaggggttgtgcccccgcgaagagttgttcattacttcaaaactgtgggtacaggatatggccagctacgatacggccaaagcaggtatcgacgcgtccctggaaaaatcggggctggagtactatgacctctacttactacatcaggcgatgcgtgactatttcagcgcctggcgggcgctggaagatgcctatgatgccggtaagcttaaagcgattggggtatctaatttttatgctcacgtgttagccaacttctgtgaaaccgtcaggatcagaccaatggtcaatcaggttgaactgcatccttatttcgcgcaacctgcagcgcttgaaaccatgaagtattacaacgttcagccggaagcctgggcgccgttaggcggcggaaggcataagccgtatgaaaatgagatgcttcagggaattgctgacgcccataaaaaaaccatagcccaggtcgttctgcgctggaacgttcagcgtggcgttactgtcatccctaaatccactcatcaggaacgtattgcagaaaacttcgccatctgggatttctcattgactgagagtgaaatggcgcaaatcagctcgctggatttaggctatgttggtgatgcagtgaaacactttaatcctgaatttgtacgtggctgccttggcgttaaaattcatgactga

SEQ ID NO: 113422 - DNA, 765 bp, Enterobacter aerogenes
atggttaaatatgattttagcggcagggtggcgctggtcaccggcgcggcttctggaatgggattggcgacggtatgggcattttgtgagtctggcgcgacggttgttatgtcggatattcgacaggacatattataccgggaagcggatgcgctgaaggccgaaggttactctgtaaaaactgttttatgcgatgtgtctgatgaagaccaggtcagacatatgattgaagaaaccgtacgggagtttggtcaacttgatgctgcctataacaatgccggtatccaaagtcctatagctgaaacagcagatgccggcagtgaagagtttgatcgtgtcaatgcgatcaacctgcgcggtgtatggaactgcatgaaatatgaacttcagcaaatgcgtcgtcagaaaagtggtgcgatcgttaattgctcctctcttggtggactggtcgggattgccggtcgcggtgtttatcatgcgaccaagcatggcgtgctggggctgacaaaaagcgctgcgctcgaatatgccgcgcggggaatacagattaatgcagtctgcccgggcattattcgcacgccaatggttgaagatatgctcaacagtgaaccggaggcgatgaacgaactgatgaaactacagccgatagggcgtttgggcgaagcggaagaggttgcccgtgctgtgctgtggttgtgcagttctgatgccagttttgtcaccggacaggcgctggccgttgatggtggatataccgttcagtaa

SEQ ID NO: 113423 - DNA, 900 bp, Enterobacter aerogenes
gtggcgcgggaaaaccttaatgatttaacagcatttatcatggtcgcacgtgaaaaaagctttaccaaagcggcagcacatttaggcgtatcacagtctgcactcagccacagcatgcgaaccctggaatcccgtctgggaatgaaacttctgacccgcaccacccgcagtatcgcgttgaccgatatcgggcaaaccatgctggatgacctgggaccctacattgatggaattcaggaccgattgcagtcgctgaaggatctcaacagtaaggccgccggaaccgtgcgcatttccacatccgattatgcgattggatctgtcatctggcctaaacttgagccacttctcagggaatatccggatattactcttgagttgattgatgattatgccctgacagatattgtgtccggccgctttgatgcaggaacgcgtttaggtgagcaaatatccaacggcatgatctctgtgcgtatcggcccggatgtgcgctttgccgtggtgggttctcctgactatttttcccgccacccttacccgcagcaccctaacgatcttatcgagcataactgtatcaacctgcgttttcccacccacggtaatctgtatgtctgggagttcgaaaaagagggaaagagcctgaacgtcaaagtcagcggtcagctggttttcagtcgtatttatcaaaatcttcaggctgcaacagaaggatacggactggcacatgttccccgcgatctcgctgaaaaacagattgccagtggcgaactgattagcgttcttgaggactggtgcccttactgggatggttactatatttactacccggaaaaccgaaatctttcgaaagccttccagctcgttgttgacgcgctgcgccactacaaacatccctga

SEQ ID NO: 113424 - DNA, 792 bp, Enterobacter aerogenes
atgataaacaggatattcctggtcattgtgtctctgttattgctgagcggatgcgtttctcataccacgcaaaacaggagtccgaaaatgataccagaagatacccacaccgccgtggctgctgtcgcgcccgcaatggcggcttatgctgaacgatttattgaaaaggatctctggaatcgtccggaattatcgcgtcgcgaccgcagcctggtgacgatggcagcactgatcagccgtaatgacaccgttgagctcccccattaccttaacgtggcgctggacagcggcgtgacccccacagaaatcgctgagactatcacccacctggcgttttacgctggctggccaaatgctacgtctgcggcgttggttgcacgtaatgtctttgcacaacgccatattgatacggcgtcggtgccgggtgagaaggtggatttcctccctctggataaagaggctgaaaacaaacgtgccaccatggtcgagtcaaactttggcaaggtatcgcctggtgtggtgaagtacacgacggatgcgctattccttgacctgtggttgcggccagatctggcgccacgagacagaagcctggtaaccgtcagcgccctggtgaccgccggacaggttgcgcaggtgccttatcatcttaatcgggcgatgaataatggtctgacccaggagcaggcctcagaggtgttgacccagctggcttttgtggcgggctggccaaacattttctccgcattatccgtatttaaagaggtgttcgaaggcagaaatccggcctga

SEQ ID NO: 113425 - DNA, 498 bp, Enterobacter aerogenes
atgatccgtctcacctctatagccgcatcactattgttattcacaggcatatccgcatacggcaaaactgcaacttcagctcaaatgaaactgtcgcaaaccggcagtcgtgcaacggttgccgaaccggccgatcactttaccgggcgagcttatattgacccgctcttttctccggttgcaccgcaaagagcgggggcggcctatgtcaccttcgtacccggcgcgcgttctgactggcatactcatccgcttggacagacgctggttattacctctggtaccggctgggtccaggagtggggtggggaaaggaaaaccgtgcacgcaggggatgtcattcaatgcccgccaggggttaaacactggcatggtgcaacggacaaaaccaccatggtgcatatggccattcaggaatcgaatgagaaaggggaaaacgtaaactggcttgaaaaagtcaccgataaacagtatctgcaggcaggagaacatcaatga

SEQ ID NO: 113426 - DNA, 354 bp, Enterobacter aerogenes
atgaagctacgcatcattctcgacgacaaaacgattaccgcgacactcaatgacagtcagacaagccgtgagtttacaacacttttaccgcttaccctgaagctgaaagattatgccggagaggagaaaataagcgatttacccagccgattgtctaccgcgggttcccctgcaggcacggccgcgaaaaaaggtgatatcacgatttatgctccgtgggggaatttagccattttctataaaccacatgtctatgcgaacggcttaattaaattaggacagttagatgagccggatgctttgcccatccatcctgacgcctatagcgccagatttgagctgctgactgagtaa

SEQ ID NO: 113427 - DNA, 423 bp, Enterobacter aerogenes
atgcctgatttactgaacacgtggttgacactattacaggattcatccttgggggagacgttgcgggatgcccaatacctgtatcccgcgctagagtctctccacattcttgggatttctttgcttattggtccgactttcactttcgatctccgattgctgggaattggacgaagtattgtgcctgtgaccctggcagcacgctatctgttgcctgtctcccacattggattgaccattgccgtgatgacgggcatggcactgctcagtgcccaggcgaccgtggttgcttcagccggagctgcaccgtggaaagcgggacttataattgttgccgggtttaatgtgctgatcttccatgaaaggaatctaccggaccgtggtaaactgggatttggatactcattctccactgccagctaa

SEQ ID NO: 113428 - DNA, 411 bp, Enterobacter aerogenes
atgagcataaaagtcgtaaggtttgcgtttgttgtgtcgttatttcttgccttgctacagacgcatcctgtgttggcacatcatggctgggcttccttcgaaaccagccgccttgtttatattgccggtacggtttcatcgaaggggggctggggtaatccgcattcacttttcgatgtgaaactagctcggagtctgcccgcccatacacccagactggcgattcctgagcagttgcaggatccagaggacagtgtaagggttaatgccgccccctcatataaagggccatacgaggagctgaaaatcatcatagctccacctgactggtcaggcagatggggattaggacgtgcgctaaatatcgggggagcgttttcaggcagtcggttatatcaatcgggcagataa

SEQ ID NO: 113429 - DNA, 447 bp, Enterobacter aerogenes
atgaaaaaactgttatacgtgtcattttttatggtcgcgaactgtttatttccggttcatgccagcacttcttttcattctgacatgaaaaaaaacgtgatcattaaaatgactatcaatcaacagatttttgacgttgagcttgcgaataacccagcggccaaggagtttgcggaacaactccccttgactcttaatatgcaggaacttaacgggaatgagaaattcgctgaattgccccgttctttatctgcccgtgaggtcagacccggcactatcaatcagggtgatctcatgatatatggccaacgtactcttgtccttttttataagacgttccagacagcctacggatatacaccagttggcagaataattgcaaaagaagaactcagtaaaattgcacggctgcaaagagttgaggtaacgtttagtgccgataactag

SEQ ID NO: 113430 - DNA, 966 bp, Enterobacter aerogenes
atgtctaacggagcagataatttttacaaaagcgataaagtcacgcagaaaaaagtgatatttaagaatcaatatcagatgaatgtagtcggcaatctgtttatgcctaaagggatggatcagaacgctaaaaaaccggctattgtcattggccacccaatgggggctgtaaaagagcaaagctcaaacctgtatgcacagaaactggcggaacaagggtttgtaacgctggcgattgacctttccttctggggagaaagtgaaggaaagcccggacatctgatttcacctgaaatttattctgatgatttcagcgcggctgtcgattacctgagtacacagtcatatgttgatcctgagaatatcggcgtactgggtatctgcggcagtggtagttttgtaatcagtgcagcaaaaatcgatccgcgtatgaaggccatagctactgtcagcatgtatgacatgggagctgctttccgtaatggcctgaaccactcccagtcagtggaacaacgtaagtctttcattaaatcagcaattgaacagcgatttgccgagtttaaaggcggtgacacggtatatattcctggcacggtgaacaagcttgatgattctacgcctgcaatccagcgcgaattctttgacttctaccgcactgaacgcgggggatacacccctcagggtgagaaagaagaactgaccaccaagcctatgttgagcagtatcggtaagtttatgaatttctatccattcaacgatattgaaacaatatctccacgaccaatgctgtttattacaggtgatcacgcacactctaaagaattcagtgaggttgcttttaaacaggccggatatcccaaagaactctatgttgttccaggtgcaggccatgtcgatctgtatgaccgcacggacctgatcccctttaataagctggcctccttctttaaagctaacctggaataa

SEQ ID NO: 113431 - DNA, 1197 bp, Enterobacter aerogenes
atgtctacgtcgttgagaggctcagatcttcacaaagaacgcgcgtactggaacggtgtattcgcaatgacattatgcgtttttgcgctaattgcttcggaatttatgcccgtcagcctgctgacgcctgtatcgggagagttaggtgtcagtgagggactggttggccaggggatagctatttctggcgtatttgcggtagtgacgagcctgtctgtatctacgctggccggggagctcaaccgcaaaatcttgctgttgagtatgactgcattaatggcgatctccggagctatggtcgcgttagcgcctaattatctgatttacatggttgggcgtgctctgatcggtattgttattggtggattctggtcgctgtctgccgcaactgctattcgtctggttcctcaacatcaggtttctcgtgcactggctatttttaacgggggcaacgcgctggcaactgttatagccgccccaatgggtagttatttgggatccgtcatcggctggaggggggcattcctttgtatcgttccgatcgcggtgattgcttttatgtggcagtggttcagcctgccgacaatgccagcggataaaaaagctaaacgtaccggcactgtttttcgcctttttgctaaccctgttgtggtcgttggacttgcagcctgtggattgttttttatggggcagttttctctgtttacatacttacgtccttttcttgagacagtgacgcaggtggatatcaccacgttgtcgttcatcttgctgaccatcggtgtcgctggctttattggtaccctggtgattggcatatttttgaaatgcggcttttattccacgcttattgctatccctttcctgatggcggtaattgccgtggctctgatcgtttttggtcacagcatatggatcgttgcaccgctgcttggcttatggggattaatcgccactgccgcgcctaccggttggtggacatggatcgccaaaactttgccggaagatgcggaggctggcggtggcctgctggttgccgtagtgcagttgtccatcgcaattggctccacagttggtggattagcatttgaccacagcggctatcaaagcacttttaccatcagtagtctcttattattgacagcggctgccttagctttattgacgtcacgtaaagccccccaccacacccgatga

SEQ ID NO: 113432 - DNA, 897 bp, Enterobacter aerogenes
atgaaacgcaacctgaacgaccttctctattttgttaccgtagcccgtgaacgcagttttacccgcgcggctgcaaaattgggtgtcactcaatctgccctcagccaggcgatttctgcacttgaagagcgtatgcaaatacgccttctgacgcgtaccacccgtagcgtatcaccgacgtcggctggagaacggctgctgttggctgtagggaatcgtattgatgaaattgaagccgaactggatattctgaccgaactgcgagataaaccggccggaacagtccgcattacatgtggaccaaatgtattgcacagcacgctgctgccaaaactgacaccactgctgcatgagtatccagatattaatatcgagttcgatgctaaccatggttttcgggacattgtggcagaccgctttgatgcagggattcgactgggggacacaattgataaagacatgatagcagtcccaattggacccaaattgcgtatggccgcagtggcttctccagattatttttcaagatatccagttccagctaccccccatgagctgacacaacataaatgcataaatcaacgaatggtcagctcaggtgggttgtatgtctgggattttgatcaggatgagggcgatcttaacgtgcgtgtcagcggacaactcatttttaatacatctgaacatattgttgatgcagcacttgcaggactcgggattgcttttttgccagaggaagagtttgaaactcatattaaagacggcaggctcgttcgtgtactggagcaatggtgcaaaccatttcctggctactacttatattatcccagcagaaaacaaccttctccggcattttcactcgttgtggatgcgttgcgtattaaccggaaaatgtaa

SEQ ID NO: 113433 - DNA, 198 bp, Enterobacter aerogenes
atgcctgcaagcgcttgcaggaactggaaagccttctgctggtggacgttcctgaaacagtattctggaaccgatagcaccgggctggtggaaatcgccgtggtaacttatcgcatcgttgatatcggcatgcgctcgctccagccgcatgaaatctactgcgcgcagggcttcccggagtggtacatcatcgactag

SEQ ID NO: 113434 - DNA, 234 bp, Enterobacter aerogenes
atggaagtggaaatcacaattgatcgtcgcaaaaagctaccagagggcgctgtccatgcattagagaaagagccgctgcggaggcttgaccaaaactttaacaactgcagtttgatcattcgccgaaccggtactgatggtctgagtgtgtttcgtgggatggatggtgacaaaacgcgggtggagcaaatccttcagaatatctgggaaagtgctgacgactggtcctattga

SEQ ID NO: 113435 - DNA, 264 bp, Enterobacter aerogenes
atggctgacctgttttattttgaggattttgctgtggctaaaaaactagaaatgccgaacaccggctatgtagtaatcaggtgcgatgaaggggtaattgttgcccgccttacatcttttcccttatgtgagcgaactctcatgtacagacgtagcgatgaagtttctttcatgcctttacaggatgacgagttcataggaaacctatcgctttttactaaaatgcttgaaaaggcaggataccgtgtatcatattgttgttaa

SEQ ID NO: 113436 - DNA, 2004 bp, Enterobacter aerogenes
atgaaaattagaccccagcagcatctcattaacatattgacctcaactaagcagcatcatccgaattttacgctatttttaggtgctggtgccagtataactagtggtgttgagagtgcaggaggtatggttaaacgctggagaaatgcttatacatcaatgcatggagaagatgaactatctcatcaaccatggtttgataaggaaaatgagtattcagagctctttgaggcgctttatgatcaacccacacagcgccgcgagtttatcgaaagctgtataactggagctaagccttcttggggttatgtgtatttaactaaccttttggataaagggcattttaatactattttcactactaattttgatgatttagttaatgaggcctgctttacgttttccaacaatttaaggcccatcgtttgtgcacatgattcaagtatttctagtgtaaggcttacaactactcgtccaaaaattataaaacttcatggtgatttcctcttcgataacatcaaaaatacaatacgagagcttgaatcactcgaagataatatgagagcgaagtttagacagtttgctactgaatttggtatgattgttatcggttattcaggtcatgaccgttcaatcatggacacattgaatactttattgcattctgggacttgcttcccccatggcatttactggtgtataagagacagtgttgataaccttcctgagcagttaaaaaacttagctcgattccctcattttcatttaattaaaatcgatggctttgatgaattcatggctgaacttcatgaagctttgggttgttccctccagcaggaggtcgtagagccatactcagcattgtcaagcaagttagataggtactttttggtttctgaggatgatgaagatgacgacactcaacatgcaataattagacgtgatatgaacagccttgcagatcatgtaaggcgtgtaaataccgtgagtcaatttgtcaaaaaaataaaattactattgtctgaaaaagcgtcatcacttgatgatgactcaatcacgaattctctagaaataatgttaaaagagaccaaatttgcgggttctccggaaaatcttcatttttataatacgccaaattatcttattgccaactcggcatttagagcaggtgaatataaagagtgtgtggaatatgctacaaagcatttgtcaaatggcccttcaattgagactgaagcattattgctacgctcttatattcatttgaaagatgaagtgcaaattaatgagtgcttaataaggttgacggcttataataaattgaaggaaggggaagttactaaaattattaacgctttagtagagttgatggattctgaaaattactcaatggctgacaggttactagatcttttagattcacgtacaattcctgcaaaacataaaaacctcgtaactattaatagagctctttgtcaaaagttacaagaccaaccgataaattctgagcttgtgttagatttacaagaattgcttactgaatcgatagataacgacgaagcttggttagcccttggagctgctatacttcttgggaatgacgatgttgttgaagaagtatcaaattctttgtcggaaggcgagataatagcggtgattacgcaatctatgccaattttccgattgctttctgactctgtttatgaaaaggtcaaagccatggcaattgacaaaggttacgaagttactttcgaagacgtttcggaagatgcaacagagtcacaaagcacaaattcttcagaagaaggaaccgccgatcaacaaggtcagaaaacagatgatggccctgcgccaagtgatgtagatagttctgctgtcagcgagtcactagatctcgatactgataagccagcagataacgatgaggcgtttgtagactctttagaacctcaggaacgaacaaaaagtgcgattagagatgatctttctgagagacctgcttaa

SEQ ID NO: 113437 - DNA, 513 bp, Enterobacter aerogenes
ttgaacaataacaagaaaaaatatattagaactattgcaagagtaattctaagtatcttaggcacttttttcattatcattatagtttctgctatttttaacataactttgattactgaataccccaagacttatttgagtacgacattactgatgacatcatcattaacatattttgtctgttatataagaaagtcatacaagtattttaatgattttattttagcattatctgccggggttgtagcattggtttatttattaacaggcagtaaagatcttgatctattacctccggctgatttattagaaaaggatagactcacattctttcttatagtattaaaatttatggttattgccaacagtcttatttctaaaatcttactaaccttccatgatttcttaaaagaacgaaaaactgaaaaagaaagcttcaaaaaattaaacttcacgaaaagagttatattattttaccgtaaatacttcttcaagaaaaaaatcaaacaatag

SEQ ID NO: 113438 - DNA, 1572 bp, Enterobacter aerogenes
gtggccccatgtgaaaccgctttaaacccatgtaaatcgataaatttgtataccagaagtattctagctactatctcgtatacacacttgaactactggtatacatcgatgaaaatgacactcaatcagtcgattataatcaataagttatctatcgacgtgaaaccgagccttgatccgcaaggcagagtagtctacttacccaatccagaacgaaaaccgtatcttatcactgacagccatcgtgattcacccgttggttttggtgtcaaaatcagtgccacgaaaaagacctatttcatccagcggcgtgtgtcatcagcagaaaacagaccttctacgggtggtagggcacctcaagaggttatcaggtcaactattggtaatgtctctgattttgctagcattgaacaggcacgcgatgtagcccgcaatttcgtgcaaacgatgaagttgaccaagaggaatcctaatgcagtgaggcgggaggctgatgcttctgaactcactatcagtgaagtgtttgctcaataccgtcagcatctgctgggtagagcgaaaccagctaaacccaacactttggctgtattggataaagcagaaaacagactttctgagtgggctggattgcgagtaaaagatcttactggtaatgaaattcttcggaagtttgatgagattgcttcaagagccaggacagcagcagaacagacgttcaggtgggtcaatgtcgctgtaaaacacgcaatcgatattgaagcgggtaatgcacagacacagcaacgacaaccttcgttatcatataatccattctcaatcttaaaggtgcagaaaaagttcagaactcgttctgaactggaagatagctatcgtgcgaaaggggttcgaaatccattatcacctaaagatacattagggagttttcttaccgcattacacaacaagcgaagcttaaatcgattaggttgtgattatctgttgttgacggttctgttaggtgcgaggaaagaagaaactgcttccctatgctggcgtgaggttctgaccgaagaagaagcaagaacgaccagttatgttgatcttgaaaacagaatgattcgattctacgacaccaaaaaccgtaatgaccatgaactgccaatctgcgatgcgacaaagcgaattctggaagatcgaagagatatcgtcaacgataacgaaaagcgagcagataaacgcaaatgggtttttccagctcgttcatcacgaagcaaggttggacactattcagatagtaaaagtttacgcgaaaacctgtgccaagaggcagggatagtgaagttaggtatgcatgatcttcgaagaacttttggtcgtgtagctgaagaactcacctcttacgcagttgttaaaaaattgcttaaccatcgaaacaccactgaccctacagagcgatacgcaaacccagatcaagatcgtgtttatgaagcactacaacgtatagaattaaatatgttgttgacttcacctgaattatataattcattattagcgtcatccaagtatccaccaattctcaaggggaaagtatga

SEQ ID NO: 113439 - DNA, 204 bp, Enterobacter aerogenes
atgaaagcagcaaaagaatcctacacgaaagagtatgaccgtgacacggctgaggccgctgattttggcagctacaaagtggagggaaatactgtggtttatgaggtctacaatgccgggtaccgtacctacgataaggtgacagtcaccgttggcgctgatggtaaggccaccggtgccagggttgaatatatggggcaataa

SEQ ID NO: 113440 - DNA, 249 bp, Enterobacter aerogenes
atgagacaactcgcgaaacagacgatcagtgctcagatcccttcagagcttgctgcggcggttgaaaacctggctattgaactggacagatccaaaagctgggtgattaaagaagcgttgaccgccatgattgaagagagagaacggcggcatcagcagattttgaaagggcttgctgatgtcgatgcgggaagggtggttagccatgcggatgtagttgacttcgctaacaaactgaaaaaatcgtaa

SEQ ID NO: 113441 - DNA, 324 bp, Enterobacter aerogenes
atgtcaatcacaccacctcatgaatggggtctacaaagcgatatcaccccacgatttggcgcgagattagttcaggaaggcaagcgtctgcattacctggctgacagggctggtttgacggggagctttagcccagagcaactgcagaaactggatcagaatttcccgctgtttataggtcaattggaagcaatgctgcggttcggtgagttaaatccacagcagcaacatcaggtgaacattcatcttacgggtttaacctgcatagctgacacccgtggtagctgcggttacgtttacatttctatttatccaaccccgtaa

SEQ ID NO: 113442 - DNA, 1884 bp, Enterobacter aerogenes
atgaaaaaaatatttctatatcatagggttagtacagaacaacaggtcgaagatggttcagggatggcacgtcaggccgagctattacaatcctatattgatcgtactcgcattgttgaaagcatggatgatccagtacctgtagtactggaggatggcggtttaagtgctttcaaagggcataactttttacatggtcagttagggcgatggatggaagaagtacgggcgggtatgtgggatggttcgattcttgttgtagagaacatcgaccgcttcagccgtcagaatccatttaacgtaatgggatatcttcacgatctaattaaccattctgtagcaattcatgatgttaatatgaatatggtgatcagtcgtgaaaattccgcaatgctgcctatggtaatgatgcaagcacagagggcatatgatgaatctaagttcaaaagtaaccgtatccgtgctggatgggctaagaagcgagataacgcatttaacaacggtacaatagttacaaacaagcgtccaaagtggatcgatattgtagataatcagtatgttctaaatgctaaagcccgtattgtcactgagatatttagactctatcaaacgggtattggatgtccaaccattgctaaaacattgcgtgaaatgggtgatgattggaggtttgatcgcatatggacaggcgaagcagtacataaaattttgagaaatcgccgtgtaacaggcgtgatttttatcagtgaattgatccgtgattacaacagtactgaaaattctattgtacagaaacgctatgaaatgaatgtatacccaccagtaataggggaagatgaatttaacttagtacaacaactattatcaagccgtaggtctggtaaagctacaggtggaaaacgaattactaaaaagcgtaatgatgatggtagcgtagttactgatattaatggctatccaacttacgatactattgattgtggagaaattaccaaatctaatatctttaatgccgtttgccgttgtgcgaaatgtggatcaccaatgtatcataatattgtagtaagcaagcgtactccagctaaagctacttcacctgttgagcaggaatatagatacattcgttgccttaatgagcgtgacggattgtgtgataataaatcactacgttatgatgtgattgaacgtttcattatggagcatgttaaaggtttagactttagtacaattattcaagaaaatcgcattaaccctgaagttgaattagtacgtttaaaacttgaagaagaacgcgaacatattcgcgagtatgaacatggtataaagcgtttacgtaatttaggtaagaaagtaccttttgatgtacttttagaacttgaagatgcacaggagcgacttaaagcacttgaagataagcaagctactttcgctgatgtacacgtagatcttgatgtattgaagaatgtagatcttgatgctctctatgatgtgactaacatcgaattacgtggacgcgttgaaaatgaattatcgaaagtactggagaaggtagaattacatagggatagcaaaaactatgtgatcacttttaagtatcggagagtagatgttttgaagcatgtactaatgataacggcaagtaagacgccagtacttgtatctggggtatgtattgaaacgctaggtgataccgtagcgtactcaacgccatcatttgatatcattgttggggatggtggtgatctccgcttccagcctattgacgatgaaccgctttcaatcattgattacagcctcttgatgaattatgtagatggtactgaaggtgcagatgcggtggcagcatggatgaggcacaatatgaacttcttattcactaagtaa

SEQ ID NO: 113443 - DNA, 354 bp, Enterobacter aerogenes
atgactgaacgttataagccagatatgtctgtaatacatcattcacatatgttgaatgataaggttcgtatcgataaatataaaaaagcaatttctgagacgattgcaccacatgacaacgttgttgatataggctcaggatgtggaattctgtctatgttaagtgcccagaaaaccactggacaggtctatggcatagaatattttgaattcgctatttcattatcaaaggaactgtgtaataaaaaggataatatagaatttattaaaaattcatctttccagacgtctcttagtgatcacatccatgcaatcgttactgaaaccattggtcaaatcggaccagagggttga

SEQ ID NO: 113444 - DNA, 360 bp, Enterobacter aerogenes
atgatgataagaatattgtcagtactcttaacgacgatcccattaactgcaattgcgactacgattcccgatgggaaaccagaaaagccctttgttattggtaatgaagttatttgtctgaaagaaatccagaagcaaatcaccccttatctcaaatcttttgaagaagaaagcggggttaagtacaagtacaatgttaaatctggtttatcgtacaaagatactgtagggctgcggttacagatcaatcgtgtggattcggggttggatatgcgtgttgcggatcttgattattactggttacatgaacgtggaagcatgtgccaaccaacgtacatggtacttgatcgttctcaatga

SEQ ID NO: 113445 - DNA, 366 bp, Enterobacter aerogenes
atggaaaatacttttaataaaattaataaaaatgaatcacatccaaatttactaagaacgcattgcatcagtgttcgactgaaccatgaagaactacagtttctcaatgctaaacgtggagagaaaagcaagggggaatggctcagattagcttctcttgataagcttcccatagtagttccttcaatcaacatagaagcttggaaatccctcagcgaaatatcacagaagctgaacaagctacttattcatctcgaaagtaaaagcactggtggtgagcttacaaagacagagatcttcgcagtgaagcgccaaatttctgagcttcgcttctgtcttacatcctccaagagatctatgagttag

SEQ ID NO: 113446 - DNA, 129 bp, Enterobacter aerogenes
atgctgagatggcagccctttatcttggtatcagtgtcaaaactctggcacgatataggcaaaatggtgatggaccgccttacatacaataccaatcagaagacagcaaggctagaaaccagaaagtaa

SEQ ID NO: 113447 - DNA, 678 bp, Enterobacter aerogenes
atgactatcccggataacgatccactctctgccgcctgttacgtactgggccttactgatgacctgactcgtcagaaactcgatgaacgtctcatcgcagacccggattttgcggcggaagttatgcgctggcaaaaagctttcagcgtcgccgacgtcaccacggaagatctcattccttcatcttctctctggcctcagattgagcgtgagattaaccgcacctcaattacagcaagaagctcatcggctcacctgcggccggttcactgggcaggatgggccgtcgctgcagccctggcgggtatagtcatatttacagacgtgatgaaaccagagatatctaatgaatcacgccttgttgccgtgcttaaagggccgcaagcggatgcgcagtttgtgatcagcatggataaatccggatcatttatcagagtctcttctctgggcgtcacgttgcctgtgaataaaagcctgcagctctggatgataaaaggcaattccgccccccactcactgggcattatcagtcatagcgacatcaatatttatcggctaccttccggcgggatggataaccagactgtattcgcaataagccttgagcccattggggggtctgaaacagcagggccatctggttccgtcattttccagggtaaatttatctcattctga

SEQ ID NO: 113448 - DNA, 549 bp, Enterobacter aerogenes
atgacgactaatgtaccgtttattcatgcggaaataattaaacaaattgcaggcggcgatagacaagccctggctcagctatacaggcttctctcccccaggcttttgggcattatttttcgtatggtcaggcgccgcgactgggctgaagagatcctgcacgatacctttattcaaatctggcaatccgctatttattacgacgaaaagcgaagcgaaccccatatctggttaagttatattgccagaaatcgtgctattgattttctgcgacagcgggaacttcgttgctgctccgttgaggatatcgacgagtctgaaaccagttttacgcagataacgcctgcagagaacctgcatcaggaagctcgtcggctacagaagtgtatggcgcatttaccccctgagcagcgccagagcatcgctctggcttactatcgtgggctgtcacagacagagattgccctgtctatggcgcaaccggaagggacggttaaaagctggatccgtcgtgcattagctcacctcagggagtgcattggcctatga

SEQ ID NO: 113449 - DNA, 561 bp, Enterobacter aerogenes
atgaaaaaattcatgccagccatgttaatatctgctcttgtcttcagtaccgcctctcaggcagccatgatggacagtaacaccgtgatggtcggtggagcggccatgtatccttctaaaaatattgtccagaacgccattaactccaaagaccataccactctggttgcggctgttaaagcggccgggctggtgccaacactggaaagtaaaggccctttcaccgtttttgcgccgacaaacaccgcttttgaaaagctgcctcctggtactgtcgactcgttgctcaagcctgaaaataaacaaaaactcacgagcgttctgacataccacgttgttgccgggaagctggatatgaaagcgctggagcagaaaattaaggcaggtggaggtaaggctgaactgaagaccgtcaatggtggtgctctttgggtgatggcaaacggtccccacaacattcagattaaggatgctcgcggtaatgtagccaatattaccacctatgatgtgaaccagagcaatggcgtcatcgatgtcatcgataccgtgctcatgccttaa

SEQ ID NO: 113450 - DNA, 192 bp, Enterobacter aerogenes
atgctagtgcaaaataatatttataataattcagagtcatatgctcttcttttgtttagtatgtggcttgtccttattgtacttcttgctgtgatatcttgtgccttctacggtgtattgatgcataaaactgcaatttgttgttttctgtcagccatgttccttggtatcgcaggctggttttatggatga

SEQ ID NO: 113451 - DNA, 237 bp, Enterobacter aerogenes
atgagtgaagctaaaccgcaggatggcagcaccgtaaagggataccgcatgttaagcgagggtgatattgaacagatgaaccgtctgaagggtgtcagtaagcacttcttaaaccttctagatacagccaaagaatcaggtaccgatacccgttggattggtatgggtaaaactgaaatgcagaaggtgtgcatgttcgcttgtcgggctgtggctcaacctgaagacggttgttag

SEQ ID NO: 113452 - DNA, 282 bp, Enterobacter aerogenes
atgagctttgaaattattgctgggctggtggtcgttatcctgagtgctatcgctggtgcgttcggcatcggtcatgctcgcgggacaagcaaggcggaagctaaagccaaaaccgagcagcagcataccgaagagaaagcagccgccagtattgctgtggcagaacgtaaagcagaagccacgaaaggggccagtgatgtacagcagactgttagccatatgcctgatgacgatgttgatcgggagctgcgcgagcacttcatccgccccggtagtcgttga

SEQ ID NO: 113453 - DNA, 237 bp, Enterobacter aerogenes
atgcgtggccttttttatcgtgacgtactcaagcgagttgcagcgcaggccgaagcaaagacctgtaaatcggctgagccgcagttactggcggccaataccaaaacagagcggcaggaaataagcaggcgtagcgtcctggtgtcacaaactattgaccacaaggttaatgctttgttaactttcgggtgtggtgaatccccctatgcggaggggcggaaacagcattgtatttga

SEQ ID NO: 113454 - DNA, 195 bp, Enterobacter aerogenes
atgaaaccacaatcaacagtgcagcacgaagttaacatcgacggcaaagaatttgttgtcacgttagccaaaacaggaaaatcaacgtggagagcgtggggggatgcctggggccgccatatcgtcgaaacaggctctagcgagagcagtgcgctaacgcattggaaggctaatgcgttagcgatgaacgggtag

SEQ ID NO: 113455 - DNA, 558 bp, Enterobacter aerogenes
atgaccgaccggcacaacaactacgctggtataaccttgcgctttcaggccaaactcttcgtcgaggatagcgaaatcgacgccttcgatcggcaccgcatccagccccattgccgccacgccgagcaggaagttgcccacgttaagataaacctgcttcgccatccactgatcgtcatctttcagctctttgcggtgcatatcggcaaagaaggtgcggcctttgtggttgccggctttggcttccggagtggcaaaacggccatcggcgtcttcctgatcaacgactttttccagccacgcatcgtccatcgcggttttcgcacagaacacgacaacgtgggaagcgtcgaggattttacgttcgttgaacacgtaggtgccgctggccgctttcgcgacgcgggctttgccttcatcgctgctggcgacgataaagtgccacggctgggagttggtgctcgacgggctatattgcagcagcgttttcaggttttccgcctgttcggccgtcagctttttcgccggatcaaaggccttagtggagtaacgttttaa

SEQ ID NO: 113456 - DNA, 2289 bp, Enterobacter aerogenes
atgtcagatatcaccgctaatgtcgtcgttagtatgccgagtcaacttttctcaatggccagatccttcaaaggtaatgccaacgggaaaatctacattggtcgaatcgacgcagaccctgtagacccagccaaccaaatccaggtatatcttgaaaatgaggatggctctcttgtaccggtaccacagccaattattacaaacatgggtggatatccggtttataacgggcaaattagtaaatttgtcaccgttgaaggccactctatggccgtttacgactccaacaacgttcagcaattctactatccaaatgtcctgaaatacgatcctgaccaacttcgccaggaacttggaacagatattggcgctgatttagttggagcagctccagaaggtacggtgcaggacttcatcgatatccagaatgataaaaacaaatacatcaccccacaattgtttggagccaagggtgattacaacccaaccactgataccggcacagatgatacagcagcgtttcgccaggctattgctgtagcagtaacccttggccgcagaaaggttgttgtgccggctggattcaattatctaatcacaaacaatcttaaccttggcggagttggttacattggctctgacggcgtagctcttgtcggtgagaattgggttaacacaaatctgtatttccgcgctccggataacaataccgcatgcattgagattattggcggttctggaatccacacgggtagatatatcagcggcctgacgattcagccaaccattgggacaagatatacgggcgttggctatcgaatcgctggcggctgctttatcaaaaacggtctgtgccttatccgccagtttgcggttaacctccatcttctgaataacagacaggctggcgttttcactgagcagaacgttttccgtgatatgcgcattcatcgcggcctggttaacattctgatggaaacaaatggcggagataactcattccatgccaacgatttctctctgtgccagttgcaggttaaaacctctgttgatggcggcgatggaaatacaacccctggcgttggtcttgagctaagaggtgttacagcgcctgtatattggtatgacagtttcttcaacgtgcatatgtttggaggtgccggcgcaataggaattaagctcaccaatgcaaacacagacggcattgtaggcaacgtaacagcagagggtgcactgatattaaaaagcaccgatagcacatcctcatttgaggtgaggggcggattctacagcataggttctgtgacattcgatgtccccggagagcccacagcacgagcatctgtttttgtattcgagaacagactgagcaacacatctaattttacttcgccaagaatgaccggcctgtcgccgcgtcagctgccactttatctggctgacagaacggataacggcggctacccggcagtgttcagggcgacgggaaccaacatcgatggagtgtgctatgcagctgcaggcacagcaggaagtaatcatttcttcggctacaccccaccaggaggaaatctacagagtttcgttcctggcgtcgcgattggatacgacggcagctctatagcaagttactcgactaccttcttcatctctaacgcatcaaccggcctgcagctgactcctgcattctttggtccgcgcacagacaacaatattgatttcggctctggtgcatttagaccaaagcaatattggggggtcaacagttccattgccacatcagatgcagaccataaaacagaacccagattaatttatgatgctgaggtggacgcgttttatgagatcggacagcttccatgggtatggcagtggttactgaaatatcaggctgaaggagatggcgcaagattacactctgggccgacagtacaggcagcgatagcagtaatggagaaacacggccttgactggagaaattactccgccttctgcttcaaccagtgggacgctcaggatgaggttgtagagacgtgggatgacatttatgaaaccattccaaaagcaagagcgctttatgatgaatcaggggcgtgcatacaggaagaaatccctgagcataaagttctcgtcaccccggcaggaagtcgcgtagtaagtgaagctgttgaggcagggcaggtctactcctttaggaaggaggagctcattttatgggtgctaagggcaaccattgagaaacagaaaaatattgagtccaggttagcggcactggaatcaatgcgttag

SEQ ID NO: 113457 - DNA, 1500 bp, Enterobacter aerogenes
gtggaaagcgaatcgattcttgatgagttaacggaagacgagcagattgaattgcttgagcttctggaagaagaggagcggtaccgggaaactcacctgctctatgagttcactccgtacggcaaacagcgtgagtttatcaatgccggagctgattaccctgagcgttgcttcatggcgggcaaccagttgggcaagtcctacactggaggcgcagaggttgccttccatctaaccggtcgataccctggaacgaagggttatccgaaagatggcgcatacggtgaggattggggtggaaaacgcttctatgagcctgttgtgttctgggtcggtggcgagaccaatgaaactgtaaccaagactactcagcgcatcctgtgcggtcgtatcgaagagaatgacgagcctggctacgggtcaatcccgaaagaggacatcatcagctggaagaagtccccattcttcccgaaccttgtcgatcacttgctggtcaagcatcacacaccagaaggagtcgaagatggcatatccatctgctacttcaaaccatactcgcagggccgcgcacgctggcagggtgacacaattcacggcgtctggttcgatgaagagccaccttacagcatctacggcgaaggcctgacccgtaccaacaaatacggacagttctcaatgctgacgtttaccccgctgatgggtatgtcagatgtcgtaaccaaattcctgaagaacccgagcaatgcgcaaaaggttgtcaccatgacaatctacgacgccgaccactacagcgatgagcagaaagagcaaatcgttgcttcataccctgagcatgagcgtgaggcacgagcacgcggtataccgacaatgggtagtggtcgcatcttccagatacctgaagaaaccattaagtgtcagccgttcgaatgtcctgaccacttctacgtcatcaacgcaatggacttcgggtgggatcaccctcaagcacagattcaactgtggtgggataaggacgccgataccatctacgtcgctcgcgtatggaagaagaaagaacacaccgcagtgcaggcgtggggtgctgtcaaagcatgggcgcagaagatacccactgcatggcctcatgacggaaaccagcatgagaagggcggcggcgagcaactgaaaagccaatacgccgacgcaggattcatgatgcttccggagcatgccacatggcccgatggtggtaacgccgtggagccaggaattactgagttgcgcgacatgatgcttgatgggcgcttcaaggtattcaacacctgtgagccattctttgaagagttccgcctgtatcaccgagatgaaaacgggaagatcgtaaaactcaacgatgacgttctttcagccgttcgctacggctacatgatgagacgctttgcaaaactgatgcgcgacgtcaaaacaccgaaagagaagaaaatacctgcaccgattaaacctgtcgcacggagaagatga

SEQ ID NO: 113458 - DNA, 489 bp, Enterobacter aerogenes
atggcagcaccaaagggcaaccgattctgggaggcccgcagtagtcatgggcgaaatcctaaattcgaatcgcccgaggcgctgtgggctgcatgttgtgaatacttcgagtgggttgaggctcacccactgtgggagatgaaggcattctcataccagggtgaggtaacgcaagaacctatcgccaagatgcgagcgatgaccatcactggattaacactattcctcgatgtgacgctcgagacatggcgaacatatcgcttgcgagaagatttatctgaagtcgttatgcgagcagagcaaatcatctacgaccagaaattctccggcgcagctgcagaccttctcaacgctaacatcattgcccgtgatttgggcctcaaagagcagtcgcaagttgaagacgtgacacctgataagggagatcgcgataagcgccgctctcgaattcaggagttactcaaccgtggaaagcgaatcgattcttga

SEQ ID NO: 113459 - DNA, 459 bp, Enterobacter aerogenes
atgggcagcttctttactgcagtagacgatccgaaaaatcagcgcgtgttcctttaccgcgccgatgaagctgtaggcgatgcaatttatctcgacaccgacccaacgggaacggcaatccctttccctgacgtgctggataaagtcgatatgggttcagcaacgaacaaagctggcttcattctgccgtacaaagatggcgttaagttgaaaatctcaaccaacctgcctgcaacaggtgcaattggtgacacgctcactttaacctggactggcggtgtgccaccgtacgaagtgaaaactgtggatgagagtaacgacactctctacgacgcagtaactcaggcagacaaaacctacacgttcgacaccactggaaaagcatctggtgattatgtcatcacagtcaaagatgcaaatggtgcggctgtagaatcttcaccatgcacgattagttaa

SEQ ID NO: 113460 - DNA, 654 bp, Enterobacter aerogenes
atggttatttggtcattatttgacggttcagggattatgggtcttccatgggctgaggcagggcatgacgtttactgcttcaattctgacgaggggaatcatggcgggtacgaggctatccgcatgaatcacccaaaaatccgctacgtaaacctgtggattgacgaggggtttgcagcggctaccgcagcaatgaagcgcccggacttcattttctcattccctgactgcacagagttggcggcatccggcgcgaagcatgcccaccactcgcttcagtcggtgagaatggcaataatggttcaggagttcgcggagtcaatcggggctggttggctggttgaaaaccctgtagggaagatgtcaacggaatggcgcaagcctgaccattactttgacccgtatgagttcggcggatacctgctaccgcatgaggagacattccatccgcgcatgccagcacgggacgcatacacgaaaaaaacttgcatctggtgcggagggctgaaatggccggataaaaaacctgttgagcacatagggaagttttgggggtgggcttacttgggcgggaagtcaccaaaaacaaaacagctacgctcattaactccgcgcggatttgcgcgagcagtatatgaggccaaccatgcttag

SEQ ID NO: 113461 - DNA, 225 bp, Enterobacter aerogenes
atgaccaaatcagccataaccagaatagcagccctcatcattctgtttgttatcccggcagcgatggcggcagataacccacattgcgtaacaggcaagaacggtttcggcgccaccaccacgcaatgcgatgacggcacggttactatcaccaccggtaaaaaggcaattgtttgcggtaaggctcttaatggcagccataactgcgaggagattgagttgtga

SEQ ID NO: 113462 - DNA, 201 bp, Enterobacter aerogenes
atgggaagtttactgacaagaagagaggccggggtgtttgatgagaccccggcggaggaagatgatttattttacttggatagttcgggtatgaagatttgcttcaccgttcctctgattacagaggtgtcttctatttctgctaacggtactctgtcgtcatccactgacagaaaaacgccgccagctccattgatgtga

SEQ ID NO: 113463 - DNA, 579 bp, Enterobacter aerogenes
atgaaactgaatattactgttgatttagaatggcttggcgaagatggcgatatggatgaagaggttaagcatcaaattatttccggtgtaaaagcagctatttccagagattgccttgctaaagttgagaaagaggcttctcagcagattaatgaagctattaacgagtcaattatcgcagccagaaaggcaatagaacaaaaggctgttaagttcgctgatgactggttggaaaaagaagtgactatcactgataaatggggagatgcacaagattgcctgaccatcacagaccttattaaacgtacatttgatggtctacttgagaaaaaggtggatgacaacggaaattttgctgacagttacagtggtaaaacgcgactgattaattggcttacgggtaagcgagtgcaagatgtcgttcaggagaagcttaagggtatcaacaaggatattgatcgccagattgcagagtatgttaatgaaggcatacgcaagaatgttgcaaacaagttcgctgaaatggtcgttcagaccgcgcagcataaccaccaatcggcaatagaaaataaatcataa

SEQ ID NO: 113464 - DNA, 219 bp, Enterobacter aerogenes
atgagtaaagataatagcggacctgctttcccttactcagggattcataagggtgaaaaagaaaacatgatagtcgatagccatggaatgacgctgcgagattattttgcggcgaaggctatgcaggcaatgatagcagcgcatgagcctgatggcgccattcctggatgggcatatggaatggcagacgagatgctgaaagctcgggaggttgaatga

SEQ ID NO: 113465 - DNA, 330 bp, Enterobacter aerogenes
atgcaagagtttaaaggtacgccagggccttggtcggccgtccaacaatatgtagatgaagtttcagtgattgatgggaaaggctttaaagtcgttacggcagagagaacggcaatcctcatggattgggacaaaaaagggttcgagcattggggagatgaaggaggcaataggcatttatcaggacctgagcagtttgctaatgcttaccttatagccgctgctccggaattactggaagcgttgcaattaatgttggattctcaagtattgccggtttggcatcaatcaatcgcacgcgcagccatcaacaaagcactcggcaaataa

SEQ ID NO: 113466 - DNA, 315 bp, Enterobacter aerogenes
atggatattgataaatttgatgatgatatatacagattaagcctgtttgatttattagataagtatccacacattgatttctctatagacagagagcctacagatataatacaccttcccctcggaatggcatggacctgcggttgcggatgtggagtggtcatcccaagctattttacgattggaagcgcttatacagctgatcataatggaaatgtttttcgatgctctctagagatagggctagcctcaccttgcgtaaaaaatagcggagaacattatggtgtagacatttatgagggggagcaagaatga

SEQ ID NO: 113467 - DNA, 240 bp, Enterobacter aerogenes
atgggaaaagttacgtttgtagtcgagtttctagatggcgaagaaccgccagtcagtagtggaacaacactccttggtggaaagttatcttctgttcagtggagcgattaccgagaagattatttttcgccagagcagagagatattgtcattgaagcactcaatgaacttaccaaggatgaagttgatgcagaatgccatgatgagattatcaacaaagctgagttgctgaccttctga

SEQ ID NO: 113468 - DNA, 936 bp, Enterobacter aerogenes
gtgaaagttgtctttaatgttaatggtaaaaaagttccgctcaaatctctgcaatatataagtaaagcaaatcaacttgaagtaatgaggaattggttttttgaaaatttcgaagaccccgcaaactcttgcccgtatgaatcccgtgaaggcggatatgcttacatttatggtggcccatatgaagcaagtgaagagttacaagcgatgtttgaagggtacgtgaaattttattatatccaagaattagttagtgatttacaagaacagtgctacgagtggtctggcaattcaaataatattaatgattggtacgacgaagacttgtacgatgctgttacatcttccgaacagcctttttctaagttcgttgaaagcattgatggaataaaatcgctggctaaaggtgattttaaagataagcaaaaagaacatctgcttagcatcttatatattaacgtcattacagccttggaaacgctttatgttgagttatttattaactctatagataaaaatgactcataccttacagatttcatagaaaaaggtaagacggaatttaaggtaaataaagaaattttggctttgccattcaaaggagaaactattgaaaacatgagggcggaattgatcaaagcaatcaaagaacatttgattagtgcaagttggcatagtacaaacaaagttgtagggcgttataaagctacatttgacattaatgtacaaaaagagtggccaatagacgagatcgaaatagcaacacaaaagcgtaatcatttagttcatcgtggcgggaaagataaagaaggcaatccggtagtgattactgaacaagatttagatatgttgctggatcacgctcaaattcttggagaaaaattatttgatagtcttggggtagcattacagaaaaaagatgagagcgaattttga

SEQ ID NO: 113469 - DNA, 1554 bp, Enterobacter aerogenes
atgaataatattagtgcagaagaaattttaaaccgtgtttggaactatgcccatgtattacgtgatgaaggcgttggctacggtgattatgttgagcagctaacctatctgatttttctgaaaatgtcatctgagcgcgctgaaagtggacagggcggagaaagtcttgcggcggattgttgggccaagctgatagagttagatggttcagatttggaggtggaatatcgctatacattggagagtctgggtagccaaaaaggcactctgggtatgattttccgtaaggcgcagaacaaaattcaagatccagaaaagcttgagcgcctgatatccatgattaataaagaatcatggtcatcattgagtattgatgtcaaaggcgagatttacgaaggcctactccaaaaaggggctgaaagtgagaagaagggtgcgggccagtactttacgccaagaccaatcattgaggctattgtagatgtaatgcagcctcaaccaatgcagacaattgctgatcctgcttgcggtacaggaggctttttgacggcagcgcacgactatgtgcttttcgacatagatcgagtgaccggaaaaagaatgcctaagtcgttgtcgaaaaaagaaaaacgtttcttaaaaaatgaagcaataagtgggaacgatatatcagactcagtcgcacgtctatgtgctatgaacctttaccttcatggtattggaactgaagagtgcccgatatctacatctgatgcgctcgcaaaagaggtcggtttaaacaaagtagatatggttctcgcgaatcccccttttggtaaaaaaagctcaatcactatcattaacgactctaccggaaaattagagaaagaaaagctgacctacacccgtgcggacttttgggcagaaacttcgaataaacagcttaacttcgttcagcatatcggtaacatgctgaaagttgatggtagcaactcaggcaaagctgcggttgttttacctgataacgtgttgtttgaggggggggccggtgaaacaattcgcaaagcactgctggctcgctttaaactgcacactatcttgcgcctaccgacgggcattttttacgcacaaggagttaaagcaaacgtgatattttttgatgcgaaacctgccgccaaaaaacctttgactgaaagcgtatgggtttatgactatcgaactaatgtacacaaaacgttaaggacgaataaacttgttcgtagtgactttgacgaatttgttgagctctataaacctggtaacctcaaagcgcgtgtcgcgacatgggctgaagtacaaaacgaagagactggagcgggaccaaatggtcgttggcgtgagtaccgctatgacgagatcatcgcaagagataagacaaatctcgatatcacctggttgaaagaccaatcattggaagatatagaaaatcttcagccaccagcagtcatcgcaagtgagattgttgaattgctcacagcagcactagaagagttcaaaagcgtagaagaagcacttgtagaagaagatgaagattaa

SEQ ID NO: 113470 - DNA, 810 bp, Enterobacter aerogenes
ttgagatacatagataaacgccagctgcgtagattggtcgatttaacagacattgatttggcaaaagcacaaattgctgcgttaccagcagatcaacgtagtgattttattgatgccaacggtgatcgttggtcaaagttaaagccagctctgtggcagttgggcaacttaaaatgttggtattctgagtcggaactacaagttcaacaagggcacgttgaacacttcagaccaaagaagaagcctcacggtcttaatggagttgcacactctggttactggtggcgagcttttgattggactaatttccgactatcacaccctacatgtaacgttcgaattactgattatctgacaggtcaaattgttggaaaaggcgcgtattttcctcttaaagatggtgatgctagagctatcgacgaggcaggtgagcggaatgagaatcctgttcttctcgatccaacagtgattggtgattgtaaattaatttgtttcgatactaatgatggtaggccacttgctactttttctgtacagcaagatccgtggaagaacaaaagagctattcaatcaatagcgttttatcatctagatgaaggaacatggaattatcaacggaaagacttgatggatgaggttggtattctttgtgacaggttaattgaagccgaaagctcacccaatagagatcaagcacaatgtgatcagttagctgatgaattggttggttatattaatgagcatcaaccgttcacctcagcatgtactcaagtaattaaagaaaaagggttgcttgaggcagtaaattag

SEQ ID NO: 113471 - DNA, 684 bp, Enterobacter aerogenes
gtgaggcttaaaggtgttaaggatgcgattactttcaaggaaatgagtgaaggtgagcaacagctgctcactattattgggcttatgcgtttcactcagcgagatgaaagtctctttttgttagatgagccggacacacaccttaatccagcgtggtgcttggatttgttaaaaaacctcagaacatatggtgtcgaccctaaaaacagccaaattttaattaccacacacagcccacttacttttgcaggtttagacaagcacgaagttgtgattgtggacaaaaactcggatggtcagatttatagctatcaccctaccaccgctccaaaggggatgggtttccaggctattctaaccagtgatttctttaagttacgctcgaccctggatagggatactctgaatttgcttgatgaaaaacgtgagctgggtttaaaagaagaaaaaaccgacgaagacagacagcgacttgatgagctcaatacaattcttggaaaattagatttttcacatgcagcacgtgatcctctatatctagaatatatccgcgcaattaccgaagcacaaaaagagtttccagaaattgcaaacgcaactcctgatcatgtttcttggcaggttaggaaacggatttctcttgatattgctaaacggttatcgagaaaaaaggaggacgtttga

SEQ ID NO: 113472 - DNA, 954 bp, Enterobacter aerogenes
  misc_feature (940)..(949): n is a, c, g, or t
gtgaaaattgattggttacgattagaaaacttcaaaaatctcacaagttttgaggtggatttttccttaaagtctgaacgccaagttattattggtcgcaatggtgtcggcaaatccaatatattggagtccatcgcatggattttcagagacttagatctttgtgaagaatctgactttgagtatgagattaaatatcgatgccgtgatcactatgtaaaagtaatatctaaagggaaatcgagtaaaaagcctaggcgcaaaggtactcggcgagaaaatattcagcgcttcaaacgttcttattgggtaattgaaaacgctgcagatattgaagataaaagtagcgaagaaattgaaaaattatttgtagagttaaaagagactgaatttaaccgccgcaaccaagctattaaaaacgaaagcggcgtttatcaatttagagatgaaagactgcttcctgattatgtttttggttactactcgggaatatcggcacgctttaatgaagcgttcgaaactcacgagcgcgattactattctgaccagaaggatggggaggaaatgtcgcttagaactatgtttttagctaagcctcaccatagtcagttttcattattatctttttttgctaagcaggatgaggctactgcaaagtttttgttggatgagttcgacatagaaagcttgtcttcagtcttgtttacacttcaagaaccctattggagtagttcgactaaaaagagcgaactagaaaagcagaataaagataggcgtttttggggggctggcggaaatgttgagccattcttaaataaattatttagtcttgcctatgcaccaatggctgggaccgaaagaaaagaaatatcaataaatcgaacgactaacttagaaacaagatattgttttctaaactctcaggactctattaataaannnnnnnnnnattag

SEQ ID NO: 113473 - DNA, 1731 bp, Enterobacter aerogenes
atgacaagtaaaaatggtaaaaaagaaggctggattgaagttcttttggaagactgtgtcgcaattttggactccaagagaatacctgttaatgcaggagagagagctaaaagaattaaaggtaaaagtagaagcgagctctatccttattatggagcaactggagaagtagggcttattgatgacttcatttttgaaggtgaacaccttttaattggagaggatggagccccattttttgataaaactaaaaatgtggcatttgttgttaaagaaaaattttgggttaataatcatgcccatattttaaaggcatttgattctgttacatccaatagatatttaagtcattacttgaatcaatttgattataaagggtttgttggtgggtctactcgcttgaagcttaatcaagcgagtatgaagaaaatccctgtatctttaccgtcgttaagcactcagcacgcaatagtcgataaaatagaagaactttattcccatattgatgctggtgttgaagggttaaagcaagcaaaggctaagcttcaacaatatcgtcagtcagtacttaaagatgccgtcaccggtaagctaacagagcaatggcgtgagcaaaatgtagacaagttagagccagcgagttcgttgctaaatcgtattctcgatgagcgccgagctaactgggaagctgagcagctaaagtcctttgaagagaaagggattacgccgaagaacgataggtggaaggagaattataaagagccccctcaggctgatgtgtcttccttacctgaaatacccgatagttggacttgggctactataactcagcttggtgagttaaatagaggaaaatcaaagcatagaccacgtaatgacccgagtttatatggtggagattatccgtttgttcaaactggtgacgtacgagcagctgatggccttttaacaaattataagcagacatattcaaaaaaagggcttgctcaaagtcgtttatggccaaaaggtacattgtgtatcactattgccgcaaatattgctgaaacagcaatacttggtattgatgcatgtttccctgacagtgtagtaggctttatccctcaaaatgaaaatatttcagttgaatatatagagttcttctttaggacagtcagagaagaccttgatcgctatgctccagccacagcccaaaaaaatatcaacttagcaatattagaaacagtttctgttccattaatgtcagttgaagaacaacgagagttagtgctacaagtgaccgaaaagttggcaagcgcaagtagagcagaaaccactatagatggaaagataaaacattcagtttccctaaagtcttcaatattagcgaaagcattttctggtgagttggtacaacataacagcaaagaaaataccaaagatcttctagatcaaattaagacagaaaaagaagctttagcagaaacaaagccaaaacgttcaattaagagggggaaaaaagtgacttcagggcgtaaaccattactgacagtgttgaacgaacaaagcgaacctataaaacctgatgagcttatgcagttagctggtttttcatctaatgaagttgaagaattttatattgagttggccgaaatctcagagaaagtagcacagctctcacctgacgaaaaactgattaaaaactggccttatgaaaaagagtcagagattaaattgaagctaaaggattag

SEQ ID NO: 113474 - DNA, 555 bp, Enterobacter aerogenes
atgacgaagccatgctggagctccgtgccagaaaaaagttggcttctctgccgggcgagggcgacagatagtcgccgatgttcagcagggattgcgcgctggccgagggtaccgaggtctccgtcagtaaaatatgccgttggtttgcctcggcgcacttggtattaccgcagcgtcaaggcagttcccaaggttcagcagcatctggtctcgtcgatcaaggtcatgatcgacgagaatccatcgttaagctatcgaaccgtggcggcactgctgggttttaacaagaacacggtccagcgcatcttccagctcaaggggtggcaagtgcgtaaacgtccggttgggtttcgcccgagactccgggccttgtcctcggtggcatcggcccctaaccagcgttgggcgaccgacctttgtcggatctgggctggacagaatggctggtattcgttggccttggtgattgattgccatacccgagagttgctggggggcatctatcgcgcagtggtaaatcaaagacggctgaggcggcgcaggagcaagcgctga

SEQ ID NO: 113475 - DNA, 303 bp, Enterobacter aerogenes
atgagtaatcccagtcatagcgacatcatgcgcaagttaaaagagatcaaggggattaaggagctgctggagaaggccgtgctcttgtatgtcctgctcacggatggcgatctgccggtctggtgctatgcgctcatcatcggtgcgctggcttatctggtaagcccgttcgacgtggtacccgatcccatttcatttgccggttatctggatgatttatcgatcatcacctcggcattagccgcactgccggttaagtcacaccaccgccaatccgcgaaagaccgaatgagatcaccgtga

SEQ ID NO: 113476 - DNA, 750 bp, Enterobacter aerogenes
atggccagaaaaatcattgtcgtcaccgccgcttatggcaacgaccacgttaaagcgcttggcgggcagtccgccgtattaccctttatcgccggttccggcgccgatggcgtggaaattcgccgcgagctgttcagcgcggcggaactgaagcagttgccgacgctggcggccgacattgaaaaacggggcctgctggcctgctactccgcgccgcaggcgctgttcgctgacaatggcgagctcaatcctaatctcccgtcattacttgaggaagcgcaaaccctcaacgccctgtggctgaagctctccctcggtcatttcatccataatcaacagctggagacgctgcgcgatattctgagcgacagcggcatggcgctggtggtggaaaatgaccagaccgattgcggccaactggcgccgatgcagcgcttcaaagccgcctgtcgggtccatcagatgccggtgacgctgactttcgacatggggaactggctgtgggtcggcgattcgccggaagaagccgcgcgctacctcgcccctgcagtcagctatattcatgtgaaggcggctgagcctcatcatgagaagtatcgcgccgtcccgccggaccaggcggacgcacgctggctggcgctgctcgataacctgcccgccgacgcgccgcgcggtattgaattcccgctggtcggcgacgacctgaccgccgtcacccgccattacgttgatctgttacgcgaggattaa

SEQ ID NO: 113477 - DNA, 678 bp, Enterobacter aerogenes
gtggatcagaatcttagaaatattcatgaacatatgattaatttgggatgcggatcgttaagacatgccaactatttggggcatttctacgatatggttaatgattattgggatgaattggctgtactacaagctgcgcatgccggcgaaatattcttgaaagctagattagcccaagaacatccattattaattttcgataccattccaaaatcaacgagtaaacatgttgatagtcttggcctgctaaattttgaaagtttactacaagacggaaggacgattgactattctgagttgccagaaaaagtatgggccgcaactggtttgaaattcacgcctgaccaattacgactttataaagagttcggttatcttcgaaacaaaatacaacatttcgcctctcctaaaggagatattcaaagtcaaattacaaattatatctatggatttattgacccattcataaattcgcaatggggtttatatgcacttgatttttgcgatgacaccgagccatatgaaaaccttgttcctgttctggccagttgcaacgtggagtttttgattcctccaggtttaggagcaaatgtgatgcaattattagatgatggatcgcctgcctatattcgtaaaatgagaatgcaggcgattgaaaaaggttatatttctagttag

SEQ ID NO: 113478 - DNA, 705 bp, Enterobacter aerogenes
atgagtgtcgtttttgttttagctgtagcactaatcacgaagtttcttttcccagattttcaccctattgcaatagtttctgaaatattgaatgtcaaaaaaacaattgataagcataaagtagagacatggcttgcgttaatatctatagcttccataatatcttctttaatttgggttcttattatttggttgaagaacatattattaggttttttttgtgagaaacagcaccacgaagatatatttcacgcaaaaaaattacgtatcttaagaaagaccatatctaactcaacgcttgatagtatgttgttggatgctatggagagtaaaccaaagaaatcaattttagttacgctttcttcaagaaaggtatatgttggaatagttaatggcattcaagaacctacagaaagcgaagcgccaaatagctatatctctatttttcctattatgtctggttatagagataaggatacgctctcgataacatttactaattcatacccctcagaagtatcagtctcatctgcagcgactgctgactcaaagaaaattcataaaatagctaacatggatattctaatcaaatccgatgaaatttcccatttatcttggtttgattttgcagtattcgacgaggttaatggctcctttgaggaaggaacaatcgacctgagaactaatgcggctgattctacttaa

SEQ ID NO: 113479 - DNA, 282 bp, Enterobacter aerogenes
atggcaaacaataaaaatcatattattggagaagtgcaaaaaggttatgctcgcatccgagtcggtgaccgggggggggcttacattccgtctgaggaaattgcaacgctccctgaggtccaggacatgcaaaaacgtgctgcagcaatagtgggtcgcaacgccaagattaatggtgcatatattgctgggcaagaggcagctcgtaaatatgtatccattgcaaaaggcgcaactgttaaacaacagactttagaacaaaaagataaagcgaaggcataa

SEQ ID NO: 113480 - DNA, 1179 bp, Enterobacter aerogenes
atgcaattgcgtaaattacttttgccagggctgctttccgtcaccttactgagcggttgctcgctgtttaacagcgaagaagacgtggtgaaaatgtcaccgctgccgacggtggaaaaccagtttacgccgtccacgtcctggagcacttcagttggcgatggtatcggtgatttctattccaacctgcacccggcgtttgctgacggcgtagtgtatgcggctgaccgtaaaggcaccgtgaaagcgctgcacgctgaagacggaaaagaagtatggtcggtgaacctggcggaaaaagacggctggttctcgcgcgccccggcgctgctctccggcgggctgaccgcttccggcgaccacgtttatgttggtactgaaaaggcgcagctgttcgcgctgaataccagcgacggtaccgttgcgtggcagagccgtgttgcgggtgaagcgatttctcgtccggtcgttagcgatggcatggtactggtgcataccagtaacggtcagctgcaggcgctgaacgaaaccgacggcgcggtaaaatggaccgtgaacctggacatgccggcgctctccctgcgcggtgaatccgctccggccaccgcttatggcgcggcaattgtcggcggcgataacggccgcgtcagcgccgtgctgatgcagcaggggcagatgatttggcagcagcgtatttctacggctaccggcccgactgagatcgaccgtctgaacgacgttgacaccacgccggttatcgttaatggcgttgtttatacgttggcttataatggcaacctgaccgcgctggatctgcgcagcggccagattatctggaaacgcgaactgggttcagtgaacgatttcatcgttgacggcaatcgtatctatctggtcgatcagaatgaccgcctgctggcgctgaccaccgatggcggcgtaacgctgtggacccagagcgatctgctgcaccgtctgctgaccgctccggcgctgtataacggcagcctggtggtaggcgacagcgaaggctacatgcactggatcaatccggaagacggccactttgtggcgcagcagaaagtcgatagttccggcttcctgaccgacccggttatcgccgatggtcgcctgcttatccaggccaaagacggtacgctgtattcaatcacgcgttaa

SEQ ID NO: 113481 - DNA, 1422 bp, Enterobacter aerogenes
atgaaatttaaatggaagacaagaaaacttggagaattagttacatttctgtctgggggaacgccttcaaaaaataataaagactattgggggggagatgtcccttggattagcgcatcttcgatgcagtcgacgagatatcatgactccgatctccgggttaccgctttaggaagctccaatggaactcgattggtcccggaaggaactgttttattattagttcgaggtggggcattacataataaaattccagtagggatcactacacgtgaagtaacatttaaccaagatgtgaaagctttaattcctaaaaccaccgaaataactccctactatctcctgtcatggttgatgtctgagagagcacttcttttatctaaggttgagaatactggcattggggctggtaagctagatacaaaaattttgcaagatttagacgtactaatacctcctaaagctgaattacagaggttggaatcgtttagtcgtgccttggatgataaaattattcttagcgatagaatcaaccaaaccctcgaacaaatggcgcaagccctgttcaaaagctggtttatcgattttgaaccggtaaaagccaaaatagcggtactggaggccggtggtttgcaggaggatgcaacgcttgctgctatggcagcaatctctggaaaagatactgattctttggctatttttgaacaagagcatcctgaaagatatgctgaactcagggctacggcagagttgtttccgtcagccatgcagggaagtgaattgggagagattccggcgggatggttctgtacggacttatcgtatcttgcattacttaatgcctcttcctggtcaaagaagaatgctccagaatcattaaagtacgtcgatttagcaaatacaaaatggggcattattcattcaacagaagaattctttttttctgatgcgccaagtcgtgcccgtagaatattaaaacccggtgacactattgtaggaactgtgaggcctggaaatggttcatatgcctttattgctgaagatggcctgactgggagcaccggttttgcagtattaacgccaaaacatgaacactttagttcgtttatttatatttgtgcaacgtctaaggataatattgaacttctggcccatttagccgatggtggagcatatccggcagttaatgctgatgttgtactatctactccgtgtatcattcctgttgatcatcacagcagcaaaaacctaataacatgcttccactattatgtcagagagttatttgcttataagcatagcaatctcagacaaaataaatcattggagcaactccgtgacaccctcctccccaaacttctctccggcgaaatccccctaccggaagccgcagaattagccaaggaagctgactatgtttaa

SEQ ID NO: 113482 - DNA, 1077 bp, Enterobacter aerogenes
atgaaagtaagtgattttatttttcaatttaaacctaataattattcacatgaagaggccttatgtagagtaaggatattcttacatgggaatactcaattttcactattaacagatctaggtgataaaagcggaccaactagtgtgacaaattctgtagaatatatccgcgagcaactaattaatgatggctttatttacaatgatactgtaattattgaacattatgaagaaggattttctggctacggcacttttgatattgtaacatttaaccataataattatcctcactgggaaaaaacgacactcaaaaaaatgcagttaatgcttgattgttctctcgaagaattattagatagtacattaaaaaacaaaaggctctttcaaaagatagaatatcttcatcaacaactttatccttacaccaaaaagacttatgttgaagatagcaataccatcacgaaaagattacaaataaaagagcattctatatcaaaaaaagaaatttctgattttattgaaacaaacccaaccgaacgtgaaatagctgattttataaaaaaagatttatcgtttttcgctagtttttatgctaatccaaaagaagagtatattgttttatcagaattaaaaattgctaatggtttcgttgattatgtcatcttttccggtcgatcacgaatggatgttactctcatagaaatcaaaggtgctaattttaatcttatgaaccaatctggatacggtaatctgtcacaaaaaacaaatgaggcgatacaacaggttagagagcgaattagtgtaatatatagaggagattatgaaaaatatagaaactactttcatgagataagagaacaggtcgaaactggttctggcttctcaaacgcattacttggaccaaaaggaaatttaagtgttgaccctgataaagatataaatatcagaagtgttgttattgctggtcgttctaataatgatctcgaagaaagtaaacaacgacataatgttgaaattacatccagtccaccgatcagattagaaagctgggatagtttaataaataaattttaa

SEQ ID NO: 113483 - DNA, 1050 bp, Enterobacter aerogenes
atgacagcactcactttacccactaaacatcgcaccctgtggcatttcgtcccaggcctggcgctgaccgccgcgttgaccggcgccgccctgtgggcaggcagttttcctgctatcgccggcgcgggcttcagcgcgctgacgctggctatcttgttcggcatggtggtcggtaacaccgtttatccaaagatttggcagtcctgcgatggcggggtgattttcgccaagcagcatctgctgcgcctggggatcattctgtacggttttcgtttgacgttcgctcagattgctgacgtcggcgtcagcgggatcctgattgacgtgctgacgctttccagcaccttctttatcgcctgtttcctcgggcagaaggtcttcggtctcgataaacacaccagttggcttatcggcgccggtagcagcatctgcggcgccgcggcggttctggccaccgaaccggtcgtcaaagctgaagccagtaaagtgacggtcgccgtggcgacagtggttatctttggtaccatcgccatcttcctctacccggcgatgtatccgctgctggcgcactggttcactccggaaacctatggcatctatatgggctccaccatacatgaagtcgcccaggtggttgccgccggtcacgcggttagcccggaagccgaaaatgccgcggttatcgccaaaatgctgcgcgtgatgatgctggctccgttcctgctgttcatcgccgctcgtgtgaaacaactggcgccagccggtaacggcgaaaagagcaaaatcaccattccgtggtttgccatcctgtttattctggtggcggtatttaactccttccacctgctgccgaaagccgtcgtcgatatgctggtcacgcttgataccgtactgctggcaatggcaatggccgcgctgggcttaactacccacgtcagcgcgctgaaaaaagccggcgctaagccgctgctgatggcgctggtgctgttcgtctggctgattgttggcggcggcgcgattaacttcgctatccaccacctgattggctaa

SEQ ID NO: 113484 - DNA, 2490 bp, Enterobacter aerogenes
atggctcatatcagcgccgtcgtaaccctacgaccaattcgattcgcattcctcgttaaacctaatgacagtaaacggttactggaaatcttccaaataaacacatgcctttggggcggtaaatttaaccctatcattccaatttttggccatgtgcctaaatggtgggatagggatgactacaaacctgagagcgctttgcagatcgtcaatggctatcttgatgctttcgaacctgatttccttgtagaagctgaagcagggctggctaaagggtttggctatgacccagaccgagtactgcaactttcagccatgctaaggcgatctgatgaactgcggggtcaagctgggcttgatgtcttcgacctatataaagatctgtataagaaacaatttcaattcgtgcgtcgacatgagcacaatatcgtggaactcatacctcggacgaatgcattgaagttgttctgtgcttgcctatctggcagcttccctgaggatgaagaccttaaatattttggccaagggttctgtgatgcttttgatcccaaacaggttgaattatccccagaagctctagtagacctgtacaaggatggatttaattcagcactacaaatcggtcactcgaatattgaggttaattatcatgacaatgcggatccaacgctctttgtcatggatgcacatgactcgcgcgatcttattgacttctggaaccttcgcgctatgcggaaatatgtccgaccaattccactccaatggattgatgcgctttccccatactgcagagaatacattgaagattgccatcgccccgttcgagggaatcaatttggcttaatgactcatgctaccgtaatgtttgcaagatctatccctactgcgaatatcgaacaactttacgccgactatttgcgggttaatcaagatgaggcaaataggcgtcaagattggtatccaccgatttggcgaccatcatctggttttacagttcgcagtactcgacctactctatcctgtgcagaaaaaacgtttgacacacaaatcgaaggtgaccgaaccgaagttcgatttgattatctccatccagaattcactgaaagatatggtgccaatgatgctcgctgggtgaacgtagtgaaattaaaaaattggtcaaataccagtcgggctgcaaccgtttatccttgtaattacaggtcgcccaagatgccacgtttccagtcaatacagagaagcatcttatctacaactgaaggttttgttgtattttgccgtttccataatatgtccgatctctggcgtttgagtgacggcacaacggcgataagtgaatggctaaaaaacaatggagttgaaagccaaatctccgatgcaggacaagctacacagcaaattattaatacgctcggaggtttcaggggaattagtagttttgctcatgcagagatagtgaaacttctcaataaaatttctcgacggcccatttcaccctcaattcaacaccaagaatttcagaacaaaattaataatgtggtgaagggtgatatatggcgaaataaaaatgctgaaactttagttgagcttggtgctgttgagcttggcttggagttaaagtgtgcaaaatgctctacttggggatggcacgcgctacgcgaactggatcttgtagtagcatgcggcctttgcctaaataagtttagctttccaatgatcgatccaagttcgagtcaattgtcccgttgggcttacaggttgataggcccctttgcacttcccgattatgctcgtgggggatacgccgcatccctaacgctaagatttctcgccaacacatttggaaatcatgatgccacgattacatggtcaactggccaaatactgacattggccccaaaacaatatattgaagctgacctaatactctggcaccgacgcaaagttttcaatgagctggatcaccacgcagaactcgtatttggagaggcaaaaagctttaggggcgagaattccgaagagaaaaaagctgttgctgatgcatttgaagttgaagatgtagaaagaatgaaacaacttgctatccgcttccctggcgcaattttggtttttgcaaccatgaagcaggcaggagatctttccccggccgaaattcagcgaattacaaaactcgcgtcttgggggcgtgaatacatccacgagcgccgacaaacaagggctcctgtaatactcttaactggtctagagctgtttgcaccatattcgctttctcaagcctgggatgctgcaggtggccgccatgctgaaatgggaaagggacacttcggctatacagataatcttcgcgttctggccgatatgacacagcagttataccttaacatgccggcatatagcgaatggttacgagcaaagtgggaaaaaagaaatcagcgtcgtcaagtgcgacaagctgctgcggtgccagcacgagatgctggagatcattaa

SEQ ID NO: 113485 - DNA, 801 bp, Enterobacter aerogenes
atgctgagtacgttacccgatttacacagaagttttgcagagcaactcaaacttaaatttcagtcagattcgcgaattcattcccttcttgctggcggctcgatgattcatggcggatttgataaatactccgatctggattttgtcgttgtcgtagatcctctctactatgacgaaattatgacgcagcgtagggaacttgccggaacattaggccatctgctgcatgctttcaccggggaacatgtgggagagcctcgcctgcttatatgcctgtatggccctgaactcctccatgtcgatctgaaatttgtcaccctggacatgctcactcaacgcgttgaggagccagcggtgttatttacccgtgataacactgctctgaagcgacaactggcaaaatttagtgctcactggcccaacatgacgccggagtggtttgagtcccgagcctggatctggcttcattacgcagtggttaaactgggaaggggcgaactctttgaggcgattggtatgctggcattcttccgggagcaggtgctgggaccaatgctgtaccgtcgcgcaaatctaccgcaacgtggggttcgccgcattgaattctacggcattgatcctgatggtctgctgacttccacgttggcaacgcacgatcgtgactccgctggtgttgccatcagaatggctgttgacgcttatatcaatctgcgggctgatgctttgcctgaaaatatcgcagatgatgcggcacgatgggcggttcttaccatgttgaaagagtattctgacaggggttaa

SEQ ID NO: 113486 - DNA, 867 bp, Enterobacter aerogenes
atgcaaagaattattcctgataaaaattggtgggataacgagagtcataatcgaaatgcagcaactgtatgcccatacgcgaattcgcatagctgccctcgataccatgacagtgtagttctgcttaaacgtagcaaaatgatagcgggcataacggatacaaaagaagaggagttgagtgagtattgggaaagaaccaaattttcatctttatgtgatgaagaattaccctcagtttgttcaaataaaaacggaggtgtttcatcgatcagtaatttttgccctgaaatatcatataagtatttttactattatgctgattacatgtgtaaatatgtcgatgaaatagatcaggatacaggtgtgcgtattgcgaaaaacgataatataaaaaatgactggaagtattcatggatgaccgttactcctaggttttatttggattgcgatgtctttagtcatgttaaacagttcaatgaaactttggggaatgattacttaaaaagattgcaccccaatattgttcagcaaataagtagaatgaataattgtttagattccaatgacccggcaggagcgttgcacgccgcctctaatattttagaaacaatggcgaaagatatttctcaaaacccaaatgtatcaaatcaatcattgggtggtttttttgaacagttcaagaaaaagtcaaacctatctaataaccttattgttgcgattaaagatatttatgttttgcgtaacaaattacctactgctggacacggaagcctagacaagcctgaattgactatggcagatgctatagctattgcggcaatgacaaaggcgatattagaaattgaatatcgaagcaaggccatctaa

SEQ ID NO: 113487 - DNA, 1251 bp, Enterobacter aerogenes
atgagctttgaatccttatatttgaaagattggcagcaattcgcagatgtgaacatcaattttcatcctaatgttacgattattactggtgctaatggaagcggaaaaacgaccatactatccttattagcaaggcatcagggatggcagcattttaccctagccacaccaaagacagatttaaaaactaaaacgttgaagtatttttctttaatgaggttttggggaaaggaaacggattctgacaggaaaataggaactattacatatgataataattttattgcaacggttttagcacctgaagcaggaagtccccaatacgagcttcaaatacaaaatcaaagaaatgttaggtttttattcattccctcgcacagacaaactttctcttatagacgtgttaacgaaattactacaatacgaaaagaaagacaaacagcattcgaagaaataaaaaacaattatattaatcgagagcttcagcaatacggtccaaatgaaccaaatagctttttaatgaagagaactctgctggggtggatgattaatggatatggagtgcatagtggaaacaaaacaataatgccgtccgacccacaacaaataaaaaacttcgaagggtttcgtgatgtgctgaggctcatactgccagatacattaggttttcaagatattgaagttagagactatgagattgttttctcctgtaacaatggacaggatgagtttttgctagaaacagcatctggtggaatttcggctctaattgatatagcttggcaaatattcatgtttgacactgattctaaagaaccttttgccgttgttatagatgaagtggagaatcacttacaccctagtatgcaaagaaatttactgccaaatctttctgctgctttcccacatgtaaaatttatagttagtacacatagcccgctgatagttacttccgtagaagaagcatttgtgtatgcacttcggtatgatgagcgaaataaagtacgctcttcattacttgattttagacatgaagttaagaatgctgtagatgttttggatgaagttttaggagtatcaacgactattcctgcttgggctgtaggtaagctttcctctattttagaaaagcattcagataaagatcctacttctgagtctttagcagagttacgtgctgatctgtatcaagctggacttgggaaactaatgcctcaagctataggagctatcgcggaggcaagaaaatga

SEQ ID NO: 113488 - DNA, 588 bp, Enterobacter aerogenes
atgagacgtctgcataggcctgagtgtcctaacactaccgcgcttcgtaataattacaagcatccagagaataaacttgctctccaacaagcttcttacggaaaatgtatgtattgcgagagctacatctctaatgtttattttggagatgtagagcatattcgtcctaaagcgcaagataaatatccagaactagagttcacatggacaaatcatggtttctgctgtgcacgctgcaataatgctaaaagtgatcaatttgacgagggttgtcctcttttagatccatattctgaggaccccagcatacatatcttagccttcggttctttattaagaaataagagaggaagtgaaaggggcgccataacaataagtacaattgagctaaaccgggtagaactggttgagcgacgagctatcagaataaatgaactccaaaatgcgatagacgcatgctacagaacttcaagtgctgtggtgagaaataccttacttactgcattggcccatgaatctgaccctgataaggaatattccatggttgcagcggctttaattgaagccaaccaaccagaacaaaactaa

SEQ ID NO: 113489 - DNA, 642 bp, Enterobacter aerogenes
atgaaacgcgccccttttctcaacaagcagtctcccgagcgcacgctcgaggtggtgatcctggccggaagcctggcatgggagacctcacgcgtctggcgaaaagatcccgactgggaagatgatattcctccggtggtgctcggcccggatgaactggccgatctggacaacctgaccattatcaggcccgacacgttctatgcccgtgtacttcgtaccggcgatatacgcgaagaagacctgctgaaaatcgccgtaaaactggcacacgcgggtgtgcagatggcgcggctgatgacccccgacggtgagttagtggagaactggaccgggcagcttgcacgcctgcgacaggaaaggccttctgacatcctgccggatcacttccgcctcgatgaagaagcgctatggtttgacaagctcaccgaacgccgggacggtgaaagcgacgtccagccccagcgcatctgttcccctctgcgcgtcaccgccatcacctgcgacagccatgacggcagctatggccgcctgctggaatggcacaccaccaccggcagttgcggcgctgggccatgccaatggctatgctcagcggcaacggcgaggagctgcggcgcattctgctggagaacggcctga

SEQ ID NO: 113490 - DNA, 159 bp, Enterobacter aerogenes
atgcccaccagccataagattctgcttgcagagataaaggccgactcctcgtccacctctttgcttacgggtgaagaagagcgtaaacagactatctatatcatcttcatcaacaccgggaccattatcactaacaattatctcatcatccttgaatga

SEQ ID NO: 113491 - DNA, 129 bp, Enterobacter aerogenes
atgttgaatcaggggcaagtttacgaagtattgtctggatggggtcttcctttgatgatttgcgccaatttcctgaggaggtccgccgggatgccggtttccagctttaccgtttacaggcggggttag

SEQ ID NO: 113492 - DNA, 1314 bp, Enterobacter aerogenes
ttgattgagttagatgaatttaatctcaactacgctttatccaggacaaatatattcccaaaagtaagagacaaaatacattacctaaaagagttacattgtaaattcaaatacagtgttgatcttaaaaatcacctatctaggatttcattaaattatttagaggaagaggaggaggatgaagacatcatcactttctctgaaattcatattctcctcgaggagagtctcaaacaagatagcggcttggataatcgtgcctggcgaataaaatacgatacaataaagtgccagcacttacctaatcataacaaaaaagaacgtaacgctttactattggatttgttaaatcaaataaaagccattaaccctatccatgatacatatctttatctgtattcgaccttcactaatgaatgtcataaaaagccagaaatacttgagtgtattgatgtattatcgcatgcatatgagatttcatcaaaaaacaaaaggagaaacatcttaaattatctttcagcgttacacctgggattgtttgaaacagaatatgagtctgacacgcctgacttgatgaaaaacttcatcactaaatacgaagaagataaaacagaatcttcaattgcaccattcattatctttaaagccagatacgaaataggctgtaataaggatatatcaactgctatttcacttgctaaagaggctatggatagtccgtggcgacacaatcacattcaaaacattgttgatatattattaacagacaaatctaatattccgttagtcgaagagttcttggaaaatctgcccagagatgcatctgaaattcagatattaaaagttaaagctgacatcctctcattgaaacgagatttttcatccgctcttagtttaatggaagaggcgcataaaaagagatgggatttcggaagttatgccttggcaaaggtgtacgctaacctcttagcaagagagtatcacaaagcaattagaattgctgatgaaagccttttaaaaataaaagatttcagagaaagagatgtactaataatcaatagggaaatagccaagaagaaacttggcctagaagttaaaaaacatgaactattatctatcattgcacatcaccaatccaaaggtgatgttgcaatgtgcgcattcttccttattggagatgaactaaatgcaaataggcagctacaaacttgcattgaacgcgattacatgaattatttcaggttcttagagtggccagcattaccagataatattctcgctcgattcagtttaaccaatactcaggttgcttga

SEQ ID NO: 113493 - DNA, 1215 bp, Enterobacter aerogenes
atgattgaaaatatcgttgcagatgaaaaactattaataaaaaaacgaagcgttaaagatcttgctgattacatcaggataagatcaggcacctcgccaaactactctttatttttgggcgctggggcctctgtcacatcagggattagaacaggttttgaactggttcaggaatggaggaaggaaatcttcaatcgttttgcaactgtaccttacactgattcaaaagaagcaattgattggcttgccaagaaccatcctgattggtatgaccaaagtaacgagtattcttcattatttgagaaaaaatttgatttaccttctcaacgtaggcgatttgttgaattacaagtagataaaaggcttccttctataggatatgcgtatcttgtagaattatttgaaactaaattttttgatactgtgtttactacaaacttcgatgacctaattaacgaagcattttatcagttttcttcggatagacctttgctatgtgcacacgactcatcgataaagggtatttcgataacttcatcacggcctaaaataataaaactacatggcgattatttgtttgatagcatcaaaagttcgttaaaagaaacggagtcccttgaaaacaacacaagagaaaaactgggggaattcgcaaaggaatatggtttaatatttgttggttatgctggtaatgataattcaataatggatgtcttaaaatacctcttgaaacaagaggattatttaagaaacggtatttattggtgtaagcgcaggggcgatcaaatatccccggaattatttaaactacttaaccatgaaaaggtttattgggtagaaatagatggctttgatgagttaatggctgaattagttcatgaactaggtagcgaattatcattaagcggtgcccaaaaatcaaccaaaagagaacgtatgattcagaatttcatttctgatgagtataaactaaacaaaaatgaatatataaagaaagatttatttaaattaaagaaacacactctaacacaagatatatcttcattgataaatgaactttctgacagcgacagtcaaaaaatacctgaggaagattttaaaaatttattgtttatagataatttaattcgtgataaaaaatatgacctagctgaagataaattaaataagttaatcaaggatgacattagcgacaatataagtctaaatatttaa

SEQ ID NO: 113494 - DNA, 1260 bp, Enterobacter aerogenes
atggttataagttgtaggttaaaatgtgatttatgcgatcatctatacaggataagagttggtgtgggatttgatggctatcagaggcactactttgactgttctaattgtaatgcaaacatagtctttgctctaagggctaaagctccagaagctaatgtggaatcagtagaaaattgttctctctcgtttgatgaatcggacgtagagccagaagtcttaaattttcatccaaattgtgcatttgataaggatgatttgcacaatcctttttccttcccttcgttagttttgtcaaatttaatatcttcacatatgaggtatattcaggggagaattcaaagcgttgctcatcaattcgatataccaaatgcaccacataaatggtctttaattaaaggaatgatgacaactatccataaagataacaagaaagcagcaaggtttgttcagcagtatactaagcagagaaacaatgacatgaacccatcctcatctgatggtgtttctgatggagaagatgtcatagtttatgagtcaggtactggttaccctgagtcctacatcatccatgagttttttgattcacttttctatccgaagttgggagatatagtaaggcctattattgatgcgattgacgcgattgataaggatgctctttctgactttgttagttattggcagagtgagctgagggagcaaaatcaacatcggtatttaaacacattttctgattattttcgtcatagagaccactttggtcaaatcgttatatattccaggattgaatacaacgtcgatgagttaattgtgtcatctaaagggtttgatcagataaagttatattatggtgatgcctatgaagcgctaacttcaaatatgactattcttgcctgcctaaataatgtcatggatggtaggaagttcgatgagtttaaatcaatgacgcttacaaaatatttggaagtaaataaggcaaataaatctaaccctttcaaatcaaatcctttattctcggtcttcgcagaagaagatgtagaatcttctattagaaatggttctcatcatgcatcaatatggcatgatggagaaaaaataatgtacagaagtggagggactggagctcagcatgacatcccgtacactcgctatttggatttttgcaacaagctaaccattaaactggctgcgatatttataatcgaacattacctcagtaaacatgttagcggttcgggatatttcatcgttgattaa

SEQ ID NO: 113495 - DNA, 840 bp, Enterobacter aerogenes
atggtactactacgagtactgttgcgtagaggtatagaatctcctgaagagttagaggaacttggaataaatgtctatgcaagcattcctatctcggaatggttagcaaaagaatcatctaaagctggcaagaaaaagaaaaatgaatctgcaaaattactagcggttgagaatccagctgatttggcaatagaggctattcgaagtctccgaactagcttacattttgctatgatggagtccaggaataatgttttaatgatttctggcgcaagtcctaatgcagggaaaacatttgttagtactaatttagctgcagttattgcattaacaaataagaaggtactttttatagatgctgacctacgcaaaggttatgtccataaaatgctaggccataagcaattgaaaggtttatcagaaattctttctggacagattaaggtcgaaaatgtagttgaaaaagtacctggcggtgagtttgattatattggtagaggacaagttccaccaaatcctgctgaattattgatgcatccacgttttggagagttagtccagtgggcatcagaaaattatgatttagtcattattgatacaccgccaattcttgctgttactgatgccgcaatcattggtcattatgcaggtacaatccttttagttgcaagatttgaagccaatacgcctaaggaaatatcggtaagtgttagtcgctttgagcaaagtggattaataataaaaggttgtattcttaatggagtagtaaaaaaagcaagtagttactatggatacggttataatcattatggatataattattccgataaagaaaagtaa

SEQ ID NO: 113496 - DNA, 606 bp, Enterobacter aerogenes
atgccagaagtaatgacaaaaattgtgattagtggagtgctggggaagcactttgggaaagtccactatcgacttgtaagaaatacaaaagaggccattagagcactttgttgtacaatcgatggtttcgaaagatatttaaatgaaagtgagcaaaaaggtctcacatatgctgtatttaaaaatgataaaaatatcggagaggatgatttagcatttccaatatccggagaagaaattcgtattatccctgtattaatcggtagtaaaaaagcaggaatgcttcaaacaatatttggagctgtgttagctgctgttggggttgtagtaggggtgatgacttcctggacaggtgtgggcggggcaataggtactgctatggtaagcgcgggtgtgggaatgatggctggtggtgttattcagatgctttctccacaacctgcaggattagccagtaaacaatccgacgataacaaagcctcttacgcattcggcagcgtgaccaatacagcctcacagggttatccagttccccttctctacggaaaacgacgaattggcggagccattatctctgctgggatctacgtggaagatcagcagtaa

SEQ ID NO: 113497 - DNA, 735 bp, Enterobacter aerogenes
gtgctggcggaacagcaagccacctatgaagccgaggacgcactgcgcggtaactggctcgccggtgcgaagcagggctgggcggagtatcaggattcggccacagatgttttctcatctgtgaaagatatttctcaggccacattcagtggtcttgccaaccagctgacagcgctgaccacaaccggaaaggcgagttttaaagaattcaccacatccattctgaagatgattgttcaggtcatcaatcagctgatcgtggcctataccattcaggcggctatggggtggatcagcggcggctccagttccccgaagtcagggccgtcgtatgccgttccttcctatcgtccttccggttttgatgggggcggttttaccgggcatggggggaaatacgagcccgccggggttgtccaccgcggcgagttcgttttcaccaaagaggcaaccagccgcatcggcgtgagtaacctttatcggatgatgaaaggctatgcttccggcggatatgtcggcgctggtggtgcgcctgcaggcgcattcgctggtggcgtgaatgtctatgcaccagtaagtgtgacaactcagcagacaggtaatgatcagcggcagggtaatactgatgctgttggaaaggcctatcagcaggttgttaaccgctccgtgcaggatgggattgccaaagcgctgcgtcccggtgggcttatctggaacgctaataaccgcaggtaa

SEQ ID NO: 113498 - DNA, 288 bp, Enterobacter aerogenes
atgaatcagggcttaaagtttttgatcaaaacggtgtcctgcgttttgttggtgggcggtattagcatcctggttagtggttgtgcagaccagcgttacaagccaactgaatgcacggtgacatacaaaatcaacacctatccggtaaacgggcagtaccagctaaaaatcaatgcggtcaggtatgaccgctttggtcgcatgcaggtgcgtgttgcgcctggccaggcagttcgccccgtagggcactggctggcgaccggatttactaataaggactgtaaataa

SEQ ID NO: 113499 - DNA, 672 bp, Enterobacter aerogenes
atgaccatgccttactgtatcctgcataccgaagctgattcagatgttgtacttaatggactgggcttttcagaaaacgatattcatgctgctctgacatctgctttgtacgagcgccgcaaatccagcaagcttcaccccgctgtagatgcagggttccgtttctggagtgaaatggttgccgcgacacgccgtgtactaattggtaagggtaacggctggtcccctgaagtggtcaagcgaatggaaatggtcgctaactcatcgagaggagttaatctgattatcacctcgggtgacagacacaccgggcgtcctgatggattgccgaaaaccaaaaatgccaaaggtgaggcaacgcgctcgattgttcacaacaatcctggcacagttgatatgttccagacggatgcgttgtattcaggcaaatctgaaatcactccgatagatagcactcgcacttatatcgtcctgtactattatgatgcggctaacaaagaggttcgctgcgaggtgtcttatccggtaggaatggtgaatcaggacggatttgcccgcgtaagcgcatggagtgagcgtattattttgagtcctctgccatttgaaggtgcggatattttccctgatgaggatttcaatgacgacatatcaattactgttgaaagcaaatga

SEQ ID NO: 113500 - DNA, 1113 bp, Enterobacter aerogenes
atgagtaaccctgttgatgacggtaaacgtctttttaatccatcccggctcaagctggcacggatcagacgcaaactgaccctaaaagaactggcagaaaagatggggctttccagccgtattgtaattgagtacgaaaaagcctattgcctatatgaacccacgccagagacggtccaggcgtacgccagggctctgaaatacccagaatccttttttttcggggatgacgttgaagcaatcgatccactgacggtttcattccgttctttgcgcacgacaaaagccgccgaccagcatgcggcaattggggctggtgcgctgggagttatgctgagcgagtatttcagcacccgtttcactctgccgcagcctgaattgccgaatcttcgtggaagtgagcctgagatcgctgctcaggcggtgcgcgaagcttggggtattggcaagaagagcatcaccaacgttgttcatcttctggagaagcacggtgttaaggtgttctggctctcggaggaaacggcgagtatcgatgcattttcgttctggaaagatgatgtcccttacatcttcctgaatactcgtaaatcaggtgaacgcagtcgtttcgatgcggcacatgaactcgctcacctggtactccaccgtcatggtgacgtcaaggggcaagatgcagagcgtgaagcggatgcttttgcgtcagcatttctgatgcccctggaaaacgtgatggctgttaagatgacgttgccgacgttcgacaaaatcgtgcaattgaaatcgctctggaaagtctcggcgatggctctgattgtcagaatgcgaaatctgaacatgcttacagaatggcagtacaacagtctgatgcgcgatgcgacggcaaaggggtatcgaaccggtgagccgggaggaattgagcgtgaaagatcgctcattattgaaaaaatgatgaccgctctggctggtcacggcattaatctgactcaattgagtgatgagcttaacgtgcctcttgatgaactgagtagcctgctttacggtgtggcggcaattagtggtggtaatagcagaacatcaagctcgctgtcaaaggcctctctccgtctggtgtga

SEQ ID NO: 113501 - DNA, 786 bp, Enterobacter aerogenes
atgaaaaaaattattgggttgtctctggcgttctgcactttctcatccgtagctggtgatgctgcatcaggcgaaatccagccatatcctgattacctgtctgcctatgtcaaaacgcttgttacagccagttgtgaccaggtactttcagatgatggaaagaactccattgatagagccatcaagtccatcagcgctagcgccaccaaaggaatgactatcgacacagaaagctacaatgccatttatgactctattgtctttggggctgagatgggggataagctaaaaagagccaagaaacagaaaatgattctggctacaaaagacaaaattgggatagatagttgtggtggtgttggtgcctatgtattgatacaaaaggattttagcaagctgatatttgacggactaatgccttcagcacgatctcaagttgccgatggtaaacctaaagtgccagcttctgatgagggtatttaccgtacaacagcaaaagctctggcagaactgtacagcgctaatgaagttgcggccgatgacaaaattggtggtcgtaaggtggaagtgaccggaactgttcaggacataacaaaaaatttcgcgaatgatgtagttctcaaacttgaaagcggtaatcgctttatgcctgtcagcctgagtatgtctgattcagaaaagacgaaggcgtcgaagctgataaaggggcagaagatcaccgtgacctgcgaaaagatgcagcttttcatcggtgctccgtctggcggcaactgcacctttaactaa

SEQ ID NO: 113502 - DNA, 1137 bp, Enterobacter aerogenes
atgcacacgatgcttgaggactatggcgtagagataaatgagtatctcatcgatgagcttagggaggcggtaaaccacaaccttgattacgtttatacacacttctctgatcagaagggtaaaaacagatggggtgcattatgcagttgcatggactggataaccgtagctatccgatacataaaaaattaccctgagttatctgatgatatcgacatcagagcgatgcaagtttactccctcatatcttcaatcgacatcatcactgaatccattgagcaacttcaccgcattgtgataagtgagaaacttgaaggatggcccttcaagggaaagaatactgttttcaaaaagaaagttgcttacttatcaggtaaggatgatgacctctactttggcgaaatcagatcagtgttcggagcgcatccaacaaaacttcgcaacggcaaagaggaaaagctgttcgcgagttggccgcatgagaattctttcgaaggttttgactttaccgttaatctttcgagcaacattgtgggcaaggaagatgtgagtttcggtataaatattgctgaactcctcgcctacgccaaagagcgctttgaacatcttgtggacataaaacatggtctggattttctttatgacaaacgctgtaatgagttagccaaaatacaaataccagaatcacatagcattcaggaagagctggatctcttattggaggcgtccaaggttcggttcaataacgagtattatcactatactatcagtgagttaatcaccattttttcagtgactctcactgaagaaaagctcaaatctgatgaattggcgttcaaagagaagttactaccactaattgctgaaatacgacgaaatctccagaacatgaaactagtcgatcttgagtgcggcaacggagttattgtttcttccctgcctggtcgtgctctaagctacgaactaccgaaactattctcactcttacattcagagcgttatgacccacttattgattattatttcaagcaattaaacaaatactgtgatgaaaaatacacattccgaatcactgacggctatgggataacgttacttaagctccgtatgatgacctacgcagaaagcaagagatga

SEQ ID NO: 113503 - DNA, 624 bp, Enterobacter aerogenes
atgactacacaccaaatcacgacccacgtttacctcagggcatccactgacgatcaagacgctacacgcgcacttgaaaccatcaatgactttgttgaagagcatcggctaacaagtgttgagtattatgtcgaaaacttttctggggccaagttggagcgccccgaacttacccgcttgattgccgcagccaaaaaaggcgactttttgctggtggagtccatagaccgcttaacccgactccccgcagcacaatatgaagccctcaaagctcgtattaaaaaacaaggtttacgagtcgtcgttgtggatctgcccacatcgcacgatgcattaaaatccgcagcaggtgaccgcatcattgagcttatcaacggcctcatgatggatattgcagcccattacgcacacgaggactacaccaaacgccgccaacgtcaggcacagggcattgctaaagcaaaggctgaaaataagtacaaaggcagaccagcggatacagatctgcgacgcaaggttgagtcgtacctcaccaaaggcgggaatacatacgcggagatcgcgaaactgtgtgattgttccgttggcatggtcgcaaaggtcaaagcattactatcaaattga

SEQ ID NO: 113504 - DNA, 1299 bp, Enterobacter aerogenes
atgtcaaacccgaacgacaaagaaataaaagtagtcctcagcgcctttatcgactacctgaaagaacatggatgggtgctcaaagcgacaaataatctatcagtcctgttcaatatccgtgatggtgttaccttgaacgaagacagtatcagtgggctgttttaccagtgggccaaccgaaattcgtactccagtatcgaatacgaagatcattggtggcatacgatacgccgccggttaaccttcgtgatcggtgagacgttccaaccagcagtagagccagaattatttgtgccgttgagttccggtgtgctggcagtcaatacctacaaaaaatacgagaaagacgcgccagctaacgggtttgaccctgaccccgccccgtggtttgaatttcttgaacgtttgttccctgcggaaactgacagaggaatagtctgtgactggctggcgcatatattacagcgtcccgatcagcgcccatcctggcacctgctattcacgggggatacaggaaccggaaaaggtgtgctctttgagcatattctgactccactgctttcggggcaaaccgcctcgctggactcattcgccaaattgacggagaagcacagtacaacgctgacttccaatatgctgatccacctggatgatgtctcaaccaacagcgacagccagatgaccaggttaaaatctatcctgagtgaagaatggcagatgatacgcccgctttatgaagcagagcgtagtacacgcgtttacacgcggatcattctctcaagcaaccagccccgacctttacgtctggatgagaacgagcgccgctggtacgccccagagtttatgacgcacaaaactgaccgacaggagacgcaacaattcatccagaatcgattattgccgtgggtgtccagtggcggattggatgtgctttatgagtggctaatggcgcgtgatctgagccagttcaatcataaatacgttccgcagtccgattgtttgcgccggatgataacggattcagtttcaatcctggagatgcaggtgcgcgagtgggtagcagataatccggcattccgactggagacgctacaagcccaattctccgacttccgaaacacccagatcgccgccagccatttgaccgcgatgcgataccggagatgccagccgtaccagaaaaacctagacccagcgaccggaaagacatcaaaacagtggtggtggatgcctgaagactggacacctgccagcctgcggcaacatttggcgtctgacacagaagagttcatattctga

SEQ ID NO: 113505 - DNA, 198 bp, Enterobacter aerogenes
atgaaaatctatgacataacagtaactggagcaactgccgactggctcactgctgcgcgtgggcagatgccgctgccggtattcattcgtaagctattgacggagatagccagcaacgcggaaaaatataacgaccttacccggaccattaacgactcagtggagtatcaatgtcaaacccgaacgacaaagaaataa

SEQ ID NO: 113506 - DNA, 144 bp, Enterobacter aerogenes
atgaccgcacagagccgcgaatgccccgagagaaccatcgatccggatgtccttgcccgtgcgatagcagccgcccgtaagctcaaggaagaggaccctgagcgttataaatcgatccccattgaacagggaaaacaatcatga

SEQ ID NO: 113507 - DNA, 492 bp, Enterobacter aerogenes
atggcaacgaaaaaaagcacccagaatgcaatttcaccggagctacaatcctttattgacgagattgcagtcagataccaacccgaccccgaagcactgcaccgccgtattgaaaacgctgaagctcgctataaccgatatcagaactttactgatatccctgcgcgactggtggataagctccagagtctaatccttgaaggctggcggtttcatcttgctgggcctgcttcagttattgccaacccatcgatgatttccgtgactctgcaaaaaccagtctcattgattgagcaggaacttgaagcacttcgtgttaaaacctcagaggcgtaccacaacgagctgatcgactctatggaattggcgatcgacacattgattgctgaagcggctgaagatgccagacggcaggcagaggaacaggcaatagctaatcaatccgcgatgcgtggtcaacttcgcaacttgctgaaacaggggattgtatga

SEQ ID NO: 113508 - DNA, 1518 bp, Enterobacter aerogenes
atgtctctgggctgcgattcagccagtagagcgaaatttttatcttctcgtctctctatactcatttctcttgtaaaatcgtccaggatggagccagccctactattggacatagtgcaaaaaatgaaaaagttagaacaagacgatattgaccgttatttgctaaaaattcaggcagatttttacgccgcagcaaaaaaaattccctcaacagtacgtagcactctgcgagaatccggttcattggtccgtgaaaaaagtaaagcgcgtgatgttgggctgttacttgatggaacctttaaacaagatgttgaaccgctgtcgacagattcagtcatagaacaacttggtagccagtttgatcttacgggtatggaggatgaaatagattatttggcttcagagtatgatctcctctggagacattactgcgatgcacatatcgcttttatggatcaacggcattctgattatcgccagatcgttaactctatgcgaccagaaagtgattatattcctggtcaagctgctaagcctgaagaaccacagacccctgctttgtcgctatctgaggcatggaagggttttgtaaaatataagtccgactggactcccaagattcggcaggggaatgaaaaatactatgaagtgatagaggcggttttgggggctgacactccagtttctgacatttctcgacgtgatattaaaaacctgcttgaggtagttgaaggtttaccgcgtcagaataagaggccttataaccggatgacaatccagcaatgtttggacttggatgaagtcccagaagaagatctggtttcatccaaaacggtcaaagattatctgaaactgtgtcaggggttgttttcaacctacctgactaaagaagaggatattcttgagtcatcaccgactcttaacgttacgtaccaagctaaaagtcacagctatggttattacactcgagcagaaatgcgaaaattagtatgtcactttgcgactttggaagggtggaataaatggggttttctgctgttggcgtacactggcgcaagacgctctgaaatcgcaaaactgaaagtttccgatgtgcggttggacgaggatagccagaggcattacataatgatcggggatagtaaaactgaggcagggattcgacaggttcctatcgcaaagcgtcttcttgacatggggttcttgctgtatctggatggcaaaaagccagatgcttacttgtttcccgagattactaatcgaagtcaggtaacccggttgttccacgcgatacgtgagcaattgaatattgattaccttgacgattttaaaaacaggcgcattgttcacagcttacgccacactttcgtaactgaaattcaggcaaaacataccctcacgcttgttcagcagacaatcggccatgagcattcaaaccaagggcaaactaaggtttatacaggcaagatgaaagtttctgacttgctaccagtggttgatagtgttgactggttttaa

SEQ ID NO: 113509 - DNA, 333 bp, Enterobacter aerogenes
atgaaacattggatattgggtgcggcactatttgccgccaccggcgtcgcgcaggcggaaaactaccgtatcgtgcaatcgccttcgcaaaaactggatgtctggatcgataacatcaagggtaataccgcgcagagctggtgcgctaatgaagtggcgctacgcatcgtcgccaatggcaataagaacgtcaagatactggataacttcctgccgcgcgtcggcgcattaatggagcatcagtgttcgcgtttgcagcagctgaactggacgctggttgacgctaacaatggacatatcgcccaggggagcgcggcgaaaaacaaaaaatga

SEQ ID NO: 113510 - DNA, 132 bp, Enterobacter aerogenes
atgccgcagatgcgttgtctgaccccggttgcgctgcgcttaccggggctacaatttgcaggtagcccggctaagcgaagcgccgccgggttcttccttggtcacgctgcgtttattggggctacggtttaa

SEQ ID NO: 113511 - DNA, 261 bp, Enterobacter aerogenes
atgagtcctatcgacgatctaacgataggctttgaaactattgtgtccctcatttcgggactggatatgcggctcgacgcggcgactcagccggcctgcttcgtaatctttttccaggcagagtctgagtttttgtcccgtatgacccgtctggagggttttgaatgtatccgcaaccagtttgatgtcatgcgtgttcgctgcggcgacgaccagcgacagaggaagcccgttggcatctgtcatcaaactgcgctttag

SEQ ID NO: 113512 - DNA, 186 bp, Enterobacter aerogenes
atgataaaagactacctgatcgtgttctacctgacgacaattgctatctggccagtcacgctgaccctgattggcctctctgcaggagtgtctctcaatgcgaagagcagggggccgggtcttttccctatcattccgttcatgctggtggctgttgctgtatggcagtgtgagcgtttcacgtag

SEQ ID NO: 113513 - DNA, 1038 bp, Enterobacter aerogenes
atgctatgttcagaatgttttaaagatgaagggttaagattattagcggataaaataggttttttatgcaacgataagtgtgagaactgtcattctcattcaggacataaattagataaagaaagattaatatatttagcagaccgtttttatcgagcaggcactttacagcgatttgattacggagctgctcctgcgattacattcaatgagatgcaaaaaacctcggtaaattttgatgaaatccttaatgaagatactaaactactttcattacatacaggcatgggtttttttcattacggcccacggtattggatgtttggcgaagttgaacctttaaaagcattacaaaatgaaaccactatagaaaccatgctttctacaattattgatgcctattcagaaaccaaatatgataaaaatacaaagttttatagacttagaaaaaaccctgagaatcctgaaattgaaagccagtacgatactccccctaaagcattcggagagggacgcttagattctgtcgatatgcctgttatgtacgcctcatttgatttggaagtctgtatacatgaatgcagggtgacggcagatgatgaattgtatttggcaaccttgagaccaaaaaaacaactaagactgatagacttctctcagattttagaagaagaaaatgtcactgagttcgagagcatcgatatggcagtgttcatgcttttcatggctcgagataattcttacccaatattgagaaggttaagtcaaaaggtatatgaaagaggatatgatggtttaatttatccatcttactttagcatgctgcattctggctctgagccatttgaaacaacatttggtttatctcataggaggatcgcgtggtataaggagcatgaagaacataaagtccacaagaacctagctatatttggaagaccaataagtgatgaaaaagtggtaatagaaagaataaacaagctatttataaggcaggtaaaatatgaagtggaatttggaccagtgacttataattaa

SEQ ID NO: 113514 - DNA, 198 bp, Enterobacter aerogenes
atgatggcggcgccccgcatccctccgcagatgataggtatcattcccaacaatacaggcggctgtagtgatgttgaaaatgccagtcgcatatttgtccacaatgaacggatacctctacagaaacgtctgtgggtgcttaacgactggctaggagagaacattataaaattttctaaaaatactttggttgaatag

SEQ ID NO: 113515 - DNA, 735 bp, Enterobacter aerogenes
atgattaccgccgcccggcgtaaaagcctctttctggctggcctgatgtatataaaggttaacgctagtcgggtggtgtgccaccacgtgaacctgtcaaaacctgtcacattgcgggccactgatagtggcgtacaaaatgcctggcggaatttagcgaccagtacgcgcgatggacatcacacctgcagtaaaaatttttgcgagtccataaaaaatggcttgatgttctacgtcatccaggtctatggttattgtgcaccagcaaaatctggtgccgggattggcgtcccggagagtttacaggcgacctatgacgcgccatgcgtctttttttgtgtcgttaattcagtacacccttttttctgcgttgcgggtataatccgcgtcgctcacaaaataatggtgggctggatgggggcggagaaatccgcgccggtttcctgtaacgccggttacgccaaccctgttcagtccaccaccagcgaaattggcgtttccggtggtgggtttcagacccagttacaggaggctgccaccatggctactacccctacccaaaatccacaatttatctggatcatcgctgctatacgacgtgatagccaattcgtcactgtaaaaatcttccacgttaccgcagtctctgaacgagaagcccgtcgcactttagtgcgtgaccacgtttgttttttcgctggccgcatccgtctgacggaggtggatcatgcgtaa

SEQ ID NO: 113516 - DNA, 180 bp, Enterobacter aerogenes
atggctaactccaccagcacaccgctgccaaatcacgcatatcgcgacgcgcagggccagacggtgagcgtgaccgctgtagcgcataaccgcgtgacgttctatcgcgaggggtatcagttcccgtgcgtacagcccattgagcgcttcatgaaggagtacacggaggtgaaacaatga

SEQ ID NO: 113517 - DNA, 246 bp, Enterobacter aerogenes
atgcagcagaatggttacattccagatacagcgaacgcgatagcccagtatttcaacaaagcatcgttaccttctcagcaggagacgctgggcgaaatcgtgatggacattctcaccgaagggcggcatttaaaccgcaaagcgctttgcaccaagttactgagccgtcttgacgtcgcacgagccccggaagaagaaaatcattatcaaacgttgattggcatgctgtttgagcgtccggagtaa

SEQ ID NO: 113518 - DNA, 255 bp, Enterobacter aerogenes; identical to SEQ ID NO: 105286

SEQ ID NO: 113519 - DNA, 882 bp, Enterobacter aerogenes
atggtcagctccacggttttcgtctgccagctggtcgtcacgccactcagccacggggattctgaggatagccaggcgacaggattgcccaaatcagttatcacaccaacggtatcagacgatacgctgttcatcgtttccgatgttttgtactcaaatgagacggtaagcgtcagcccggcctcagcagggatacgcgtgacgttggcaacccggacagagccggttgtcgttctcagcgctttttcacctgcatcatacgtgaatgccgagccggtaccggagttctcccagaacgacagatccacatccatgccgccgttactaatcaggctcccttcagccagggtgtttttcagcatcgtcagctggccagactgtgtggtcaggttgccttccgtcgcggatacccggtttgttaacgccgtgaccgcgctcgcatcggcctttttactgacgtttgaattggttgtcgtcaggtcgttctgcagtttagcgatcgcgctgccctggctggtcagcgttttatcctgctggctgacgctggactgcaggcccgtgatggcgttgctgtttgcggccacacccgactctgttttaccgacgcggttagacagcgaggtcagcgaattcccctggctggttaacgtggtgccctgctgttcaaccttttgcgtgagggactgcagcgcggttgcatcggcttttttacccagactggtttccagcccgctgattttgctggcctgtgcgctttgtgcagtcgacagggaactcagctcctccgcgaccgaggatttattctcgttgaactgcgtctgcagcgattcccgggctgtcacctctgctttatcagcagtgatacgggcattcatctcctga

SEQ ID NO: 113520 - DNA, 828 bp, Enterobacter aerogenes
atgaatgaggccatcaccgagcagttatataataaagttgtaaatttcgttaataaaatggaagggagtgtgcattttgattatatatccaaatccttgcgcatccctcctgatactcttgatgaaattatagataagatgattgctgacggtgtagttgttaatacaggaatggtaggtgaatatttagcagtgaaacacgcatcttgcaaaagctctagtaagaagattcgatgcagcacgtctcaaaaaatcaatgacggtagtcaactaaagttccttgttgagaggataatattaattacggctatattattttttcttataacctgcttttatgcttacagggcaccgatatcttttgtttttctaattccaacaataattactgtatttgttattgtagacaagaatcatggcggagaaggttacctagggttgagttctatcttagcatgtttaatttttttgtttcttactaatgcgcaggttccaatatttggagacgcttatggattaagaaaacagaggaatgacatgaaaaatgaaattactagaaaagcgaaggaagaagagcagcaacagcttaattatatccttaacgcaagagagcacataaaagagaagctcaaagatccttcttcagctaaattttctggtgagtttgttgggagaaatggttccgtctgtggttatgtcaacgctaaaaatagttttggtggttacacaggggaatctcgctacatattttctgtcagtttttctgcaatagatgaaggcattacttcctttaataaggagtgggagaggcagtgttattttaattga

SEQ ID NO: 113521 - DNA, 756 bp, Enterobacter aerogenes
atgagtcttaattcagattatcagaagcttgagccgggtgattcgatccgactgtttgaaatcgacggtcgagccttcaatatgggtgaggttttatattttcacggttataacgtcccgcattcagccgaggaaatcgtcgccgccggtggcgatgaatcaaagctgccagcgaaaagtatctggtggcagggcattgaatataaagcctggccgtgcgagctggaagggattgaatccaccacctcggggagcgatgcgcaaccgacgctgcgagtgggcaatatcgacgggtcaattacagcactatgcctgtattacgacgacatggcgcaggcgcgggtcacgatacatgagacccaaaagcagtatctcgatgcgcaaaacttcccggagggaaacacgtcagcagaccctacgcaggaaaagcgtcagctgtattttatcgatgccaaaaatcttgaaactgatgaagcggtggagttcaccctctcaagcccgatggacctgcaggggctaatgattcctacccggcaataccactcgatttgcacctggtgcattcgcaaccagtaccgcagcggcgatggctgcgattatgccggcacgcgctatttcgacaaaaacaacaagccggttgatgacccatcgaaggacgtctgcaatgggacgctctcggcgtgcaaattgcgctttggcgataacaacgagctgccgtttggtggtttccctggcacgtcgctgataaggagctga

SEQ ID NO: 113522 - DNA, 3396 bp, Enterobacter aerogenes
atgcgcggcagtcatgagggcattaatgtaatggcagacgtcgcatctttagcggtcgggctgcaccttaacgcagccaactttaaatcccagcttctgggtgcgtatggcgatgcggagaaccagtcaaaaaggtttaaccgcaatgcccaggcggacgcgaaaaagacggaagacgcctataagaaggtcggcctttcgatatccgggatggccagcaggctggcggggctggcaggagccggtctttccataagtacgatcatcacaacgtccaggcagtatggccaggcgctatccgacctgcaggcgatcaccggtgcgaccgctgatgagatgaaagcgctggatctggccgcgcaggaaatggggcgcacgacagagtacagcgccagtcaggcagctgaggcgcttaagctgatggcatcggctaagccggagttgctaaagacttcagatggtctgcagcaggcgacgaacagcgcattgattctggcgcaggccgcaggaacgacgctcccggatgcgacccgaacgctggcgctgtcgttgaaccagtacggagcgagtgcgcaggaagcagatcgttatatcaacgttctggccgctggcgcgaagtacggctcatccgaaatcacggatacggcagcggcgataaaaaatggtggtgtcgcagcagcgcaggctggcgtcggttttgaacaactgaatgcggccattcaggttctggccgaacgtgaggttaaaggtggccaggcaggaacggcactgcgtaacgtcatcctgaatctggaaaagggcacggacaagagcctcaagccatccgtggttggtctcagccaggcgctgactaatttgtcagggaaaaacctctccacggctcaggccgtgaagctgtttggcgtggagaacctgaatgcggcgtctatcctggtccagaaccgttcaaagattgatgagctgaccgcttccctgaccggtacaaaaacggcgcatgagcaggcatccatcagggttaacaacctgaacggtgatttgctgggtctgagcagcgcatttgaagggatggttatcaagattggccagagcagtaacggtccacttcgcagcgggattcagacagctacggaggcgctaaatggcctggcggataacttcaacaccgtctccagtattgcgctttacagtctgattccggttctttccacaaaattaaccgcagggcttcgggaaaatatcgctgcctggcgggaaagccaggcggcggtaaaagcgagagcgcttgccgatgcggatattgcccgtaaaacgctggattcgacagctgccatcctgaagcaaaatgatgccgagtttggtcactaccgccagatggaacggacggctaaacagtacgggatgaatatcagttatcaggacgagtttgcgcggcttatccggcaggaaactgaacaaaccaacctggccagtcaggcaaaagcaaagctgaatgttgctaaccgccagttatcgatttcagcccgagccgcatcggttgctgtaggtctggcgcgaggtgctcttgctttcgttggcggcccatttggtgcagcgatgctggctggctccgcgttactgtatttccatcaacgggcacaggaagcccgacagtctgctgttaacctgaaagatgccgtcgttgaaaccaccgctgcgctgatgcaaatgtccgacaagcagctggcagttaaagagctggaccttggcgatcagctggataatcagcttggcgaacaagaaaagctgcaggaacaactgaagtacatgaacaaacagatcgaccagtccaacaaacagggctggatcggtgatgtgttcggtaacaaaaaggacatgcaggcggcccgtcaacgcgctgaagctgacctggagtcggtcaatcagggtatccagaagacccgcgataatctggaaaacgtcgggagagcacgctttctggttcagaccggaattgctaactacgccagtcagctggccagcgatattcagaagataaccagcactactggtaccctgggagacacgccccctcctgtgtggaccggcgatggtaatggtgatgcggcaaagaaaaaacaggctaatcagtacgagcaattgcggcgtgaagtggaacaagcccatgccagcagccttgaacggatcaatctgcaggagcaggaaagcgcaaggaaattagcggaagcagcgaagaaaaatggcgccagcgatgctgacctgcagcgcgtgcttttgatgaatgcggagaactatcagaagcagcgactggatctggccgcacagtattcacccacgcaggaaacattacgcaaggagcaggaagccagccagaatctcgccgaactgttcaaagcccgccttcttaccgaaaaagattaccagactgcccgaatcactctggccagggatacagccaaagagcttctgcaggcgcaggctgacgaaattgctgttcctaaactggatatcgccggtgaagtcgatcctctcgtctccctgcgcaatcagctggcgcaacgccagtcgctgctgcaggcgtattacaccggcaatgccatcagcaaggatcagtacgaaatgctgatgcagaaggcgacgaaagagtcggcagatgcgcagtatcagacttcgctggagttgtatcggtcgcaaggggagctgcagagccttgcagtcgggcttcttgagacgacgcaggagcgttccacaaatatgttgaccggaatgctgacaagaacgcagagcttcagagacggcatgattggactgttttcctcgctgacgcaggcagtcattaaaaacctggtggatatggctgctcaggcgctggttaccagttccattatgcaaaccattatgggcgtggtggggattgggacgagtattgcaggtggtatttctggagccgcctccggagctgcttctggcagtacgggaacggccattcagaatgcagggagcaactttcagtttaatgcgaaaggcggcgtttacgattctccttctttaagtgcctacagcaaccagatccacgataccccgcaattcttcgcctttgctaaaggggctggcgtttttggcgaagcaggacctgaggccattatgccgctgacgcgtgccggtgacggctcgctgggggtacgcgcggtcgggggcgcacagagtgccagcaccacagaagggccaaaggtctggatcaccatttctggtgacaaaacttcaaccgatagtacatcgggattcgaggagtttggccagcaaattgggtcgttcgttgagaagaaataccgtgagctgcaggcgaaagatatgcgaccgggcggtgctatctggaacgctgtaaaaggacaacgctga

SEQ ID NO: 113523 - DNA, 288 bp, Enterobacter aerogenes
atggctgcgaaaaataaagcagtggagccggaagaaacggtcgcacaggacaaccatgagaccgaggatgcacaggataaccatgcgaccgtggtcgcacaggcagaacgtaaatccgttgtgttcctcggtccgcatagccgttattcccgtggtgatatcgcgtggtttgaaggatcgcacgccgaagagctggttaagcgtcgtatcgcggtatggccgaatgatgccgaacgcgcgctgaaaccgaagccgggagatgacgactttgatactgacattggatga

SEQ ID NO: 113524 - DNA, 441 bp, Enterobacter aerogenes
atgttcagtcgtgatgatttaaccatttcaatgtactacgcatcatccactgatgctgaatcaggtaacaagctggccacgatgactatcgaagtgcgcgatacaactccgattgctgatctggccctgatgacacagctgcagtgtgtgaccgataaggcgaaaaagaaaacctactcggtaggcaagcaaagtattgccaacggttcagatcctctcctggtcgccattgaaggccactggcggacgggtacggaggccctggttaaagagctgcttgcagaagtgatggacttcatctctggcagcgttgggcaggaaagcacctgggttggccagtacggtctcaaagtatttgagaatgccccgctgattgagcgtttgccggaaagtgtgctccaggctgatggtggcgttgcaccggcaccaactgaaacctga

SEQ ID NO: 113525 - DNA, 336 bp, Enterobacter aerogenes
gtgctggccgtgccacagaacgaaaaccgcaacagagagaacacgatgaagaatttaaaaattgaatacgttgatggccagctcgttaccgtcgatgttgaggggatctcgatgctcaatgcaggactatcgggcctgaactttagccattttctggggaaagaaccgcatctcaagtttgaggtcggtggtgaaattcccgagggactggttcccgctcaaccgcaaccgcaagagccagcgcaagcgttcgaaggcgagcacctgccagccgaaaccgcaccgcgccatcagcgtaaccgcaataaaaatcgcaaccgtaaccggagccattaa

SEQ ID NO: 113526 - DNA, 873 bp, Enterobacter aerogenes
gtgaaaaagccagtcacttatggcgcccatcgaattcttcatgatttattcaaaaatggagcgacgttcaaacgtaacttacttcgtgaaaaattatccgagctggaagagcgcggttttgctgctacttacgccaacaatcttgtataccttacccctacaggccagcaatatgcgattgaatcctttgttggcgaaagtcttttggctcctgaatactacgcgcgagctacagagccagcagacaatgctggaccgtatgaagccgaactttgcggtaactctatcgagcaagaaacgctttctaaggtgctggctaacaccttgcatactattgacccggaatatgctgctaaggatgcgaagctgttggctgcagcagtcaacattgcatttaacgaactgaatgctactaccagtaatgccataactaaccagaacggtgcaaagtgtgtagctgttggagatttatcatccaatgctaaaccggatacagatagcggtcgcctttctacgagctggtcaataaagacagcgggcggcattcaaaccctcgagagtcgaaactttccggtaggcattaaatttgctgataaaccagattctaccgtgaaggtaaagcttgaactggataccagcgaagcgatgaagtcgcttgatgaacttggctctatggcgaagaaaatcgacgctattgtggcagaagcgcttcaacaaaacggcagtatattcagcgctattaatcaacgcgagcgagatgctgcatctcacaatgctttgttggcacgagtgagtgcgctggaaaagtgtatttgtaaccaaggcgctgctattactgatttgggcgcgcgtatcactaagtttgccctctag

SEQ ID NO: 113527 - DNA, 465 bp, Enterobacter aerogenes
atgaacagtttaaaacgaatggctaaagcctggttgctgatgaacgccaccttcgccctgcttgtgatggtgacacgaccggcgctcgccagtgacggcctgaattttgattcaattattaacgccctgccgcctggctgggccagcggagcgacaggtgtattcatcgtgctttatgccgtggcgcagctgcgtgccgtactcccccctgcagtgaccaacaaaattccggcggtgattatgaaggtcctcgactttgtcgctgcgaactacgcgcatgcccgcaatgccgatgctatcagcaaggccgcacgggatgcagggaaaggaaacggcctcagtgatgatgagtatcgagtgattgtggaaactgccaaaaataatggagagctgcgtggaagcaggattgagagcgctggcgattatcctggagatgatcgcccaggcagtaaaagcccgcaatga

SEQ ID NO: 113528 - DNA, 228 bp, Enterobacter aerogenes
atgaacgtaaaagagatccgcgagaacatgaccgaagcggccttgagcgttgagagtgtaatgcggggacatccccgcatcaccctgcaggagttaagcgaagcctgcaacgccagccaacctgcagttgaatttatcatagagcagatgatctgcatgggggtagcacagcgaggtgcttttgagcgttactcgctaacccctgagtataaaaacggtaacttctga

SEQ ID NO: 113529 - DNA, 222 bp, Enterobacter aerogenes
atgaattatcaaggtcacgaagatatgcgccaggaagtagccgatatttctaacgagctgtatgaactctggcaaaaagtgaaacgctttgaacgcgagtacagttttaacaatacagacctgaccggaaggctggcagggcagctgattggtagcatggaacctaaattagccgaattaaacagctttatgtgcaacgttgattaccagtttgaagactaa

SEQ ID NO: 113530 - DNA, 312 bp, Enterobacter aerogenes
atgtttaacgtgataacccacccggcagcagtggaagagttagaggaaataccggacgacttacgaggtcgcatgacccgactgattgaacgacttgaaaaagaagggaataaactgaaaatgcctcatagccgctcaattggcgccgggcttttcgagttaagggttggcgacaagaacatagcaagaacgttatacgcttacgcagttggccaccaaatcttcctactgcatgcgtttgttaagaagacaccgaaaaccccgccaggggccatagagatagcgagaaagcgcctgaaggagatgagctaa

SEQ ID NO: 113531 - DNA, 207 bp, Enterobacter aerogenes
atggaagaaacagtttcctcacgttgtgaacggctcgacgcccagctgagtgatctcgatgctgttttggatatggtgtcagtagccataacgtctcctgaagccagcctgcacatggcagaaactacgcgccttatttacatgtcacgtcgaatggtacagcggtgtcgggagttgcgtaaaaccgaaggttggggccaaagctga

SEQ ID NO: 113532 - DNA, 222 bp, Enterobacter aerogenes
atggataaatcaacgttaatttttgagaaactccggcaaaggaccataagcagtctggctaatggcggcgacggctttgtctttgcatcaatgcttgtgtttgatgtgggcctgaattcgagaacggtacggcaaatactggataaagccgttaagcatggagaactggaaaaaatggagcgaggtgcgggtcgagcgcataagtaccggacaattcagtga

SEQ ID NO: 113533 - DNA, 462 bp, Enterobacter aerogenes
atgaccaaatcaaccataaccagagagcggctgtcagatattttagagttcggcagtggaaggctcatcaagccaattagtgatgaagaaatagagttgatggcccgcatggcgctggccgcgatggacaacgcttgccgcgtcagcatgaccaaaaccccggctgggaaaagtgaatttcttttgtatgcagaaaagctggctgcagataccaaagcattagctgaacgagttaagcgaaacgatgttacagcattaaccaccagcgaagagcaccggcagctgcgcgatctggtgatgatggtgaagatgctctgcagaacgataagaaagtacaacccggaaagccagcaggcggcagattataccgcttatttacaaaaggaaggtctgatatcggcagctgattgtctgcgcggctccgacccgaaggagactgatacggaggatcgccgtggctaa

SEQ ID NO: 113534 - DNA, 294 bp, Enterobacter aerogenes
atgtggcgaggaactaaccgcggcagaagccagatgatactgaccgagtatcaatataatccgaaagcccaaaacgccaaatccgtttaccttgtgcggcataacagccgcattcagcagactgttctggagcaattcctgacgatagagcgcgatagttttgggcgatttaccccggccatcgaactgaaagacttcccggaaggccttagcgaccgcgagtcgatgctgaaacttgccgactggctgcaccgcttaggcgtggcgattgaagataactggagccaaccatga

SEQ ID NO: 113535 - DNA, 327 bp, Enterobacter aerogenes
gtggataaatcttcacgcctatgggagcgctttgaagatgccgctcacgataacgctcagcaaatgaccagtattgccaacgatgcgattacggcacttgaggctgcagagagccgtgtcgcagaacttgagcgaaaacaagagtctcttcgcccggtcggcgtaatgagtgagaaagcgtatcaccgccttgaaaacagagagtcacgctttattgcactctggcctcgccccgagatctatttaccgcgtaagcgcccggaagatggcgtgatcgtctacggacgaacgtcttttgtggctgccaacaaagcggaggctgagtga

SEQ ID NO: 113536 - DNA, 372 bp, Enterobacter aerogenes
atgacagatatcaccaggctgattaacgatctcaattaccgcatgcactcagcccaaaatctcggtttcgattttctgtttttgaaacttgatgatttaggtgtcatcgcagacacgctggagacagcgctgcgtgcaaacaccgcccagaccgatcacgtcgagcagctgcagcagcgcatcgccgagctggagtcccgcacagtgaagcttccgctgccgcgtcgtaaaacagctgatgattatgtcgatgatacgttcgaaccgtgcgatctggctgctatatacaacgcatgtcgtcttgaatgcgaagtgaagttcaagaatgcgctggccgccgctggcattaaggtggaggtggtgagtggataa

SEQ ID NO: 113537 - DNA, 609 bp, Enterobacter aerogenes
atgcttacttatcatcaatcaattttaaaaatgattatgactaaatggctggaaagcgattatgtcattatcgatacggaaacgacagggctgtgtaatggctctgagattatcgaaatagctattatcaatatgcggggagatgtgttgctaaatactctggtgaaaccgacccgccctattcctccagatgtgaccaatatcaacaacattacgaatgaaatggttgctaatgcccttggttgggcagaagtgtttccggtagttatccggattataagtcagcacaaatggttagcctggaactccggatttgatgcccgaatgatgattcaatcctgcagatatgcggggattttggggcgaacctccccctactcagtgtcaacgataacgacggttattcatacgagccatatcgacgctaaagcggtctatagccaatggtacggggagttcgatgagaagcataagaacttcaagcgacagagcctggcgacagcagctgcgcgacacggcgtttctaccgctggcgcccatcgcgcgttggccgactgcctgatgatcctcggcgttctgaatcaggtttgtcagaaggaggccgtatga

SEQ ID NO: 113538 - DNA, 336 bp, Enterobacter aerogenes
atgatttaccgcaggggatgggtgccggtgcttcatcgttatcagctggaaaagaagctgaaggatgaaggtttcgacaactatgaagaaatcaccagtttcttatgcggaggccgcctggaggatgagcgtagccattttgcctatcaagtcgtcgataacaccgaatggatggagagccgtgacgcgacgttctggcaacgtctgaaccgcctttggttcgtgccgctgtatctgctaacaattccgttccagtggcttatacgtgggcgtatgggatttgagacgacatccaaaacaggtgcattgttcagccggttaaccggtttgaagtaa

SEQ ID NO: 113539 - DNA, 525 bp, Enterobacter aerogenes
atgcaaggaaaaggattaattaaatattcattaatctcattattattaggagtagcacccataataataatattctctatttattataaggatgaaaattcttatatcatttcttatctttttgatattgcaaatggttataatagagacttctcagaacaacatttaaaagtaagcactatagcttctacatacgccaaaacagcaccaatattcgctatattaatgtatgcgttatgttggaataaattcgatctaaaagttaatgattttagtttgaaaaaatggcttaaactccttccaggcttacttattctacttttaggcaactattatttagcatatataggtgtggaaaatatgtcagatagtatttatcgttcaaaaagagtcattgctacgaatgaatatttcttaatgatttattacatatgtttatttttaacaaactatgtttttgtatggatgtttttgctttatctatacgcaatgaaaggattgccttacttcaaaaagcgggggtga

SEQ ID NO: 113540 - DNA, 1125 bp, Enterobacter aerogenes
atgtctgaagaaacaatgactgtcaatggcagtgatgtccattggggcggcggttcaggtaaaggcaatagcggcggggcttgtaatgacgatggggttagcagtaatggccccgttgtttcatacggtttagatggagaagtcaggattaatatttatggtgccaatccaatatgtcctcttgtttcaggggcgccctggggtagtgataaaaatgcagcatcaattatcagcgcaaacttaaacagaaaatctaggttcaaggctaatatctataactggcatgctggttatggaaatacaggctccctggatagtcctgccatcaatgacctgagcggttggggcggcgagatgctatattttcaggttagtttcggaaaggaaaactataacgtatattacaatactaaaaaagacatctttgagacctcatatgccagcggctacgctggaaatgaagaatcgaggatggacgaacaagctatcgctgttgttaagctttacctgcttgaacaaaaacaaaaagatatactcactactgccgcaggaataattactgactccggcaaaactctcagtggaaaaatcggagataaatacaacactctggcgaaagaagctgctgataatatcaaaaacttccagggtaagaaactcagaagttttaaagatactatggcagccgtgaatgaactggctaacaatccaaagatgaagttaagtcaggcggataaaacagctgtttctaatgccctcaaacaaatgaatctggcaacccttgctgatcgattcaagggattgggaagggcctttacctggggtgatcgacttcttaaagccgagaaaatcagagatggtgttgctactgggattaccacagggaactggcaaaagctggcgtttgaggttgaagctatgtacctcagtggtgttgctggcagcgtagcgctagggattgtaactgctatgattagtgggttggcgtcacttgttgctgtccccgctgtagttgtctctgcgcttaccgttgtggctgtaattggcattgctattgccacatcttatatcgatgctaataaagccaaagcattgaataatgcagcccttggtttatttaaataa

SEQ ID NO: 113541 - DNA, 1923 bp, Enterobacter aerogenes
atgcgtaaggtgaaaattggtgagctaatcaattcgcttgtgaacgaggtcgaggcaatcgatgcctctgatcgtccgcaaggcgataaaacgaagaaaattaaagccgctgcattaaaatataagaatgcattatttaatgacaaaagaaagtttcgcggtaaaggtttagaaaaaagaatttctgccaacacgttcaactcgtatatgagtcgggcaaggaaaagatttgatgataaattgcatcataactttgaaaagaatgtaattaaactatcagaaaaatatcctttatatagtgaagaattatcttcgtggctttctatgcctgcggcatcaattagacagcatatgtcaagattgcaagccaagctaaaagagataatgccattggcagaagacttatccaatataaagattggtacaaaaaatagcgaagcaaaaataaataaactcgctaataaatatcctgaatggcaattcgctattagtgatttaaatagcgaagattggaagaataaaagagattatctttataaactattccaacaaggttcttcgctcctggaagacttgaataacctgaaagtaaaccatgaggttctctatcatctgcagcttagttctgccgagcgaacctctatccagcagcgctgggccaacgtcctcagcgagaaaaagcgcaacgttgtcgtgattgactatccgcgctatatgcaggccatctacgatataatcaacaagcctatagtttcgttcgatttgactactcgtcgtggtatggccccgctggcgttcgcccttgccgcgctatctggtcgccgaatgattgaaatcatgctccagggtgaattttccgtcgcaggtaaatatacagtaacattcctggggcaagctaaaaaacgctcggaagataaaggtatatcaaggaaaatatataccttatgcgacgctactttatttgttaatttggtaaatgaacttcgctcatgccccgctgctgcggattttgatgaagtaataaaaggatatggcgaaaatgacactcgctcagaaaatgggcgtattaatgcaattctcgctacagcttttaatccgtgggtaaaaactttcttaggcgatgaccgccgcgtttataaagatagccgcgctatttacgcccgtattgcctatgaaatgttcttccgcgttgaccctcggtggaagaatgttgatgaggatgtattcttcatggagattctcggccatgacgatgaaaacacccaactgcactataagcagtttaaattggctaacttctccagaacatggcgaccaaatgtcggcgaggagaatgcccgcctagcggcgctgcaaaagctggatagcatgatgccagattttgccaggggcgacgccggggttcgtattcatgagaccgtgaagcagctggtggagcaggacccatcgataaaaatcacaaacagcaccctgcgaccgtttaacttcagtaccaggctgattcctcgctacctggagtttgccgccgatgcattgggccagttcgtcggtgaaaatgggcaatggcaactgaaggatgaggcgcctgcaatagtcctgcctgatgaggaaattcttgagcctatggacgacgtcgatctcgatgacgaaaaccatgatgatgaaacgctggatgacgatgagatcgaagtggacgaaagcgaaggagaggaactggaggaagcgggcgacgctgaagaggccgaggtggctgaacaggaagagaagcaccctggcaagccaaactttaaagcgccgagggataatggcgatggtacctacatggtggaatttgaattcggtggccgtcattacgcctggtccggtgccgccggtaatcgggtagaggcaatgcaatctgcctggagtgcctacttcaagtga

SEQ ID NO: 113542 - DNA, 780 bp, Enterobacter aerogenes
atgaacgcgctctctgttttctcgtttcaggaaaaccaccccgtgcgggtggttctggtaaatggcgaaccgtggttttatgcttccgatatctgcagggctattgatatagcgaaccatcgtgatgcagtacgtaaacttgacgaagatgaaaagggcgtcggttcaaccgacacccctggtggtgagcaggaatcagtaattatttcggaatctggtctctatacgctcatcctccgctgccgcgacgcggtgaagcagggaacgacagcctggcggttccgaaagtgggtaaccaatgaggttctgccagctattcggaaaagcggtgaatacagctacgtcgaacctgcgccaaaaagcgccggtgaaccattggactggcggcaaaaggaagaattacgcggcctgataaacgatatagcccaaagttttcgttaccacaacgcatggaaaagtggcgtatggctggcgctacgtcgcgcctgcaggaacccatcccccaatccgattacggttgatgatctcccggccatcactgccgagttgcgccggatattaacgtctgcagaaaccgcgctggataatatgcggacttacgagcgggaatttttgcgtgaggtggttcgcggggcgcgtcggagtgtatcgcgtgaggaattgtcaatcatcgaccttggctcagaggtggagaaggtgctgccagcgcatttcgagctggccatcaataaactggaggcgttatccacaaaattagaggctcctgccgtctcttcctga

SEQ ID NO: 113543 - DNA, 231 bp, Enterobacter aerogenes
atgaatcaggtgcagttaaacacccagggcctgcttgagtcgattgaggagcgcctggcgcagatagaagcgctggtttcctccgcccatcggacgatctccagttacgaggcctcactgtatatgcaggaggcggcaggattacttcaggttgcccgtgagctggtacaagaagccagaaattgttcctcctctctgtcagcgcagctgaccgccagggaggccaaatga

SEQ ID NO: 113544 - DNA, 165 bp, Enterobacter aerogenes
atgttcaagttcaggttcgcggcaatctgccgtaccgataaaaaatcccatattcatcatctgtccactatcgcctcatccgagcgcgaagcccgtcgccagttcgccagccgttttgttctcgttctgtcagcccgtatccgggttagcggggtagccgcatga

SEQ ID NO: 113545 - DNA, 1125 bp, Enterobacter aerogenes; identical to SEQ ID NO: 113540

SEQ ID NO: 113546 - DNA, 525 bp, Enterobacter aerogenes; identical to SEQ ID NO: 113539

SEQ ID NO: 113547 - DNA, 336 bp, Enterobacter aerogenes; identical to SEQ ID NO: 113538

SEQ ID NO: 113548 - DNA, 297 bp, Enterobacter aerogenes
atggctaaagatatcgatgtacttctggaacagcaggcggatcagatgaccgccgtcttaaaaagccatgcgtcgcatattgaaagcatgctggcgcagcatcgttttcaggtcgcacagctggcattgcacaacagcccagaaccgttcgttcgtgaggtattcaaccacctgcgtgatcgcctggtacaagtcaccatcaatgaagctggccttgctgatgctgaggatgcgcggtacctgctgcgaatacttgatcgcatggaattgtcagcattagaggggaaaccattatga

SEQ ID NO: 113549 - DNA, 4005 bp, Enterobacter aerogenes
atgaccttacaagaattctatgcggctcgcttcggtagcgatccgtattcattgcttgaagcggcgcgggatgagctgtcagagctggccacaatggctggcattaactgggcagcatgcgctgataacattcagctgaacccgcgcggcggggaagagcgttattccaaatataacggccacgcacccgaggctctggaaaagagtcttaaaggacgtgtggaaatctactcccgcaaggaacaacacaaaagcggcatcagctacccattcgtcaactttgtccagaaagggcataacgaaggttcctggagcggcttctccttcctgttctccgaataccgccgtgaccaacaacgaaatcatgcgaccgtggtcgcacagcctgctgaagagctggcgcgtattgagcgccaggcggaagcacgtcagcgccgtctagaacaacagcgaattaatgaccttaaaaacaatcagttagagcatgagcgtttgctcggctggttggctttccacaaggcgtgggaacatgcgccagctgaagacggttcctggccctacgcagtgaaaaaaggcattcgtgacgtatttagcgcttgtgatattcgtcgcgtgaccagtcacgacaacgcaaaatggagccgtgggccgactacatacatggcgattccgcttgcccacctagatggacgcaaagacggacgcattgtcggctggcagcgtatcgaccagcgcggcggcaaattccagaccagcgcgatcacaagcggtgatttcgtcggggcatgttttgttattggcgacctgaaaggcgcgcaaaatgttgctgtggtggaaggtttcgccaccggcgcatcggtatggctggctacccgaaaagacccaaaaaaacgttttgatgccgtcctggtcgccgttgctgcaaacaacatgatccacgttgtcgagcagctggtgaacatgtacccggcggcaaaaattacctgcgccctggataacgaccgcaaatcatctgcagagggcaaaggcaataccggcttgcgtaccggctttgacattgtcgccaaattcaatggcatcaaatgcgtttacccgacctttgaagatgatccccagctggagtgcagcgacttcaacgacctgcacagattacgcggactccgcgagacctgccgccagcttttcgccaaaggcaaccgcctgagtaccagtaccgatttgctgacactgacgctgaataagctgaaaacggctaaatgtgataaccgccggacgttcgcaaaagaactgttaagcgcggtggatatcggcatgcttacctgcccggtacctaatagcccgtccgatctgtttaacatgttctgcattgtgctgcgtgatatgggtctggaaagcgtctatcgcgccacggttaaagaccacatcgcgcgtcgcctgaatcgtaaatgccggaccgcccaggctcctcgttcctttagcgagcgcatcaccgacccgaataaacgtccccagcacatcacgtataagcgcttcgagacatccgtaatgacggatgaaattttgcaatacgtgcagcagctgcagggcatcgttattgtccgcgccggtatgggatcgggtaagtcgacaggcctgcttcgcccgttgatgcataacgccgaacgcggcgtttccgtcgcacaccgcgtaagccttattggcggcctgtgggaaatgatgaccgagcagaaagggaccagagccgatattctgcattaccaggaccccggctatcaggaaatggccccatacgcgagcaagttgaccatttgcatcaactccatcgtgaaaggctgctggcaaccgctgatgcgccagcatgactatttcggctttgacgaagcaacgcagggactacgcgccgttctttctggccgcgcaatggaaaacccggtcgccgtttttaatacgctgattgacgcgctggccaggacggaattgcaccccatcatggtagacgccgacgcgaacgatctgctggtcgacctggcggagctggcgatgaaacgccgagaagaaatgggcctgccggcatggctgcaaattcacgttatcgaattgccggtcgacgttcgcaaccgcgaaacgggcgaacctatccgcgtattctacacagagaaagatcgcatcatgaccgaggtgattaaagcggtggaactcggtgaaaaaatcatgctggcgaccgatagctcaacgtttgccgaagacgttaccgccacgctgcgccagcgctacccggaaaagaaattcctctgcgtaaaccagaagagcaagccggaacccgaggttgaagaattcaccaataaaccgaaaaagatggtgaagaagtacgacggcctgatttacagcccatcgatatcctccggcgtctccatcgagcaaaaacacttcgatcgccatttcgggatgttctgcggcgaagtggtccccagcgatgctatccagatgcttcgccgcgaccgtaccgccaaagaattcatcatcggctttgataaggttcgcgcgcgacgcgaaaccgacccgcaaaaaattgaacgcgcttttgtgcaggcgctgctggccaccgccggtatgaacggcgaactaaccgacgttgtttttgacggcgatcgcatctctatgggcgtggccaataccgattttaccaggatgaaaatcaaagcggcggcgatagaagcctccgcgcgtaatgactacgccagcaatatgatctgcattatgcacagcgacggctataaggtttccccgctggcgtccgacgaactggcgaactccgtcggcaaggagctgcgtaaggaagcccgcgaaattgtctgggaacaaacgctggacctccacctgaatattgaaacgccgagcgaatctgaacgtgaggccattctgaaaaaacgcgccctgaccctggaagaacaagcgaagctggtccgctgggacatcgagcatgagctgaagttaccggtcaacgaggacaacctgaaattctacttcgacggcgcccgcgataaggttcgccgttatgaaaccatgctgctagatgaagtcacggcgcgacgttttgaccgcgaggaatccgcgatcaactttacctatgccttcaagcaaacaggccaatggcaatactttaccgccacggcaatgacccgcgagcaggctgatgaggcatttcaggcgaaacaccctggcatcaccgactacaaggtcaaatcgacaccggcggtcgaggtcggtatgcgcggcttctacggcctcaaatctacggtgctgcgccagtacttcatcgactgcggcatcgacccggaaaccatgaccggcgaagccacccaggccagcatgaaatacgccagggataaactcatgacctccgaacggcgagacctgttaaacaacgtcctgcgcattggtggctttatgacaccgaagggcaagccgaaggttcccgaagcgctgtttaaaaccatctgcgagtcgctcggcctgaaaaccgataagcgccgcgccagggacggggacaagcgcccgaccatccgttttgtggatcaggggtcggcggcgttcatgatggatattctggcgaaccgccaggacgacggcctgtctctgcagttgcgtaaagccgagaaagcggccaccgaagtggatcacggtttggatctcaatatatatatggatcataaaacgcgatccacaaacggggatgatttggacgcccctcattcagtaatcactgaggcgttggccgagcttccggtgccggtaccggaaacctgggcgctgaccgcgttgtccgatgatgaactggccacaatgaccacctggtcgccagccagcattgcgatgacctttgcgtccctgtacctcacagagttcatggaccgcctctccagcaacgaactgcgccgcttgcgtgaatatatcaccggcacagctacgggcggctacgacgcgcaggaggcgttctatggctaa

SEQ ID NO: 113550 - DNA, 609 bp, Enterobacter aerogenes
atgattaatcgtatgaaaacacgaggcgaacgactgaaagcacgccgtttagaattgaagatgacactgaagcaagtcgcagaaagtgtgggtatctctcttcctggcgtccaaaacttagaacgtggcgacgtcatgccgtcgctggagattgggcttgccctggcaaaatgcctgcgcatgcctgtgcaatggatactgtatggcactgaatctgatcctgaccgcgttcctgttattggcacaacagaaagtggcccggatagcgactggcagccaggagaacctgccaacacagaacgattcctgccgttcgttagccaacgcaataccgtttatgcgttaacggtcgggaaccagattcagcacaactaccagccgggtgacgtcattctggctgattcaactcttacgccggttcccggcgaggatgtattagtttgtgataatggcgggaaaatctcgatactgcgcttagcgcggtttgacgatgagcgctactacttagatggcgctaactctcaacgagttatccatgataaaagtgatcttcaattcgtgcatcagatagtcggaacgatcaaatcgttcatggtagagggtagatga

SEQ ID NO: 113551 - DNA, 738 bp, Enterobacter aerogenes
atggaacttgagcgaatccggatctgcgtggctacggctctttcagatcttcactacctccagcgaggcatcttagaggttcaacttgagcagctacgtcttgccagttcggacaggtttactgataagccgacccgagtgattgaaatgggtgagagcactaaatatgaaattacagtctctgcagagcaggttcgttaccatgtgggtaaaacgtttaagcaatcttcaatgctgctgacagagctggatttccagacggccagttggcgaagagctattgaacaattagaacgtgaggaaatagcctggctgcactattgctacggctgtaagcctaattttaaaaatgatgaagctgtatgccagtggctatggcttgattttcttgtcgctcattcaaataccgatttaaaaagaatgaaagagctgacaaagagaacgatgaagaaattaactcattacgccattcagcaggttaaagcctcgatattacgcaatgaggaaatagatcatttgcgtgaggatgagcatataagttttttactgaatatcaccattgatagctggcgtaaggactataaaaaacgctggtcattaatgaaatcacgatgcctgtatctgaacagcaccgcattattacatgcagcggagaagcgcagtgaaatcatcaaccgccatcgtacaggaagtaccgacctgcctgtgtcagcagattatgcacaggaaacccggtaa

SEQ ID NO: 113552 - DNA, 609 bp, Enterobacter aerogenes; identical to SEQ ID NO: 113537

SEQ ID NO: 113553 - DNA, 135 bp, Enterobacter aerogenes
atgaaatccgagttattcaactacagcctgaaaacactcctggtactgaattttatcgccgatttggctctgtttgcagtgctgtatggttttgggtatggccttttgttcctgcttgaatggtggcttatatga

SEQ ID NO: 113554 - DNA, 372 bp, Enterobacter aerogenes; identical to SEQ ID NO: 113536

SEQ ID NO: 113555 - DNA, 327 bp, Enterobacter aerogenes; identical to SEQ ID NO: 113535

SEQ ID NO: 113556 - DNA, 294 bp, Enterobacter aerogenes; identical to SEQ ID NO: 113534

SEQ ID NO: 113557 - DNA, 267 bp, Enterobacter aerogenes
atgaccagcaaattaaccaaaaaagaatcggcctggttcgatgaagttaacgcagtactggcgcggtgtccgtctccgggaaaattcggtttctacacaattggcgatcgtgacgtgatggtctacgacaagcgcaaagaaaatgagattgaacgcaagctcgacgagcggtcgtcttccgattggtgtgtggctgtacgagatgcggacgctgaaattgacgccaatatttactttccttctgccgtactgagcacagctggataa

SEQ ID NO: 113558 - DNA, 462 bp, Enterobacter aerogenes; identical to SEQ ID NO: 113533

SEQ ID NO: 113559 - DNA, 225 bp, Enterobacter aerogenes
atgctgggtgagatttgtgcgctgcgtcgcccaggtagaacgccgtattcagaaaatgaagtaatcggcctgctgatccggaagaactacaaagagcttcagaagagcctggcgaacacatgccagcgatgcggtcaggcgctgccggtatctgaatgtatctttgacggcgaaaattcatgcttactgacgactgccagactgaagctggccattaaagcgtga

SEQ ID NO: 113560 - DNA, 222 bp, Enterobacter aerogenes; identical to SEQ ID NO: 113532

SEQ ID NO: 113561 - DNA, 207 bp, Enterobacter aerogenes; identical to SEQ ID NO: 113531

SEQ ID NO: 113562 - DNA, 288 bp, Enterobacter aerogenes
atgaaagtgaaaggcatcccatttaaccaggttaaagaacgtctgctcaataccccggaggcaatccggggttatcaggaagcagataaagaactggcactggtcgaaatgctgtacaacatgcgagaaaaggccgggttaagcaaatctgccctggctgaacggatggggatatctccatctgcaattagtcgtctcgaagggaaccctttaggggccagcatgaagacgctgagcaagtatgcgcaagcgtgtggcgctgatataaatattcaggctatttactag

SEQ ID NO: 113563 - DNA, 312 bp, Enterobacter aerogenes; identical to SEQ ID NO: 113530

SEQ ID NO: 113564 - DNA, 222 bp, Enterobacter aerogenes; identical to SEQ ID NO: 113529

SEQ ID NO: 113565 - DNA, 228 bp, Enterobacter aerogenes; identical to SEQ ID NO: 113528

SEQ ID NO: 113566 - DNA, 1062 bp, Enterobacter aerogenes
atggaaaacactgtaaaaataaacagtgctcaacttgtgcatgcagactcgctggaattcatcaaaaccctcccggataacagcattgacgccatcattaccgacccgccgtattaccgcgtaaaggccaatgcctgggataatcaatggccctccgtgactgattatctggcctggctggatgagttttttgccgaattctggcgggtgctgaagccagccggttcgctatatgtgttttgtgggccaaagctgtcatcggataccgagctgcttcttcgtgatcgtttcaatgtgctgaaccacatcgtctgggctaaacccagcgggcgctggaatggcgctcgtaaagaaagcttccgttcttatttcccggccagcgagcatattttcttcgcggaacattacggcgcagaagggtttgcaaaaggccagaatggatacgcgacaaagtgccagaagttgaagggcgaagttttcgaaccgcttatcaactatttccgtgatgctcgccagcggcttggtatttccgctgccgaaatcaacgaggcaaccggcacgaagatgtgtagccactggttcagcaccagccagtggcagctacccaatgaacggcagtacctggcgctgcaggcgctgtttaacagaaaggccgcagagtcaggaacaacaggtcttaccgagccgcatacggtgctgcaggaggaatacggcacgttagcggcgcaatattccgaactggttgttcagtattctgagctgcgtcagcagtatgagaacctgcggcgaccgttccgtgtgacaaaagacgtcccgcacaccaacgtgtggacgtatccaccggttccgtactatccgggcaaacatccctgcgaaaaaccgctgcagatgatgctcgacatcgtttcggccagtacgcgccctggcgatgttgtagctgatttctttatgggatcgggtgcaacgataaaggccgctctacagttggggcgtgaagccattggagttgagctggaagaggagcgattcttacagacggtctcagagatagaaaaaatataa

SEQ ID NO: 113567 - DNA, 492 bp, Enterobacter aerogenes
atgaattatggattggcgagtaagcaagatgcgcggcgatatgccgaagctatatgcgacgtaatcggacacggaaaaaacaacgccgctgtactgctttgtgttgagacggctgctgctgagacgctccttggggactacaaagacccgacgccgactagcgccgggactggattaacccaggttgatctcggcaccttcgaatggcttcgcgataagtacaaaaacagtcgttacgccgccgttctgctgaatcagtttggtatcgacctgggccggacggtttaccaggagctgagaacatcgccgctcatggcgatgttgttttgccggttgcgctatttgacggtccctgagtcgattccggcgacccgcgaggctcgcgccgcttactggaaaaagtattacaacacctcggcaggtaaaggcacgccgcaggattacatcgataaatgccagcgcgctggcgttgatgcgctattcacgcagtga

SEQ ID NO: 113568 - DNA, 465 bp, Enterobacter aerogenes; identical to SEQ ID NO: 113527

SEQ ID NO: 113569 - DNA, 219 bp, Enterobacter aerogenes
atgcgcgtagcaacccggctgattatctgcgtcgctttggccgggtgcgcgaaatcaacaccgatggcaccaatactgaatccggctccgtgcgcagcggaaaaaccggcgattgatgtggttcacgtcgatgggcatttcgttatcgctgatgacgatatgggaaaactgaccggttacattgccgcgcttgaagcgggctgtaccgcaccgaaatag

SEQ ID NO: 113570 - DNA, 300 bp, Enterobacter aerogenes
atgaaaatttatatcgctggcccgatgaccggacgcgagaacttgaatcgcgaggcattcaacaaagaggccaaccgactagcccgccacggtcacaccgttcttagtcctgccagcctgcctgacgggcttgaacagcgcgaatatatggacatttgtttcgccatgctccgctgtgctgacgcgattctgatgctccctggctggcagacgtcccccggcgctacggcggaatatcactatgcgtacaaaatggagcttccagtttataccacggtgcattatccgccggtcgcatag

SEQ ID NO: 113571 - DNA, 873 bp, Enterobacter aerogenes; identical to SEQ ID NO: 113526

SEQ ID NO: 113572 - DNA, 336 bp, Enterobacter aerogenes; identical to SEQ ID NO: 113525

SEQ ID NO: 113573 - DNA, 441 bp, Enterobacter aerogenes; identical to SEQ ID NO: 113524

SEQ ID NO: 113574 - DNA, 201 bp, Enterobacter aerogenes
atgggttatacccgctgtacttattgcggttcacagcttcatacatatgcgaactgccccaaaacatggggcggctcatcgcgtcgcgccaatctgcgctgcagttattgcggtcagtccgggcataactcgaatgcctgcccacacaacgcgagcagcggtcgtcggcgcagcctgaatgacgacttccacctcgactga

SEQ ID NO: 113575 - DNA, 264 bp, Enterobacter aerogenes
atggaggactgctatctgctgatggaatactgcaacactgttcagcttcttttcgatgccaatcaggaaatcaaaaatgatgggctcggcgatgagacagccgccggtgggcagaaaatgggcgcggcagtaaaggcccgtgacaaatatatctcacagttaatccggctgagcgttgttctaaaacttgatccaaatagccggatggtaaaacgaactccactcgccgggagtaaaaccgaaaacgaatttgacgaattttga

SEQ ID NO: 113576 - DNA, 1716 bp, Enterobacter aerogenes
atggccgcatacccgaacgtcaatatggcgaatcagtatgcgcgggatgtgttgaacgggaaaatactcgcctgcaagagcatccagctggcatgccagcgccattttaatgatctgaaaatttctctcgataaggattatccctaccggttcgatcgtgaactggcggaacgtgcctgccgtttcgttcaactattacctcactccagcggtgatttagctggtcaaaaactgaagctagaaccttggcaggcctttgcattcagttcgattttcggctgggttacgaaaaagaccaaaaaacgccgatttcgtgaagcgtatatccgggtggccaggaaaaacggaaaatcgtttttcgcggcaggcataggcacgtacatgttctgcgctgatggtgaaaacagtgcggaagtgtactgcggggctaccacgatggcgcaggcgaaaaaggtattcaccccagccagacagatggcagaccgccttccgtcgctccgctcaaaattcaatatttcggtatgggtagacagcctgacccgaccagacggttcgctgttcgctcccatcgccggtaagccaggcgacggtgacagcccacactgcgcgattattgatgaatatcatgagcacgatacggaccacatgtatgaagccatgacgctgggtatgggcgctcgttcgcagccgctgacgcttatcatcaccacggcgggtacgtcgctggaatcgccatgctacgacaaggataaacaggtcaaggagatgctcaacgggcatgtgcctaacgaccgtctgtttggcctgatttacgagcttgatgaaggggacgactggaccgacccgaccaacttcattaaagcgaatccaaacctcgatgtgtcgatttcgtatgacgatctgctggcggagatggaggtagctaaacaggttccgcgcaaggtaaacgcctttaaaacgaagcgtctcaatatctgggtatccggtaaatctgcgtactacaacatgacgcaatggcatgctgcagctgatgaatccctgtgctacgaggactttgccggtgaggattattacctcggtctggaccttgcccagcgtcttgatcttaacgccggtgttggcgttttcgtccgcgaaattgagggtaagaaacactactactgcatcaggccgaaattttgggtaccggaggacacggtccgaagcacggacccgaaaattgccaaaactgcagaccggtatgtgaagtttgtcgaaatgggggcgcttgaagcgacagacggggcagaagcggactatcgcgaaatcctggccagcatcatcgaccttcaggaaattaataaggtccgcatcagcgagatccccattgaccccagcggtgccacggcactcagtcatgagctgcaggaccacgggtttgatcccatttctatccggcaggactataccaacatgtcgccccccatgaaggagctggaagcggcgctcgctggcggacgtttccaccatgacggaaaccctgttctgtcatggtgtatcagcaacgttattggaaaaaatgtacctggaagcgacgatattgtccggcctacgaagggtgacaaacaatcaaaaatcgacggagcaacagcgctgttcatggctataggccgcgcaatgctgaacggtagggccagcaaccaatccgtttatgatgaggaagatgtagcgtgttaa

SEQ ID NO: 113577 - DNA, 1266 bp, Enterobacter aerogenes
atgtttattccccagatgtttgaaggtaaaaagcggtccgtatcaggtggcggattctgggaagctatgctgggtggtgtccgttcaagtcatagtaaagccggtgtcatgattacgccggaaacggcgcttgcgctttctgctgttcgtgcgtgcgtaaccctcctggcggagtccgtcgcgcagttgcctgtcgaactctatcgacgagataaaaatggtgggcggcaacgtgcgacagaccacccgatttatgacctgattcactcccagccaaacaaaaaagacacctcattcgagtactttgagcagcagcaggggttgctggggctggagggaaattgctactcgatcatcgaccgcgatggaaaaggctacccgaaagagctgatccccattaacccgaaaaaggtgattgtccttaaggggccggacgggatgccgtattacgaaatcccggacatcggtgaaacgttaccgatgcgcatgatgcaccatgtgaaagtcttttctctggatggctatatcggcagttcaccgattcagacgaacgctgacgtgctcgggctgaatctggcggtggaagagcatgcatctgcagtattccgtcgtggcacaacaatgagcggcgtgattgaacggccaaaagaagcgggagccatcaaaagccaggacgcgattgaccgcctgctggcgaaatggaccgaccgctattccgggatacgcaacatgttctccgtggcgctgctgcaggaggggatgagttacaaatctctctcgcaggacaacgagaaagcgcagctgctgcagtcgcgtcagtggggcgtggaagaggtttgccgcctctacaaaatcccgccacatatggtgcaaatgctggcgaaagcaaccaacaacaacattgagcatcagggcctgcagttcgttatgtacacgctgctggcatggttgaagcgacatgaaggcgcgctgcagcgtgatttgttgttgcccagcgaacgccgcgacttgtatatcgaattcaacgtttccggcttactgcgtggtgaccagaaatcgcgttatgagtcatatgcgcttggccgccagtggggctggttgtcggttaacgatatccgccgcatggagaatctgccgccgatagccggtggtgataaatatctgacgccgctgaatatggtcgacagcgcacaaatcatccctggcgataagaagccgacggcgcagcagatggcggaaatcgacaccatcctgtctcgatcctga

SEQ ID NO: 113578 - DNA, 921 bp, Enterobacter aerogenes
atgacaacgaaacaaattaaccttccgcacattgcggagatggtctttggcgtgccgcattatgtatcgcggcaaacgatggactctgtaaaggcggtattaattccccgaattcagggaacggtcgagaataccggcatccagttagctctggacccggataaagcatcggcatcggagcaggtacagccagccggtggcgtggctgttattccagttcacggattgctggtagcgcgtcgcggacaaatcacgcaggcctgcacggagctgacgagctatgagcgaatccgcagccagctgaccgcggcattaaacgatccatcaatcagcgaaatcgttctggatattaactccggcggcggtgcggcagtgggctgtaaagagctggctgattacatttatcagtctcgcgagacgaagcccatcacggcaattgtgaattacaacgctttttcagccgcgtatttcatcgcatcggcctgcagcaaaatcatcgtaagccagaccagtggcgtaggctccatcggtgtaattatggagcacctggatacgtcgaagctggaagagaaaatggggctgacgtttaccacgatcttccggggagataacaaaaataacggtacccaacatgagccactgagcgaagaagcacaggccatgttccaggggatgattgacgaaatgtacgagacgtttaccgggtcagtagcggaatatcgcggcctcgaccgtcaggtcgtcgttgatacgcaagctgggctgtatttcggtccaggcgctgtttcagctggccttgcggatgaaatatcagaccctcagtcggcgatcaatgccattgcggcgaagtacaaaacgcctcagaaagccggttctatcaagctgcaggcggcagcgatggacctgcaaacaaaaatgtaa

SEQ ID NO: 113579 - DNA, 1287 bp, Enterobacter aerogenes
atgccacagattgaagaattgcgtcgtcagcgtgcgggtattaacgaacaagtccaggcgctggctacgattgaagcgagcggcgggacgctgacagcagagcaactgaccgaatttgcgagcctgcagcagcagttcaccgatatcagcgccaaaatggaacgcctggaagccgccgaacgtgctgcggcgctggtcgcgaagcctgtgaaggctacccaatacggaccggcagttatcgtcaaatcggagccaaagcaatacaaaggcgcgggcatgacgcgtatggtgatgtcgattgccgctacgaagggcgatctgcgtgacgcagctgtatttgctgctgaggaattgaatgaccagtctgtatcgatggccatctcaaccgcagcgggttctggtggcgcacttatcccggagaacatgcagaacgaagttattgagctgctgagtgaccgcactatcgttcgtaagctgggcgcccgttctatcccactacctaacggtaatttgtctttaccgcgctcagctggcggtgcaacggccagctacaccggtgaaggtaaggatgctaaggcgtctgaatcaaaattcaacgacgtaaaactggctgcaaaaaccatgatcgcactggtaccgatttcgaaccagctgattggtcgtgccggttttaacgttgagcagctggtcctgcaggatattctgaccgctatctccgttcgcgaagataaagcgtttatgcgtgatgatggtaccgaagacacgccaattggtatgaaggcgcgtgcgacgcagtggaatcgcctgctgccgtgggaagccgctgcagcgatcaaccttacaacggttgatgagtaccttgacaagattattttgatggcgatggatgggaacagcctcatgattaagtgcggctggggtatgtcgaaccgtacttatatgaagctttttggcttgcgtgacggcaacggtaacaaagtctacccggaaatggcgctgggtatgctgaaaggctatccgatccaacgtaccagcgcgattccggttaacctgggcgaaagtggcaaagaatcggaaatttatttcgctgacttcaacgatgttgtcatcggtgaagatggcgcaatgacggtcgatttctccaaagaggcaacttacaaagatgccgaaggcaatctggtatccgcctttgcccgtaatcagtcgctgattcgcgttgttgttgagcacgatatcggtttccgtcatccggaaggtctggtgctgggtaccggcgtcctgttctaa

SEQ ID NO: 113580 - DNA, 288 bp, Enterobacter aerogenes; identical to SEQ ID NO: 113523

SEQ ID NO: 113581 - DNA, 318 bp, Enterobacter aerogenes
ttgatactgacattggatgaagttaaaaaccaactccgcctggagctggacttcactgaacatgacgccatgctcacgcagatggtgaacgccgcgcagcggagcattgagcgtgattattactgcaagctggtcaccagtgatgaagagctgcaggcgcttccggagacggtacgcggattcattgcggacgaagatatcaggctggccatccagtatcttgtcagtgatgcgtacctgaatggccataccgggcaatggctggaaaccgcagcagtgaagcatctccttttccctattcaggagcataccgtatga

SEQ ID NO: 113582 - DNA, 339 bp, Enterobacter aerogenes
atgagcctgaaaccgggagatatgaactgtcgcattacgattagttacctccagtccggtcgtgggccgctgggcgaaccgctgccggaaaagttagttgaatcgggaaaggcctgggcaaagcgggagctggtatcgggtagaaaagtccgcacgatggaccaacagcaggttatggaaacctgtttgtttaccgtctatccgggcgtggtggtcgatatcgactggaaaatcacgacaaaagacctggtttatacagtccgaaatatcgaccgaaaaacggaccagatcatcattaccggggaggcagacgggcggcatgatagaactggcgattaa

SEQ ID NO: 113583 - DNA, 390 bp, Enterobacter aerogenes
atgatagaactggcgattaaaaatgagctggagcgcatcaccggcatggatgcgtacccgcttttactgccggacacggtccaggaaggggtgacctttcagcgtatctctgacccggaaatgtactcgggaacattgcggacggggatcgtatctgcccgtatccaggtgaatctgtaccgcgttgatgattacacctcactgctgcagctggataaaaaaatctggtcggaatggaagtcaatcgttcatggccagctggatggtgtcccggtccagtatgttgagcgtggtggcattcaacaggataaaacgacgctgacgaaccgcagcatccagtaccgcctgattcgtgatttcatcattcactacgtggaggactcttcatga

SEQ ID NO: 113584 - DNA, 402 bp, Enterobacter aerogenes
atgatccgaatggaagtgaaagggctggatgagctggaacggcagttaaccgctttgggggaaaaggtcgcgacgaaggtgttacgggatgccggtcgtgaggcgttaaaggttgtccaggaggatatgaagcagcatgccggcttcgacgaaacgtcgaccggggagcacatgcgggactcaatcaaaatccgttcttctaccagaaaggcgcgaggaaacacggttgtaacgctccgtgtcggccccagcaagcagcaccatatgaaggcgctggcgcaggagcttggcaccgttaaacaggttgcagccccctttattcgacccgccctggattacaacgtccagaaggttctgcgcgtcctgaccgtggaaattcgaaacggtattcaaaacaggtag

SEQ ID NO: 113585 - DNA, 465 bp, Enterobacter aerogenes
atggctgataagagttcgcctgaatatgcgatgttgcctgctggcaccatcgtaaaatatggagaacccggcgcagcagcatcggctctgaagccgctgattaactgtaaagcgctgggcgcaatggggcagacgggaggttttgtcgactgcactacgctgcttgataagcagaaacaatccatcagtgatctgcctgacgggcctgaaaagtcgctgggttttattgatgatcccggaaatacagatttcgccgcgctgcttaacgcagcggaagcccgcaaaaccatccagctgtatgttgagctaccgaacaagcggacggcgacgatgttgctggcgctatccggctggcagatgaacgaaatcaccgcgccagcgagtgaagtgattcagatcaccgtacaaggtaagcaaaacagcattaagtggggtactgccggtgctaatgctggcggcgaataa

SEQ ID NO: 113586 - DNA, 369 bp, Enterobacter aerogenes
gtgaaagataaagattttgacctgtccgcgcttaaatccgcgcttcttaaatcagtcccgacggtagtgaaaaccgagttgttcggcgcaacggtctatatccgccgcctgaccggggattacctcatcagctatgaagagaaaatggctgaaaccgcaaaagctggcgcagcgcgcgaggcatcagagcaaataatccagatagtcattgatgcactggttcagccggatggaacggccattccagatgagtttaaacccacggcaactgagctgctcaaggcccatgaaaaccccgagttgctggaagccgtggataaggtgaagcgccactccatcgggacgctggaggaagcggaaaaaaactaa

SEQ ID NO: 113587 - DNA, 3396 bp, Enterobacter aerogenes; identical to SEQ ID NO: 113522

SEQ ID NO: 113588 - DNA, 339 bp, Enterobacter aerogenes
atggctatagaaatatttacctggagtccccgagtaaatccaacgcaaaccgtgaatttccgtacccgaaaggcgcagttcggcgatgggtatgcccaggtatcaggggacggattaaatacccggtcacaggaatgggagctgagttttgtcggtaccgaggattatatccgaccgataaaacagttcctggatcgtcatggcggcacaaagtcttttcaatggacaccaccacttgaagatgtggggctttttcgctgcgagcaatacaaacccgtaccgatggggggagggaattactccctgtcggcaacctttattcagggatttaaaccatga

SEQ ID NO: 113589 - DNA, 756 bp, Enterobacter aerogenes; identical to SEQ ID NO: 113521

SEQ ID NO: 113590 - DNA, 711 bp, Enterobacter aerogenes
atgcggcagaagacgattaatgcgatacaagctcatgccgctgctgattacccgcgcgaggcatgcggattaattgctcaaaggggaagagtggagcgctattttccctgcaggaacctggccagcgagtcgaatgataatttcgtcctggctccagaagattacgcagaggtagaagattggggcgtggtcatcggtattgttcacagccatcctgatgcgaccacacagcccagcgagctggataaggcgcagtgcgatgcaacgctgctcccctggcatattatcagctggccagaaggtgatctgcgtaccatccatccgcgcggagagctgcccctcatcgagcgaccgttcgtgcttggtcactatgattgctggggtctggtgatgagctactttcggcagacccacggcatcgagctgcatgactaccgtgtcgactatcactggtgggaaaacgattatccggataacttctaccatgattgctggtacgaatgcgggttccgtgaatttgatggaccgccacagccgggcgatatggtcatcatgcaggtgcaggccgataagtggaatcatgccgggattctgctggaagggaacatgctgctgcaccatctatatggccacctcagccagcgcgtgccgtatggtggatactggttagacagaacgatgaaaatcgttagatatcattcactactttaa

SEQ ID NO: 113591 - DNA, 828 bp, Enterobacter aerogenes; identical to SEQ ID NO: 113520

SEQ ID NO: 113592 - DNA, 10236 bp, Enterobacter aerogenes
atggcaaataacataatcaaagggcgcaaaggtggcagctcaagccagcgcacgccgacggagcagccggatgatttacagtccgtagcaaaagccaaaattctcatcgcgctgggcgagggagaatttgcaggtgaattaacgggcaaggatatttatctcgatggtaccccgctattaaatgccgacgggtcagagaacttttccggcgtggcctgggaatttcgtcccggaacacaggcacaaaaatatattcaaggcattcccggcactgaaaatgaaatcagcgtcggaacagaaatatccagcgaaaccgcctggagccatacgtttacaaatactcagctatctgccgtccgcgtccgtctgaagtggccgtccctgatgaagcaggaagatgatggtgacgtggtgggcaacacggttaaatacgccatcgatttgcagacagatggcggtgcatggcagaccgtgctggaaacggcggtgaccgggaaaaccacttccggctatgagcgcagccaccgcatcgacctgccgcaagcggggagcacatggacgctccgcctgcggaaagtctcgccggacgccaacagcgtcaaaatcggcgatgtgatgacgctacagagctacacagaagtgattgacgcgaagctgcgctatccgcataccgcgctgctctatatcgagttcgactccagccagtttaatggttccatcccgcaaatttcctgtgagccacgcgggcgcgtgatccgcgttcctgataactacaacccggagagccgcgagtataccggcacctggaccggcgggtttaaatgggcctggacggataacccggcatggatttattacgatatcgttgtttcagaccggtttggcctcggcaaccgtctgaccagcgcgaatatctctaaatggacgctgtaccagatcgcacaatactgcgatcagatggtccccgatggtaagggcggcgatggcatggagccgcgctatctctgtaacgtctatgtccaggaacgcaacgatgcgtacaccgtgctgcgcgattttgccgccattttccgggggatgacctgctggagcggtgagcagattgtcgtacaggcggatatgccgcgtgatgtcgactttaactacacgcgggcgaacattattggcaaaccgcgttattcgagcagcacaagcaaggcccgctacaccaacgcgctcgtctcctggtccgacccggcgaatgcgtatgctgatgcgatggaaccggcgttcgtcccggagctggtttcccgctacagctttaaccagctcgaagtgacagccatcgggtgtactcgacagagcgaagcccaccgtaagggcctgtggggcatactgaccaacaacaaagaccgcatggttgagattgatgtggggctggacggtaaaatcccgcagccgggctacatcattggactggctgatgaacttctggccggacgcgtgaacggcgggcgtatcagcgcagttaatggacgggtgattacccttgaccgggatactgatgcaaaagctggtgaccggctgcagctgaacctgccgtcaggcatatctcaggcccggacgatccagtcagtcaacggtctccgacaggtcacggttacgacggcgtacagtgagacgccggaggtggaatgtgtctgggtgattgagtctgacgatctgtatgttcagcagtaccgcgttatcggggtcaaggacaacaacaacgccacgtatacaatcaccggcgtggcccacgatccggacaaattcccgcgtatcgataccggcgcgatcatcgaccagcgcccgataagcgttatccctccagggagtcagcagccgccggaaagcatcgttatcagctcgtattctgtggtgaatcagggcatcagcgtcgaaacgatgcaggtgcactggaatgcggtgaaagatgcgatttcgtatgaagcgcagtggcgacgtaatgacggtaactggattaacgtgccgcgcagctcgaccacctcgttcgaggtcagcggcatttacgccggtcgttatctggcccgtgtccgggcgatcaacgctgcagaggtctccagcggctgggcatattcagaagagaaaacgctgacaggaaaaatcggcttgccgtcggcaccgctggcgctgaccaccacttccctgctgcatggcgtgcagctgaactgggcgttcccggaggggagcggcgatacgcagaaaaccgagctgcagtacagtcctaatcccaacggcaacggggcgatggcgctgtctgatgtggcgtatccgggcaaaacctatcagcagatgagcctgcagattgcggcgatgttctggtaccgcgcgcggatcgttgaccgtatcggcaatgaaagtccgtggacggcctgggtgcaggggatggccagcgacgatatcggtgagtattacgacaagctgaccgatgcgattaaggacacggaagcctggcaggaagcccagcgggatattgaggagactcataaggagctgataaaaaccgccgaggctattcgtgaagaagtcgcgcagcaggtcaccgatattaaccagagtattgatgattctgcgtctgagatccgccagcaggttgacggtcagatagagtccgtcaacaagtcgataacggagaatatcaacagcgtaaatcagacgctcagtgacaatatcacggcagtcaacaagagcatcaccgatgccgtgagcgatattaatacctccgttgaccagcagatcgctgacgttaacaaaaccctcaccgagggggatgctgcgttaaaatcccggctgcaggcggttgaaaacagtctgaaacagtccatcgcccaggcgaatacaggctgggacaaagcggtaaaacaggagactgccgaccgcattgcggacgtcaacgcgaaagcggcgcaggcggcagaccagctgctgaatgaaaaaaacgagcgcgtggccgccattgataatctgcagacgattattcaggacggcgacgagtcactggcccgtcagatttctgaaatttccgccggtagcgggcagcagtttgattcgttcagtatctggtacttcgataaagacaatgaggggtggaccgaggacgatgccggtcaggtgccgatgcaaatcacggacgacggctggctgaaagcactgaacagcaccgcctcctgccgttcgcccaacgggcaaactattccggcttcctcctatcgcaccgtcatgctgcgtattaaacgcgtgggtaatccggcatggaaagggcggctttactggattggtacagaggaaaccggctggagtgatgcccgctcggtgagtatcgcggagcaggagtttgacggcgatggtatcagcgtggtggccatctccgatgtgaactggaatgcatccggtacggtccgccgctttcgcctggatctggctcaggggcagaatgccgacaaccatttcctgatccactggatatcggtcgggcgtccggcaccggcggccagtactgcagcgctgcgtaatgaggagatggcgcggacgcaggcagatgaagcggaagcgctgaagcgctccacgctggcggcacagataaggggaacgacggacagtaacagcctggcggatctgcgttccggcctgctgtatcaggagatgaatgcccgtatcactgctgataaagcagaggtgacagcccgggaatcgctgcagacgcagttcaacgagaataaatcctcggtcgcggaggagctgagttccctgtcgactgcacaaagcgcacaggccagcaaaatcagcgggctggaaaccagtctgggtaaaaaagccgatgcaaccgcgctgcagtccctcacgcaaaaggttgaacagcagggcaccacgttaaccagccaggggaattcgctgacctcgctgtctaaccgcgtcggtaaaacagagtcgggtgtggccgcaaacagcaacgccatcacgggcctgcagtccagcgtcagccagcaggataaaacgctgaccagccagggcagcgcgatcgctaaactgcagaacgacctgacgacaaccaattcaaacgtcagtaaaaaggccgatgcgagcgcggtcacggcgttaacaaaccgggtatccgcgacggaaggcaacctgaccacacagtctggccagctgacgatgctgaaaaacaccctggctgaagggagcctgattagtaacggcggcatggatgtggatctgtcgttctgggagaactccggtaccggctcggcattcacgtatgatgcaggtgaaaaagcgctgagaacgacaaccggctctgtccgggttgccaacgtcacgcgtatccctgctgaggccgggctgacgcttaccgtctcatttgagtacaaaacatcggaaacgatgaacagcgtatcgtctgataccgttggtgtgataactgatttgggcaatcctgtcgcctggctatcctcagaatccccgtggctgagtggcgtgacgaccagctggcagacgaaaaccgtggagctgaccattccggcaaactttaccgggaattatgtctatctgcggtttgccgccgggggctgggcaccgtcaaacagtgcgcgtctgtatatccgtaaagtcgacgttttttcgtcgaccggggtgtcgaagaaggcaaatgcctctgccgtgactgacctgaccagtcgcgttgactcagcggaagggaagctggccagccacagccaggcaatcacaaagctgcagaatgacctgaccacgacgaactcgaatgtgagtaaaaaggcggatcagagcgcgctgacgtcactgaccgggcgagtggagaagacggaaagtggcctgactgcagcgaacagcaatatcacttccctcaacagctcaattagcgccgcaaaagcagccggggatgactatatacctaaccccgcatttgatccctcttacgaccgcatggggtatgacgtcgtatcatccggcgctgctggcgtgcccggggattgcccgtttgcgtacgtggttcgtctggcaggccgcgatcatgtcccaaaaataaacaacattgctgtcacaccgggtgatgtcttcgagatgtcggccctggtagcctgcggcgccggtcaggccgattttaatctctatatcgccagcggcacctcagcgacagaaggggttaaagcgaggctttctggcggtaacacgaaaaccacggcggtctggaagcgcgcaacatggcgctttacggtgccgtctgacacgaatttcctgcgccccttcctgcaggttaaccagagttcaccctttggtacggtctggtatgcagcagactggcatctgcgcaacgtcaccgcagcgaaccgcgcacagaaaaccgccgatgccaccgcgtcagcagtggataccctgaccacgaaagtcactcagcagggcgatacgttgtccagcatcgggagccggacgacggcgctggaaaacgggctgaagacgacaaacagcaccgtcagccagaaggcggacgcgagtgccgttcagaccctgcagaacacggtgacgcagcagggcaaagacattacggcggcgaacagcgcgataacgaagctgaccagcgacctgtcgacgacgaatgccaatgtcaacaaaaaggcggatgcgagtgcgctgcagacgctgcaaaacaccgtgacagagcagggcaaaacgctgacaagccagggcagcagcctgacgcagctgagtaacagcctcgatgaagctgttgctgatgcggatgcctcccgggcgatacccggcaacctgatttctaacgggtcgttcgagcgcggccaggctgcgtttactggctggcagtcagcgacgtcagtcataacggcattgtcaccgtacaacggcacccgaatcctcaaggtggtgccgggcagtaacgtggtctcgctgcttcagaagatttcgttcataaaggatcgcacctacaaaataggtgtgttcacgcgtgtttcaggtggcacgacaatgccgtcaggcgctgccggaaataacaagctgcgcatcggtgaatccggcggaccactgaaagaggtgcagttcaatcccgcgacgctgccgacaggctctgtctggcaggaaatttctggcacatggaaagccacgaaaacggcagtccttgacgtctccattatggtactgctggcgacgggtgagcagtattttgatgatttctatcttattgacgtgactgatgagaccagtattgcggccagcgccactgccatcagtaatctgaccaaccgggtaacgagcgcggaagggaagctggagagtcagagcagcagcatcacgaaactcacgaacgatctggccacgacgaatgccacagttaacaaaaaggcggacgcgagtgcgctgcagtcgctgcagaacactgtgacagaacagggcaaaaccctgagcagccagagcagtagcatcaccagcctgcagaacgggctgacgaccgcgaaccagaacatcgcgaagaaggccgacgcgtcagccgtcacctcgttaagtaaccgggttaccgaagccgaagggaaactgaccagccagagtaacagtatcacgcagctccaggcgtcgttgatatccggtagcctgattgcaaacggcggaatggagtcagacctctcgttatgggttgactccggcactggctccgcgtttacgtatgacgccggggaaaaagcgctgagaacgacgacaggctctattcgtgtggccaaccagacccgcatcccggttgagccagatacgaaattaaccgttacgtttgagtttaaatcctcagaggcgatgtcgaatatatcctctgactccgttggagtgatttctgacctgaataaccccacgggctggctggtatccagtacatcatggttaaaagggataacgaccagctggcagacgaaaaccgtggagctgaccatcccggcaggttttactgataatttcgtctatctgcggtttgcagcgggcggctgggcgccttccgccagtgcacgactttttatccgtcatgttgtcgtgttttcatcaaatggtgtggcgggtaaagccgacgccagcgtcgtgaacgatttatcgtcaaaggttaccgagcagggcaagacgctggccagccagagccaggcgatcacaaagctgcagaatgacctgtcgaccaccaatgcgaacgtgacgaagaaagctgacgccactgccttaaacgcgttatctaatcgggtaacgcagacggaaaaggatatcagcagccaggctgacagcattaccagcctgaacagctcgctgaatattaatgcccgtaaaggctcaaacccgtggctggacggaacgtttgaaacctacgacgcaaaccataatctgggtgggtccgcacgggttgttagcgggatgggttactccggcagtaaatgcatgcgtgtcacgcgagcgccgaacacgaatggcaacagcgatgatttaatcggctcacgcctggccattcgcgatacggcagtattcagggttgaattctgggcgatgatgcccgccggagaaaacccgtccagcggctgggtcaccgcggtcggtattaacgtccagaatgatacgggtagcaattcctggctgggggcagcgaatgtcagcgagtcgacgctgggcggccgtgacaaatgggttaaattttccggctacgcaaaagcgacgatgaaaggcgcgacgcgcgctgtggtctggatctccacgcgcggggcgaacggcagcaatacgccgggctataacctgtatatcgacgacctggttattacagatgtcaccgatgcttacaatgcgcagggcacagcagacgcggcggcctctgcggttgactctctgaccacaaaagtcactcagcagggcgatacgttgtccagcatcgggagccggacgacggcgctggaaaacgggctgaagacgacaaacagcaccgtcagccagaaggcggacgcgagtgccgttcagaccctgcagaacacggtgacgcagcagggcaaagacattacggcggcgaacagcgcgataacgaagctgaccagcgacctgtcgacgacgaatgccaatgtcaacaaaaaggcggatgcgagtgcgctgcagacgctgcaaaacaccgtggcggagcagggcaaaacgctgacaagccagggcagcagtctgacacagctgaataacgccctgagtgataccacggccagcctggcagctgacggtaaaatccccggcaacctgatttccaacgggtcattcgagcgtggtcaggatgcgtttaccggatggggaagcgtcgggtctgttatcagtgcgcagtcgccgaactacggcagcaaaatcgcgatgtgtggtgtgggtcttgccacactatcccagaaggtcccggtaacgaagggcaacacctataaaatcggtgtttttgcccgtgcgcagggcggttcggtcatgcaggatcagggcaataacaaactgcgtattggtcagtcgtccctgctgtacgatcgccagtttaaaaccgcagacctgcccaccggctcctcatgggttgagctgtccggaacatggaaggcgacggttgacgggatggttgatgtggctatctactcttccctgaagtctggctctcagtattttgacgacttctattttgtggatatcacggatgaagtgaatattgccgccaacgccggggccatcagtagcctgaccacgcgcgtgaccacggcagaggggaaaattacctcacagggcagcagcatcacaaagctgacgaacgacctggccaccaccaatggcaacgttaataaaaaggcggatgcgacagcgttgaccgcgctgaccaaccgggtaacgagcgcagaagggaagctggagagccagagcagcagcatcaccagtctgcagaacggactgacgaccgcgaaccagaacatcggaaaaaaggctgattcttcgacggtcacctccctgactaaccgtgtcacgcaggctgaaaataagctggagagccagggcagcagcgtcacatcactgaataacagcattgcggccacccagcaggatgcggacgcggcaaaatccatgcccggcaacatgctggcgaacaactcgttcgaacgcggttttgacggctggagtaactccggctggagcacgctggcagcgcagaacccgaagtccggcaaatacatcattcaggccacgaagacatccagcggctcaacggcctgtgaccaggtggtgaagctgacgggtggccagacgtaccgcgtgggtgcctgggtgcgcaggtctggcgatatggccatcagcaataccagcaataccaaaatcagcatccgcaacagctcaggaccgctgaaagatattacgatcccggccagcgtcggtactgcatggacttatatcagcggcgactataagccgacggcagacgccgagctgatcatctctctgcgctccagcctgtctgcgggttatctgtatctggacgatgcattctgcatcgatgtcagcgatgaggtggccaataccgtcaacgctgcagccatcagttcgctgacaacgcgcgtgaccagtgcagaggggaaaattacctcgcaggggcagcagctcaccagcctgcagaacagcctcggaaataaagcggatgccagcgcggtcagttcgctgactacgcgggtaacaaatgctgaaaataaaatcacggccacgtcaaacagcctgaccagcctgaacagcaccgtcggtacgttatcctcgaccgtacaggcccagggtcagacgctggcggagacaaacggcaaggtcagctcgatgtactccatcaaagttgaaaccaataacgggaagaaggtgggcgccgggatcgtgttgggcagcgatggttccaccagcgacatgatcctctatgccgaccgtttctcgctgtttaaccgcaacagcaaaaccgctgtgccggtgatgattgctgaaggtaacgagctgtacattgattctgcccgtattaaaaacggttctattgatagcgcaaaaatatcagggtctattcagtcgacggggtttggagccggaggtggatggaagttaagtaagaatgaaaataatcttgtttttactgatgaaaataatgttgtgagatttaaagtggggcgtctctga

SEQ ID NO: 113593 - DNA, 771 bp, Enterobacter aerogenes
atggctgagtacggtgtacaactggtcaacaaatacaatctttctatatctaatgcacaggatgtcaattacacgctacgttcatccggcgtcattcgtaacagtgatttctccgttggttcttacaccgacccggttagcgtatgttatatggacctgagtagtctgcattgccctctggtatttttcaggccagtcaatgctgattccagaatttgcgcgtttccgagtcaaatggctgattttatgccatctgtgggtgagcgtattgaccgaacgatgatggtacttaaatggtggaataaaacggtcacagatattgagtattttatttttgacatttggacgccacctgagcgctcaccctttggactgcaaatgtttgatggctcagggaatattatatttgattctggctggaattttttaatgttgtccagcgtcaaatggctggacccgggctatcccaatcaccagaacgacactaacggctcaaactggactgatgtgggtcacatgggggaagggcaactggctctggccttgcccaatccccgtggctgggctgagcctgggggtatgacggtcggctggtacttgatggaatgcttccatctgcagggaaacaatgcgcgcatttcattagttccacgcggtgtatatttctggggtagcggctctcagagatggacgaacaatatgcgcacacagctgatggcagctgatgtgtccaaaatgccgcgaaactataacccggtaagactgctttga

SEQ ID NO: 113594 - DNA, 243 bp, Enterobacter aerogenes
atgtttgttgaattggtctacgataagcggaattttgagggattagccggtgctaaggagattatctactctgaactgactaaacgcatccatcgcatctttcctgatgccgatatccgggtgaaacccatgatgacgatggcctccatcaataccgatgcaaagaaacatgagaaagagcaaatcagccgggccatccaggagatgtttgaggaagctgagttctggctgactgaagcatga

SEQ ID NO: 113595 - DNA, 1164 bp, Enterobacter aerogenes
atgtcacttatcaatttactgcaggaatgtatcagtcgcggacaagagatgacgcaagccattgccatagcgcaatttggtgatgatagccctgaagcacgtaagattactcgccgctgggggataaccgaggttgctgatttaatcggtgtttcaccgcaagcgattagagatgctgagaagaatgggcggttaccgccacctgattttgaattacgtggccgcgtcgaacgtcgtgctggctataccatcgaccaaattagccatatgcggagcattttcggtaatcctaatcaacggccagccgataaaaatccagccgttttagctgttatgtcgcataaaggtggcgtttataaaacctcatctgcagtacatgaagcccaatggttagccttacagggtcaccgagttctactcattgaaggtaatgatccgcaaggaaccgcctctatgtatcatggctatgtgcctgatttgcacattcacgccgatgatactttgttgccattttatctgggtgaacgtgataacgcagaatacgctataaaaccaacatgttggccgggactagacattattcccagctgcctggcgcttcaccgtatcgaaacggacctgatgcaataccacgcccaaggaaaactacctcatccgcctcacctgatgctacgggctgctatagaatccgtatgggataactatgacattatcgttattgatagcgctcctaacctcggaacagggacgattaatgttgtttgtgctgccgatattattgtcgtagctacccctgcagagctatttgattattcatccgttctgcagttcttcaccatgcttctggacctactaaaaaccgttgatttaggcggtttcgagccggtggtacgactgctgctaaccaaatacagcctgactactggtaatcagtcgcgctggatggaagagcagataagaaatacgtgggggtcgatggttctgcgtcaagttgtcagggtgacagatgaagtaggaaagggccaaataaaaatgcgtacggtatttgagcaggctgcttatcagcgctcaacacttaacgcctggcgaaatgcagtttctatttgggagcctgtttgccaggaaatttttgatgatttgattaagccacgttgggaggagtaa

SEQ ID NO: 113596 - DNA, 972 bp, Enterobacter aerogenes
atgaagcagcgctcaattttgaaaggtgcccccaacatcgacaatattatgagtaaaacacaccacgcccctacatcggggtcagtgtcgccaatggttggtgatttacagcgccagcttagttccatgtcagggaatagcattactttgcctgttttggggcgcaacgtaagctttaaactggaaactattccggcaaacaaagtagaaatggcgacaatggtgtggctgggcaacgaacgcgatcaagagctattagacgaagctgcattggccgacctcgttccttcattccttacttctggtcagcagaaccccgccttcgctcgtagaacgtcaggtattatagaggtcgctgatggttcccgacgccgtaaaaccgccataattactggctgtgactaccgcgtattagtcggtgatctcgacgatgaacagatgcagtggttatcgcaagtgggcaacgactatcggccaaccagtgcatatgagcgtgggaaaaaataccagcgccgccttaacgatttcgatggcaacgtcaaagccttagcggtggcagaaggggttgatcgtaatatcattacccgatgtataagtacggctggcctgcctaaagatatcatcgccattttccagcatcctggcgaactatctgcccgcgccggtcacgacttattcaaagtgtatcaggaaaataagcaagccatgctagacgctgcacagcagctgctgcgcatgaagaaaaagggtgaaaaattcgaaccaacgagaatcatccaggctctgcaggacttcatttcgacaaatgcagatgatacacaaaaaaatgagaagcggtatggagatggggttgttgcgaaatacaaagggaattacgtcacattaaagctagataacagaaaaatcccctctgatttaatgaaaaaattagagggactgctcgaaggtgaattagggaagggtaatagttaa

SEQ ID NO: 113597 - DNA, 243 bp, Enterobacter aerogenes; identical to SEQ ID NO: 113594

SEQ ID NO: 113598 - DNA, 771 bp, Enterobacter aerogenes; identical to SEQ ID NO: 113593

SEQ ID NO: 113599 - DNA, 4767 bp, Enterobacter aerogenes
ttgtccagcatcgggagccggacgacggcgctggaaaacgggctgaagacgacaaacagcaccgtcagccagaaggcggacgcgagtgccgttcagaccctgcagaacacggtgacgcagcagggcaaagacattacggcggcgaacagcgcgataacgaagctgaccagcgacctgtcgacgacgaatgccaatgtcaacaaaaaggcggatgcgagtgcgctgcagacgctgcaaaacaccgtgacagagcagggcaaaacgctgacaagccagggcagcagcctgacgcagctgagtaacagcctcgatgaagctgttgctgatgcggatgcctcccgggcgatacccggcaacctgatttctaacgggtcgttcgagcgcggccaggctgcgtttactggctggcagtcagcgacgtcagtcataacggcattgtcaccgtacaacggcacccgaatcctcaaggtggtgccgggcagtaacgtggtctcgctgcttcagaagatttcgttcataaaggatcgcacctacaaaataggtgtgttcacgcgtgtttcaggtggcacgacaatgccgtcaggcgctgccggaaataacaagctgcgcatcggtgaatccggcggaccactgaaagaggtgcagttcaatcccgcgacgctgccgacaggctctgtctggcaggaaatttctggcacatggaaagccacgaaaacggcagtccttgacgtctccattatggtactgctggcgacgggtgagcagtattttgatgatttctatcttattgacgtgactgatgagaccagtattgcggccagcgccactgccatcagtaatctgaccaaccgggtaacgagcgcggaagggaagctggagagtcagagcagcagcatcacgaaactcacgaacgatctggccacgacgaatgccacagttaacaaaaaggcggacgcgagtgcgctgcagtcgctgcagaacactgtgacagaacagggcaaaaccctgagcagccagagcagtagcatcaccagcctgcagaacgggctgacgaccgcgaaccagaacatcgcgaagaaggccgacgcgtcagccgtcacctcgttaagtaaccgggttaccgaagccgaagggaaactgaccagccagagtaacagtatcacgcagctccaggcgtcgttgatatccggtagcctgattgcaaacggcggaatggagtcagacctctcgttatgggttgactccggcactggctccgcgtttacgtatgacgccggggaaaaagcgctgagaacgacgacaggctctattcgtgtggccaaccagacccgcatcccggttgagccagatacgaaattaaccgttacgtttgagtttaaatcctcagaggcgatgtcgaatatatcctctgactccgttggagtgatttctgacctgaataaccccacgggctggctggtatccagtacatcatggttaaaagggataacgaccagctggcagacgaaaaccgtggagctgaccatcccggcaggttttactgataatttcgtctatctgcggtttgcagcgggcggctgggcgccttccgccagtgcacgactttttatccgtcatgttgtcgtgttttcatcaaatggtgtggcgggtaaagccgacgccagcgtcgtgaacgatttatcgtcaaaggttaccgagcagggcaagacgctggccagccagagccaggcgatcacaaagctgcagaatgacctgtcgaccaccaatgcgaacgtgacgaagaaagctgacgccactgccttaaacgcgttatctaatcgggtaacgcagacggaaaaggatatcagcagccaggctgacagcattaccagcctgaacagctcgctgaatattaatgcccgtaaaggctcaaacccgtggctggacggaacgtttgaaacctacgacgcaaaccataatctgggtgggtccgcacgggttgttagcgggatgggttactccggcagtaaatgcatgcgtgtcacgcgagcgccgaacacgaatggcaacagcgatgatttaatcggctcacgcctggccattcgcgatacggcagtattcagggttgaattctgggcgatgatgcccgccggagaaaacccgtccagcggctgggtcaccgcggtcggtattaacgtccagaatgatacgggtagcaattcctggctgggggcagcgaatgtcagcgagtcgacgctgggcggccgtgacaaatgggttaaattttccggctacgcaaaagcgacgatgaaaggcgcgacgcgcgctgtggtctggatctccacgcgcggggcgaacggcagcaatacgccgggctataacctgtatatcgacgacctggttattacagatgtcaccgatgcttacaatgcgcagggcacagcagacgcggcggcctctgcggttgactctctgaccacaaaagtcactcagcagggcgatacgttgtccagcatcgggagccggacgacggcgctggaaaacgggctgaagacgacaaacagcaccgtcagccagaaggcggacgcgagtgccgttcagaccctgcagaacacggtgacgcagcagggcaaagacattacggcggcgaacagcgcgataacgaagctgaccagcgacctgtcgacgacgaatgccaatgtcaacaaaaaggcggatgcgagtgcgctgcagacgctgcaaaacaccgtggcggagcagggcaaaacgctgacaagccagggcagcagtctgacacagctgaataacgccctgagtgataccacggccagcctggcagctgacggtaaaatccccggcaacctgatttccaacgggtcattcgagcgtggtcaggatgcgtttaccggatggggaagcgtcgggtctgttatcagtgcgcagtcgccgaactacggcagcaaaatcgcgatgtgtggtgtgggtcttgccacactatcccagaaggtcccggtaacgaagggcaacacctataaaatcggtgtttttgcccgtgcgcagggcggttcggtcatgcaggatcagggcaataacaaactgcgtattggtcagtcgtccctgctgtacgatcgccagtttaaaaccgcagacctgcccaccggctcctcatgggttgagctgtccggaacatggaaggcgacggttgacgggatggttgatgtggctatctactcttccctgaagtctggctctcagtattttgacgacttctattttgtggatatcacggatgaagtgaatattgccgccaacgccggggccatcagtagcctgaccacgcgcgtgaccacggcagaggggaaaattacctcacagggcagcagcatcacaaagctgacgaacgacctggccaccaccaatggcaacgttaataaaaaggcggatgcgacagcgttgaccgcgctgaccaaccgggtaacgagcgcagaagggaagctggagagccagagcagcagcatcaccagtctgcagaacggactgacgaccgcgaaccagaacatcggaaaaaaggctgattcttcgacggtcacctccctgactaaccgtgtcacgcaggctgaaaataagctggagagccagggcagcagcgtcacatcactgaataacagcattgcggccacccagcaggatgcggacgcggcaaaatccatgcccggcaacatgctggcgaacaactcgttcgaacgcggttttgacggctggagtaactccggctggagcacgctggcagcgcagaacccgaagtccggcaaatacatcattcaggccacgaagacatccagcggctcaacggcctgtgaccaggtggtgaagctgacgggtggccagacgtaccgcgtgggtgcctgggtgcgcaggtctggcgatatggccatcagcaataccagcaataccaaaatcagcatccgcaacagctcaggaccgctgaaagatattacgatcccggccagcgtcggtactgcatggacttatatcagcggcgactataagccgacggcagacgccgagctgatcatctctctgcgctccagcctgtctgcgggttatctgtatctggacgatgcattctgcatcgatgtcagcgatgaggtggccaataccgtcaacgctgcagccatcagttcgctgacaacgcgcgtgaccagtgcagaggggaaaattacctcgcaggggcagcagctcaccagcctgcagaacagcctcggaaataaagcggatgccagcgcggtcagttcgctgactacgcgggtaacaaatgctgaaaataaaatcacggccacgtcaaacagcctgaccagcctgaacagcaccgtcggtacgttatcctcgaccgtacaggcccagggtcagacgctggcggagacaaacggcaaggtcagctcgatgtactccatcaaagttgaaaccaataacgggaagaaggtgggcgccgggatcgtgttgggcagcgatggttccaccagcgacatgatcctctatgccgaccgtttctcgctgtttaaccgcaacagcaaaaccgctgtgccggtgatgattgctgaaggtaacgagctgtacattgattctgcccgtattaaaaacggttctattgatagcgcaaaaatatcagggtctattcagtcgacggggtttggagccggaggtggatggaagttaagtaagaatgaaaataatcttgtttttactgatgaaaataatgttgtgagatttaaagtggggcgtctctga

SEQ ID NO: 113600 - DNA, 249 bp, Enterobacter aerogenes
atgaaaaaagcttttggtaggaaagagttgttgctggtggtgccgttatcgatgagtactatcgaccgccttgaacacaaaggtcagttcccaaaacgcttttatattaccgacggacgctgtgcctgggatggagatgaagtcgaacagtggcttgacgaaagaaaggccgcaaacaccggtaattttggtgggaaaaagccacctgttgacaagagagtttctcgcccggtaagtaaggcaacgtga

SEQ ID NO: 113601 - DNA, 264 bp, Enterobacter aerogenes
atgcaggccacccttgagaccataaagtcggaagagaagcagacctatcactaccctctgaagacgtactaccgtgagcacatccatagtcctgagggagtgcacggtccggttgagcactccatgctgatggatatgctgaaaaagatggatgccgacgggcataatgttgccggtgccgctgcggagttaacgactatgttctgctacatagctggcgtcagcaagcgctgcgagaaatcgagacgcacgctcagtacgtga

SEQ ID NO: 113602 - DNA, 570 bp, Enterobacter aerogenes
atgtatagcgaaagcaaaactgcgcaaatggctggctatctgctgcttaaacgtggtggacgcatggcatacatcaagctcatgaagttgctgtatcttgctgacagggaatacatgatcacttacggcgactccatgactggtgatcgtgccgtatccatgaataatggacctgttctgtcaagaacatatgacttgctgaaatcaggaagcccggaggaagaatcaccttgggatgactggattgccggtgaggcagattttgaagtgtcattgaagaaacgagttaacggacttgatgacgatgacgcattcgatgagctcagcaaggcaaacaaacgcattcttgacaaagtatttgatgaatatggccggtacaaacgatttgagctttgtgacctgactcatcgagtatgtgctgaatggcaaaatccgcatggctcatcagttccaatcagccctaaagatattcttatggctgggggaaaaagtgaatcagaagctgatgaattaattcgccatatgcgtgaaagagatgcactgaaacagttcagcaggcaacttgcatga

SEQ ID NO: 113603 - DNA, 213 bp, Enterobacter aerogenes
atgcttaagcttttttccacattggcaggaacgccatctaacgatggcgttaatgattttgccatgatgctttcggttggtatctcgtatcgcgcatcaccagcaaatactaaagttggtaaagctaacactatacagcatagtatcgaacgcatctgtaacttccgttatgtcattggtgttgtaaaaatgattactagttcagtagtgtga

SEQ ID NO: 113604 - DNA, 1221 bp, Enterobacter aerogenes
atgaaggattccaatcgttttaatgaggctttagcgattggcgaaaaacttgacccaagcaataaatccatgcagaaagccgctgacaacacttcatctgcgcttaatttccgcattaatgatgctactacccatgacgcgatcgtgcagcaggtcaaccagaccggcattattcctacccaagttacatctcagctaaatgccatctcccgctcaagtagtcctgaagtggtaaagcagggagctaatctgtttaattctctgtacgaaacggatcctgcctctgtgggtgatatgcctaaggatatgcagagtttttacctgactgttaagcaacttaccgattccggaatggcgtcagacgaagcggtgaagcaggcgcagaacgttacttataaccagtctgacgctctgaaattacaattgtcttctacgcagagtacgaaggaatacaaaaaagaacgtgccagcgcgatggattccgctgtcagtagcatgaagccttggtacagctttggcgggccagtcgcagatgaccagaatgtaaacgccgtcaatttccgcaatgactaccagtcactttatgacatcaattatcgtaactcgggcggtaatgctgatgttgccaaaaagatgaccaatacccagatcgcccgtacctggagtctcagtgatgtgaatggcagcgctcagtttatgaaatacgcacctgaggcgctctataactatgggccatctggttggcaggctgcgcagtggaaagaagaaaaagagcgcctgacctatggagagcgtgaaggcaaaattgaaaccagcccgactcaactgggaatcacatcaggctctgcgccagttattaagtctaataccccagagtccagaataggtggtgaactggaaatcacccctgatgttctaaccacgcataatggtgattacgccattatggttaggatgaaagataaagatggcattgagagcgtacagccttattacgataaatatggccgacctatgcgctggaaaccgtcgctggaggattggaagccatatcaggatatgcaaaaagaaagcgagataaaaggccagcaagagattattcgaggtcaggaaattagaaatttcaaagataagcatcgggctatggatgagcaatatcgtaaattccataacgatcgtattaatcggtttaaaaactatttttcatgggatgccgaataa

SEQ ID NO: 113605 - DNA, 132 bp, Enterobacter aerogenes
atgctttttggacattggatagatcaacgggaaatcccggatccctataaaaaaagcgaagaagcgttcctgtctgtctataaattaattgagcaagccggaaagttctgggctaaaaaactaagcgcataa

SEQ ID NO: 113606 - DNA, 675 bp, Enterobacter aerogenes
  misc_feature (612)..(618): n is a, c, g, or t
atggcgttggaacagttaaggtctattgatgacggtcttcactcagcataccaagcactgtttgactatctagcgagccgacgaacaactatttcgttggtttcgtgggggcctatatttacggcactcgtgaaagcgaccgtggatgcattccttgattatttcaacgcgatcccaactggtggcatgcttaccaaagagcaaaagcttgtgatgcaaatcggtttggttcgcgagaatggtgaagaatattactcgccattccacccaatggtgttggcttactacttaaatctttgtaatgaaatgcaaaaagatgacagctttgctgacttgccaactgtcacgttcaatcgcttggggccaagtggactgcttccgtatgtctatcatcccaagcatgggtttgcctacaaccagcaagtaacagaaaacgggttttgggttaaaagtgtccctcaccagaaaagttgtctgaagttcgttcgcaagctggttaaagaaaagatcaacgagttccaaaaagcgtttctccacttgtttaccggctcagagaagagtgtgttggtgaatgccgtgaatcaagatcgtgcagaagagttattcctcggnnnnnnngagagaaagtgcgagaaaatgccgacaccattatcgatattctgcgaacccggctaa

SEQ ID NO: 113607 - DNA, 1005 bp, Enterobacter aerogenes
ttggcttacgcgattctgagggctgagaagctcaaaacgttcggcaatattggggggtcgttgtcgcacaactaccgaaccagagagacccccaatgcagatgccgaacgaacgcacctgaacacccacagccagccaacggctgctgctgcaagatcggctatcgaggcaagactgccagagaagcgccgatctgacgctgtgctgtgcgtggaatacttcattggcgccagccctgaatatttcgcccagtccggcgataaggacggttctcgctattttgcgaccgccttggagtggctgaaggagcggcatggcgctgaaaacgtggtcgcaacgtctgtccaccacgatgagaccagcccgcacctggtcgcctatgtcgtgccgatcgaccaggacacgggcaagctgaacgccaagaagttcttggggggcaaggctaccttgtcacagatgcagtctgatttcgctgaaaaggtgcgccaccacggccttgagcgcggaatcgagggcagcaaggccacccatacgagggttcgggactggtacgcccagattggcaaggacgagccaaaaccagaaatccagattccagagaaaaaaatgctcgaatctgcccatacctacggggaacgcgtggctgctgcggtcatcgagcaagtgaacccgaagttcaacgagatggcagcgaaggtgcagcagctcgatcaggccaagaaggaggccaaagaggcgcgggcggggctgcaaaagctgcaatctgacctcaagccattggtggacgtgctgcgccctctcgatcaggcagatcggcagaaattggctgatattttgaaggtcgaaagcgccaaactggtcgcggaaaaagagcgtcagaaggctgaagctgaagcagccaaaaaggctgagcaggaacgcaagaaggcagagaaaattgcccaaattcagcgcaaacgcacgctgtcacgaatgaggacactcggcaaaggtcaggggcggtaa

SEQ ID NO: 113608 - DNA, 189 bp, Enterobacter aerogenes
atgagctatttcgacaacgacgatccagccatgattgccgacctactggacgtggttttgtgggacatggctgaccctgacaaacacccaattgacgaatatctgattgagctacgcgctcgatcagatgccgacacgccagacatacaacgggccattgccgttttggtcgattaccagaagggctga

SEQ ID NO: 113609 - DNA, 639 bp, Enterobacter aerogenes
atgctagccgtctcgatgctggacagccgcaagaactatcgagcaggtgacctaccgaccacacgtatcaccgcgactgaatacgctgaaacctatggcgtggacatcaacacggcctacgaccagctccagtccagcgccaagcagttgtataaccgctcgatcacgttctttgagccagcctacaagcgcaacggcaagccgttaaagcctattcaggtcaatatgcgctgggttggtgagtgtcgctatcacgagggtgaaggctgggtggagctgtactggtggccaaggcttttgccctacctgacaggcattcggaagcaattcaccagctaccaactccaacaggccagcgccttgcgttcggtgtactcgtggcgactgctggagctgctgctacgctttgaatcgacaggaatggcggaatacacaatcgaggacttcaaggcctcaatggatgccccgccgagcctatcggactttgggcaagttaagcgtcgcatcatcgagccagccgtgaaggagctgaacgacaaggatggctgggtaatccagtggcagccgatcaaggcagggcgcaaggttgccaaggttcgcttcaccttcaaacgagatccgcaggggcgtctgctatga

SEQ ID NO: 113610 - DNA, 465 bp, Enterobacter aerogenes
gtgattccgattcggacagcgactcggactctgacagtgattccgattcggacagcgactcggattcggacagcgactccgactccgacagcgattcggactcggacagcgactcggattccgacagtgactccgactcggacagcgactcggattccgacagtgattccgactctgacagcgattcggacagtgactccgactctgacagcgattccgattcggacagtgattcggactcggacagcgattcggattctgacagcgactcggactctgacagtgattcggactctgacagcgattccgactctgacagtgactccgactctgacagtgactccgactctgacagcgactccgactctgacagcgactccgacagtgactcggattctgacagcgactcggattccgaaccgcaggcaaatgatgatacgcatacggcagctatcgataccgtag

SEQ ID NO: 113611 - DNA, 495 bp, Enterobacter aerogenes
atgattttttgtagtgtaggcactcaacttcctttttctagattagtggattatttatatcgctggtctgaatttgtaaacaaacagcaaaagagaatagttatacaatccggtggtgaggttaattctaaaaaactagataatattttagtcagaatgtttgtctctgaggaagaattttcaaagtacattgatgaatgttcggtttttatttctcatgcggggatggggaatataattagggctattgaattaaataaaccgatagtaattgttcctcgacttggttcattaaatgaacatagaaatgatcatcaaactgattctgcgaaccgattctcttcactaagtaatgtttttgtggcaaatgattttgattctttttgtaaagccattgagttagctagcggttattgtgacaacacaagcaaaactgcttaccctgaacgagataaattaataaaatatcttaattcacaaatatcccttctgtag

SEQ ID NO: 113612 - DNA, 549 bp, Enterobacter aerogenes
atgatgaaactgattaagttgaatgctaaaaaagtgattataggttttctaaatgctatcttatcactatcgactttttttgtggttaggcgattcttgttacgtgttttatttagagctattgtgggaaataagagtacggttcatcgcaaagttaaaatatttgatatcggcagtttatcaataggtaagcattcaacgattaactatggctgctttctggataatagaggtgggttagatattggtgataatgttaatatctcgcattgcgttaaaatttatacaatgggtcatgatttagatgatccatttgcaaagcttgtaaaaggaagagtacaaattgggtcaaattcatgggtatttcctaatgtattaataatgccaggtgttactcttgctgaaggagctgtcgtatatccgggaagtgtagtaacaaaaaacattcctagttatgaagtttgggggggaagtccagccaaattcatatgccatagaaaacgtgacattaaatatgaagcatcttttcctgtatggtttgccatttaa

SEQ ID NO: 113613 - DNA, 291 bp, Enterobacter aerogenes
atggtgaccgtcgacccggcttccgccgtcccgctcagggccggcgtcgcatcattggtcagcccgccgctggtcagcggcccggtgtgctgcgccacgtcatccgtcacctgcagatcgctgaccggcgccacggtggtgtccactgagagcacaaagtccggcgagtggccgctggtgttccccgccacatcggtcaccgtggtgctgaagcggtgctccccctcactcagcggatccggggtgaagctccagtgcccgtcctcatccgccaccgcggtacctatttga

SEQ ID NO: 113614 - DNA, 459 bp, Enterobacter aerogenes
gtgacccgtgaaggtgagcaccaaaaataccgccttgatgccaagggccagcacaatgttttgcatcagcacctgtgctgtcgcacgcgacagtcgcacgaaggtcggaatcttgcgcaggtcatcgtccatcagggccacgtcggcggtttcaatagcggtatctgtgcccgccgctcccattgcaaagccaatgtccgcacgcgccaaggccggtgcgtcgttgatgccatcaccgaccatgccaaccttgccgtttctggacaattgctccacttcgcgcagtttgtcgtcgggcagttggttgccttgcgcgcggtcaatgccggcttgtgcggcgatggcctgtgccgtgtgggggttatcgccggtcaacatcacggtgttgatgcccagagcatgcagctcggcgatggctctcttgctgctgtccttgatggtgtccgcaacggcgaataa

SEQ ID NO: 113615 - DNA, 459 bp, Enterobacter aerogenes
atgctagataaaattgaccgtaagctgctctcattgctgcaaactgactgcaccctctctttgcaggcgctggcggatgccgttaatctgaccaccacgccctgctggaaacggctcaagcgtcttgaggacgaaggcatcctgcgcgagcgcgtggccatcctggatgcggaaaagctggggctcgggttaaccgcctttgtgttgataaaaacccagcaccacagcagtgactggtactgccgctttgtcagcgaagtgtcgccaatggcggaagtgctgggtttatggcgtatggccggcgagtacgactacctgctacgggtacaggtcgcggatatgaagcgctatgacgacttttataaacgtctggtgaacagcgtgccggggctgtcggatgtcacttcgagttttgccatggaacagataaaatacaccacggccttgcctattgattaa

SEQ ID NO: 113616 - DNA, 642 bp, Enterobacter aerogenes
atggcacaaaatgctgtggatggcggaaaccgtcgttacatccttgtccaactacctgaaccgatagatatcggaaataaggaacaaaagaatgcagcagaattttgtcaccatcttgacaaacctcttatattagccgagataacgaaagaacgtctacgtcgtgctgcgagcaagattaaagccgataatcagagttggcaaggagataaaggttttcgcgtattcaaactagctcaatcaaatattcgcacctggaatcccataccggaaaatcttgaagctacattacttgatttcgaaaaccatctactcgaaggacgtagtgaagctgatatcctttatgagttattgctcaaactaggtctcgatctttgtgtgccgattgaaaagcgtattatcgctgaacgtgaagtgttctctgttggaggtggtgttctggtgacatgcctggctgagcaaatcaatagcgatcttatagaacctcttgctctagggattgttgattggcgtaaggaattaacaaccgctggtgatactacctgtgtattccgcgatagtgcttttaccgacgatgtggcgaaaactaacctcgcagctatcctggaacagcatggcatccagaatgtgcgtagtttgtga

SEQ ID NO: 113617 - DNA, 378 bp, Enterobacter aerogenes
atgaccggcaactgcgcggcgctggcagcgctggcggatgaaccgggctatgcgcaaatcaacaccgccgacgccgaacggttaggcatcgaggatgaagcgctggtgtgggtcaattcgcgtaaggggcgcatcatcacccgcgcgcaggtcagcgatcggccgaataaaggcgcggtgtacatgacctaccagtggtggatcggcgcctgtaacgagctggtgtcggagaacctgagcccgataaccaaaacgccggagtacaagtactgcgcggttaacgttgaacggattgccgatcagcgcgcggcggagcagtacgtgatcgaggagtacaacaagctgaaagcccgcctgcgcgaaagcgcgatgggttaa

SEQ ID NO: 113618 - DNA, 234 bp, Enterobacter aerogenes
atgatgtttgttttcatccacttgcccgcgggtgcggtaagaaaggcgcgggatatccagcagcgcgtgcgccagcgcatcgagctgcgtgtcattgagctcggcggctctatgctgcccggtcagccccacctgccacaggatctccacccgcagatagttaccaagtccggcgagaaacgcctggtccagcaacaggccggaaaactggcgattgcgaaatttcgccgataa

SEQ ID NO: 113619 - DNA, 918 bp, Enterobacter aerogenes
atggaagtttactcatcattttctaatattataaactttaaacgttcaaatattcctatccaaggaatatataagagatatgctattttatttgataaaataatattcaacaggtacggatgtccaataggagatcatgatttatttacaagtctacctgaatatatttcaacttttgcaagtgatgaagaagatttcaagcagaaactaaatctttctaaaaataaaaaattccaagatttatttatcgatttatgggatttatccgaaaaccctgaaaaattaaattatgaagccagtgaatatgtttcagaacatcaaagtgagatgatttctaaattctcatggggacgaaccctcatagacaaagagatgggaattcataaccatgatagggagtataaggcagcaagtatagtttggggagatattagctccgatctggggtttaatttcctattaaaaaataaatataaaagccttcatattaactttgcccccgtagttgcatcagcggttaactcagcccaacatacatccaatatagaaaatcttttcacaactgatctaatcatcccaagctttgaagaactaacttgggatcaaattctggaattaagagaagataaatacatcaaggcgtttaggaaaaaatatttctccattgagatgaatgacaaaaacatcgatttagaacttaatttcgatttagattcagccttatgggatttggctttacaaattaaacctaacattacaaaatccagcatggaagcagtattaagcaatcttccactccctaccgttataaatccattcggaatttattatggggcaagagaaataataaaaaattataaaaataaaagaaaccactcttggatatatttcattcaatcggcgaaaaacaaaatgtaa

SEQ ID NO: 113620 - DNA, 1071 bp, Enterobacter aerogenes
atgaacaatgagttaatcttggctgtagcaggttcaagaaaaacacaaggaatcattgatcattgtgcgagaatagatggtcaaaaaagagtattagttttaacatttactcaattcaaccaaaatgaaattcgcaatcggttatctcgttgtgcaggaaacaactcatatattgaagtgcttgggtggtacacttttttacttcgacattttgccaaaccgttcctcccctataaattccctggacaaaggattttgggatttaactttgatggaaggccatacatgatggcaaggggtatcaacagatttttagataaaaactaccatgcatacgcttgtgagctagctcgactaagtgcagaactgattactgcaagccaaggggcattaatttttagacttgagtctatttatgatgaaatacttattgatgaagttcaggatttgagcggctacgatttagacatattagattctttgttagcaacagctatcaatttgaaaatggttggagacatgcggcaagctgttctatcaaccaatccaagaggaagtaagcataaaaaatatcaaaatactaatatgctttcttggtttttggaaagagaagagaaaggaataataaagataattgaacgttttactacctggagatgccatcatttaatatctgattacgccgatactattttttcacctgaatggggttttcctaaaacaaaatctgaaaaccacactgttacatatcatgatggggtttttcttgtaatgaaggagcatgttgaagattacatcaaagcatttaaaccacaatgcttgagaaactcaaaaagcagcggtaaggtctataatttcgattttattaatttcaaagcatctaaaggttcaacttttgaacgaatcctaataattccaacctcaggaattgaggcctttattcaaaaaaatgagtatcttgaaagtacagccgccgcaacattttacgttgcagttacaagagctcagcaaagcgttgcaatcgttattgggaaaccaggtcaatcaaacttaccgatatggaaaccataa

SEQ ID NO: 113621 - DNA, 1605 bp, Enterobacter aerogenes
gtgataaaaaagattaaaatctcaggttacagaatctacaagcaattgattttagagccaaatccaaagctcaacctgatagttggggggaatgaggttggaaaatcaaccctaatggaagcaatagccttagcgctaacaggcagaatcaacggaaaaggagctaatgatgaattaaatccgtattggtttaatacagagctagtcgctgattttgttgaaagaagacaaagaggtgaaaacattagtctacctgagattaaaattgagctcttttttgataatacgccagaattacaaaatctatgtggagctattaatagcgaccatccaacaaatgcatgccctggtgtattattccatgtactgcccaatagtgaatataatgaggagatagagcaatggcttataaaccctagtaaaatcttacctgtggaattctaccgaatagaatggcgatcttttgctgatgagaagttactcaatagacctaggcaattaacgactgccatcatagattccaaaactgttagatcttccacatcaatagattatcatttaaggcagataataaatgatcatctcgatccaatagaaagggcaaaaatatccttatcatacaggcaagttaaagcatctatggctggaggtgtacttagtgatatcaacgaaagaataagtacattaaatgcctcattacatgataaaaccatcattttggatatggatcaaagtagtcgaacctcttgggagggcgttgtatccccccatgtaaatgaggtccctttttctatgtctgggcaagggcaacaagctgccatcaaaatttctttgtctatgggacgtcacgctgaaaagacaaaatttgtgatgatagaagaaccagagaaccatctttcacataccagtttatcaacactactttctcgaatcgaaaagttatctagtactagtcagcaattgttcattacaacgcatagtactttcgttttaaatagactcgggctagattcattaattttaattggcaatgaatctgtaagcagaatcgatggtctatctccagctactgtagcttactttcagaaactacctggttacgacacactcagaatggtcctggcaaagaaagtggtattggtcgaaggcccatctgacgaaataattttcgaacgttttttcaaagacacataccaattacgacctatggaggtcggtattgatgttataagcatgaggggactttcactatcaaaatgtttggagttatgtgcggctcttgataggcctgtagcctctctccgagataacgatggagtttctccagaggatcttgcgcttccagtccaagagtggctgaaaaaagaccgaagagagctatttattgggagtgtagttactgggacaactttagagccacaacttatccaccacaatggtgaaaaattacttcgcgaagtattaaacatagaggatagagctgaacttctaacatggatgagcagagaaaaaactgagggtgctttgagaatttcggcttcaaaaaaagcactgacaccacctaaatacatgagcgatgcgataaggtttatttatgaacaatga

SEQ ID NO: 113622 - DNA, 642 bp, Enterobacter aerogenes
atgggggatattgtaaccagggaacaggtggtcagtctcattacccggtatttcagtcagcagatttcagatgcagaaaaagttgctgccctcaatcattttcgtaaaacacttcatgagctcagtccttttacccgggaacctgtggacctggtgttatgggtgaaagccagcgaagtggtggccaacgattacaaccccaatgtgatggctgccggggaaaaaaaattactgcagcactcactgcaggaggacggttttacccagcctgtcgtggtatctgaagagaaaggtcagtacctggtcgtggatggttttcaccggcaactgctgggcagacgcgagtcaggggcaggaaaacgcctgaaaggctggttgcccgtcacctgcatcaaccccgaacgaaaagggcaggcggaacgaattgcctccacgatcaggcataaccgcgcccgggggaagcatcagatagcgtcgatgtcagatatcgtcagagacctggcccgtctcggatgggcagatgaacgtattggtaaggagctgggaatggacagggacgaagttcttcgtctgaaacagataagtggactgactgaattatttgaagaggaggatttcagtccggcctggacggttcgctga

SEQ ID NO: 113623 - DNA, 1248 bp, Enterobacter aerogenes
atgtcagacaacgtcattatggaacgtaatcgaatacagaagatcagaaccggggaggatgttctgtctgcggttacagaccgtgtggagtggatatttgataccttttctccggtttgcctgtctttttcaggtggaaaagactcaaccgttttgtttcatatcgtcgccacaatagcccgcaggaaacaccggcgtttctctgtcctgttcattgactgggaagcccagtatcagtccacgattgagcatgtacagaaaattaaggatctctacagtgatgtgacgaagacgtttttctgggtggctcttccgctgacgactgtcaatggtgtttcacagtttcagccggaatggatctgctgggaacccgatgtggagtgggttcgtcagccaccggcagatgccattactgatatggcgtattttcccttttaccgttacgccatgacgtttgaagagtttgtcccggcgttttcgacatggtttacgggcaatcagtgtggagtggccatactgaccggcgttcgtgctgatgaatccctgaaccggtttataggtcttaccagccagcgaaagcttcgttatgccgatgacaaaccctggaccaccgcatctcccgaggggttttactacacgatgtgccccctgtatgactggaaagcccgggacatctggatttaccacgcccgcacgggtgccatttacaacccgctgtatgacctgatgtacagagctggcgtcccactgcggaatatgcgggtctgtgagccttttggccccgaacagcgccgcggtctgtggctttatcatgtactggagcctgaaacctgggcgagaatgtgtgcccgtgtgtccggcgcggccagcggggccatttatgctaatgaaagtggcgcttattttgcattgcgcaaacgcatctccagaccagcacatcatacctggcgcagctatgccatgtttcttctcgatgtcatgccacagaaaacagccgagcattaccggaacaagatagcggtatacctgcgctggtatcagatgcacggttacccggaggatattccggatgaacaggagaatgatctgggcagcagggatattccctcctggcggcggatatgcaaaacactcatcaaaaatgacttctggtgccggaccttatctttcagcccaaataagccccggcattacgaacgttaccaggaacgtatgaaacgaaggaggaaggaatgggggatattgtaa

SEQ ID NO: 113624 - DNA, 1029 bp, Enterobacter aerogenes
atgaataaaaaatatcgcgctatgcagatcgtcgcccccggggtgctggaaatgacagagcggccggtacccgctcccggcccggatgaggtactcatcagaattgaagcatgcggcgtatgcggtgccgatctccgggacgcggaaaaagcgccgcaggcgggccagcccggccgtataccgggacatgaaattgtcggatttattgcccggaaggggaacagggtacccgatatctggcaaaccggtcagcgggtgggcatcgggcgtctgggagggtactgtcagcactgcaaaccctgtcgcagcgggctttttcacctctgtgaaaaccagcttacgccaggactaagctgtgatggcggctacgcagagtacgttgtcatgcggcataccgcgctgatagccatcccctccgcgctctcttccgtacatgcagcgccgatcctttgcgccggtaccgcaaccttcaacgcgctgcgtaattctggcgccagagcgggcgacagagtggcggttctcggagtggggggccttggccacatggccgtacagtatgcccgtaaaatggggtttgacgttacggtggtggcgcgcggtagcgaaaaagaacgagcggccattgagctgggtgcgcatcattacatcgatacacttaaggaaaacgcatcagaacgtctgaaaaatgacggcggtgtggattttattatggcaacggcaccggcttcagagacggtatcagcccttctgtccgccctcgccccccggggaaaagcgatcctgctgggtaccggacaaacgccggtgcaggtcacgccgggtatgatgatcggcgctgaacgtaccctgacaggatccttcgtcagcacaccggcgcaaaccgagcgcgcgctgcagttcagccacctctttcagacgttgcctgtcacagagttgctgccgtttgaaagggcaaatgaggcgctcagcagactgaagcagggtctggcgcgataccggatagtgctcaccatgaatcaggataattaa

SEQ ID NO: 113625 - DNA, 519 bp, Enterobacter aerogenes
atgaccacaccaagagtaaccccctggcaggatgaagagcccgttgacgccaatcttctcaacgcgataaaggcccgtcggcccggcggaaaactgataggtattgaccgggtattactgaagagtgcccccctggccacgggctggaacgaactgatggtacgggtacgtcaggaattttcgctcagccttgaatatcgggaactgatcatgctgcgcgttgcgctcctgaataaagcagaatttgaatggaacgtgcactaccctgcctatctggatgcaggcggcactgctgaaaaagcagaagccctgcggttatcctccgcaccacacatctttaatgacaccgaaacgttgctgatacatcttacggaccagtccactcggaacgtcgtggttgaggagaacgtcatcggggcgctgaaaagcttgttaggtgaaaaagagaccgtggaagcggttgccactgtcgccgcctataacatggtatcccgttttctcgtcgcccttgccatctga

SEQ ID NO: 113626 - DNA, 483 bp, Enterobacter aerogenes
atgcaaatccagaccgcgcattatgaccttgtcacctcatggcaggggggcatggccagccggacgctctgccagtccttttccgcagacaacgcttcgccggccctgcaaagtcatgttatcgattccgatgaaccggtttcgctgggtggcgaagggctggctcctgacccccaggagctgatgctcgctgcgtttaacgcctgcataatggccgcctttattctcgaagccagggctgaaggtctcgcccttacgcatcttgaaattcacactgacgggcaccttccgaagggtatacctgcctccggtgacagacctgcagaggatgcctccggcaggcttgtgtatgtcatccacgtaagcggtagcggcacggtgcatcagtttgaaggggtccatcagcgggtgattgactcctccctgaaccggtggttactggcccagaatatgctgatcgaaggtgacttaatactgagctga

SEQ ID NO: 113627 - DNA, 777 bp, Enterobacter aerogenes
atgaacgcatcttttgccggtaaaaaactgttagtggtcggtggtacaagcggtatgggcttcgaaacggcgaagctggttctgaaaaacggtggcagcgttgtgctggttggcaatcgccaggacaaagccgagcaggcccgccaggcgctggctgcagacggtcaggtttccatcatcgttgccgacctgatgaaagaagaaggtatgcagcacgtggtgaataccattaatgccgaacacaaagatattagcctgctggtcaatgcggctggcgtatttttcccgaaaccgttcaccgaacatgaaacgtcagactatgacatgtacatgagcattaaccgcgcgacgttctttattacccgtgacgtggtgcgcaatatggtcgaagccggcattaaaggctccatcgttaatatcggttccatgtgggcacagcaggccatcggtgccactccgtcttcagcttactcaatggcaaaagcgggtctgcacgcgctgaccaaaaacctggccattgagctgggtgaaaaagggatccgcgtgaatgcggtgtctccggccgttgttcacacgccaatttacgaaggcttcattccgaaagacgacgtgaaggacgtgatgagcagctttgacagcttccacccgatcggtcgcgtgggtaccccggtcgatatcgcggaaaccgttgctttcctgctttctgacaagactggctgggtcaccggcgctatctgggatattgatggtggcgtaatggctggccgtaacgcctga

SEQ ID NO: 113628 - DNA, 915 bp, Enterobacter aerogenes
atgcgatcgctaaaccgacttaaatggctgcatgcttttgaagccaccgccaggcacggcagctttaccggcgcggcacaggagctgggtgttacgcccgccgcagtaggccagctggtccgctcgctggaagactgggtcggacacccgcttcttcaccgcacccgctcaggaaaagagcggctgacgctggttgacgaagcgcaggaggcactccaggacatcacgcaggggctcgacaaacttgaaaccggattaaacaagcttcgtggtcgccgctcgcgctcagtggtggtggtgacggcatcgcaggtactgatgatgaactggttgatggatcgcctgaaccggttttcggaaacgcacgaaaatatcgatctgcggcttaacgtcacggaaaagctgatggacgtgtcgcacggcgaggcggatataggtattcgctgcggccagggcgactggccaggcgtgaataaaacctggctgatggatgaggaagcggtactggtctgcagtccccacctagtgccgtccgggaaaatggcctgcagtgaatggctcgccacgcaaaaactcattcatgatgacacgccccacccgggggcggattttccgtcatggaataatgtcctgatggcgatcggtgcccccgaagcgctggaaagcgggctgcatattaactccacctcagcggtgattctgtcggccctgagcggcagaggcgtggccatcgtgcgatacgctctggtgaaaaagcttatcgaaaccggacagctggtccagctgcatcctgaccaccggtggccgctcaagtggtcttattatctggtcaccccgcagcagaatgtaatgcgtgatgaagtaaaagttttccatgactggcttcttcaggatgtcgtttcagaccgctcataa

SEQ ID NO: 113629 - DNA, 282 bp, Enterobacter aerogenes
atggcttatctgcaaatcaccctagatatcagtaatgaaaaccgtgcggcagccgcgggggtataccagaaatacaaaaccccgtttctgaccaccatcgagggtgccacctctaaagagctgcttgtccgtgatgaggatgtccaggtgctgcacggctttaagactgtagcgcaggcgcaggcataccttggcagtccgctgttcacgcaggatgtcgttgcaggattaaaaccctatttaaacagcgcgcctgacgtacgtattttcgacgtcatgtaa

SEQ ID NO: 113630 - DNA, 345 bp, Enterobacter aerogenes
atgttcttaaactggaatgaatatcgcagtggcctgctcgccaccatcggcaaatttgccaaactgcagccagagtttatgaaaggctttcaacagatggataaaggggcgtcagaaaacaagcacctcgatcccaaaacccatgaactgattgcactggccgtggccgtcaccacccgctgtgacggttgcctggccgttcatgtggacgctgcggtaaagcacggtgccacgcgcgaagagatcgccgaagcgctggccgttgccattaacctgaatactggcgcagcgctgacatataccgcgcgtgctctggatgtttacgataatctgccgaacaaatag

SEQ ID NO: 113631 - DNA, 480 bp, Enterobacter aerogenes
gtgctcgaggggacttttaccgaaaacggggtcaactatcctgcaggctggtatctgcgcagcccggacggttcttctcaccaaccctcaagtcgcgacggcacaaccattttcgtcaagctgcgccagatgtctgccgatgaacgccagccggtcaggataaatacgcaggaggcagctaactggcacggtcagccgcaaagacaagtctgccctttattctccggcacctcagaaactgttctgcttcagaaaattgccccgggcgagcggatcttctgtgcgccgcttgttggcggagcagagatccttcttctgcagggagaactccatgcgccggaaggttgctatggggcaggaagctggatgcggtttccgccgggagatatgcctgctcttatggccaccgcctctggcgcacttttttatctgaaaacgggacatctcagcccgacaaccctgaccggagcgacattatga

SEQ ID NO: 113632 - DNA, 1095 bp, Enterobacter aerogenes
atgaagcagagcgctgttatcattggtgcgggcataagcggcctttatgccgccacgctgcttgaaaaggcgggtgttgattatgtgatccttgaggctcgtgacagaacgggcgggcgcgtgctgtcatgcctggaactggcgggcacctccgctggcgttcatgtagatatgggggcagcgtggttctggcctgatattcaaccggacttcgcgcaactgatcgagcggcttaatcttccggtaatagcgcatggccgtccgggtgacatgctctacgaacgccagctggattcgccccccgaacgctacccggcatgggagagctccccggcgtctttcaggcttaagggaggaatgcaggcgctgacggcggcacttaaaagtcagatcccggctgagaagattaaaaccggccatcaggtggtggcggtttcccgggctggcaaggaagtgcagatccatacccggtccgaaggcagtaaaaaagccgtattttccggtgagcatgtcttcctcgctttgcctcctgccctggcagctaaaatagatttcagaccggcgatgccggaacaggtactgtcaaactggcggaaaatcccgacatggatggctccccatgcaaaatatgtcgctgtatataaaacagacatattgcatgagcggcagctttcagggaatgcaggaagccgcgtggggccaatggtagagatccatgacgtatccgagccagattcgggcaaaacggcgatttttggttttattggcgtaccggcaaaatcgagatggactgtcagcgaagctgttctcaaaaatcattgccgggagcagcttgtacgcttatttggacaggatgcggcagaacccgaagctgaatatattaaagactgggcggccgatccgtttactgcgacggaatttgatctcctgcaggaggtagggcacgtaacgcctgagcaacttcccaccaggggagagtggtctggcgagatgactggtatcgccagtgaatggtcgccgcaattctcgggctatctggcaggcgctattgactctgcgtcatcgggcattaaacgctggtttcaacagaaataa

SEQ ID NO: 113633 - DNA, 870 bp, Enterobacter aerogenes
atggatttcaacgcaacgaaattgtttatcgcagtggtgaatgccggtagtttttctgcggcaagtgacagagcaggggtaccgatttccacgttaagtcggaaaattaatgagctcgagcaggcactgaatgtacagctcctggaacgctcccggcacgggattaaacccacctataaaggacaacagttctttgaacaggctcgtctgggtgtggagttactggaggatgcacaaaagtccgtcacttctgtccacaccttacagggcaaattgcgcctgtctgtcccgcctgacttctcactgtggtgggatttactgatcgagtttcagcaacgttatcaagacatcaccgtattttgtcattccagcgaaagggtggttgatttgttcggcgatggcatcgatgtggcactcagaatgggcgagctgaatacggatgatgtcatcgctaagcaccttatgaccctggaagggctgtttgtcgcaagtcccgaattcctggcacatcacggtaccccagaaacgctggcagaaatggcccggcttccggttgctgcctgggagagtctgaatcacagtttttttgaatggaattcgggaaccgaaagagtcaaatatgagcccttcttttccactaataatacccagggcttaattcattacgctctgaatggtaagggcattatccatttgctggattttgcagccagaccctggctggaaagtggtgagctgatacagcttttacccggtatagccacgcagaagcttcctctgcaccttgtctacgcccggcataaacatccctcagcactggtgcgggcgtatctggagttttgcaccgaatgggtggggaaactgagttag

SEQ ID NO: 113634 - DNA, 957 bp, Enterobacter aerogenes
atgaaaaaccgcgtcaacaaaatcttaaacattcgctatccgcttatacaggcacccttgtattttctgactaatgcggaactggtcgctgcggtttcaaatgctggcggtcttggcacccttggacctcacgcaggtcaggaaaccctgcccggctcgcgctatgtggcgctcgagcgtatgcgggaacaaatccgaaacgttaaaaagctgaccaataaaccctttgctgccaccctgattaacggcccggacatgagtttctggcggcctactgctgaaatgctggtagaagaaggcgtggaagtggtactgatcaatgaagtgctggactctgaaatctacgatttttttaaaggccacagcataaaaattctttaccgcgccctgactccctctattgctaattcgaaagaagcggagaaattaggcgccgacatcatcattgcgacaggttttgacgaaggtggcaccgtaccatcccgggtgattggtacgttcagcatcgttcccatgatcgtggatagcgttaacgttccggtcattgcggcgggcggtataggtgacgtacgcggcgtgcgtgccgcgctggctttgggggcggaaggggtatttgccgggagtctttttttgacggcggttgaaaaccctgccgctgacaaagtcaaacgcctgattgtcgattccacggcagaagatttgctgctgttccgcacgctgccggcttattaccgtaccctgcccaccgatctgagtccgacgctggcagagttagatgtgcagggcaccgatcgtgaaaccatgtttaaagccatgaacggctaccactcgctgtggcaggccatgaggctcggcaaccttgaccagggcgtcgtgtccaccggcacgggtatttccgttatcaaatccattcgaccggcagcagacattgttgccgatcttatgcaggacttttaa

SEQ ID NO: 113635 - DNA, 192 bp, Enterobacter aerogenes
atgtctgaatcactgctttttcgggatgtcgtgcgtgaacgccattcagtgcgtcattttcttgctcatccggttccggaagacattctccgttcggtgttagaggatgcacagcgctcaccttcaaactgtaatactcagccctggcaaaagcatatcgtcctgcacaacctgacgaagactaaccaataa

SEQ ID NO: 113636 - DNA, 741 bp, Enterobacter aerogenes
atgaaaattggcattatcggagcgggcagcattggagcgatcctcgccaggcggcttgcccgagccgggcacgaggtcaagatcgcgaactcccgcgcccccgagacagttccgcctgcggccctgaccacaggcgccaccgcggtctgggccgcggtggcgaccgagggagcggatgtggtcatcacctcggtcgggatgagccggatccccgatgtggctctccttgtcgctaaggcctcgccggcagcagtgatcatcgacaccgggaactaccacccgccccgcgatggcgtcattgacgcattagtagaaggccggacggtcgagagcctctgggtccaggagcagtacggacgtccgatcattaaggcgtggaacactattaccgacgtttccttcgccgagaagacctctgagcccggcgcgacaggacgcatcgcgcttccggtggccggtgacgacgacgttgcacgagcgctggtcatggacctcgtggaatccactgggtttgaggcgttcgacgcgggtgggctcacggagtcctggcgccagcaaccgggaacgccggtctacatgactgacctcacggctacagagctgtctgcggccctggccagggctgacgctagccgctcgtggcgacgacgggacctgttgtgggcggtgtggtccgagcgcatggaggttgagggcgacacgcccgagcgcctgctcgcgctcgcccgcgccgtcttctag

SEQ ID NO: 113637 - DNA, 135 bp, Enterobacter aerogenes
atgttttgttttgttcctattatcggcactcacacaacaaaatccattaaaaacaataaattaaagagtatttccctctcaagttacgatcttcttttaagggattctatgaccaacagttgccgctatggttaa

SEQ ID NO: 113638 - DNA, 360 bp, Enterobacter aerogenes
atgaacggaaaaaccaaactggtgattgtgggtggtgtgctggcggtgtgcgccggcattttctgggtggggtatctgaagggctggtacgcgcattttgagcacgtaaacagccaggctaaagaaaggctgccgaagcaggagaaggcggtagcagctggcgagcagaaggcggcgacggcgagcgccgcagccaaagttatttaccgtaccgtttatcgtgatgtggtgaaatatgtcaacgacccgaatcatactaagtgccagcttgatcctgctgctgtgcagctgcgccagcgagcaatcgatgcggccaacaatatccccggatttgatgaacccgccgtgcaagctaagtga

SEQ ID NO: 113639 - DNA, 720 bp, Enterobacter aerogenes
atgtgcaaatctatattaaagcaattcgaaacactttacaaaaagaccgatgatatacctggtggaactaaaacaaaaattatcattacttgtttcttagtgataatcctaatctccctttcaagctttcatgaagcatcgttagataattggcttattgcagttagcaatataataatggcatcttgtgcattcgcagcattattaaaggtcagtagttatttttcctcctacgctgcgaaggatgcctacgatgcggcaaaaaaaataaaccatgaaatatttcctagaattttatcagaaaatagaatcaactacatatgcttggagatcagaagaaaacttgatgttccaagacaatatccagaaaaggtaaaaatagaagaagtaacagaaaaagtaaacgaactaaacgcagcacttaaccaagaaaataaaaatttcatgcaagatatgtttgaactacaaaatcaaaacaaaataatcacagattctcttaagcatttagaaaacacatcattaaaagaatataaagatattcatcagcaaggattattcgtctggcgccttactacagcgcttaacatgcatcttacatacacactaaacgatattccttcaggagacttcgattacactttggtatttaaacaaatcgatgatgtattagacgcctcaagccttctattaaataagatcagcgaagaacttaacaaataa

SEQ ID NO: 113640 - DNA, 4923 bp, Enterobacter aerogenes
atggcgctggtcggtattaataacgaaaacgaattttactccaaccactatctgggcgaagtctttaccagcgacatccgtgatgttctggagccttggattgagcaggaaaatgccgctcgcgaggctgaacgcgctgcccgtgaacagggcaaagaggttgaggcaggctaccgcgcgccgtggaaccagcttaacagcctggcgacagagtttttccgcaaactcactgatcatgaaaaacagcgccagatcccgcagcgtcttgccgatcaacgcactcgctggcagccgctattaaaggcattgggttgtgaactcaatccgcatattcagatgctggatgacgatacgcctttgccggtactggctcgttacaacagcaccgacggcagtccgtggctgtggattgtcgaagcacatgaccaggaagaaggaacgctggatccgctggcgctgtcgctgctgaccgcgcagttcccggcagataccgataaacataagcgcgacagtctgcgtaaaaaagcgaacggcgaataccgcagctggcaggatctgctctccacggtggtcttcacgcaaaatgaaccgccgcgttttgtgctgctgctcggtaaccgccagctgttattgctggatcgtactaagtgggcgcaaaaccgcctgctgcgctttgattttgaagaaattttaagccgtcgtgaaacggatacgttgaaagcgacgtcggtgttgctacacaaagattcgctgttgccaggcagcggtgcaccgtacctcgattcgctggatgacaattcgcacaaacatgcgtttggcgtgtcggaagatctgaaatatgccctgcgtgagagcattgagctgttgggtaatgaagcgatgcgttatctcatcgacaacgagctggcttattataccgggaaacgtgctattaacccggatgagttgagccgcgaatgcctgcggtatatgtatcgtctgttgttcctgttctatatcgaagcgcgcccggaactgggctatgcgccgatgaccgccaaaacctatctgcagggctacagcctggaaacgctgcgcgatctggagatgatcccgctgaccagcgaagaagatcgcaatgggcgctacttccacgatagcctgaatatgctgttcaaactggtgcgtgacggctacagcggcggcgtgaaaatgcagagcgacctggagagcggcgacctgatcactattcacagccatcagttcagcgtgccgcgtctggaaagccatctttttgaagcgaataacacccgtattcttaaccgtgtggtgttccgcaacgaaaccctgcaacaaattattcaggcgatgtcgttaagccgcccgggtaaaggacgttttaatcgccgggggcgtatctcctatcgccagctgggtatcaaccagttaggtgcagtgtatgaagcgctgctctcttaccgaggattctttgccagtgatgacctctacgaggtgaaaaaagccggagaagagtttaacgaactggaaacgggctacttcgtcagcaaagatgagatcggcaaataccacgacgacgagaaggtctacgaaaaagacggcagcctgcgtattcatcgtaaaggcagctttatctatcgcatggccgggcgcgaccgcgaaaaatccgcctcttattacaccccggaagtgttgacccgctcgttagtcaaatatgccctgaaagagctgtttaaagagcagattgatccgattaccgatctgcacgccaaagccgatgcaatcttaaacctcaccgtgtgcgaaccggcgatgggcagcgcagcgttccttaacgaagccatcaaccagctggcggaagcttacctgttccacaaacagcaggcggaaggtcgccgcattcctcaggatcgctacacccaggagctgcaacgggtgaaaatgtacattgccgacaacaacgtattcggcgtggacttaaacccggtggcggtggagctggcggaagtgtcgctgtggctgaatgccatcagcggcgatgcatttgtaccgtggtttggctaccagctgcactgtggcaactcgttggtgggcgcacgccgtcaggtgttcaacaagagcgagctgacctacaaaaaagcgaaagatccgagctggcttaacagtgaaccggccgagctggcgatgaatattccacgcgaggagaagcagattttccacttcctgctgccggacagcggtatggccaactacagcgacaaaaccgtcaaacagcgctatccggatgatttcaaagcgctggacagctggcgcaaagagtttaccaaaagctttgaagcgcatgaggttgctgatgtgcagcgcatcagcggcaaagtggaagcgctctggaacacattccgacagcagttgaaagccgagcgccagaaaaccgccgacaattacccagtatggcctgccgataatacggctcaagtccgctcttctatacgcagtaaagatgaaaccttcagcggtcgcctcgaagataacagtacctatcagaaactgcgctgggtgatggactactggtgtgcgctatggttctggccaatcgacaaagcgaatgaactgccagatcgcggcatgtggctaatggagatggagactctgctcgatggtattgtcgtcacggaaagagtcactgaagccgcagaacaggtcactggcgatctgtttgccgacgagggcatggtgcgtgaagagtcttcgctgttttccggtgcaggtcgcctgaaaaccgatgtgctgttccgccatttgccgcgtctggcgatagtcgatgtgctgaaaaagcagcaccgtttcttccattgggatctggaattctgcgatctgttcgccgagcgcggcggctttgacctgatgctcggaaacccgccgtggttgaaagtagaatggcaggaagctggcgtgctgggcgactacgagccggagtttgttctaggccgattgagtgcttcgaagttggcgacattgcgtcatgaaaccttcaatcgaattccgctgctcgaaaatgcctggcgcagcgagtatgagggttgcgaagggatgcaaaacttcctgaatgcgcagcagaattattctgtacttgtaggccaaaaagcaaatctctataaatgtttcttaccacaggcgtggcgtttgggagcgcagaaaggtgtggcagggttcttacacccggaagggatttatgatgatccgaaaggcgggcaattgcgcgcgtcggtgtatccgaggttgagagcgcattttcagtttcataatgagttgagtctttttgctgaggttcaccatgcaacgatgttcagtataaatatctatggaccgaagaatacagcgccgtcttttattaacatgtccaacgtttacgcagtaagcgcaattgatgcctcgtttgaacacaataatttaggtccagtgcctggtatcaaagatgaacaggaaattgatggaaaactgaaggtttcctggaacacctctggtcaccgctcacggctgattcatattggtgtaaaggagctctctttatttgctcgtctgtatgacagtgaaggaactacagcgtgccaagcccgcttgccagctcttcatgcaactcaactagttgctgtgctggataaatttgccgaccagaaaacgaagttaggagatttaggggatagctattattcaacccagcattggaatgaagttaacgcccaaaacgatggaactatgattcgtgaaactcagtttccagagaattcctcacaatggattttatctggcccgcacttctttgttgggacaccgttctacaagactccgcgcgaaaactgtacgttaaacagcgattatgactgcctcgacctgctaaccctgcccgacgattacttgccgcgtactaactatatgccagcatgtgatgtgcaggagtatgccaaacgtactccacgagtgacttggactgaaccaggtgaagacgagccgaggaaggtgacggattattatcgttttgtgaatcggagaatgtttggagcatcatcagaacgttctatgatctctagcatagttccaaagcacgttgctcatatacaccctgtactctcaacgacattcagagagccaaaaagcctgctaagcttttcagcattttgtcattcaatagtggctgatttttatttgaaaacaacagggcgggcggatgtttatgaatctacattgcgttgcttcccttatgttgagctaatgagtgcaaactcaagagcattagctttgaacgtgttaacgaaagattatgctggtctctggcaatcctgctataacccagatttcaacacccagcgctggagccgcaatctcccgcaacttccacaagatttcttcgccaatctgacccctgagtggcagcgtgattgcgccttacgctctgactacagtcgccgtcaggcgctggcggaaatcgacgtgctggtagcacaggcgctgggtttaaccctcgaagagctgctgactttatatcgcgtccagttcccggtaatgcgtcagtatgaagccgatacctggtacgatcaaaacggccgcattatctttaccccaagcaaagggctggtgggcgtcggcctgccgcgtaccgcgcgtaaagcggacctgaaaaacggttttgtctttaacgtcgacagcccagactggaccggcggcgattgcaccgatcaagccatcggctgggatgatgtcaagcatctgcaaaccggcactgtcagcgtcacttttgatgactatacccgcagcgatgaaggcgagcgcagaatcgtcatttggcaggctccgtttatcaaacccgaccgcgaagatgattacaaagtggcctgggcattttttgcacaagataaggagagcgcctga

SEQ ID NO: 113641 - DNA, 420 bp, Enterobacter aerogenes
atggctctgagtgatgtgaaggttcgttcggctaagccggaagcaaaagcctataaacttactgacggcgacggtatggttttgctggttcatcctaacggctccaaatactggcggctacgttatcgcttcggtggtaaagagaagatgctggcgcttgggaaataccctgaggtttcgctggcggatgccagggcgcgccgggacgaagcccgtaagctgttagctaatggcgtcgatccctgtgagaacaagaaagccgttaaggtagagcaggaacaagaagcgataacgtttgaagtagtcgccagagagtggcatgccagcaatcagaaatggtcggcatcgcatagcgctcgtgtattgaaaagcctggaagataatctctttgctgctaccggtaatcggaacaattgctga

SEQ ID NO: 113642 - DNA, 1008 bp, Enterobacter aerogenes
atggaaagcatagttttttttaataacaaaggtggtgtaggtaaaaccacattactgtgtaatgttgctgcctatctaagtttggaacttaacaaaaaggtactggtcgttgatgctgatcctcaatgtaatactacttcgtattgtttaggtgagcagaagatatctcaaatatatagcagtgaaaaacgaattactatcgagcactttttaaaccctgtgcgtcgaggaaaaggatatgcttcggaaagaatagtccctatcaaaacaagtaggtttgggtttgatctaatacctggagaccccaaattagctctgagtgaagattttttagcatccgattgggatccagcagtggctgggaaacctcgaggcatgcaaacaacatttgtcttctctcatctttcctcactatacaacgactatgattatgtattatatgatgttggtccatccttaggtgctttgaatagagcaataatcatatcatgcgattttttcataattccaatgtctgttgacatgtttagtttgctggcattaaacaacattaatctgtcattgaaaaattggatgaatggtattaaaactggcttaaaaaatcatatagccgaagaaggggaagaatttacaattggaaatgaaagcctggaatgtaatttgcaatttttaggttatgcaatgcagcaataccgaggaaaaacagtacgaggtgagaaagtcaaagttaatgcttatgaaaaaatagcattaaaggttcctaaaattataaagacggaaatagtggcaaactactctcacaacaaaaacattgatttcgaactgggccaaattgaaaacatgtatagcctaattccattatcacagctggctaacgcacctattttttgccttaagaataaagatggtgtcgtggggtcacatttttcaaaagtaaatgacgccaaaaaattatttgacagcatttgctcaaatatcctaaaaaatattgaggcagttaaaccatga

SEQ ID NO: 113643 - DNA, 873 bp, Enterobacter aerogenes
atgataaattgggatgaagctttaatatctgatctagccagaagaaaatgcattcttttccttggcgcaggtgtatcaatgaatagcactggtaacggaggagtcaggcctccaagttggaaggagtttttggaaaactgtttgccggaactgaatgcggcgtcttcaacccaaataaaaaaactaataaaaaatgaagattacttaacggcatgtgaactaatcaagtcaaaattagcaaaaggcaaattcgaccacatagctaaaagtgcatttttaaccccacagtatactaaagcagaaatacacgaacttttattcaagctggattgtagaattgtagtcactccaaattttgataaaatttatgaaacttttgcgataagagaaactgaaggcacggtaagtgttcggaactattatgatacagatatagtttctgcagtgaaagatagcggcagggtcgttttgaagattcacggtacaattgataatacctcaaaattaattttttccaggaccgattacgccagtgcaagatcgcagcacagagacttttatgaaatactcaatgcattagggttaacacacacattcctatttataggatgtggggcaaatgatccggatatcagattgctgcttgaagatgcatttttcaaacataatgccgtcaagccacactatatggttgtctcagacaagagtattcataaagacatgatgcctgttatcgaaaaaacattaaatgtcaacatgcttgtttacaaaaccagtaaaggtagccatcaagaattaattgatagtttaaaaagcttagtccaacaagttgagattgcacgagttgaattaaaggagaatatgaattggtaa

SEQ ID NO: 113644 - DNA, 843 bp, Enterobacter aerogenes
gtgaatgactttattgaccgcggccgcgtgaagaaagtctatgttcaggccgatgccagtttccgtatgctacccggtgatatcaataacatgtatgtccgcagctctaacggtgaaatggtgccgttctcggcatttgttacttcacgttgggtatatggttctccgcgtctcgaacgttacaacggcctgccttcgatggaaatcctcggcgaagcggctccgggtaagagtaccggggaagccatggccttgatggagcaactggccagtaaactgcctgcaggtatcggttatgactggacgggcttgtcttatcaggaacgtttatcaggtaaccaggcgccagcgctatatgctatttcgctgatagtcgtcttcctctgtctggcagcactctatgaaagctggtctattccattctccgttatgctggttgtgccattaggagttatcggcgcattattagcagcctcagttagaggattgaataatgacgtttatttccaggttggcctgttaacaactattggtttatctgcgaagaacgccattcttattgttgagttcgccaaagaccttatggataaagaaggcaaaggtattatcgaggcgaccctggaagcatcccgtatgcgtctgcgccctatattaatgacttcattagcctttattctcggggtcatgccgttagtaattagccatggcgctggtagcggcgcgcaaaacgctgtcggtaccggcgtgatgggcggtatgcttaccgcaacgctgctggccatcttcttcgtaccggtgttctttgtggttgtaaggcgtcgctttacccgccacgcagaataa

SEQ ID NO: 113645 - DNA, 420 bp, Enterobacter aerogenes; identical to SEQ ID NO: 92004

SEQ ID NO: 113646 - DNA, 816 bp, Enterobacter aerogenes
atgtttaatacggattcgcttgcctggaagtggcacattccggagctggcccggcagatttatccgtgggtcagctggctgtaccaggagtattacggtctggccggggctttcctagttatcggcctgtttttcggtctggctgaactttgggccggacggatgcgttttgtggggctgagtcataaggagcgacgggagtatgccgatcgctataagcgcgataataaacggccagcgccattttcggtgctggcctcgctggattcgcccgggcggatggtcagggcacgtcgacatgtctggaactacgcgtactggctgaccggcgcggccggtctggcccttctgggggggctggttgtcgccgtgtttatcgagagctggggagaaaccgtcctgcgtccggacctctacgcaaacgcagattattacctgctgcagccggctaacctgttcgggattgcctggtgcgcgggcgggctggctgtcgggattgtgttggcgcggctgctggcgttcctgctgcttgacggtcattttgcggctgctgacgaggcggtgaacgcgaaactgaatcaggagagccggcgcagcagccagcggacaggagagatgaccgacgtgcgccacctgcatttcggggagccggtaccggttaatgcgctggccgatttttcctcggagcaggcccgcaggagcaggcggtgtttctgggtaaggatgagcagggcaagccggtgctggttccgcgtgatacctggcgcaagaccaacattcagatcctcggcctgcccgggagcggcaagagcgtga

SEQ ID NO: 113647 - DNA, 624 bp, Enterobacter aerogenes
atgtctaaaccttacgttcgtctggagaaaaatgatgcggcagtattactggttgaccatcagaccggcctgctctcactggttcgtgatatcgagccggataaattcaagaacaacgtccttgccctcagcgatctggctaaatactttaaactaccgactattctgaccaccagttttgattatggccctaacggcccgctggtgccggaactaaaagaacagttccccgacgccccttatatcgctcgtcccggcaatattaacgcctgggataacgaagatttcgttaacgcggtaaaagccaccggtaagaaacagctgattattgccggtgtcgtcactgaagtgtgcgtggccttcccggcgctgtcggcgattgaagagggattcgacgtctttgtggtgaccgacgcgtccggtacctttaacccgatcactcgtgatgcggcgtgggatcgtatgtcgcaagcgggcgtgcagttaatgtcgtggtttggcgtggcctgtgagctgcaccgcgactggcgcaacgatattgaaggattgggaaccctgttctccaaccatattccggattaccgtaacctgatgaccagttttaacctgctgagcaagaaataa

SEQ ID NO: 113648 - DNA, 1008 bp, Enterobacter aerogenes
atgattgattttattgagtatatgaagcgcattggctttgatgtagaaaagtataactcacttagcgaatgttcagattatgaattgattttgcaattgaaggcgagggagaaaatagatggatgggttaataatctatactcagaggaagatttagttctttcgctatcagaagatgatgctagaaaaaaattaagggagataggtgctcaaattggacgtgatttcgatgacattatcaaaatgctagaggagatgggaagaaaaggaatattcagagcattgctagatagtgttttttatcgtttgctttttaatgagccattaaagattgaacacttcgagaagtacttcatggcttatgaaaaacagtatttagagcgtacgcataaagattttcactctggaccagtaaagcactctcttccctatacagataacatatcacctatgtctcgatgggatttagagtgctttattaatgggggtgcggttgatggcgttggtaaaggtgagaagataatgctcacgcctgaagaaatagaaaatcttgactcagaaaactatgagaagttatatgagctttcatctgaaagcttgaactgtgtagttaatcaagagaatttacgtggtgattttagctatggcatgttattgaagcttgatttaaacaaaccagatgctgagatacttaaagacttaagtttattgttgcccatgtggagaaaacaacttggtttaaccacgccggagaaaaaaagagaatgggaatatatcaggcgtagaatgatagattatcgaattattccattaatggatgttttgaatctggcaaaagtttttacgtttgttactgggaaaagagtgtcaaaaaaagtcatagcacttttagtttaccctgatggtaggcaagatggatttggtctccaccagaccgtattaccttttttagataaaatcatggggaattcttctaaattgatttttgattataaaataactaaataa

SEQ ID NO: 113649 - DNA, 210 bp, Enterobacter aerogenes
atgaaccaacctaatcaaactcaacatctcacagatcgaaccatccgcgaaccggagtgccggcagcttacaggcctttgccgtactactcgttacatgatggaaaaagaaggacaattccctgcccgacgcaagttaggtggccgtgccgttggctggcttttgtctgaggtttccgagtggcagaagagccgcagcaaagctgcgtaa

SEQ ID NO: 113650 - DNA, 186 bp, Enterobacter aerogenes
atggcaacaggttcaactaacaataagtcgcagcaacttaatgcacgtttcccgcatgatgttgttgctgatttagaaagcaacctcgaagatggcgagacaaaagcgcagtttatcgtcacggccgtaaagggcgagatcaaacgccgccagcgtaaaaaagccaaagacgaagaaaaaaactga

SEQ ID NO: 113651 - DNA, 183 bp, Enterobacter aerogenes
atgaaagatcatacccaaactcacaccaaatttacatggcgttttcttgcgctgagcgccaccgatcgaaacatcctccatatcattgccactacagaacgcgaagcccgtgagcaatcaccggttggctgcgtgatggtgttcgctggccgtctgcctgttcaggaggtgcgccatgcatag

SEQ ID NO: 113652 - DNA, 201 bp, Enterobacter aerogenes
atgcatagccggatacctatgctcaatgtgagtctgcatgtttccccagcttttactggtcgaattctggtgtatgtgaaaaacggggttgttatttcagataatccgattggtgatgaagaaattattgcttctcctcgaactatcaccgaaatgcttgaacgtgctggctaccgtataacgtcgattaataagggataa

SEQ ID NO: 113653 - DNA, 357 bp, Enterobacter aerogenes
atgcaacggctaaatgaaatcaaaaatcgccttgaggtgattgagaaagcgcttggtgaacaatatccgcgttttaaagcagatcccgaaattaccgggcagataactgacctgaaggactatgtgcaggaggaacgcaaaaggattcagaaacagaaagcgcggggggagttgtcagagtttgaatcagccttcattgaaccagccattaacgatgtgtatctgtcatctctcgataaaatcagacgaggttcaaaaccaagcagcagggttaatgactacatttgcgatacctcatccacactgagttactggctcttccagatcagggattacaagggcaagaaagatcagtag

SEQ ID NO: 113654 - DNA, 351 bp, Enterobacter aerogenes
atgagaaatcaggcaagaatctggccggaaggtgagtcgtttacttatgaagtgttgataccgacaagtgaaggcccgttacctgttgaagtgacatatgttgtcccggccttcgaagtagttgtagctctgtggcagaacaaggagcatgaaaaaacgtatccgctttttcgtcagtttattcagggctggagcctggaagataaactcaccgataacgtgtttaaagcctttttgagagcttacccgggaactgcaaataaaattatgcatggctggcaggaatatatgcaaagcgcacttacggaaaatgagcatctttttgctatgcagagccagaccattaactga

SEQ ID NO: 113655 - DNA, 189 bp, Enterobacter aerogenes
atgttaaaacatgaaactctaatagctgcaattgagaccgctgcggatctgcgtggatttagtcttaatgggcaggagcggctggttgtccgcacccgtgttgatactgcactggcagctaaagcacgataccgtaggcggatggcggccagtactttccactggcagaagcccattccgccaagatag

SEQ ID NO: 113656 - DNA, 687 bp, Enterobacter aerogenes
atggccggacaattagacgaagcagcaaaacagattttgggtaccttactggcagattttacagatcgtgggttaactgcacaggatttaaaaaatggttatgaaggcccgaatatcaatgcgctagcgactgcagtatgcaacgtcgctgattttacatctgtagattttgaagttgcctttggcgatctcgaaaaaggtaagctaatcggaaccgggccaatgaaaatgtttgataatgatcacaatagttctgtggtcatcattggttcttatagtctacgtgagttcgtttatttgacggaggctggatacaaggagtccagaaaagtaccaaaccgcccgcaacgtgttcaacgcatagtcaataatctgactatcaccggcggtcatttcagcaatacgcaattagggcagggggaggtcgtctctcaggctcaaaacattacaagcagttccgattctgaaatagtttcaaagttgatttccatccttgaagaacaagggcaggtagttaacatcgctcaacgctctgatattgaagcagctgtcgcagcagctaatgaaggggatggtaaagaggccaaatctttactggctaaggtttgcggccccgcctgggaatccatacaaccggttatgtggccgattgtgggtgagctggtcaagaaaagccttggactttga

SEQ ID NO: 113657 - DNA, 513 bp, Enterobacter aerogenes
gtggcgctggagaacacccatccgttcacccgcgaactgtggggccgccactggacctacgcccataacgggcagctcaagggttataaatcgctgaagacgggaaatttccgcccggtgggcgagaccgacagcgaaacggctttctgctggctgttgcaccgtttaaccgagcgctatccgcgcacgcctggcaatatggtcggcgtgtttaaatacatcgcgacgctggcgggcgaaatgcgcgagaagggcgtgtttaatatgctgttatcggacgggcgctatgtgatggcgtactgttcaaccaacctgtactggatcacccgtcgggcgccgtttggcgtggcgaagctactggatcaggatgtggaaattgattttcaacgtgagaccacaccaaacgatgtggtctccgttatcgccactcagccgctgaccggcaatgaggcctggaataaaatcatgccaggcgagtgggcgttattttgcctcggggagcgtatagtttga

SEQ ID NO: 113658 - DNA, 180 bp, Enterobacter aerogenes
atgtgcgaattgctcgggatgagcgccaatgtgccgaccgatatctgttttagcttctccgggctggttcagcgcggggcggcaccgggccgcataaagacggctggggtattaccttttacgaagggaaagggtgtcgcacatttaaagatccgcagccgagctttcagtcgccaatag

SEQ ID NO: 113659 - DNA, 354 bp, Enterobacter aerogenes
atggcgaaactggtgaagacccatcagccgcgcctgtttgactatctgtacagtcatcgaaataaacgcaagctggcgacgttaatcgacgtgccgcagttgaaaccactggtccacgtttccggtatgttcggcgccgcccgcggcaacactagcctggtcgcgccgctggcctggcatccggataaccgcaatgcggtgattatggttgacctggcgggggatatgtcgccgttgttggagctcgacgccgatacattgcgcgagcgcctgtatactccgcgagacgaactcggcgatttaccggcagcgccaattaagctggtgcatttaaataaatgcccggtgcaatag

SEQ ID NO: 113660 - DNA, 354 bp, Enterobacter aerogenes
  misc_feature (239)..(248): n is a, c, g, or t
atgggatcgctgacacagcagcaacttgaaaaagcagcgggctccactgcgctggcggttcagaccggtatagtctcggcgcaggacatcaccaaagcctataaggacatcgaaaaagaccctgttaaagcgctgcagaatctcaacgaacaatataatttcctgaccgtttcacaacttaagcatgttgacgatctgataaagcaaaaggatcagaccgcggccgttacgcaggctannnnnnnnnnaagcagggcactttatcggctggcgatcgcagcacggatgccgcccaggctgagctactggcgcttcaggtacagttacgcgcgctgcagcagcataaagtgctga

SEQ ID NO: 113661 - DNA, 510 bp, Enterobacter aerogenes
gtggaaaccgccgtcgcctggcaggcggccattgagcgcaaggacggccctaccgcattaatcctttcgcgacagaatctggcgcaaatggcccgtacgccggaacaggtgcaggaaattgctcgcggcggttacgttctgaaggatgcgggcggcaagccggatctcatcctgatcgccacaggttcggaagtcgagatcgccgttcaggcggcggagacgctgctggccagcggcgtaaacgtgcgggtggtgtcgctgccttccaccgacgttttcgatgctcaggatgaggcctggcgcgagtcggtgctgccttccgatgttagcgcccgcgtcgctatcgaagccggtattgccgactactggtataaatatgtcggcctgaaaggcgcaattgttggtatgacccgctacggggaatcggcgcccgccgacaagctgttcccgttcttcggctttaccgctgaacatatagtcgaagtcagccgtaaggtgcttaacgggtga

SEQ ID NO: 113662 - DNA, 669 bp, Enterobacter aerogenes
ttgcaaagccttaccagcagtcaattggcgcgctggcttggcgtgcagcaacgtaggcctcgaggagtgctgattgtcggggcgaatacggtcgccagaaccctggcccaggcgctcagaaaactcgatattccggttcagctgagcgataacagctgggaatactaccggctggcaaggatggaaggcttaccaacatattatggcaatgtctggtctgaacatgcggaaaactacctgaatctgagtgagattcgtcaggtgatcgccttgtcgccaaatcgtcaccagaatgcgctgaccaccctgcattttcagcatatatttggtaataatcgcgtcttctcaatccgtacggggcctgtgactaaaggacgtagtgagaaagaaacgcgtcacgaacagcttttcgatactgatatgacctgggcacggcttagtagcctgatagcgaaaggcgcagtcatgaaagtcactcgcctgaataacaattttggctggccggagtatctcagcaccaaccccggtgcaacaccgctgtttgcgcaaagagaggatggcaatctgatagcgattaataatggaatcatgccgccgccaccctgtaccgtcgtggcgattatcgaacctggagtggaaagtgaaaaaattccgtcagaagcgtattga

SEQ ID NO: 113663 - DNA, 549 bp, Enterobacter aerogenes; identical to SEQ ID NO: 16825

SEQ ID NO: 113664 - DNA, 345 bp, Enterobacter aerogenes; identical to SEQ ID NO: 86717

SEQ ID NO: 113665 - DNA, 267 bp, Enterobacter aerogenes; identical to SEQ ID NO: 16860

SEQ ID NO: 113666 - DNA, 276 bp, Enterobacter aerogenes; identical to SEQ ID NO: 16862

SEQ ID NO: 113667 - DNA, 1110 bp, Enterobacter aerogenes
atgaaatcacgtgccgctgttgcatttgcaccagggaagcccctggagattgttgaaattgatgttgctccgcctaaaaaaggcgaggtgctgattaaaaacacccacacaggtgtctgccataccgatgcctttaccctctcagggaatgaccctgagggcgttttcccggtggttctcggccacgagggagccggtatcgtcgttgaagttggtgaaggcgtcaccagtgtgaagccgggtgaccatgttattccgctctacaccgctgaatgcggggagtgtgaattctgccagtccggtaaaacgaacctctgtgtatcggttcgcgagactcagggcaaaggactgatgcctgacgggaccactcgcttttcatacaacggtcagcctctttaccactacatgggatgttccacattcagtgaatacaccgttgtggccgaggtttctctggcaaaaattaacccggaggcgaaccatgaacacgtctgcctgttgggttgtggcgtgactaccggtattggcgccgtccataacacggctaaagtgcagccgggcgattcagttgccatttttggtctgggggcaattggtctggctgcggtacagggggcccgtcaggcaaaagcgggacgtattatcgctatcgatactaatccgacaaaatttgacctggcccgtcagttcggggccactgactgcattaacccgaatgattatgacaaaccgattaaagatgttctgctggatatcaacaagtggggtattgaccatacctttgaatgtatcggtaacgttaacgtcatgcgtgcagcgctggaaagtgctcaccgtgggtgggggcagtccgttgtcattggtgtcgcaggggccggacaggagatttccacccgtcctttccagctggtcaccgggcgcgtatggaaaggttccgcgtttggcggagtaaaaggccgcactcagctccccggtatggtcgaggatgccatgaagggggatattgaccttgagccatttgtaacccatacgatgacactggatgaaatcaatgacgccttcgagcttatgcatgaaggcaaatctatccggacagtgattcattactga

SEQ ID NO: 113668 - DNA, 399 bp, Enterobacter aerogenes; identical to SEQ ID NO: 16863

SEQ ID NO: 113669 - DNA, 837 bp, Enterobacter aerogenes; identical to SEQ ID NO: 16864

SEQ ID NO: 113670 - DNA, 2652 bp, Enterobacter aerogenes; identical to SEQ ID NO: 16870

SEQ ID NO: 113671 - DNA, 309 bp, Enterobacter aerogenes
gtgcacgtgcggacgccctctgacaccacgaccgaagcgctgtgccgtatcggcgagctgtatggcatcgaggcgggcatccggggcaaaagcgcggcggaacggctggccattcggcaggaaaaagcggtaccgctgctgaccgcgctggagggctggctgcgtgaaaagcagaaaacgctgtcacggcactcggagctgtcgaaggcgttcgcgtacgcgctgaaccagtgggatgcgctgaaattatacctgcgggagattactgatacagaacacgccgggaatgtgccgccattgacgcaatga

SEQ ID NO: 113672 - DNA, 276 bp, Enterobacter aerogenes
atgtgggaaaagatattacaaaaaaatctttattctgaatgggttatccgaaacaccctatactggatgactcctgtaagtccatggaaacttgaagaaaacacatcctcgtggattatcttctttgagatagaagatcctgaatgtgagtttgaattcgaaaggctgttaaacgattttagcctgcgtgagaaacttcaccatcaaactggtcagttgcgtgatgccattatcagcaaggttctccgaagcatagatgacagacttgcaaaatga

SEQ ID NO: 113673 - DNA, 477 bp, Enterobacter aerogenes
  misc_feature (440)..(449): n is a, c, g, or t
atgaaagaactcgagtatataaagccatatagcttaaaagaattaattacgaaaattgttcatcagggatacacaaaagacaatttttgcctttacacaaaggaatatgaagctgttgctacccccgaacttgtttgctatctggatcggtatactgaagttagtgatgatgaagacgtttatcctgaatacgttgagcaagaagataaatttggtgatattatcccatttgaaattaaatttaatgattcagcatctcaatatgatattttttcatttagagaaacattattgggtggttatataattataaatggaaaagttaaagaaaccattcaggaaaaggggttcaagggaatgaaatttgtggcaatcgaaaatgcgttagatgtattttgtaaagattatttttacgatgtagaatctaaccgtaaaaaaannnnnnnnnnaaaaaatataagaaattgccataattaa

SEQ ID NO: 113674 - DNA, 135 bp, Enterobacter aerogenes
atgaaaaaaacaatcggctcaatcgccatactgctcgcaagcttctctaccaccacgacagccgccggcaacgtatatgtaaagctatcatgcgaaaacaacatcaccgtggacatcacgctgaagaaacagtaa

SEQ ID NO: 113675 - DNA, 1104 bp, Enterobacter aerogenes
atggatgatataaaggattcaataattcaaactattcgtgaacgttttggcaatcccatgtgggggtatatagcactttcttggtttggttttaactggaaaaacattgcgatactattttttagtaagtcaacaattgaagaaagaattaaaattgtcactagccaagactatctttacctacattacctaataataccagtagttgttggttgtgtgctcgcggctagcgcaccatatatcaaatgggctttttctaaagctcatgagtacggcgaatcaatgcttaatgaagttgacaagcgccggattaatgctgcatatcaaaaggatatagataccgcgaacaaaaaagttgaacgtgattttgctgctagaattgctgaggcagacaagcaaaaagaattagttgaaattgaagaaactaaaaaacaacttccatacaatactgaaaatttaataaaagaacatggtgtactgactgagcaatgttcaagtcttgagcatgacattttgatttataaccaacagaaagatcaattagacaaagaaattgactcattacagcttaaggttaagagcattgtagaaatattcaatagatacaactctcctagcaatcatgaaagtattcagcgatttttagatgagatatctacaatcttcaatagtgtaatatcaaatcctaaacaagatccttctgaaaaagaagcagccagtgtgttagggaatataaataaagcatatcaagccgcacttttaccacaaaccaatatttctaaaaatcaatataaatcagccttagagaatattcagaacgcattatcaaaaaatcctaatcttgcagatttgatatctagcacttacgatactttcaataatcccaactataagaaggttcatgacctagtacagagtattaactctattcagaatcaatatcctcaacttatgtcactatcatctcagacaaaggagatgctaaattcagccacaagtaatgacttaaaaaagatatcacaatatgcagggctattgagccctcaatatactgatgtatctgaactactaaaacataacaattcatcattggaaaatgaatga

SEQ ID NO: 113676 - DNA, 426 bp, Enterobacter aerogenes
atggaaaaaacagaacaaccaccatttctggcaattgattaccgtatcctggcatttgatattaaaacagccatcaacgaaaaaaccatcgatagcagcaccgttctcaaactcaaattagtctattgttacctactcgggttatcaaaaaaatgcagtgaagtttatccagaacaaacaaaaatgggtaaaacattgggtattggttcccgacaggttgttggaagatgcatatcgctgctggagtctcttggatggatttcaaaaacatccagaactggaacatccaatctatacacggtgaaaaccgtcgagcaaattttagaaggtattccgcgcgagactaaagaagaacaaccaacacctacaatacagcactctgttgtatcagatgatgatggtgatatcccatcgttttcaaaataa

SEQ ID NO: 113677 - DNA, 771 bp, Enterobacter aerogenes
atgtataaagaacttatagaacagagcctgaatgaggcaaaagccgccagagctgcgctgagcaaggttaacggtgtagttgtcggaaagatgcataatcctgatcgtgggctgtatctcgctaactatgccaatttactcatgaacaggcagatagacatctttgatgatgggcttctcctcctcgaaaacgaacgataccaaaccgcttgtatcgttagccgggggatgattgaaacacatgctttctcacgactcttaaacaagaaagtggagaagattttgactaaccaaagtggccaggaaagtgtagataaagccctcaaagtcatcttgggctttacgaacagttcgcgattaaaaaagtcagagcaagaaaagattcagaaaggagtatttgacccgaacgactacatgtttactgaagaggctaaacatcgttttgaaaacctacttgctgtcagtcagcatgtgatggatgctttacgcgatctctatcaagatgagatgaagcagactaatcagagggaaagcgattttgaactgacgtatgacatacttagcgaatatgttcatccttcacaaacgagcatctaccattactacacacctgaaacccacttagttcctacttcagttggtaatattcatgcttatgagtctgctcagctacaatgtgcgagagcactacacttcatattagatgcgaagaatcaacattattggtctttacagttagcaaatgagatgaccaaacgcggttcagcataa

SEQ ID NO: 113678 - DNA, 789 bp, Enterobacter aerogenes
gtgtctactgattttatatggcgatatcttgatatagaaaaattctctatgcttcttaatcagcaagctttatttttttgctcagcaaaaaaatttgaagatccgttcgaaggcgagtttgcttgggggcgtgtaggctacgaaaaatttattgagacacagaaaaaactatgcgctacccatggagctggcatggacttagatatgttcatggcattcaatttaaagacacttaaagaaataagtgagaaaacatacataagttgctggcatagcagtgagcatgaatccgaagccatgtggaagttatattgtaaaaatccggccaaaggtgttgttataaaaacaaagaaaaaaacactccaggctcatcttgagaataaaggtctaaacaaacttcagttaaagtcagtaaagtacgtaccgaatttctggataaaacaatacaatcctgaacccgatgttttctttagtaagagaccatctttcgaatacgaaaaggaatttagggcgatttttcaagaaaatacatttaataccccccctgtaaatggtaagctaattccagtatcccttaatgaattgttagaggaagtaagaatatcaccgttttctggtcaagatttcaaaaatgaggttttagaactttcaaaaatatatgggctagaaactaaagttaaagactctgaaattgaaatgcatcccatcatgagcgttgaggagaaaataattgcagaaggtcctgattggtatcagtcaaccatcaggctggcagtgcgtggcgcataa

SEQ ID NO: 113679 - DNA, 900 bp, Enterobacter aerogenes
atggtatatatgacaaacactcttttttttggtaatggaataaacagactttctgaaaatcacgtcacctggagtaatttactcgataacataaaaggtatcaataagttcgaaagcggccagttgccaaacactatggtgtatgagcgaatctatctagaaaaacatgcgccagatagaagcgaaaaaaaagatgagcttgaaataaaaaatgttatagctaacgaactacgagagcaaggatcaaatgatgttcttgaggagttagcatcgctaccttttaagcattatcttactactaattatgattacgccttagaaaaggcgcttgatatttcgccagtaaagctaagttcagaggaaatttatagcttgagaagaaaacgaatgtatgaatcacagaataattcaaaattcctgtggaatatacatggtgaaatagacaaccccaaatctattatgcttggtttagatcattattgtggttcagtgagcaaaatcgatgcttatgttaaaggcaactactcacataaagttaatggcgctgacgtttctgttaaaccgatgttagaaaaacttagagatgcttcattttgtcacacatcatgggtggatctatttttctcaagcaatgtacacattatcggcttttcattagactatagcgagactgacatatggtgggtgctaaataagcgagcccgtttttcatctgaagcaacaattaataacaaaatatatttttacactcatactatcagtgatgaaaaaaaaggactgcttgaggcattcggtgttgaggttattacaattgatgtgattgatgataactttgagggtatgtattggtctgctataaagaaaataaataataacctcaatcgagatacagaaaactga

SEQ ID NO: 113680 - DNA, 141 bp, Enterobacter aerogenes
atgaatgtcttctggacgctcattactgaactgacgatgcgtatctgcaaagttaggtgttgttatctcaaaacgttcagagcctactggtgcaacaggcaccggttagacaacacggtatggcggattaagccgccctga

SEQ ID NO: 113681 - DNA, 864 bp, Enterobacter aerogenes
gtggaaaaaaatagcaaaggtctaagagttcgtaatttttttgatattgaagctaaagaaatcatggaaagatatcgtgtgatagaaactttattgcctaatacaaattccaaaggtgcttatcaccgaggtgaggaaggacgttatattgaatccttgttaagatcgtttcttaatagccatcttccctctaatctaaaagccatgtctggatttattcttagcccctcaactaaaacaggaatagaggataatactcgtgttgaaaactttccagatcgtcattcaaggcaattagatattatagtgtatgatgttgccaattatccaatctatgaaaaatttgaagaattctgtattgtcccacctgaaggtgttgtgagtataatatccgtaaaaaagaaattaaagacaaatgacattcaccatgaggttaaagcattaagagatgctgccaccttatgctctggaaataaaaagagaacgcctcacacagctattttttcttttgatagtgacatcaaaacattgagaggtctcaatgcgaaaatattctcaagcatttcaaaggagaatggagggtctttttccactcttattaacgaagttatagttgcaaataagacttgtatatttaaacttagaaaggacaacacgactgtagaaggtcatgctcaatatgtgggtgtggattgtacaaaaagacctcatatcacgttgcagagaatacttcaaagcatattatcggttcactatgatacctctagaggtagtacaattaatagaccaggatttgtatctttcgaaaaaaatacatttgccgattctcccaaaattggtacaattccatatgattatgactag

SEQ ID NO: 113682 - DNA, 381 bp, Enterobacter aerogenes
atggacatgacattgtttgaggaatgtaaggaccttctcaagacagattttaatgttatggaaggggatgatttgagtgcggtaatggatatttttcttcaatatccatggcatagcggtgatctcaaatggtcggaaatggactttagcgattatgaacctagtcatgagatgtttaacgtgagcgacttaggcaatgaaactgtatttgtcgtagcggatgatgtgaatgtgcccgtgttcagaacccatctacgactcattgtcgataatatctacgatgtcatcgccctgtcacctaaactatttatttttaacgataagataatgattaagcctttatttcctcatgatcttataagggttggtctgcgaaagtga

SEQ ID NO: 113683 - DNA, 669 bp, Enterobacter aerogenes
atgttactgaccgcacctgaattggcggcaattattgcagtcgctggcatcgcagttcagttctgggttgcttatttagctcggcgacagattgcaaggcaacacgatcttcagcacttgatctcacatcgcactacagcgtctttcgttgcggacaaacgccagaagtggatagatgaactgcgaacagacatggccttccatctggccttatcgcaggagatcatctggaagtgggattctatgcgccaacgtgcgcatctacgcattaaggaagacgccagtaatattgatgggacggttgaccaagtgaaggccggtaagattttacaggaaattaccgataagttctcaccggagaatggagcgcgtgaccgcgagcatcaggaacgacacacccgaatcatgttccggctaaatccaaaggaggagttgcacatcaagcctcggcaatgccttgagtacatccgggtcggacttagcaaaactcaaggtgcgaaaacacgagccgaagctgatgagcaacttaacgaaacgattcgactgattgctaaagcgcaagaacacacgcaagacatcttaagagccgagtggcagcgagtaaaacaggaagttgcttaccctgaagcgctgatttctacaattcccaagcctgactcgtgcaagtag

SEQ ID NO: 113684 - DNA, 1179 bp, Enterobacter aerogenes
atgggacgttcggccgattacaccatccaaggttttttgtatcagttcaatatgacgctctctgaactgcttaaagcggcagacgaggcggaaattacaattgaaggaattgtagaagacattgaggtggctacattttcaggtactaaagccatacaatgtaaataccatgaggcgcagtctaagtattccataagcatactttatgaccctttgcttcagatgatgaaacactttaaatcaaatccaactgcaaaaataaaatatcatctcttcgcgcacttcccaaacaaccccactgtgactataaccgatgttgagcttaaaagtgctctgaattcaagtaatcaaaacttaaaaacacttatagctgatgccaaaggtgttgatattaaaaagtttcttgacgtattctccatcacgattacaccaaagtatgacgatttgatggaagagaacacaaaactccttgttggtctgggattcagtgatagcgaagtcgaaacgttattttatccgaatgctattcagataattggtgacagaagcatcaaacatgacgaaaagtctaggaaaatcactagaaagttgtttcttgaagaattgcgtcgtattagatctacagctgtttcacaatggacacttgcattaaaaacgcgaaaaaaagttttggattcccgacgaaagcaattgaaagaaaatctaagtttaaacgcacgcttacgtttcttattggtttttccgggtatccttgaagagttcgacaaacatatagtcctatttataaaatcctttattgataagtatcattttaaacaagctcatacacacactcccatttttatattggatgtttctcagtcccactttgatgacattgcagaacgtttatacgaaaaggatgtaatcccgaacatcggtcgccatgtaaaagccttctccgagaaaaaattttttagtgagcctattgttacccgagataaaaaagaatttgttcttcgctttattcgctgggacgattacaaaaaccttcatcccaaagttaaggcggatgatttttttgtaatcggagatggagatgtgacagagctggatcttcgggatgtaaatcttgaagctttgggtgccgaaaaatttgatgaaattaaatatatgatggggatcagtaatggctactaa

SEQ ID NO: 113685 - DNA, 1767 bp, Enterobacter aerogenes
atggctactaaaattggggctgtactgtcgtgctcaccagaggctgtaatcgttgcagtagatcgtcttgagacatttgaaacaaataaagaaaaccttcaggttgggcgctttctgaaaattgcccaaggtaatcacgattttacaattgccaccatccgtaatatcaaaggtactaacaccactgatccagaaggcaagccagcttggagcttccagattgagtgtcaggctatcggaacgctggtggatgataaaaattttgaccgcagtagtctgctgctgccggtcccaactgagcatgcattcattgctgaaaatgacaccttagacaaaatcttttcagctgatagtgagcacgacttccctctcggcaagctttccatgaataaagataccgacctcatgatcagcggtaacagattcttcagtaaacacattgctatcgtaggttccacgggctctggtaagtcatgcacagttgcgagcgttttgcagaggattgttggaattgctgagtgtaaaaacagcaataaagatcggcagaataactcgcatgtggtgattttcgatattcacgatgaatattctgccgcattcagtttgcaagaagaggaatcgttcactctcacccggcttgatattgataccttacaactgccctactggctaatgaactctgaagaacttgaaagcatgttcatcgaaagtaatgagaacaactctcataatcaggttagccagttcaagcatgccgttgtattgaacaaagaaaagcataatccggccattacggaagttacgtatgacacgcctgtatatttctcgattaaggaggtctacaactacatagaaaacctgaatcgagaagtgattggtcggctggtgggggaagataaaccaaagctggctagtggagaactagtcaccgatcgaacgatttatttcgaaaaaattcaagactttatcgctacatcgtctgcgggagcaactaaggcaaccgtcggtcctttcagtggtgagttcaacaggtttgcttcgcggctggagtcgaaacttacagataaacggctgcggtttctgttgaatgccaagaaagttgacggaaatgcacatgttacagacgactttgagacgttgatgaaacaattcattggctatctggataaatcaaacgtcactgtcatcgatttaagcggggtgccatttgaagttctcagcgttacagtcagtctgatctctcgcctaattttcgacttttgcttccattattcaaagctgcagcatgccatcggcaagcttaatgacatcccggtgatgttggtttgtgaagaggcacacaactatgtacctagggacggacacgcatcttatcgggcatcaaggaaatctattgaacgcatagcaaaagaaggcagaaaatatggcttgagcctgatggtagtaagccagcgtccctcagaggtctcagaaaccatttttgctcaatgcaacaacttcatctcgctacgtctgacaaatgatgccgatcagtcctatgtgcgacgactatttcctgacaattccaatggtatcactgagattttaccaaacctggctccaggtgagtgcgtggtagtgggtgatgcggtattactgccagcagttatcaaaatgccactgccggtgccagaacctcactcccaaagcgttaaagttcataatgagtggcaatcgctatggcgcgatgtggctttcgaaaaggtcatcgaacggtggaggaagtga

SEQ ID NO: 113686 - DNA, 591 bp, Enterobacter aerogenes
atgccaaacgcaattgaaatggaagaagtccatatagaatatgatgattattctgtatctcatgagtactattcttaccgaggtgtatctggcgattcggagcatgatgtaaagcatgattatgcagccctaataacgcaggcgctcaggcgttcaacgctaattaccatttattcactttttgaacatcacatgaaaaaatgcaagaaacttgcaactcaggcgccgggctatacaaaacccaaagaagatgatggtttaaatgcccttaagcaaattcaaattattaataacatcccagcttatgatataacgaaaattgatgacttacggttgattcgaaacctcatgacccataatgacgggatgattgattcgtactcagatgactcacaaaaaaaacacgccattgcctctcgaagactgcgcgatgagggagtgctacgcataaccgccctagaaggtagagttgttttaaatgaaatatttttggattatacggttaatacaataaagcaatatttcgatgaaataaacatagccctcgacttgcattataaaaatcacgcagacctgaccccatctaattaa

SEQ ID NO: 113687 - DNA, 594 bp, Enterobacter aerogenes
gtgccactatcgaatttgctaaaagataccgtttcactattaaaaaagaatggtgaaaaggttgataacatcaaagcaagtgttcagtcaaagaagattttcattaatcggtctgatattttgattgaaacaggcgatttgattcaacgaaggatgtcaaatggcggcgaggaaacctatgaagttattgacccagggtttcatgagcgacatggggcaattgcagcaggctatcaaataactcacaaaaaactaggattgccagaagttgataaggctatacaaaatatcacctacaatattagtggtgctaattcgcgtgttaacaaccactcaatagataattcaataaacatcaccaactttaattcagatgttacagagcatattgcaatgctacgctcagagatagagagacttctaaataaacctgaagaaaaaaaagaggctcttgagattgtagatgcgatagaaggccagttttcatcggataaacctagcaaagtgatagtgaagtcattattagcttctttgcctacgatcggtagcgttgcaacaataggttcattcctattaagctgttttggaggttaa

SEQ ID NO: 113688 - DNA, 534 bp, Enterobacter aerogenes
atgattctgataatttactcgcatccttatccgcatcactcgcatgcgaataaacggatgcttgagcaagcagggacgcttgatggcgtagagatacgctccctctatgagctatatcccgacttcaatatcgatatcgctgccgagcaggcggcgctggcgcgcgccgatctggttatctggcagcatccaatgcagtggtacagcgtaccgccgctgctaaaactgtggatggataaagtgctgtctcacggctgggcgtacggccacaatggtattgcgttgcatggtaaatcgctgatgtgggcggttactaccggcggcggcgaaagccatttcgatattggttcatcccccggctttgacgtgctggcgcagcctctgcaggcgacggcgctgtactgtggcatgaaatggctgccgccgtttgccatgcactgtacctttatctgcgatgacgaaacgctgcaggcgcaggcccgtcattatcgtcaacgcttaatcgaatggcaggaggcgcatcacaatggatag

SEQ ID NO: 113689 - DNA, 873 bp, Enterobacter aerogenes
atgtcaattaacaatttaagtttaacttcatttaagatagaaatgtgtagagagaatgctgacagcgatgagttaacaattctgagtacagccactgcatttttttattgttttaatgagaaggtctatttaataacaaactggcataacgttacaggaagaaactccttaaccggaaagccattagataccatcaatttatcagttcctaacctcatggctctttatcttcctaaaagaatagaagctgtaggtaactctttttatttatcatggagaaatgttcttaaacttaatttatacgaggaggacaatggtgaatatgcacctatatggtttgaacatccaaaccatgagaacaaggtcgatataattgcaataccttttaacgacactatgaaaaccttaaaagaaaatgggtttgctatttttcctgttaattcagatgagctgtatttggaagattttgatattaaagctggtatggatgcattcctcatcggttatcctctaggtatggttgccggggggaatctaccaatatggaaaagaggtagtgtagcttctgaacatgatgtaaacattgacaatctacctaagtattttattgatacagccaccactaaaactggcatgtcaggctctgctgtatttataaaatcaaatggatttactttgccaaaaggaaaggaaaacattgacgatatgattatgtcacaatgctatacctttggaggagtctattcaggacgctctcaattaatacactccggaagtaatatttatcccgacctagcaattgtttggaaagaatcagcgataattgaaattattgaaggtaagcacaaatcaaaacatgtatattacggataa

SEQ ID NO: 113690 - DNA, 1170 bp, Enterobacter aerogenes
atgttctcaaacatgcactcgacacagcattggttaaaacagttttctaaaaatcatagagtaattgcagaatctcttctgaatagtattgtttatataaaatcatcatctttaataatagacttaaaggaagtgattttagaaaatgagaataaagaaaaggtttcaatattaccaatcagagaactcgacgataacgaacaagtttttgatttgactaacaaaaataccccacctcaattgcaggcctcaaatcaacctttaggtagtgaagcattcatttcaaacctatacactcaactcaataggaaaaacaaggtttacttcccactgagtagaataaaaatagggagaaaatctattatcgcttcaaactcactaaatgcaatgcaaaaattatctattagaaaattaatattagttgatgacttaataggttctggggataggacaaaaatatacttagagcgattgtacaaccatccaacaattaaaagctggctttcttttggaaccttaaaaattgagattttggcatatatggcaacattgcaaggtgagggggtagtaaggaggtatatagggaataagaagggaattaatcttaatgttttatacttagcaccgacaatatacgagttgagaaattttgatgacattaaggtgttatgtgaatcttattctgatgaaaatgagaattatccgttaggttatggtgattcagcggtcagagtagtgttttcacactcagcccccaataacataccttctattttatatagaagcaaaattagatacaaaccgaaacttaaagggataacaaacttacgtaaatgggatgctttatttcctagtcgccatataaatagtgatttcatttatgaagtagaaagtaaaacaagatcactatcgaaaataaataaaataaaactaataattaatactttagcatccgaacctctatctataaaaaatttaagccgaatcttggggttgtcacaatatgaaattagattcatacttaaaaatttaaaagagatcggttgggttgatttgaatgaagagttattcactttaaccgagttaggctatgttgaagtaggtatcaaggctaaaggtctgaattttattgcatcaaacccagaattctattatcctcgaaaatggtga

SEQ ID NO: 113691 - DNA, 1143 bp, Enterobacter aerogenes
atgaccattgtcccatcccatctatattttattggtggagtagaagcaagaagagaaccagcggttttaaaaagcctgatggcgaagtcaagtaaatttcatgatcacggcttaacatatatccatagcatacaacaccttagcaagctaatttacactgatgaaaattacctcaaatcaataattttgaggaaaagtagtgagtatgatcactactcaattccaaaaaaatcagggggaagtagatttataagtgctcctcgtgatgagctaaaaaaaatacaacattggattaatttcaatgtacttaaaaatttaactccacatccttgctgctattcctatcataagaaagcctcgatatataaatgtgcagcaattcactgctcatcaaagtggcttttgaagttagatcttgaaacgttttttgatatgacttctgaagtgcatgtttacaagcagttcacctctatcggttattctcctatagtatcttttgctcttgcacgaatttgtacttatcaaccaaagaaattaacggcacactatagcacctggaagttacattctcgtgtaaatagaaaagagcccttctctcgtagtggtattagttatattggtaggctaccgcaaggttcaccaacaagccctatgctctcaaatatggcattctataatcttgatgaaaaaatatattcattagtaaaatattatggtggcctttactctagatatgcagatgatatatttatttctttctctagcgctgacattaatagaacattaatcagcaagttagtaggtcggcttattaatcatttaaaaaaagaaggttacaaattaaacaagactaaaattaaattatcaccaccaggctctagaaaaatagttctcggattaaatgtagattcagaaacaccaaaattatcaaaagaattcaaacggagtattgattcacatctttatgctttggcaaagcatggtcctaagctccatgctttagaaagaaattttcaaagtgtatttggtatgttggagcatataaaaggaaaaattctttttgcacgatctatttcacgagaatatggagataaaaaattaaatgaattctatagcgctttagaatcccacggttttaactaa

SEQ ID NO: 113692 - DNA, 1131 bp, Enterobacter aerogenes
atggcacgcacatacgtcaaacaaacagtacagaataatgaacaactttttgattctttagttataaatgccatagatttccttgagtcttccattgatgatctaaataaaaggcccaagaattcaattgttgatttctatacagccattgaactttttttaaaggcaaggttaatgctcgaacactggactttaatattggatgatcctggcaaggcaaataaacaaaaatttagcgttggtgactttaattctgtgtactttaatgatgcggttcaacgtcttaataccattattggcattaagcttggtgataatatcattgatgagttcaaaacgttaggtgcacatagaaaccaaattgtacactttgcacataccgaatattcaagcactcaagcaaataaagcgggcgtagtggctcaacaatggtcttcatggcaccatttgtataatttactcactgttgaatggaagggtgagtttattaaatataagaaagagatcgagcgtgtacataaaagaatgctacaacaaaaggattttctcaataccagatttaatgagattacgaaggacattagtattctaaaattgaaaaaaactaaaatagttaagtgccgtcaatgtggcttagaagccggtaaagttaatgctactcataaatggggtgatgattatgagtgcttggtttgcgagtcgcagggcgttgcggtaaagcaagtcgcagatactttgccttgcccaaactgtaaagtaccattcgaatttttcggttcagacatcaataaatgtccaaagtgtgctcatgaaattaccacaaatatattaataaaattatgccgtgaagtatatataaccggtgatgagtggtgggaagagggtggggaatgtatagctggttgtcacgtatgtaagcacactccaaattcagttttctatattgatggtcagtggagttgtgtttcatgttttgatagaggatggtcagcagttaactgtccgcattgcgatgaatatgtgactggtgatatggaaacaatcaaatacttcgcatgttataaatgcgaagatgagcaacggaagtatattttagctaaagctagaactccagagtcaactttcaagtaa

SEQ ID NO: 113693 - DNA, 1266 bp, Enterobacter aerogenes
atgaagaaaaacactggagaatgtgtagataaaaaatgtaaaaaacctatttcagagcatgtgaaagcaaataaaaagcgtttatgcgaagaacactatgaactacaaaaagaaaaggcccggatgaagttagaaaaacgtataagcaagatagccgacagagttatatccagtcataaactgtcaaaaatcgaagcattaattagcaacaataacgttaatgaagagatcttcagaagaaaaataaacaaacaatggatatcagaaaatacaaaaagaaaaagtgatgtaaaagacatcctcgaatctcgagaatggaaaaacacacaagaactaattcgaagaagacgagtcacttgcgtagagaaacaatttatggattatgtacaggatgtgtgtcatttatatttactaaagctttttcatagtagagaatatctcaaaaaagataactcatacaaaaaaaatcatatatcttcgcttggagatattagccctgctgtcactttaaaacttgaggtagccttctctttcaacccttactctgacgtcagcataagcacggatgatatcattttgattccacagaaaatccgaagaatgctttccatggaaaaatcatttcttaagaaaaaaatacaaaaagataaatcccagaatcatgaaagcaagaaaataaaaagtaaagttaaaaaaagaagcgatggtatctaccacagaatcctgcgagaaaatgaacctgaagaggttagtaagtttatggataagatgagagaacaattaaaagagcttccttctacaatatttataagataccccccctttctatacagccccattgaaaaatccctgccactatttcggttagcacaaatggaatacatcagaatatatcaaaaatctgaggcaaacatatttgttaaagtagaaaatgaattatcccacttcaaaatgcatctagaatcatttgcgattttaagctttcatgctttgatgtcaggtaaaacaataggaaggggatttataactcaggcatcatcctgtattaaactcacaccaacaaataggacctcagcaagtaaactcttgttagatgaaatagaatataatctcaaggctttatttcatgttaacatgaaaaataaaagcgaattcattaggttgtacaactcattctttagtgaagatgtaattgaagaagacaccgaaacagaaaaaatagcatccatacataaaaatatatttaaaaataactttaaaatttaa

SEQ ID NO: 113694 - DNA, 1431 bp, Enterobacter aerogenes
atgaaatttgaacctcagaaaataacgattgaagattcaatggatgcaataatagattatagaggaaagacacctcagaaatcttcatcgggtatacctttaattacggcgaagatcgttaaaaatgggacaattcttcctcccacagagttcatcccttctgatgattatgataactggatggtcagagggttacctgaagtaggtgatgttgtgttaacaacagaagctcctttaggtgaagttgcccagctgtgggatacgaaaatagcattagctcaaagaatagttacattaagaggaaaaagtgggcttttgcataatgactaccttgtttatttgttacaaagttcaactatacagaatcagcttaatgcaagatcaacaggaactactgtcaaaggaattaaacaaagtgagctgagaaaaatagttttagatattccgtcattagactatcagaaatggaccgctgaatgtttacagtcattagatcgaaaaataaaaaataataaccaaatcaatcaaaccttagaaaaaatggcacaagctctgtttaagagctggtttgtcgactttgaaccggtaaaagccaaaatcgctgtgctggaagcaggtggatcgcaggaagatgcaacgcttgctgccatgactgcaatttctggaaaggatgctgattctttggctgtatttgagcaagaacatcctgaaaaatatgctgaacttaaggctacggcagaattatttccatctgcgttgcaggacagtgggttgggagaaattccagagagatggaacgtctcactattagaagatgcaacctcactaataattgaccatcgaggaaagacacccaaaaaattaggaggcgactggtctgaggaaggtcacccggccatatctgcaaaaaatataaaagatggtcggctagtacggtatgatgctattaagtatgttgattcagacttatatgctaagtggatgaaagataaacttcttgctggtgatattttaatgacatcagaagccccgcttggtgaattactgtatttagcgaaggattgcgattatttgctaagtcagcgactttacggtattcgagctaataacgagataatttctggttcatatctttatttctggttgcagactagtgctgccaaggcagatattaatggccgagctacaggttccactgttgtgggaattcgtcaatctgaattgaagaaagtaaacgttatggtaccacaaaaggctgtggtagattcattttcaaatttaacagctctttatttggaaaaaattgagtcgaatgaaaagcaaaacatcgttctaaaaaaactccgtgacaccctgctccccaaacttctctccggtgaaatcaccttgccggaagccgaggaattagcaaaggaagctgactatgtttaa

SEQ ID NO: 113695 - DNA, 213 bp, Enterobacter aerogenes
atggccaaaatgattccggcattcggacccattgataatgatagttatggagaaaaaacggtctataccctattaaaagaagggctgtccgatgatttcaccgtaattcatagtctcccatggttgagttcggcggcccggcatttgggtatgaaactacccccaagtggagaaatagattttcttgttctccatcgtatctatggtgtttag

SEQ ID NO: 113696 - DNA, 150 bp, Enterobacter aerogenes
atggcgtttttagcattccagaaaaccgaactaaaaccgatcactacttccaaaaattacagtcaaataatgttagtgctttactcgttttggattatggtaataatctccatacaaaaggtggatttcctgctaacgatcagcagatag

SEQ ID NO: 113697 - DNA, 1089 bp, Enterobacter aerogenes
gtgactccgattcggacagtgacagcgattcggactccgacagtgattccgattccgacagcgattcggactccgacagcgactccgattctgacagcgattcggactctgacagtgactcggactccgacagcgattcggattccgacagcgactcggatagcgacagcgattccgactctgacagcgactccgactctgacagcgattcggattctgacagcgactccgactctgacagcgactcggactccgacagcgactccgattctgacagtgattcggactctgacagcgattcagattccgacagtgattccgactccgacagcgactccgattctgacagcgactcggattcggacagcgactcggactctgacagcgactcggattcggacagcgattcggattcggacagcgattccgactccgacagcgactcggactccgacagcgactcggattccgacagtgactcggattccgacagtgactccgattccgacagcgattccgactctgacagcgattcggactctgacagtgactctgactcggatagcgattcggattctgacagcgactcggattcggacagcgactcggattctgacagcgactctgactcggatagcgattcggatagtgacagcgattccgactccgacagcgactcggattccgacagtgactccgattccgacagcgactcggactccgacagcgactccgactctgacagtgattcggactccgacagtgactcggattctgacagcgattctgacagcgactcggactctgacagtgattccgactctgacagcgactcggatagcgacagcgattcggactctgacagtgactctgactcggacagcgattcggactccgacagtgactcggattctgacagcgattcggactccgacagcgactcggactccgacagtgactccgattctgacagtgactcggattcggacagcgattcggactctgacagcgactcggactccgatagcgattcagattccgaaccgcaggcaaatgatgatacgcatacggcagctatcgataccgtag

SEQ ID NO: 113698 - DNA, 423 bp, Enterobacter aerogenes
atgagcgcatacgtagtatctgataaagccatttctactatcgttaaaactctggtactgaccggcacacttcagcctgtcgaggctgtttcatttggtcagatgatgcttaatctgaatacccattctgttaatgttcgctatcaagaaagcagcccggcgcacgcttttgaatatagtgaaccggagctaaatattaatgacccaaaaacacaaattcaggtgattgtctgcattgatgagtatgaatatcagtcctgcgagtttgccgaatactatgaaacgatggtgcatacagtcctcaaagctataaaatcagcgttacatgaggcttatactgaaacattgcctaatcccgcccggtggaaagctaaaaaatcctatgaactgccgggctactcagaagctgaatggagtttatga

SEQ ID NO: 113699 - DNA, 183 bp, Enterobacter aerogenes
atgtctgacacacatatgtcgttatatgaatttctaagaatgttcgttgtaataggcgtaattttcatcgggtactttttaaataaaatgatttttgagattcgcggtcatgaatcattttccgaaatggaaacagcgttactagatttttgtgatgaaatctatgggggcaaaccatcctga

SEQ ID NO: 113700 - DNA, 453 bp, Enterobacter aerogenes
atggtaaacgctctcgatcctcaccccgcttttctgcgtagtgagaatatggacattctgtactggaataaagcgactgagcataaaatatttaactgggggattttgcctgaaaaagatcggaactctctgaagttaatgtttttaaataaagagtacagaaaaaggattcctggctgggaaaaagctgcgaagcaaacaattgcctcattccgctcgtactatgcaataagcaaaaacaaagcatcctttgagcttgtaattgatgatcttcttctgcgcagtgaagatttcaaaagcatgtggggtgactacgaagtaagaaaaacgagctacggtgaaaaggagataatcgataatgacggtattattcgacaatatagctatactgccttcgccccggaaaatatgtttggtatattcttgatattttatcttgagaaaaagtcttga

SEQ ID NO: 113701 - DNA, 621 bp, Enterobacter aerogenes
atgaaaaaaatatttatctatggtgttagtggtgacattggacatcgggttgctttaatgcttagtgaatcagggttttcagtttcaggtattgtacgagacccagcaaaacagaggcgcctcaaaagtgagggaattaatgcagatcttggcaatattgaaactgccaccatagagcagcactctgagtggcttaaagatattgatgtggtcttatacagtgctggcgctaattcagatgaagaaaagaaaattgaagctgtggattacctgggtgtagtcaattcttctatggccgctgttttggagaaagttagtaagtatcttcttgtctccgcgtttccggaggcgggtagagcccggaaacgtgatgcaggttttgaaacatacatgaagtacaaaaaaatggctgatactcatttggtttcaacaaagctggactggacaatcatcaggcctggacgctttagcgatgcacctgccacaggaaaaataatcgtatccaaagctctaaactattcggaaattacaaaaagcgattttgctgaatttttaagccaaactgtccgtaacgacaggtattcaaatgaaataattgaggtgaccggcaggggggcttga

SEQ ID NO: 113702 - DNA, 879 bp, Enterobacter aerogenes
atgcctactggtttatcaaaaaataaatttatcttagctattatcccatgggtttttgtttttttgtggagcaccggtttcgtcggcgctaaatttactgtgcagtacagcgaaccttttcacttgttgttcttaagaggtgagttctcatgtgtggccttctttattatggctttaattgcccgcgcccatttcccctcgtttaaagggatccgtcagcagctaacggtcggattatttttacacacccttttcctcggtggatgcttttattctatgcacagaggaatgccgtctggtgtcgttgcgctgattaccggtctacaacccgtggccacagccatcatcgtttctgttttacataataagaaacttggcgctctgaagtggttgggtattgtcattggtttccttggcgtctttctggtcctttcaccgggaaaacaaagcttccatatggacactctggggttaattgccgctttggttggtcttgcaggagtaacgatcggttcgctataccagaagagtgtgcaaggcgatggccatatttttacagctacttttttccagtatgtcactctgactattgtcatgggtatcgcaagcatggcttttgaaacgtcaccggtacagtggaatattccctttgcacttgggctgctatggctggttctgggtgtatcagtatctgcagtactactgcttatctttatgattcagagcggtgaggctaccaaggtagcgacatatttttaccttgtacccgtattaacagctgctgaggcctggcttttatttaatgagtccataacgacaacgacgctctctggtatggcgttatctattgtaggtctgctgttcgtaatacgcggataa

SEQ ID NO: 113703 - DNA, 972 bp, Enterobacter aerogenes
atggaaaaaattatacaacgccctcgtcgacttcggaaagacaataatacacgaaaccttttccaggaaaacactctttcagttaacgatctaattcttcccgtattggttgaggagagtgttgatcactatcaacccataaaaactatgcctggtctgtttcgcatccctgaaaagcagctaccctgggaaatagaaaaaattgcgaaatcaggcattaaatctgtaatgacatttgggatatcccatcacaccgatgcttgtggaagtgatacatggaacgataatggtctcgtagcccggatggcaagggtctgtaaagatgtggctccggaggtagtggttatctcagatacttgtttttgtgagtacacaacacacgggcattgcggcgtccttcagggggaaacggttgataacgatcaaacaatcataaacttgggaaaacaggcggtggttgccgcaagagctggcgcagatttcatcgcaccttcggccgcaatggatggacaggttatggcgattcgtgaagccctggatgacgctggttttactgacacggcgatcatgtcgtattccactaaattcgcctcatctttttacggtcctttcagggaggccgcaggaacagcacttattggcgatcgtaaaacctatcaaatgaacccaatgaatcgtcgggaagcaatcagggaatcgcttcttgatgaactgcagggcgccgattgccttatggtcaaaccggcaatgtcatatcttgatattctcagagatatcagggaagcctcaaatctgcccttgattgcttatcaggtgagtgctgaatacgcaatgattcgctttgcagcagcagctggcgctattgatgaagatgccgttttactcgaaagtcttggatcgatgaaacgagcaggtgctgatctcataattagctattttgctcatgaattagtggaaaaggggttaatttag

SEQ ID NO: 113704 - DNA, 897 bp, Enterobacter aerogenes
atgaagcttagcatttcccctcagttcactggcgtcgttctcgctgtaatggctgctttcggcttttccttcaaagctatattcgtcaaactggcctatcaggctgcaccagttgatccggtgacactactgatgctcagaatgtcaatggcattacctttcattattcttgcggcagtcccggccctacgccggggatcagcgttgagcagaaaggactatgcgttactgcttatgttgggtgtagtcggctactatggctcaagcatgctcgattttatgggactgcaatatataacagctggattagagcgactcatcctttatacctatcctgttatgaccatactgatcggggtgttctttctcggcagatcgcttacgaaaaaactcttcttagctatgttgttttcctatagcgggatccttatcgcgttttaccatgacctaagcattgcgacggatacaggtgcgctgattaagggctgtttactgatatttggatgtgcgttgctatatgcgacttacagtgccggatcggagatagcaataggccggataggtgccatacgcttctctgtccttgcattactggtgtccatcctggctacccaggctcacttttttttgagcagaccagtttcatccatgattctgccatggactgtatatgcttacagtctggggatggctttgttttcgacagtattgcctattttctggctttcagcggctatctcgcgaattggtgcagcccgggcagtacttattggtctggtgggacccatgcttactattatcttcagttggtggctgcttaatgaacctctctctgctgaacagttaacaggaacgatattggttgtctgcgggctgcttgttattgttaaacgttaa

SEQ ID NO: 113705 - DNA, 825 bp, Enterobacter aerogenes
atgaacaacggttttcagagccatgtttacagcttagcgatcgacggcactgaaatgaaggttgctgcaattcatcgttctggacagggcgaacctgtactttttttacatggcttcggctccacaaaggaagattatgcggatatcgcacagtacgcggagtttaacggccaaccatttcttgcctatgacgcgcctggatgtggtgaaacacagtgcagcgacctgaatgccatcagcatccctgttcttgttgaaacagcgataagtatggcaaacttgttgggctttaaacgttttcacttagttgggcactcaatgggaggactgactgctctgatgctcgcccattcacaccctgaacgagtcctgagctttgtaaacatagaaggcaatatagctgcagaagactgcttcctgagccgccaggtaattcattatcctgatggcagtgatgaacaattctttgatgattttattttccgcacccgacattcccccgcctgggcaagtgccctttattcagcaagccttcgttacaaggtgcgtgccggcgcggttagacctatttttaagtcgatggtcgattactcagatcatggcgatcttatggccaaatttcttaatcttccctgcccaaaaatgtttatgtatggtcaacaaaacgcaactctctcctaccttgactatatatcgcagcgtggtgtgaagctggctgaaatttcagagtgcgggcattttccaatgtactccaatcctgtcgctatgtggcgccatattcgtgagctgcagatgtcaggttctactgaaccagaagctctctga

SEQ ID NO: 113706 - DNA, 897 bp, Enterobacter aerogenes
atgataaattttcgtattatccgtcacatgtggctttttctggccgtagctgaggagaagcatttcgggcgtgctgcgaaaaaactgggaatgactcagccgccacttacacagcagatacaggtgctggaacaatctcttaaagtgcaactttttgatcgctcgaaaagaaatgtccagctgacccctgtggggcaggccattcttccagccgttaaaaagtttgccgaacaggtagagaggctggaactggcgattaatgaggctgtggccgggcatacaggactgctgactatcggagcgatcagtaccgcgatgcttgatgttctgcctgcttatattaagcagatgaaagtgctgatgccggatattattatttctgtgaaagaaattgacagcgctgaagcaattccggctctttcttctggcgagatcgaccttgcttttgctcgactaacagggggagaaggacaggatattgaaacgatgccagtgtcgagcgatgaactggttgttgcactgcctgataaccatagccttgcgggtcaaaaacggatctgtcttcgttcattgatagatgaagagtgggttatgttctcccgtcatctgagcccggtctactttgacagcataactgcagcatgcaggggagaagggttttcgccaagaatcatacatgaggttcgctccgtagcttcacagatagcgtttgtgagttgtgagcagggcattgctcttgtacccacatcgctggagcacttgtctccggcgaatgtgattaccattccgcttgaagaggatattaaagttattacaacggctgtcgcctggtcgtcagttagaaaaaacgcattagccgacaagtttattgaactcatcaggacgtctaaaaattga

SEQ ID NO: 113707 - DNA, 501 bp, Enterobacter aerogenes
atgaacacaggaaagtggatcctcgcgaatgccctagcgttgctgctggctattcccctgctggcaagcatcatatttggtgttctgctttggcaaatagattctattatctttattaacaccgctttcagcctttatcttgcggccattgtggctggcgctgcgctgtttgcctggctacagtaccgtattgtcgataagccagtgaccttcataaggcgatacttacccggcttatttttactgctgtatctgctggtcgtttactttattgcgttgatatccgcggcgggggaaacgacgagccagcggtttattcatccctatttattttggctttggccgtttacgctctatatattcccctctcttttgccagggttgaattcgattttccaccgccgtgggaatatggcgcattgttaccgctggcttcgtggctgggtttgctctcctatatgttggcattggcatggtttactcgtcgccagccggttttga

SEQ ID NO: 113708 - DNA, 543 bp, Enterobacter aerogenes
gtgcgtaatccagcgccactggcaactccgcaagcgttaaaccagagctggtccatcgattttatgcacgacgccctggtctgcggcagacgattccggaccttcaatgtggtggatgattttaaccgtgaagcactggcgatagaaatcgacctgaatatcccggctcagcgagtcatccgggtgctggacaggatcgtggcaaaccgcggctacccgctgaaaatgcggatggacaacgggtcagaactggtctcgctggcgctggcacaatgggccgaagaacacggcgtgatgctcgaatttatcaagccggggaagcctacacaaaatgcctttatcgaacggttcaaccggacataccggacagaaatcctggatttttacctgttcagaacactgaatgaagtacgggaaattacagagcgcttgctgatggaatataacaacgagcggcctcatgaatccctgaacaacctgacgacggaagagtaccggctgatggctgaaaaaacggaactctcaaaaagtgcgtggaactaa

SEQ ID NO: 113709 - DNA, 183 bp, Enterobacter aerogenes
atgaagacatattacaaagtaacaggaaaaacctgtcacactatccatactgaattaagaaagattggtgatttgattaacccaatcccgaataagaaatatcacatcaaaagaatgatgaccaaaggcactcgtttattactcattaaatcaatcagtgaaagaattaaaaataaccgttga

SEQ ID NO: 113710 - DNA, 360 bp, Enterobacter aerogenes
atgaaagatactattcagaaaattcaaggaatcactacgagtgaacaggattacaaagcgcaaatacaaaagctacaggctcagttgaatcagagcaacacagctaaagcagttgaggctatagagcctctctgtaaagtaatcggcttagacgcttcacagtatgttaaagccactagcaaaatgacagcaagtagtaagttattctgtgattcaattatcaagactgcttcagctaaaattaaacagcttgaaagagctacaactgctcagattcttgatgctcagacaagacgcgataaagctgttttagcttcaaatgaaatgatggacgaattagcgaaaatggggggcttataa

SEQ ID NO: 113711 - DNA, 192 bp, Enterobacter aerogenes
atggaagatacaattaacgccccgattgattattatgacgctgaaaaacgtctgattgttggtcacaatctggttggaaaaatccaccctcaattatttgataagctggttcgtcgttcaaacgatggttcaacccgttgccagcaagcccgaatcaccagctacttagaggggttactaactaatggctga

SEQ ID NO: 113712 - DNA, 339 bp, Enterobacter aerogenes
atggctgaaacctttattaaccctgataagccgtgtattcattgcggcgcacttaaccgttatgtctcatcgggaagttgtgttgaatgctcaaagagccgtagacagccgcctaagcctaaaccaacgattgcacgtgtaaccgcttcagcagccgttgcaccgtttcactgtgaaggtggggataaccgaaataacatcattgtgaagctgtctgataaggcgcttaaccgtcttgatgagattggttactcgttggttcagaaataccgtttggcaggctacacgcaagaacgaatccgaatgattgctctgtctcatctgcttgaagccgcttaa

SEQ ID NO: 113713 - DNA, 483 bp, Enterobacter aerogenes
atggctaaaaaaacagcacccttgcttccagagactaatcagttgcttgttgagtttggtgagcgccttaagctggcgcgtctgagacgcaagcttacagcaaagcaggttgctgaacgggctggaatgtcgccaatgacactgcgttctcttgaatcagggggagctggtgtgacaatcggcgcttacttgtctgttatgcagatcttagggcttgaaaaggatctaaacaaacttgccgccgaggatgagcaaggacgcctgctccaggattccaggttaataaacaaaacatatgcttctcgtccttctgcagttactcgcacaaacaggcataccgggagtgtggtaaaacgtgatacgtccggtaagcaatccatggccccatcaaaaaaatcagcaaatgccgaactaaaaacacctgccgcgacatcagcatccttggctgcgctgttaaaaccaataaaaaatcctaaaaggtaa

SEQ ID NO: 113714 - DNA, 1269 bp, Enterobacter aerogenes
atggcaatgattggcgtgtatgcggactgggatggcctgcatggccccagacggctcggctttttgcatagtcgccggacccgtgcgcgagaattatttgaatttgagtacgatccggatgctttagccgatcccgagcttaacttcctacagcttgaccctgaaatagtcttgtttggaggagcgcagtatccaacaccaccgcgcgataaatttggggtttttggtgactccagtcctgaccgctgggggcgaatgctgatgaaaagacgtctggaacgggatattcgcgaagggcttctgcctgaagggacacaactgcacgaatccgattatcttctgggtgtgcatgatctttatcgagttggtgctctgcgctacaagttggaagatgaaggcgagtttcttgataatcgaatggatgtcgcggcccctccatttaccgaaattggcgcattagaaagagccagtcggtcacttgaggatgatccggataacagagcattgatgggccatgaatggctaagaatgctaatagcaccaggcggttctctcgggggcgcacgaccaaaggcaagtgttgcggatgacaatggacatctctatatcgccaaatttccgagtacaagagatgaatacgatgtcggtggttgggagatggttgttaacgctctggctgtcggttgtggccttaatgtggcttctgcacaagcgcgaaaattcgccagcgatcatcattgttttatggtgcgtcgttttgaccgtaccgatgctggtcagcgtcttcattttgcatctgccatgacgttgacccgacaccaggatggggatgattactcaacaggcgtcagctatctggagcttgctgaagttctcatcagaaatggtgcacagaccaatgctgacctacaggaactctggtcacgcatcgtttttaatattctggtctctaactccgatgatcatttgcgaaaccacgggtttattctggttccaggtaagggatggcgactttctgaagcctacgatataaatccggtttccagatctgatggcttgaagctcaatataactgaggcagataacgcgctggatctggaattagctagggaagttgctgaatactttcgcctgaatcaggccaaagctgatgagattattgccagcttccgtgggatagtcagccagtggagaactattgcggacagccttactcttccttaccgggagcaggaacaaatggcggaagcgttcagacgtgcaatgtga

SEQ ID NO: 113715 - DNA, 462 bp, Enterobacter aerogenes
atgtcacggatattccaagagttcttgtatcagtttatgaaaaaagaatatattggttggagtgtaaaccgaccgcatataaaatgggatgcttctagtgatactgatccagaattaaaactcttacctaggatggaaagtgatataataatgtcaaatgcaaataaaaccattatcatagatgccaaatactataaaaacatgtataccaacaggtacaatagagcaaaattccgctcaaacaacctttatcaattaatgtgttatttgcataattacgattttcaaaaaacaaaacaaaataagaacatagatggcattcttatatatccaatgacaggagatagtgttaatgaaacatatacaataaacaattataaaattactctcagaactcttaatctaaatcaggagtggaacaaaattcatgatgaattattaaatattttcatcaccccgtga

SEQ ID NO: 113716 - DNA, 360 bp, Enterobacter aerogenes
ttggcattagcacgaaatacagtatttgaggaatcaattgaaatcggatttaacagcaaaacaaaaaaagtaaaaatccccaagaagttaaaaccgttagcaataatcaaactttacgtagaatcttcaccactgacacctgacgaacaatcaataattaactctatgaatggcgtcaaatggaaaccccgccaaaagtatgctggttttaaattcaatagagagccgctcaaatttgaatatctatttgataatataaatgagtatgatggatggttagaatttaataggctcgaaaatgaaaacttcacaggcaatgatctagggctttattttgatgccccaggcatcaccgactaa

SEQ ID NO: 113717 - DNA, 279 bp, Enterobacter aerogenes
atgattgattttgaacaacacaaaaatattgtagaacagtttgtagaacagcattacccactggcacatagcttgatggtcgatacctacgctgacccatcggcatactattcaaactatcaaatattgctggcggcgatgaatacacttccagaacatccagaatatttcctggagtggctcatagaagatgaccccgcgttatatttgaacctgatggagttgattgttatcgtcagaactattcaaaacgtgtttgaacaagtctcacctgattaa

SEQ ID NO: 113718 - DNA, 309 bp, Enterobacter aerogenes
atgagtaaggtaaaggtggcgcctattgaactcgaaatagacgccacggaagtaatcaataaggtcgaggaactactggggttacttgagcttccagcccgttcccttgaaggaatccctgaggatgtcgtcaacctgctttttgacaacatccgtcccttgcttaacgacatcgtccttagtgatttctcgaccacagttggcacaactgacgccaacaaaatttgtctcaaagtcgaaatcatcgggacgcttgagcatctcgcttccgcaatcagggcaagcaactttcatcgttgtcagttttga

SEQ ID NO: 113719 - DNA, 735 bp, Enterobacter aerogenes
atgaacctttttattcgtctccccgttgagtctgcacgcgcaaccgtccaaatcccgtcttcggatattgaatattacggtgtcctggacaacacggcgtggggttactgggatttttataatgagcgctttgtttctcaggttggcggtaagacgttgaccaatatggacgcaggcaacacgttcaacaatcaccagttgcaggtaagtgcgcagctcaataaagccgtccgcagccccatgcaggacaacatcggtgatttaaccatgatgtgtgttgtaaacctgctacccaatagtcggtttaacgcaactgacggcctggtcggcgtgattatggggaactttacttctatcggtttcgtgcaaaccgagaacggattaaacttcaaggctaacgcaatagcaacgtcaacaaaaatcgcagatgtcacaaccgagggctacgcgtttatctcaatgagcctgaatgttgctgccaaaaccctgcatatccgggttgtgcaacccgccagtgggattgattatacccgcgatatagtcggcaccaacgcattcacgccagcaggtggcccgcttgcgctggggaactacggttacacgacgtaccagagcaacgtggtattcaaatactctgagttcggactctataaccgcacattgagcgcggcagaccttgaatcagcctatcaggctgctaaggtgcgctgtaacgataagggcttgagcatttaa

SEQ ID NO: 113720 - DNA, 483 bp, Enterobacter aerogenes
atgagtaaaaaaataatgcaaagtcgcaatgatgaatatcataagttaactcgtggggaacgtattggctacgggatgggcgattttgcgcaaaacctggttttcggcacaataggcggctttcttgctctacatatgttgacggtgaatacgatcagtacggccactgcggggttcatttttcttttcgtacgaataatcaatgtgttttgggatccgatggttggaacctatgtagacaaaagaacgtcagtcgcgggtaaataccgtccctggctgttaagagccggcgggccgctggtgatcctttccgctttgctttttgctcccattcctggcgtgagaggttccgtaccgttcgcctttatcatttatttagcgctggatttagtctactccctggtgaatatcccttatggttctcttaatgcctcactgacaagagatccggaatctattgataaattaaatgatgctggctaa

SEQ ID NO: 113721 - DNA, 162 bp, Enterobacter aerogenes
atgccattcacatctagcatgataaaccccggatggctggcgtttataaatcacggtaccgccttttgcgtacgtgtatgcatgaattctcgtccagaaatcgccataggcgaggatttctgcaagtacggccttatcatgaataacgacggttggaggtaa

SEQ ID NO: 113722 - DNA, 192 bp, Enterobacter aerogenes
atgtggcgaatattcaaaatcatcattctttgggttggtgggatagctgcactttgctttgtagcgtcacttgccggtgagcatgatcgcgaagattgcgagggccgcattgccaaagagctgaacaccacggccgtatacatcaacggtcactgcatggtcaaaggctacggccgtttcgacgggagatag

SEQ ID NO: 113723 - DNA, 2724 bp, Enterobacter aerogenes
atgtcggtaccaaaccagacaccttataacatctatacggccaacgggctgacgacggtatttgcctaccagtttatgataatgaatgctggcgatatcgaggtttcaatcaacggaaccccgcaaaccagcggctataccgtacagggagcagggcaaactggcggggggcaggtggtatttatgacgccaccggcaaacggttcagtagtcatgttgctacgtaaattagtcattaagcgcgatacagattatcaggataacggcgatctgcttgcggagacgataaacgccgatttcgaccgcctctggttagctatgcagcaggcgtttttaagcgatagtctgtctcttaaacgcccgttgcttggcggggattataacgcgggtaatctgaagattatcaaccttaaagaccccacggccaaacaagatgcagcaacgaaaggctgggtagacctgcaatattccgtgcctacatctgaagcgaagcaggcggctgccgaagcgaaagaagcgcgtgacgaaaccagggaaattgctgataagtttggtgatgtggatggcgcggttaccgctgctgaggccgcaagagacgcggctcaggcttccgccgatagcgcggacgatgatgcagaccgggcggaagctgcggcatctgcggccgaagcggtagtagacaccgcgggtacttatccgaatatcgcggcaggtcttgctaacaccaccgaggggcagtatttccgcgttccgcagggaagtggcgccagcatttcctttatctggtatagaaacgtagccggcactgcggtagacgttgcggactggcctggcacaggcgcagttaaaaataccgtgcgggagtacatgaccgaagctctggcgctggcagaccttaacgctgggttgatccctaatggtaccgccgtgcgggtatacctagacggagatacagccctggccgaagagttcgttaactttaatggcgtactggaatttacgaacagaaagtttgcatctcagtgggctgttgatgaccttcgaaatgacgtgaacccgcagcttgctggcataaaacattatacgggaagtagcgctgtccctattgtcgctgatgctgaaaataatattgtgctgggctacgaccaggataaaagcgaaatttacggcgacggtttggttaccgaatcaaatatcccgaaaactattcaggcagtaccgggggttaaaacatataaagggggtgacctgcaaccaattgttgccgattctgaaaataaaatattaatgtcatatgatcctcttaatgatgaaattcagggggtcgggctcgtcagcaacagcacgatgaacgatggatactcggctaaaaaattcaccggcaataatgtgtatccgttactcacggatagcaggaataaagtcctgctgggttatgacgcaggttctgatcgggtcattgcggcaggtcttgatttcactggcacagttcctgtttatattgacgatccgcttccgtttaccccactagcccgactgattaaccagattctggtttacgggcagtctctggctgccgggcgagatggcatcccgttactgtccaccatgcagccattcagcaacctgacgtatatcggcggtacgcgtggcggtggactaaatgcccaggatttcagtgcatcaaaaccgctggttgaagactcaattaacccgtctccggatggtggcactaaccgtggcgaaactgtctgctcaggcgcggctaactatgccagcctgtccgcatatgtcgagaacggaatagaccccgcgtcgcatatcatttttgccagttccgccggtaaatccggcgcgccgattggcgacctgaaaaaggggactgactggtacaacacgcagtttatggcgcacgtgactggtgttcatgcgtttaacagcgatgtggccgtgcaggccattatgtggctacagggggagtcgaattccgacggtcgaattcctgacgggactcgctcagcctaccgggggacattgcgtcaactgcgggttgattccgaggcagatattcaggcgacgacaggacagacgacgccggttccctatatcgtgtaccagcactcgaccaatatcaggacgaacacaaacaccgcgttagcgttttacgacctgatcactgagccggatagcttattctttttcgccacaccgctttatatgttcccgcatgcggatgacggactgcacctgaaagctgttgggtataaatgggcagcctgctattacggccgagcgtataaacaaatgatgtttgaccgcatccgtccgcgctttatacgcccgatatcagcaatacatgttggcggtgtggttcgggtgaaattcaatgttccgcaggcgccactggtcctcgataccgcaaaccttgcccctactcaggattatggtttctctgtctattccgggggcgtgaaggcggtgattaactctgtaagcattgaaaacggtgataccgtcgttatcaatacggctgcgtcttccttgtcgtctgtcatcgttaaatacggcatcgattatctcgggactggtctgaacattcaggccggcgcgagcggtaacctccgggactctaccccggaaacagtgattatcgacggtatcagtcgtcctctgttctatctctgtccgcatgtggaaattaacgctatcactggagaaatttaa

SEQ ID NO: 113724 - DNA, 750 bp, Enterobacter aerogenes
atggctatcaacggtaatatgttcatccggttaaataatgttgtctcgtcgcgggcgacagttcagatacctgcttcggatattgaatactacggaatccttgatattaacgcatgggcgtactgggatttttataaacaaaaattaacctctcaggtaggcagtaaaacgctggtcaatatggatgccgggaatatattcagcaatcatgagttattggttagtgcgttgttgaataaagcagtgcgcacgccaatgaatgacaacaacggcgattttacgttgatgtgcgttgttaatttattccctaatagccgattcaacgcgacggatggactggttggcgtgatcatgggtaactatacgtcaatcggttttgtgcaggcggaaacggggctgctgttcaaagccaacgcgatagcatcatcaacaaaagtcgcagatatcacgactgagggttacgcctttgttgcgatgagcctgaatgttgccgctaaaactctgcatattcgggttgttcagcccgccagcggcgttgattatgtccgcgatatagtcggcaccaacgcattcacccccgccggcggcccgttggcgcttgggaactacggctacacgacctaccagagtaacgtgaccttccgttaccccgagtttggtctgtacaacactgctttgtcagcggcagatctggaatctgcttatcaagcagccaaaattagatgcaaagataagggcatctttatttaa

SEQ ID NO: 113725 - DNA, 225 bp, Enterobacter aerogenes
atgaacaacctttcagacgtagcggcgggggcctcctacgtcacgtcaatcggcagcggcggttactggctgctccagctcctcgataaagtcagccccagccagtgggcagcgatcggcgttctcgccagtatcgttctcgggctgctgacctacctaactaacctttatttcaaaatcaaagaagaccggaggaaggcacgcgactatgagcaacaaagctaa

SEQ ID NO: 113726 - DNA, 1389 bp, Enterobacter aerogenes
ttgatagctgaactcatcaaaaattttcttaagcaagcagacgaaaaatcatcacaaagcacgtcttcatacaataaagaatatcgtaatctaaaaataacgctgagctttggaaaaggaagttacgcagatgtcccatggatcgcatttcttggtagtgggcaaacaccgtcaaatgggatttatcctgtaatattatattataaagattacaatgaattaattcttgcttatggtgttagtagtattacaaaaccagaactgtcatgggaagggttgccgcctaagaccatcaccattaatgattactttaaggaataccataataaacctgcagagaaatatggcacttcattatttcactctgtttaccaaaccaataatgaagttgattataactctctagtatctggactgaatgaagcaattgataaatataataatttaacaaacaaagaaactaataccaacaagttaaataacaacaaaaaagaaattaccacatataatttcaataatgccagcgaagatttattccttccaactgacacactcaacaagataattaaaaagctgaacaacaaaaaaaacataatactacaaggtcctcctggagttggtaaatcttttattgccaagagattggcatacctccaaattggaagtaaagatattaataaggttggtatgattcaatttcatcaatcttatagttatgaggattttattcaaggctttcgacctaatacgaccggtttcactagaaaaaatggtattttctatgagttttgccagaaagctaaagatgaccccgaaaataattatgtatttataattgacgaaattaacagagcgaatttgagcaaagtattgggtgagctaatgatgctcattgaagcagacaaaagaggccccgagtgggcaatccctttgacttattctgaagatgaaaaggacacttttttcgtcccggaaaatatattcattataggattaatgaatactgcagaccgttctttggctgttgttgattatgcattacgtcgtcgtttttcatttattgatatagcgccgggattcgatactgagcaatatcgctcctatatgttatccaaaggtgtaagcgaagaagttattaatctcattcgtaccagcatgcacaaattgaatttagagatcggtcatgacaaaaataaccttggaaaaggatacatgattggccacagtttcttttgcccttcgagtaatatcgaaaaaggattagactatgagtggtataaagaaaccatcatgtctgacattggccaactattagaggaatattggttcgatgaaccagagaaatatgaaaaatggttaaacatactcatggtaaatatcgatgaatga

SEQ ID NO: 113727 - DNA, 231 bp, Enterobacter aerogenes
atgtcatctatttattctgatgaatatcagttagttataaagttactgcgctctgcaagaattggtcgggggattactcaatctcaactggctaaatcgctgggcaaaccccagtcattcgttgcaaaggtggagaatggcgaacgtcgtttggatgtgattgaatttgcagctattgctcgcctgctttcgcttgatcccgcagaaatactgaatgcagttatgaagtaa

SEQ ID NO: 113728 - DNA, 225 bp, Enterobacter aerogenes
atgacttctatctactcaaatgactaccagatggtgattaaagctcttcgggatgcgcggattgcttgtggccttactcagcaggaggttgccagtgttttcggaaggccgcagtcatttatcgcaaaggtagagagtggagagagacgcctagatgtcgttgaatttgtgcttttttgtagaacggtaaatattgaaccaggcagtattttgggtaagttgtga

SEQ ID NO: 113729 - DNA, 1212 bp, Enterobacter aerogenes
atgtcaaaaattgcgcttaacctaagaataaaaggtgattatatagactcctttatttattctggggttttatatctccttgatactaacttccactttacctcatattcttggaatgatatttgcaatttcattttaaaaagaaatggatttaaaaaaattgatgccaatgcagtattgaattatgccaaagataatagaaaatttaataatagcgttgataatatagacactgatataaatgaaattgaattatcaacattaaaaaaagattcaattaatattgaatactggccttcagatataaatttattctccaataaattatattattcaggtgatgatggagtttactacatccaaacagatcatctaactgcgcaatttgataaatcaaataagataaataaaatttttggagtgaagagtttctccatctctccaaattctcatatgcgtgtagctctagctgctgggaatgaaggtgtatttacatcatgttcttatttcactcccaaaaacccaagggaacaacaaatttcaagaagtagttgcattgatattgactggatgaatgatttgttatttatcaattctcaggaatttgtaattaagaaatttcaaaacgttattagtcaaaatgatataaactcagacaaacaacatgaagccctaaaaattaacctatttaacaacttcgacgaagacaataaagatcaagatagtatttcaaagtcaatctataggaaatacattactcaaattctaaatgaaaagccaacatctttaaacttagagaatacatataaatatggctggtcgagtggtgattgtgactttctgattaaaggtgataatcatttattaatccacaacaagatatcaggcaataaaaaagaattaaatttcgacatagatgctctcactttattaaaagtcagaacatctggttgtggaacaattatggaaataaatgatggctctttgtactttttaactgaaaatggaagcaataaaatatctaatgattttgtatcatggcgggtatatccacgagcaaaaaatcatgcgaatcacttgcatataattaatgatgacaatattaacattcaggtctataacaacgacacagagacctctggacttaatacattctattcaaaaagtaagaatgatcagtacaaatacagactcgaagatttattaaggtaa

SEQ ID NO: 113730 - DNA, 405 bp, Enterobacter aerogenes
atgtggcgcaaactcggcatttggctgtggctcgccacccagaacctggcagattttcctgacgaagcgaagaaactgctcaatatgatcgaatggtgggaactgctggtgatgccgcctgaagagatcgatcaggtatgtcggtttaaggcgctgaccgaggaacagcggcaactcttgcgctcggcggttaaatcaccggtgcagtataccgagggcgtggtgctgtcaccccgcgtagaggcgctgtttcgggtggtgccgcccgcactgtatctggcgctggcgatgaccgagaagcatgaaaaggcggaaaggatgcggattatgcgggagatggggtgtagtgaaatagaagcggcagaaatcctagctgaaatgtttgtttctaatgaacgggggtga

SEQ ID NO: 113731 - DNA, 303 bp, Enterobacter aerogenes
atgcgccatagtttattatttctgttactgctcacaggacaacaggcttgggcctccctggaatccacccaactcaccctagcgctcaaacaactcgacggcgtgaaaacctcgctagaacgcgctcaaactagcgccagcaccgatccgcattcgcgctactacttcgactacttacaggcgcagcaggacatctccaccgttgaacagggcattcgccactaccttaccccggcaagggcacaacctcgtgcagtccaacccctgagcgccagttaccagcgggagaaacccgatgactga

SEQ ID NO: 113732 - DNA, 753 bp, Enterobacter aerogenes
gtgggctttacggttgatacggaaaatcggttagttactgttgatcactcgcataataactacagcgtaactaccccggaagggaacccgacaaccataaccttggcaaatggtctaaaagtcacatcaatcttctcccgaacaaaaggtaaaaaggccaaacgtggcgatccagcactaggcgataacagcccgatgctgtatgtgattaaaggtctgcatgacctcagaactcgccgacgtgatgtagggatgttgtgtgttagctttcgggatattttgcctatttttctggaaactggtttttcctgggattggttggtccctctaccttccagcagctcggtgtgctctcggtttgcagataaggtacatcaacggagcaaggtgggtgtgtgtcaaccaaccgcattggcaaagattactgctgaccaagttatgagaaatatcgatgggttgcggattgtgactaaggataaagctgtgttacgtgctgatgtgcgtcgtttcataagtgaccatggtccacaggcaccgttccaaatcaagtacgcgaagactcatctacgccagcacattaaccctttaatgtggggtttcattcccgcgggcactgcaccaccacgaaaagtgcttttgattgacgatatggtcacgtcaggaacctctatcgtttgtgccgcaagtacgattaaagcgcggtacccaaatgtacaaattgaagctctgacactatttggtacttcaaagtaa

SEQ ID NO: 113733 - DNA, 255 bp, Enterobacter aerogenes
atgtggttaaccaatgtaggtcaggataagttctttgatggcaatacggaaagtgagggaaaaccgggtttcgatatcctaaaaatgaaaaagggcatctttacggatgccctttttcataacaatttactgcaaattcgaatttgcattgttttacaaccttgcgtggttgccttctccgctcccgaagggtgcatacattttgatccttacgatctggccgtatacaggcgcagcgcgggcgacgttatataa

SEQ ID NO: 113734 - DNA, 633 bp, Enterobacter aerogenes
atgagcgaacaacgggccccaccttcgcctccaccacaagggccggtcggatggctattgtcactggctggacggattatcgggctggttatcggtgcgctggtgctgcgtgtattactggaactggcggggctctatttctggtggccgcaggaggggagcagacatgtttttcaggtgatgagacaagagcgggcggaactggttattgcgttacaaccgcatccgctggggaatgaaattctggtgctgctggaaaaagaggcaaatcgcgggattatggtaaacaaacttctgcagaaaccgctcaccgccctggcttatacactgttgagttttatgcagcgccttgtatggcttgccgccatgctccccctggtctgtctgtgtgcattaatcggactgacagacggactggtccggcgggatttaagacggtttggctccgggctggaatccttttttttccatcgctacatcattaaatatggctgttcagtagctataacgctttgggtggtttatctggcgcagcctctgtttctgcctgttactctggttttactacctgccgcgttatggtttgggataacgatctggatggctgcagggagttttaagcggtggttgtaa

SEQ ID NO: 113735 - DNA, 1203 bp, Enterobacter aerogenes
atgcacaaagaccccttagaaatagctagcgttaatccatgcgaagctaatcttaaaaataaaatacgagaacatttacaatctttaggatttacaaaatctaacacaggaacactacaagctcccggaaataccaaagatgtgattcgaagcctccatagcgttcagcgaagtgagcggctttgcgcaaatcaaaatttcattacgcttaaatctgccaaactcatgaagtattttgcgtcaggtaaagaggttgttcctgagaagatatcccctgtacttgagcgagtatcatcaggaacttggcaaggtgacctttttaggctagctgcgttaacgtggtccgtgcctgtttcaagtgggtttggaaggagacttcgataccttgtttgggatgaaaacaatgaaaaattgatagggttaattgctattggtgatccagtcttcaatctcgctgtgagggataaaatgattggctggaatgcgcaagacagaagctcccggctcgttaatgtgatggatgcttatgtacttggcgctcttcctccatacaatcatttgctggggggaaaactcatagcttgcctacttcgtagcagagacctctatgatgactttgctagggtttatggcaatactgttggtgttatatctcaaaaaaagaaaaaggcgcggctccttgccataacaaccacatcgtcaatggggcgttcatctgtgtataacagattaaaacttgacggtattcagtatttaaaatcaattggttataccggaggttgggggcattttcatatacctgatagcttgttcattgaactacgagaatacctgcgtgacctagaccatagttatgcggatcactatatgttcggaaatggtcccaactggcgtttgcgtacaaccaaggccgctctaaatgcgctaggttttagagatgatttaatgaagcatgggattcagcgtgaggtattcatcagccagttagctgataatgcaaccactatcctgcaaacaggcaagggtaagccagatctaacctcattgctttatgctaaagagatcgctgagtgtgctttacaacgatggataattcctcgttctattcgtaattctgagtatcgcttttgggaatcgaggaaactatttgattttattgataataattctttaagtttgcattgtttcgacgagaaacaatga

SEQ ID NO: 113736 - DNA, 1653 bp, Enterobacter aerogenes
gtggactacgccattaataagatcactggggcattagtatcagctgctcgggcatctaaacacagtcgatacgtttgtcctgtttgtcaaaaaagtgttagtcttcgatggggaaggataagacccccatattttgctcatttgccgggatatggtacatctgattgtgataattttattcctggacattcttctccttctgtaaaagaaaacattaataatatatcaaagttgcatatggagttgcgcttattcattcctatggaaagagggcgtggagaatggtcattaattttagttctgcctacttgtaattcatgtcgagcaaagattactctagatgtaggggggagaagtcagactattgatatgaggagtatggtaaagagccgtcagattggggccgagttatcagtaaaaccttatcgtatcgtttcatttgctggcgaacctgatcctgaatttgttgcgaaagtagaaagagagtgcccaggattaccctcagtgggggctgctgtattcactgcttttggtagtggaatatcgaaaggatttccactggcgcaagagttaaggtgcaccgaaacctttgcctttctttggaagagtcctgtacacccagattttcctgatgaattggaaatcaaagatctggttagtaaattggaatggaatttagcccttgttacaattccggaaaatccttcagttgaaactatactatggctaaagtcatttacacatcttcctgttgttcctgctagagcttctgttacagccatctggccattccaaattcaaaatactagtattaatcaaatcgagtgtgctcgttctaatataatattattatcggcaaatatggtatcagcagtatcatctggaaatgatggacctaccatgtatgcacaaggttattcttcattactttcagcgataggagtggagaagtcacctgcattctttactctgaatccaggtgaaagtgaattggtagggatttctggttctaatgaggaagatataagcttacttatctctttttattcgcaaactaatttttcaaaaaaatatccttcaattgacttggcttttactaagaaaaatgaagtgcgtgagatagtttcattacatcaaagaaaatgtattgacgttgcgattgaagctcgaagactaggatacaaattagaatatttatctatgcctccgggtgttaaaggaattgctcgaattaaaggagacgttgatgttgaaaatttacagctttttgctgataaacatatcgcccctcatgataaaaacatgcgattgctaccacctgatgttttatcaaagttagattattatttgtctagcttaacttgttcttttgaaatagattttgcaggtctaggtcgaatctctatacctgaatccactccgaaaaaaacggatgcagaaagaattagttatttatcgccaggccttcgaatgcggatattaagttttttattgcaaatgcgtcttctaacctcaaaggttattgttaagaatgatatttcattagtaagtgcattagaaaatttacagccagaatcacacttgttacctcattatagaactttggtaaaagaaattagggccagtgggtttcaatttaatcgcttgaaataa

SEQ ID NO: 113737 - DNA, 132 bp, Enterobacter aerogenes
atgctcctaggccactggataccaataaaggaaattccagacccttataagaaaagttacgaagcttttgaatcggtatatcagttaatcgagaaagcgtgtgatagctgggcagaaaaacttaatacctaa

SEQ ID NO: 113738 - DNA, 549 bp, Enterobacter aerogenes
atgttccggaatatagtaaagtcgttcgttatcgtttgccttatcggggtactcggtgtggggttctggtatggacgatttattccgtttgcccaacagtccccgctctttgaagcccttcgaacgactgcgtctataatattcgcagttgtaggggcgtggatggcaatcatttatccagaaagattgcgtttcacattcaaacctgatagcagcaaaacaactccaacacctgttaatatggggaaattattacatcctgctgtaaactcaacctttattttgtgcattgtcctgttggtcggagttttagcccctttgataaagcaaatcccttttttacttccttacaaagaaccgcttcgaggcatgtcatttagtttacttatggtgctgacattttggcaaatttggactgttattttaacgttggttcctgctgatatgattaagaaaaaagtagatcaagaaaattctaaagtagccggtcggaatagtttcttttcgcaaactcaacaaggtgataataagacaaaaaataatccctga

SEQ ID NO: 113739 - DNA, 1050 bp, Enterobacter aerogenes
atgagcgagccggttaaatttagtttttatcgagtacatgaatgtggttattactcatggggtaacagtactcctgtgtttggttctcttcaggagttactaacagatctttatctttggagtgcggataagagcatagaaaacacaaaactttatgagcctcaagtggggagtgactatttatccacttatttacttgatatcaagagattaggtgatgattggttggttacaacttggaatgaagtaccatcaaccgaagctggcgtagcttctgtgatcagagattcaaacgtgactgcccccgatgtggttatgaaccgtatacaagataactcaattccaggttacgccacctatttttggattttaccaacctatggtttatttgccagtttacggtttaaaaatagaactcaaacggggcagcctccattcagaaaatatatagaacaggcactttcattgatatcatctcatgtgcgatatggtgaggatgaagaagatggttctaggcgtgtgattggttatgcgcaggctggggaggatttaatgacaccaagtccttctccacgttttaagacatccctcgcatatgatgttggtaatcgagagtacatcagagaaaatgctaatcgagttagcaaaattattcgtaaagaaacattgagattaaatcatgctgatgagcggcagtggtggcagtcagctttaagccgtcttggtattagtagtggcaatgattaccatagaatggatgatgtgaatgtcaagtatgagttacgaccggagttttttggattacaagatattgatttaatgatgcgtgagtgggatgattctgagcatactcgttcagattgggatgattatggctttacgtttcagggggatgccggtaaggttcattggttgagctatagtactttaacagcatctgctgaactaaacgttgtatgggataatagcgaagtcgtgaatggggaatcgctgttatcggttttaactgcgggtaaggcagagctacttcgtcaaattcgtgaggagtaa

SEQ ID NO: 113740 - DNA, 4461 bp, Enterobacter aerogenes
atgtacagaggggctggaggggcagaggtagcccttctcatacgccgcctttgtgctcggttggatattcctagggaacgtatgcgttgcatacttaccagcgctagcttgggatctattaaggatggagaacgttttgctcaggatttaacgggtttatcagcaacatcctcgcgtaagtttcgaattattgaggggacacgggaatctcgtcctgtcccacaggttgttaccactaaagaagttcacgcattagctgatttcgatctaaattcatttcagtacgtagctgaggatcttgagtcagcatgtgcagcaattgagaatcttgccgaacgaatgaactggcaaaagccaataataaaagagcatagtgaactacgaaattggctgtttgataatctcactggttttggtcctattgaaaggcttattgaaatagtttcaggtaaagcggtgaggctgaacatactaagtgaaaaactttttccagaatctccgcaggaaattgctatgcgagcgacagatgcattactcgcattaggctgctatgcccagagaaattacgatagcagagtgctaattccgacccgtatgcatctttttcatcgagggctgccaggactttatgcttgtataaatcccgagtgtaaccaacgcttaggcaaccatagtgggccaactattcttggtcggctgtatacgaaaccattggatcactgtaaatgcgcttcaaaagggcgaatttatgaattgctcacccatcgtgattgtggcgcggcatttattcgcggatatgttagtacggatatggactttgtatggcacaaaccgaatgggccattatcagagaacgggaatgttgatcttgttcctatagaaatattagtagaaggaacacctcatttacatagtgattaccaagatagatggctacacattgcaacgggacgtctatctaaacagtgccaagatgaggattcaggttatcgcaaagtttttatacctgacagaattaatgctggctcagaaattacatttgatgaatgtcctgtttgtacgcgtaagacaagaagtgatcagaatgaaccttctaaaatcatggatcatgtaactaaaggagaggctcctttcacaactttagtacgtacacaaatgtctcatcagccagccagtcgtccaattgatgccaaacatcccaatgggggaaaaaaggtactaattttttctgatggccgacaaaaagcagcaaggctggcccgtgatattcctagagatatcgagcttgatttatttcggcagtccatcgctcttgcctgttctaaacttaaaaatatcagtaaggaacctaaaccaacatcagtcctctaccttgctttcctgtcagtcctttctaagaatgatttgcttatttttgatggtgaggattcccggaaagtagtaatggctcgtgctgaatttgatcgtgattgtggcagcaatctggcccaagcttttgatgatgatttcagccctcaggagtcaccatcacgatataagatggcgttacttaagcttttatgtagcaactactattctctttctggcaccaccgtaggttttgttgagccatcaaagcttaaatcaaaaaaaatgtgggaagctgtgcaggctaagaagatcagccttgagagcaaagatattcatgcattggctgtagcttggattgataccttacttactgaatttgcttttgatgaatctattgattctacattacgaactaaagcggcaggtttctacaaacccaactggggtagtaaagggcgatttggtagagctcttagaaaaacacttatgcatcaccctgcgatgggggagttagcggttgaagccttggaggatattttccgtacccatctgacattaggaaaagatggtgaatactttctcactcctaatgcacttcgcctgaaaattgatctcttgcatgtctggaagcaatgtcatgattgtacggcactaatgccatttgctttagagcattcaacttgccttgcttgtggtagtaataatatcaaaaccgtcgatccgtcagaaagcagctatattaatgcacgaaaaggattctggcgctcgccagtcgaagaggtattggattcaaattcacggcttctgaatctgagcgttgaagaacataccgctcaactatcacatagagatagggccagtgttcatgcgacgactgaactctatgaactgagattccaagatgttcttattagcgatagcgacaggcctattgacgtacttagctgtacgacgacgatggaagtgggggttgatattggatctctagtagctgttgccttaagaaacgttccaccgcaacgagaaaattatcagcaacgtgctgggcgggcgggtcgtcgtggtgcatctgtttcaacggtggttacatattctcaaaatggccctcatgacagttattatttccttaatccggaacatattgttgcaggttctcctcgtacgccagaagtgaaggtaaacaaccctaaaatagccagaaggcatgttcattcttatttagttcagacatttttccacgaattaatggaacaaggagtgtataacccgggagagaaaacgtctattttagagaaggcgcttggtactacacgagagttttttcatggggcaaaagatactgggcttaatcttgatggttttgataattgggtgaaaaaacgtattctggcgaccaatggtgatttgagaacgagtgttgcagcatggctgccttccgttcttgatactggtggactttctgctggtgactggtttggtaaggtagctgaagagtttttaaatacactccacgggttggctgagattgttccactgcctgcagttattgttgaagaggaaaatgaagacgatgatgagactactaatggagtgagatttgaacaagaagaattgctcgaattcttattttatcatggtttattgccaagttatgcctttccaacaagcctctgtagctttttggtcgaaaaaatagccaaaaactctagaggtacttttgagctacggacagtacaacagcctcagcaatcggtttctcaggccttaagtgaatatgctccggggagattgattgtcattgacagaaaaacctatcgctcaggcggggttttttctaatgcattgaaaggggaaattaatcgggcaaggccacttttcaataaccctaaaaaatttgttcattgtgataaatgctcttttgtccgtgatccctataactaccagagtgacagcaatatttgccccatctgtggcggcatactaaaagaagagataatgattcagcctgaggtttttgggcctgaaaaggccagagagcttaatgaggacgacagagagcaagaaatcacatatgcaaccgtggcacaatatccacaacccgttgatcctgaagattttacattcaaagaatgtggtactcatattctttttactcacgctttagaccagaaactagtaacagttaaccgaggtaagaatgaagggcagtccagcggtttttcagtatgttctgagtgtggcgcagccttcgtgttcgactcctactcaccggctaaggggccacatgaaagaccatataaatatatagctgcgaaggatacaccgcgtttatgttccggtgaatataaacgtgtctttcttggacatgatttccgtacagatttgctcttattacggttaactgtagcatctccgcttgtcactgatacatcaaacatcgttgtgctacggatgtatgaagacgcattatattcaatcgctgaagctcttcgacttgcagctagtcgtcataaacaattagatcttgatcctgcggagtttggctctggttttagaattttacctacagtcggtgaagatacccagacattggatctctttttgtatgataccctatccggtggcgcgggttatgcagaagtagcagcagcgaatttggatgatattcttaccgcaacacttgcgttattagaaggttgtgaatgtgatacctcctgtacggattgcctaaatcatttccacaaccaacatatacaaagtcgtcttgatagaaaattaggtgcatctttacttcgttatgctttgtatgggatcgtgccaagctgctcttcacctgactctcagattgaaaaactgtcacaattaagttccagtctggaactggatggcttccaatgtctaatgaagggttccccagagtcaccgattattgttagctttaatggccgtagtgttgccttgggaagttacccaggcctgcttgatcgagctgactttcaacatgacgtatgtaaagccaagcaggttgatgatcatctagcctttaacgaataccttcttcgttcaaatctgccgcaagcgcatctgaatgttaggagtttgttgcgatag

SEQ ID NO: 113741 - DNA, 600 bp, Enterobacter aerogenes
atgactaataaaaataaagcaactgaacgttcgggtatacatgagaccgcgaaaagcctgaatgataatctgagaaaatatattgaagcgcagtatcatattcgcgacgaaggagtaattgctgaacggcgagcgctcttacagctagacgaaactattgcacaagctccatatatagaagcaacaccagtttatgaaccaggtatgctgtatagtgaactgcctattcctaaagcggcaagtaatgtactaactcaactatcagaacttggggttggcctatatcaacgtccctatgaacaccaatcacaggcgcttgagtcatttcttgggggcgaggcttctgatttggttattgctacaggtacgggctccggtaagacggaaagttttctaatgccaattattggaaacttggcgattgaagctgacgagagacctaaatctgcatcccttcctggttgtagagcaattttgttatatccaatgaatgcattagtgaacgatcaacttgctcgtattaggcgtctttttggtgattctgaagcttctaagatactaatggctggaagatgtgcccccatacgatttggaggttaa

SEQ ID NO: 113742 - DNA, 1029 bp, Enterobacter aerogenes
atggaatggaagtcactatcacgagacaaggcattggatatgatctcaagtgccttaaattgtcgattttctggagaaggattaagagtttcggtagtctctgaatgtttacggaatgttttatatcaatattctatatccgaaacagaagaaactaggcaaaccgtaacgtcacttcgactcactaatgcggtaaggagaaagttagcgcctttatggtcagatattgcagatatagatgatgctatacatccaggcattatgtctatattggacagtttggccgaattgggagacatgtttaagttagagggcggtaattggttaacggttgctcctcatgcggtacgaactgaccataatatggctattttgctagggggagatcctgcttgtgcattctcaacggacgttgttgtcaaatccgttgggagggttcgtctgattgagcaaggcttttgcacaggcagtattgaactctgggatgcaaatgagtggatcggcgctccagtagaaggtaatgaaaaatggtcaacaaagttactttctaaaactgtatctggctttatcgatgcacctagcgatatgaaagaagcgatcgcatatgtgaaaggaaaatgggtccatttgccagatcttcctatccatgaaaagcgtatctacctatgtagaatgcctattgatactagtttttcctattttctgggggaagttgaggctggggatctatgtagaatgaattcgttagaatcctctgacgatgctaggcgactgcgcttttttcttgacacaaaagataattgcccgctgaaggttcgtattaaaatgtctgacgggttagcaaggctacgattaacccgacgattaccaagacaggaatccaaagtgctcctgcttggctggagagaagcaggccctgagggtgaacattcaggaataacacggcatgtattccccgaagagattctacccatagttcgtagcgcttttgaagggctcgggattatttggattaatgaacctacgtga

SEQ ID NO: 113743 - DNA, 888 bp, Enterobacter aerogenes
atgaacagccagcccagaaaatttcaggaaatattccataatgacaattatgaatgtctttcatcacatgaagacgtatttaatttaatatcctcgaatctgcaggccgctggtttaacgaagagctctgcagagacagtggctcgattagcattagctacctttatttccgggcaaattattcaattcagtggctctttggctgatattatagcagatgcaatagctactgctattggtgcgccacattaccatgtatggagagttccggttggaattatttccgacactgattcctttgattttgttgagtctattgctgaatcatctcgctgcctcgtgttgaaaggagccaacctttcagcatttgagatttacggaacagcaattagggatatggttgttcagcggcaaatatattcaacaaattatgatcatctggcattgatagctacttggaagcaaggtcctgctgcatttccaaatggaggaatgctggctgagttggggccagttattgacacggatactttaaaaatgcgtggtctatcttctaatttgcctaagctgaaacctggatatcttgtaaagcataaatgggcaaatattgatgggttaaaagttgatagtgatagtgaatatattgatgagttaagagaattgttggatgaaactggattcgatggagggaatttatggaaaagaatgatccatgttttttatacttcccttataagaattcccaatggaaattatttctatgatctttattcagttttgtctttttatactcttacatgggcaagaattataggtggtcccgttgaaaaaattgagaatattgccactcgtgaattaaaaaatcatagtgaaaaaatatctgcttga

SEQ ID NO: 113744 - DNA, 2610 bp, Enterobacter aerogenes
atgacagctcaagttctccttacacagcaacaagttgcggcaatccagtatgcagtcttgggaaaggatagttttactggagaagcggcctttgacagtgtggcggctcagtttcgctctggggtaataacacaagaaaagtatatcggaaatttgattaactcatctgacggtactattttgtatgctgggaaaagtaacctagagatacttaaaacggtgtactcagcaatttatagcaccccacctagtgatagtgtgctacaggcgattttagacactactcccttgaattctgctatatatgccgctataactaacgtgctgtattacaatggttttgatagtgaaacattgtcaaatcaacaaaatttggattctgctgttaatgctatgatgttcaaggattatggatcatctagctgggatacatggagtgtcgctcttgatgctaaagagcaattggtagctgcatatctaaccttagctgaccgctccaccgatatgagtggtttggcttggtggactaattctctagcagtccaaggtaactctttcgatactgttcttggaaaaatgcttagttcttcagagtttcaacggaaggttgcaaatttaagcggtgacgactatataacacatgtttataaagcaatttatggtgttgaccctagtagtacagcgctttcagtgtatcaagcgctcggtgctgataaggttgcaattactcaagcgattattaatgacctgagaaattctacatcaactgataatacagtcgtcacaaaccaacatgccttcgagtatgaaataggtactggtttactctacaaaacaggcgctattcttacagctactgctggcggcggcaatgctactggcactgtcaacactaactctagtcatcaaattagcaatgctgaaacggccgttctgactaatgttcagctcaatgccaacgcggcaacaaccgtcaatttaaagtttgctgatcatctggataaccttgagattggtggtggcagtgcggcaaccgttaacctctcggacaatggcgtgaatcctggcgttaatatcacagtcgacaacggtagcatcacgttaaatgccagttctggtgcagataaggtactgttaaccactgatgcggttgttgcttcagctaccggtaaattcaacctgggaacgggtaatgattcgctgaaatggttgggcaatggagtttctaacggggcaaacacggtatctactgctattacggctaatggcggggatggcgttgatacaatttccgctaatttaatcactaaaaacgttgtgatgtcaggtaacgccgttacccgtacagcaactatcagcaccaacacttctcagttcaccaactttgaaaaactggatctggccggatatattggcaaggcgacagtaagttcaggttctaccgccgcgaaccacacctttgattttggtattcttacgggtaatgcggtatccgagtctagtactactggtgtgactaacaacgttgtacaggcagcgacatcaaccattggttcccaaggttttgtcctgtctggccttgccgaccaagtgcatgtaattaatgccactggtggcaattcagcacagctggaagtcacgggtaatgcaactgctgctagcagcgtggatatcactttcctcgcaaatgctacaaaccattttgatgtcaatttcacagcaacgagtagtagtgatgtaaatgcaggggcgttgtctttagtcagcagtagcactttgttaggtggtaacatcgcgttgagtactctaaacattggctctggcgggacaggtgattttgacaatattctgtcactaacaggcgcgaatacacaggtacaaactatcaatgtggctggcgaccatgttctgaatctgacggtcggtacagggtatagcaacgtccatgatattaatgcttctactaatactggcggattgaacctgacatctaatgttggcggtactggtgatggtattcttgttcagttgttgaatgctttaccgctcagcggcgtaacaaccacgatccttaatttattaggattaaatggtggttaccatttaagtgttgaaggaacttctgttgcagattccttcaatgttgttggtaacactgtagttacagggggaaccggcgaaaacctgtatcagctgaaatcgagcaccattaattctggggtgaccatctccgactttaacagtggtaaagataccatttttgatactgcctccggtttgacaatcaataatgatacttcgcacacagctatcgctgattatggtacccgagctacggatgtggtcgagtctttgttaggcaccttggttactggtattgttggtggtgtcgttggcctactggggcaaattctcggtattggcaataacggcgatctgacctctaaagttggactcgcatccgtcgtctgggctgataactcccatgaggcaagtaactacctgattattgataacaacaacgatcatactttagatgcgaatgacacagttgtttatctgaatggtcagacgcaccaacagttggttgatactctgcactatgcataa

SEQ ID NO: 113745 - DNA, 402 bp, Enterobacter aerogenes
atgaaccactccgtatcctctatgaatacttctcttagcggcaaagtcgccgcggtcaccggcgccgcttccggcattggtcttgaatgcgcgaaaaccctgcttggcgcgggcgcgaaggtggttctgatcgaccgtgaaggcgaaaagctcaacaagattgtggcagagcttggcgaaaacgcttttgccttacaggtcgatctgatgcagggcgagcaggtggataagattattgacggcattctgcagcttgccgggcgtctcgatatctttcacccaacgccggcgcttatatcggcggcccggtcgccgagggtgacccggacgtctgggatcgcgtgctgcacctcaatactaatgccgccttccgctgcgtgcgtagcgtgctgccgcatatga

SEQ ID NO: 113746 - DNA, 210 bp, Enterobacter aerogenes
atgtcatacgatattgttgatcaagatgttgtaaaaatatcgagaacaacatattttaaggggatgaaagaacttgctgacaagaagtttattgcagagaccatgatacagaactattactttattaacccggattatatgtttaatggtgatcgcttgacctttatgaagacatactatttaaaagataaaaccacaaaaataaaataa

SEQ ID NO: 113747 - DNA, 1983 bp, Enterobacter aerogenes
atgtcaaattactgttactatgcagatgatgcccttgagctagtcgaaaaatctgaattaaagaaaattatagatgaatatgctgagcataatacaaagcaaacatttgtccttcgcagaccactgtctaaagatgattcacattatgactataacaatgcaatcgtcatcttctctgctggcatcaaaccttgcttcataaatctagatgacgatgaagaaaactttgatgaatatatcgacgaatttttggaagatgtagcctatttatctgaaaaatttaaatatcgagaaaaaataggtagaaagaagaaatggcaagatcttttcatatctgtgaatgaaaatgatttttctttcgatgatttaacccttgatacaaaagagtctcggattgttgatttaatcatatctcttattgttggtagcattaatgatatgtctcgcattgatctaaatgcaaataacatccttgactcagttaagtcaaaaataatacttttcgatacagatcaaactagttttgtatttaaatccggcataggaaaaaaattcgtaatacaagggcttgcaggctctggtaaaacagaactattattgcacaaactcaaagaagtttactcaaagaatagcgaagcaagaattgcttttacttgtttcaataaaatacttgcttcgtcaatgaaaagcagaatccccgatttttttgacttcatgagggtagaaagacaaatagattggaataataaattattttgttttcactcttggggtagtagtagagatccattttcaggaatgtatcgttatatatgccactattacaacctcgctttcgggacatattcatcaggcacttttgaagggctttgcaaaagagcaattgaagaaattaaaaaatcaaactgggaaaagaaaaaagcatttgattatatttttgtggatgaaagccaagatttcccacagagctttattgaactatgtgaattggttacagaaaagaaagtatttgtcgctggggatgttttccaaaatattttcatgcctatcgccgagaatgttaaccgcgcagatatggtactcaaaaaatgttataggacagacccaaaaaacttaatgttctcgcatgcattaggaatgggactatacgaaacaccagttcttcgttggttaaaaaatccagagtgggattcttgcggttacacatatcaagaaaagaatgatcgtgtgctattatcaagagatccacttaggagatttgaagatattcctgtagattatgaaagcacctcgcttcacttaattgacagtgggaataatatttctgataaaataatagacttaattcataatattaagcgcagacaccccacacttcagcaaggagatattgcggtaatattccttgatagaggaggatatatttatgacgaaattgataggcttgtgcctaaaattgagtccactttcggttgggagacaaacgtatcttttgagagcaaagctcgggatgcaaataagttcttcatatctaatataaataatgcaaaaggtttagaatttccatttgtcatctgcttcgcaaaggcattaactcgtaactcatcatttagaaatgccctatatactatgatggctcgctcatttattgaaagtcatttaattttgaatgaatccgctgattcgccagtaattaatagtattacacaagggttagattaccttataaaaaataataaaatggatgttagaaagccttctcaagaagaaatcgaaaaacaaaatgattttatagtccttgatgaagcagtatctgtagaaggcttagtcaagagtttttgtaagagccgaggtgccacaccaagacatattgcaaaacttattggtagagttaaaagcatgttgagcgaagatgaggattatgacgcagaatatattaatggtcttatagaattagagtacccaaggactaaaaagctatga

SEQ ID NO: 113748 - DNA, 639 bp, Enterobacter aerogenes
atgacaactttttactataaagatgtacccaattatcttataaatagttttgtagccgtaagagattcatttagtaatctagaaaatttattatgtgtagtaaatatcataaatcattgtcaagttcatcgggagagcaatgggctggattttgatattgccattttgacctctggtataaaccgtattttagttaaaaaaaatgacggtttttttactatgagttttccatttcaacttatagattatggatataatttatccgcacatcttgatgattatggtattacaattgatgctgcgttcatttcttatatgaagaatgctcttgaaacagccacatcaaatgtttactgtcatgatgatattgctttatcattgaataatagttttggcttggagggattggattgcactatatatgccgacattttttcacatctattattaaaagatcatggttattttagatttgatgatgatcctgtcaatgaaaatgcaagaatacacccacggtaccattttgatttcttttgtacaaattcttcaagcgtcaagcttggtcatcctaatttaataaattcggacttcttttttgacttgtttgatgtaaataaagatcgtccatatttaacttaa

SEQ ID NO: 113749 - DNA, 1743 bp, Enterobacter aerogenes
  misc_feature (537)..(546): n is a, c, g, or t
atgagaaacttgacatttcaacgattagttctgatatcagattcgaaaagacttgcgaatcagttctcgttccagaaaagattgaatttaattaccggaaaagataatagtattggcaagtccactctagcaaaaagtttactgtggtctttaggatgcgatcctgttttcgatgaagaatggaaatcaaatgacatcaaatctattttatactttactataaataacaaagagtatttttcatgtcgtggaacccactcaataattttgggagctatcggcgatgaagctcaaagatatataaatataactggtgatttttcgaaagatttctcggatctcgtcaatttcaaaatgaagcttcctaatcgtggtgatggaaacttagagacacctcctccagcatattattttttaccattctatattgaccagataaaaagctggagttcaccttggaattcattcgagaacttagggcaatattccaactggaaagctccattaatcaaatattttactggttatcttaagccnnnnnnnnnngagcattttgatattgaggaaaatatttatgaatatagtgaaatcaaaaaagaatcagcacataaaatagaaaaatttcaaagcgcagttgaagttatagttgataactcggttgattcgcatatagcgttagataatgatgacttcattaagattcagaatgaaataaaaaatgaactttacgacttgatcgattaccaaacaagactttatgatgctcaggctactatcacctcaaatatttacgatctcgaaagtcagtatacgttagccattacttctgcaaatgaactcgaggaagattataagtttgcggtagaatccatacctactgacaatttagagtgtccattgtgtggcactcttcacgataactcactacctaacagagcgttgcttctttcagaaaaggattcattgcttaatgaggcaaattcaatagcatctaaaatagcggagcttaattcttcattgaactcattaaatgatgacgttcagtttattactaacgaaatcgatagaataaataagaaatacattacagacgacgatgtagttgaaaaagatctcattgctcaagtaattgataccatatctactgaaaacgtttcaaaaaatattcaaattaaaatcaataatgaagaccttaacatcaacaaggccaacagctccatcaaggaattaaaaaaagaccagaaaaaacttctttctaccaaagaaagggaagaactgaattcatcctttatgtccaaactgttggcaaatattgaagcactaggttcgacagggataaatcttagcaaagttaaaacacccactgattataaacagttgcttggtggtggtgctgctgaggctgctaggggactacttgcttatcaactctctatactacaacaaattcatggcgctaaatcttgcgtagtgcctcctttcgttatcgatacacccaaccagcaggaacaggcaggataccgttatgaaactgttattaaagaattaatgcgtagtgttcctcaggattatcaaataatactatgtgcaatggaaaatgatgcattaaatgaatttaaacatgatgctaatgttattgagttaaattcaaatagacttttgactgcttcacaatataattctttgaggtctgaatataaatatcttcagtcaatgattacaggtcaaagtgagaaggaataa

SEQ ID NO: 113750 - DNA, 1086 bp, Enterobacter aerogenes
atggaacgtaatgttttgggtcatgctcaaagagaaatttcaggagcaaccacatttggaaaatatgattttcaatatcattgggctctatgcagaataattgaaaagcataaatcaaattctgactacgcattattgatcgaatatcatgaggatgtcgttatcgcagactcattgtatggaagttcggcaaaatttgaattttttcaagtaaagaacactggaaaacctttcacttctgacgccttaaccaaacgagagcaaggtgctgagggagctaagagttccattctcggtaagctattaagctcatgtattggtacagactatgaagcacgaattacggaaataggtcttgtgtcctccagtggtttctcatttgaacaaagagataagaagttaaaattagacgttataacttcaggtgatcttagtgtagattgcttgtcggggttaactggaaaattaaaggatgagcttggaatatctctcttgccagaaaatctaaagtttattgttccaaaaataaaattagagaaccaagaagagtttgtcattggcagatttgctgaattagtaaatgaaatatttccaaatagtcattgcaatgccgttaatatttatagagcaataatcgatgaaattcaccgaaaaggacagaatagttacgattttactgtttgggagaaaatggttgaggataaatctctaacatctcataaggtaaaggatgttatagctgttaatacaacaagcccaaaatttgaagactttgagaaagactttgagtacttagctaaaaatgacatgaaatggaacaccttaacttatcggaagattaataaaaaaataaaacaacttttcttgcgccgaaccggacattcgtcggcttttgatatgaatataatgagaatagtccagcaggcgctaagtagtgtctctgaagaagactttacagaaacccgtgattacattgagtcagttattgtaaaagctcaagagcttaatattgaagatcaagtaccagaatatgacgacatattatgcgaggtaatttatagctttttaaaggtgatgcatgaataa

SEQ ID NO: 113751 - DNA, 138 bp, Enterobacter aerogenes
atgcatgatctgttttgtttctttttccacagcatattcaatgatcactacaaactccatttctttactatgactgacttgtctagattaaatccttatattgaatatgtctactgtataaggcaacgtaatccttag

SEQ ID NO: 113752 - DNA, 561 bp, Enterobacter aerogenes
atgcataaaatatcgttagtggccgtgggggctattttgcttgtcggttgtggagataagggagattttgagaaaacaataaataaagaaatcagtaaggagcctgtttgttattcttttaatacaaaagaaaataatagtgatgcttatgaaagcttcagcgaacccggagttttcgtcagagttaatgttcgaggaaatgatgtgagtcctatcttggaaggacttaaaaaatcgggcttaatcgatattgaattcgaacaacaagggtttacccgtgttgcagccttatcagcaacagataaaggtgctaaagcgaaattttgggataaggagcatggggcttgcgtaggtactagaacagtggatgaaataaaagagtggactgaacccagcgacactggtggtcaaaaagtaacacgggtatcatatacatggaaactctcagatattccaagctgggttgataaagatgctttctcaagcgtgaaaggagtgtcagaatcagaagaagcaaaaattattctggtgaaaaccaataacggctgggccacaaggtaa

SEQ ID NO: 113753 - DNA, 444 bp, Enterobacter aerogenes
atggaaaacaacaacgagcgaagctctatgaaaatcttcgaaaaagatcaaaaaatcgcttttgttgactcgttcagcgatgctgctttgtcttacgaatacgaacaagcgggcttcaccattaatttaatgcaacgctcggttcttctctttaaccataatataaagaaaaacgtaactgccaagcagttgcgtaaaaataatataaagaaaaacgtaatgtcttcgacattgcgtaaaaatatgaacagcacatttatatattcatatagcaacatcagggaaatcaactactcgctgcctgattgcagatccgatgatgccgagatctgtattatgactgatgatgtattaaatccagtctggacgttcagggttccatctcacgcacattatatttgcaagcaatgggtggaagtatttaataaccatattttcttatga

SEQ ID NO: 113754 - DNA, 1467 bp, Enterobacter aerogenes
atgttgagtctcagtattataggaactgatccttttaagattacagaaatattgaatgatatttcccaaaactatgttgctcaaaacatcgaaagacaagctgcacaagatgcgaaaagtctcgattttttaaataaacaattacctatagtaagaaatgatctagaccaagctgaggataaattaaattcttataggagacagaaggattctgttgatttatcattggaagctaaatcggtgctagatcagatagttaatgttgacaatcaactaaatgaactaacgttccgtgaagccgaaatatctcagttatatacaaaagaacatccaacgtataaagcattaaatgagaagagagccactttagagcatgaaaaaataaagctaaataaaaaagtatcgactatgcctgcaacacagcaggaagtattgcgacttagccgagatgtagagtctggtcgagccgtatatatgcagttgttaaaccgtcaacaagaactaaatatagcaaaatctagtgcaataggaaatgttcgtattatcgatgatgcgcaaactgaagatgatcctgtaaaaccgaaaaaagctttaataattatcttaggttttatatttggtgcaggactagcgatatcgttaattacattgaaaaccctactgcgcagaggcattgagtctccggaacaactggaggaattgggaataaatgtatacgcaagtattccaacttcagattggttacagaaaaaaacaaaagattattcaggatatttggcacttgaaaaccctgcagatatagcgattgaggccataagaagtttacgcacaagccttcatttcgcgatgatggaggcaaaaaataacgtaatcatgatctctggagctagtccaaatgcaggaaaaacattcattagtagtaatttggtcgctataattgcgcaaactggtaaaaaagtacttttaatcgatggtgatatgagaaaaggctatatgcatcatctttttggattatctaaggataacggcctttccgatatcctatcaggtaaacagaacgttgaggatgttgtccaatcattaccagtcgcaaattttgatttcctcccaagaggaaaaatacctccaaaccctgctgaacttttgatgcatgaaagattcgaaaaactaattgagtgggctaattcaacatatgatattgttttaattgatactccaccaattttagccgtgactgatgctgcgattattggcagaactgttggtactactatgctagtcgcgcggtttgaagttaataccccgaaagaaattgaagtcagtgtaaggcggtttgaacagaatggcgtaaatgtaaaaggatgtatactaaatgccgttgtgaagaaaacaagtggatattatagttatggttatgaccactatgggtattcatatgacgatgaggaaaagaataacaaaaaataa

SEQ ID NO: 113755 - DNA, 636 bp, Enterobacter aerogenes
atggctccattatggttcatacctgtgctggtattaatattcttaacctccaagcccttgtcagtattagcgataaaacaatactggctaaatttttttgccggtatttccatatttgtgataattttcacttctcgccctgagcataatttgaacccattcctttcctatgttcactttttaccggtatatattattgggatgttcatatactcgaaaaaagacattctcatcaaaagagattacaaaaatattttcctgtttaactatttggtcttttttgccttttgtgttttttttgacctaggtgcgagctactctataatatcgaagattccacttttcttatatttatgcaccgttcttgatcgtgagattaaaaataatacggttgctatgattttatctgttttagctgatattagcttcactatctattttattcatggtgcattcatcggtgtagtaagaagaactgttaattctattgcgaaacactttcagcatgaaatcagtaatatagaaggggtttttatagcgctattagttacaactatggttatctcagtaattactatctttagtttggtgattaaaaaggccactacacattctaggatgtttataggttcttga

SEQ ID NO: 113756 - DNA, 129 bp, Enterobacter aerogenes
atggttatctacatttatatgtttttgatgaactttcttgctattaattcctgtatttgtatttgttgttatttacctaatgtctgttttgattttattattcttataatgcctttttatgtcaattag

SEQ ID NO: 113757 - DNA, 243 bp, Enterobacter aerogenes
atgattgatgaatttcatgtgttgtatatgtataaaaaaatccaagccgaagctgcggcaacagatatgaaaacactggaacagcttttgaagaagttccgtaaagttgttgcggagcgccgggaagaatattatcgggagattggtgagaaaaaggctcagaatttgagggctaagagattacaaaagttgcttgagaaaatggcgtgtaaccgggtttctccagaagatctacaggaatga

SEQ ID NO: 113758 - DNA, 312 bp, Enterobacter aerogenes
atgaatacggatgataaaggtagaaagccgagatcagaaaaaaccattaagcaaaaaatagcatcagctcaaatgcgtctgaatcgccttaagagtaaagaaaaatctctatccaagagcgcagagacacgcctaaagattattttaggtgcagaagtggcaaaggccgttggctgtaaagtggatgatgtcgataaggagtttgtgttgggggtattattacagtcaaaaaatgttagtgctgaggatagggtcagatttaaattacgtggaaaaaggtttcttgaggatatgctcggaagacaggaataa

SEQ ID NO: 113759 - DNA, 213 bp, Enterobacter aerogenes
ttgctgactggcttgttacatatgctggtgctgagcgtgttattaaggaatttgttgacctttatcctaaatctgaattatattctgtcgttgactacctatcagatgaatcgcgattacattttcaaaataaaagagctaaaactacattcatccaaaatttaccttccgctaagaaaaagtatcaaaaatatttacctcttatgccgctag

SEQ ID NO: 113760 - DNA, 993 bp, Enterobacter aerogenes
atgtcgttttctacgaccacggtgcgcgccgtcgccgtgcctggtctcttgttacttttagctctcgcgattgcgctcagcctgcttatcggcgccaaacctctgccgccttcggtgattgtcgatgccttctccggcagctgtcagagcgccgactgcactatcgtactggatgcccgcctgccgcgtacgctggccggattgctggccggctgcgcgcttggcctcgccggcgcgctaatgcaaaccctcacccgtaacccgttggccgacccgggcctgctcggcgtcaactccggcgccagcttcgccatcgtgctcggtgcggcgctgttgggcatcacttcgccgcaggagcagttgctgatggccttttgcggcgccttcgccgcgtcgctactggtcgcgtttaccggcagccagggcggcggccagcttagcccggtgcgcctgaccctcgcgggcgtggcgctggcggcggtcctggaaggcttatctaacggcatcgccctgctcaacccggacgtgtatgaccaactgcgcttctggcaagccggctcgctggatattcgcaccctgcaaacgctgaaaatcgtcctgctaccggtgctgattgccgccgtggtaaccctttttctcagccgggcgctgaacagcctgagtctcggcgccgacaccgccaccgcgctcggcagccgggtcgcgcgcacccagttaatcggcctgctggcgataaccgtcctgtgcggcagcgcgacggcgctggtcggccctatcgcctttatcggcctgatgatgccgcatatggcgcgctggctggtgggggcggatcaccgctggtcattgccggttacgctgctcgccacccccgccctgttgctgtttgccgacgtgcttggccgcctgttggtgcctggtgaattgcgcgtttcggtggtcagcgcctttatcggcgcgccggtgttgatctggctggttcgccgtcagccgtga

SEQ ID NO: 113761 - DNA, 783 bp, Enterobacter aerogenes
atgtctcttgatttagttatgggtgattctgtttttgcatcagggataggtattgatgttcctgtatcagaaaacctgctttcttttggtcttggcggcgatcttttcggtgtgaatcttgtagaggatggcgtgcaaccgacaattgtcggtgcgcctgccagactggacgcatactcaacgctgcttggtccgggagggtatcttgatctgaatattaaggagtcggaaaatttcacttattttgcagtgttcaaactttggaattctggtgggggcggaaacacgcagcttataggcactttccaaagttatgcagcagatggcactacaacggtggttggctcgggaattgttcttgaggctccaggatatcgggatgtgatctgttcaacgtatgacggcggcacgggttcatcgtctgcaaacaacgttgtaataacggatgtttctgatctgccgacaactgaagccacagcctcctggcgatgccttattggctgctatgacggtactggtattaatggcacacctcgactcaagcgaattatggataaaacttccggaaaatctggttcctcgttgacgccaacaggtgtggttcgtgatatgcgcggggcttcaactatccgcgtgggtaataccggaccacgtattactcaaacaaaatcgcttgcgtttatggggtacgcctattacgaccgacagttaacagattcagaaatgaacctgatgtataaccgttttaaagatattggtgaagttcaggggatgccactataa

SEQ ID NO: 113762 - DNA, 261 bp, Enterobacter aerogenes
atgaaatctaaaaaatctgtttttattgaaggacgtatcctgtcgaacagctgtcacgggcaggctggccaacctttctgtattcaccgggtcaggtttagtaatggtaaatatgccattatccgggtggcatccgggatatgtttcaaaccaggcgaaattattcaacgaaacttcgccttctttcttttgagtaccttgatgatgatgaatccagaagacaatttcttgaatatcaatgaaaaacccatgaagttataa

SEQ ID NO: 113763 - DNA, 1863 bp, Enterobacter aerogenes
atgcttgagatccaggccagtaaaattagcaacgtaatttcgtttacggtggataagaatagtcttagagaggccaagcaagcggggaaggacttacagaagtattttcaatccctggcggagccaaaactgaggttccaggttcagaagcaacgtagacagaaagtgcgtgagcaggtggcagatgctaaagcggctacaccaaagacttctaacgacctgaagcaacagcgcattgctgagaaagcggcgaaagcgcaagccagggaagcggcgaagatagccaaacgaaacgagacagccgatctcaagtttcgtagtgctaatctccagatgaaaggcatcgctggtaagtacggcattgatccggctaaacaataccagtttgcaaagtttgcgcgtgagcagacagagctattccgtaacgggcagatcagcagccagaagatgaactatgagctacgcgagagaatcgccctcatgcgccgtgaggctgcgttacaagctaaagtgacggcatccactcaggcacaagcggcagcgctgaaacacgccaaacgcacggactatgcaggggctgcaaagggtatcaaagagcgtgggctgaatctgatcggcggtggtgctggctttattggcgctacagcggcattagcgggtggggcttccatcctgggacgtgtacgcgagactgctgacgacaatctgaacctgatccgtaaaagtaaagccgtggcggtcaacccaaacgcgattcgcaccattgtcactgcaaaccgtcaacgtggtattgattcaaactacgacaccattactgacaacttcaaagatgtccgagaaaggttgggggagtccgtcactaataccactttcgatcagaagtctgggaaatttaaaggcgggaatggggcgattgataacatcatgaatttattcggatggaacaagcagcagatcgcacaataccaggataacccgttagacttcgtgcaagccgttaccaacgaagggcagcgtagagggatgagtgatgcgtccataggccacctcttggaagacctcggcaatgacatgtcctacttggtgcctgtgctaaagaataacggtgaggcgttcaatagcaccctcaaaatgctggttgataccggacaaactctaaatgatcagcagattcaggaaacctacgcctggggcgacctcagtacgacattgcaagctgttaacaatggctttaatcagaatctaacttccggctttcttgaagggtttggtaacgctggtaaggatttagcggagaacaccgccgccctgaacgagacagcaaaatcattaggctctgggcttggaaacctgttagcacaagtgacaggcttcacgaaggaaatcactgatgacctcagcaagtttaacggctggatgaaagaaacattcccttctctgtactctgatcctaaccaaacaccggaagatgcgctctatcataaagtaacgtctgatagtgccaacagtgcagcggattggattcaggataagacgggctttgatactcgaagtgttggccccgctatcatggattggttgggcgttggtggtggtaatgttggtacagccgcaagccaatacagcctttcaggtgattctctgcgtgattctgcaatgtctcttggtggtggcaatgcgccagcgtacacgctgaatcctacattcaacctcacagtagcgccgtccgtaccactgacgatccaatctgacactggaagattagctgattacatcgacttcaacgctaaagcgtcagcagcaagtttcgaacagtcattaacgttagcgattagcagcggtcaaagcagcacaggcgggtga

SEQ ID NO: 113764 - DNA, 1032 bp, Enterobacter aerogenes
atgactaaaatcgcaattgggcgtgaacaggttaatttagcgccaatcttccaggccctaccggaacgtaactatctaatgaatgcactcgacctcttcgacggggtaggcgttcagaatccgaaagtggtggtgacacagcttcttgatgataactacagcctgtttaacaccccgcagagccgttattcatcaaaccatgacactacagcccgtcaaaatgggaaagagtatcttattgaaattccttggtttgcaaggggagacgagttcaagccagtagacgtacaaagtaaaagggtacaaggcacggactacgaacagaccgtaactgacctgtacaccgaatacaccgggaaacataaggttgcttatctccgtacccgtgaatcttacctggcccgatgcctgttcaaaggtgaagtttatacgcctgcaactgatgacctgctgatctcttatgctgaactgttcggcgtagtgccaatgaccgccagcgtgagcaccgcgacagcggcacaagattttgatgccatcttagacaaagttcaggctgccgcaggtgggctggctggtcagattgaacgtgtgatcgtattcgctaaacctgctgcatttagccagattcgcttctctgacagtatgtctaaggcgttccagtatgtagcgccgtatgacgaccgtaacctattctaccagcgtcacgagcttctaccgggtgtttcaacctttagcctccctggtgcgcctatcgacattgttaaagtgacagatccgctgatcctggcacagatgccagatgatgctgacatggtggcggttccggtgttcagtaaaggcacaaacgcttatcagaacatctacggcgctgcctccggcaatttcgcgctgatcgatgctgcacctgctgaatactactcttggggctacctgagcgagcgcggcgatgcgtaccacgtcatgcacgaaaacagcgcattgcctgttaaccatgcgttaggtatgcaggtgaagatcaccatcacagcttaa

SEQ ID NO: 113765 - DNA, 357 bp, Enterobacter aerogenes
atgattgacctaaccgaacttttccccattcgtaaaagtttcacggacgtagtgagttacgccacggattcttttgcagccgtcgaaggtcgtgttttcgacctgccagcggaaattcagtgcggcgatgttattggggccgatggcgctctgtacacctccggcgctgatgcctttgtagtggtcagtgaatttgtcagtgctggcgacggtaaaaccgtaaacgtcctacgtgcgccaaatgttggcagcttcgtagcactgaaagccgacaatctgaatgcagcgaatcacgccgcagctatcaccacgctcgaatccaaagggttcgtatgccgtccattcttcacctcttaa

SEQ ID NO: 113766 - DNA, 216 bp, Enterobacter aerogenes
atgttcttattaaacaatcgcgaccgaatcctaaaatacaaaaatgaagtgattaatgttaatcctgaacttattgccaaagtggctgaaatggcaggatgcaccgttgaagaaatagaaaaagctgtagaacagtatttcccttctgaggatacacctcaaataagtatgcaggaacggatcgcaatcaaatcaaaggaaataaaacaacaatga

SEQ ID NO: 113767 - DNA, 303 bp, Enterobacter aerogenes
atgactaaaaacgagattgattatgcactggacgaatttcacgatgattatcacattccgcttcttgatgcagtgaacgcagtatacaaagcaagtcctgagaaagcgcctgagagcctctctgacgctgttaaaatgcttcacctgtcagcggcagcgctggaagggtttattctctctgtggagcgtacagagagcctacgcgaggatcaggagctggtaggagaggttacacagatggcgctgtccctggcagcgtgtaaggacgaactgagcgatctgctacaaaacgaaaatgaataa

SEQ ID NO: 113768 - DNA, 279 bp, Enterobacter aerogenes
ttgatccaatacttagtgaaatacggcgttgaccgtattcagattaacgacgctggaaagcgcgtgttagaaaccctgcaatacttttacaaatccaagccaactaagatccgatacggtgacattatcgaacgatctggatgttcgcaaggcggcataatgttttggcttcacactttaaaatcattcggtgtgatcgactttaaagaagttgactatttcgacgtgacagtaaaatcaatgatctcggattatgagatcatttattcaaacgattaa

SEQ ID NO: 113769 - DNA, 921 bp, Enterobacter aerogenes
ttgattcaagcatacgaagacggttatttttacagagataccctgcaccacgatcaccgcccactttcagatttttccacgcctacccaaatactcgtttctttagataatgttctttacgttgtcatagaggaagacggtgaaattcttcactacgactcgacagagtatttgcttggtggtggcattgttcaggatctgcatttgagctactcgacagcagacaccgctaaatcaaaacaggcccaccgtgaatacgctaataagttgggcgaccttcctgggaatgcagcctataacgggatcaaggaatacgcagacgtattaagtaagccagatttcacaaaagtttttgcattgtgtagcgaagttgacaggcgaaacttagcatttattaaacgtgcggatctatgcgcaatacttaacaccacgccggatcatctcaaccgtgttttatctgctcttgaacgtaagcactacatcaaagttgataaagctgaacaccaaaaaggcgtattaaaactgtgggttaatccttcgtttgtctggaagggtgattcagctaaccgctacttatctggacatttacagggcttcccaatcttggagcgtaaacgccccacaaaacgttctgacgtcctcgacacgctcacggcggctgcaatggttgcttatgatgcctggtacattgaacacggtcataaggctaatcaaccttattctaatgaatggtatgcagagatcacgctctacgataacgcccacggcgaaggggtgaggcttgcagcagaaaatcagacgttgagcaagttattgaacccggcaacatctgagagtgatttcattcgtgcgttattcacccctgcacaataccaagcttatctgcaaatgtttgcaaaactacaaaggagaatacattga

SEQ ID NO: 113770 - DNA, 228 bp, Enterobacter aerogenes
atgagatggacttataagggggaacacatgaaaaacagcttactggtgctaatactggcaatgctcccagccctcaccgctcacgctgggatcacattaactttgacagacgaacaggagacagacaacacgaagatctgcatctacagtaacgccaactttacggagacactggcggttaagccgtccgagtcttgtaagtacacccgtacatttgaggaggagtga

SEQ ID NO: 113771 - DNA, 1101 bp, Enterobacter aerogenes
atggctaacgacgtttatcaaagtcagaaatgcactttgcgcttctcaaaaaaagctatcgacagatctgctcaagcaatcagacatggttgtgttaacgaggaacgccaagctgctattgagatgatccaaaacttcagggaattacacctttacccgttaatgttaatgaaaaatcatttagcgagaacatccgccaaagtgaataaaaaaataattgttgctcggcgattaaaacgccttccgactattatagataaacttgaacgcccaacccttgatggaatacacgaaaactcgataaaattaacacggatgcaggacattggcggctgtagagcaatcgtaaaaaatcttgaacatctaaaattattacaaagccgtctcgaaaagagtcgttcaatacataccattgttcatactgcaaattatcttacacccaaagcaagcggatacggtggagttcatctaatttacagttgtttccatgaaggtgacgataataacgcgtggaaaaaaacgaagatagaggttcaacttcgtacagaactacaacacgcctgggcaacaagtctggagatcattgatacacttgaaggttataagctgaaaacatcgcaggaagggcatgaagactggcgtagattattttatctagcaggatgcttagtcgcccatgatgaaggtgcatgtattctttcagatgagaccttaaaatcacatagagcagagctatctgacctgcatcacgaacttcaagtaattagcaaattagctcgttactctttagccttgcacttcacaaacaatgataaatcagggttaaaaacgcctaaacactttaaaggccattttttgattgaaataggaaaattttcaaaaaataaattccccattagagcgcgagctttcaaaatgagcctctcgggccaggctttagaagcattagcagaaagcgaggctaatgaagaaatagtgatttccgtactgctttcagctgaaaacgtcaaatcattaaaacgagcctaccctaactattttggttctacagaattattttctaaattcttgcaaaaacacattgatgcagttcaagaataa

SEQ ID NO: 113772 - DNA, 261 bp, Enterobacter aerogenes
atgagcatctacttcactgaacatggcagcgctatcgaataccaagtcgaaggacgttggatagtcaagggagattatttgcaggtcaaccatggccccaacattccaggcggcttgtacaaaatcaacgacaataaagtgagattcccattcgactacaaagaagtggaaggtgttatcgatacagagaaactcaccttcacagtgtgtggtatccaatacaaaatgagaaaaataaaatccaatccgtgggacgtttag

SEQ ID NO: 113773 - DNA, 327 bp, Enterobacter aerogenes
atggaaaaagaacactttaaggctgctgcacagtacgatgattggaaagggagcgttgcagcggatggcgcagaccaagacgactttagcgagttcttaagagtaaagggaatcctcaagcaagatgagattgttaaaggaatttcattttattcagcagagcgtttctttgatgttgaggcgtatgtaactgacgaacagcacggcttacgcagagaaagagtaaaaatgactcttgaggaatttttcaaaacgttcaaacgattttctattaaaatttctcgtaaaggggaatttgacaatcaagaaatcgagttcaaagagtaa

SEQ ID NO: 113774 - DNA, 723 bp, Enterobacter aerogenes
atggcaacaaaaccaaatcgtgctttgaagtatggaaaccagccgataaggattactactgttcaagtagtagagaagttgggaggggctgcaacaataaagcaagttgatgcttatcttagggaattgtatcctcactatcgggacaacacgcgctctaacttggttattaacaccgtcaattgcaatagaagccattggccttgtaatgaagtagccagaagaacagatgacacgactcaccgctaccatgagtatgatcgcttattcaagcgagggaacattttcgagatttatcagccctctgtgcatggtgtatgggagttgtaccaggatcaacagggtaaatggtgttaccgtcaagtgaagtcggagtttgaagaagcagtagaagctgctgctaaattaccctcttctatacgggagcagattttagctacggaaagtaaaactccagaaataaccgaagtcacaacacgagtttataagcgaagcccgtatgtggttgctgaagttcttttaagggctaatggtaagtgccaaagctgtaagcgtgatgcacctttcctgaaagaagatggtacaccatttcttgaggttcaccacatcgagtggctttctaaagggggagaggattccgtgggaaatgccatcgcattatgccctaattgtcacaggcaagcccattatggtgttttggagttattgccaattaacaagtaa

SEQ ID NO: 113775 - DNA, 1308 bp, Enterobacter aerogenes
atgaggttaaaatcgcttccgtacaccttcaagagatacggtaactactacatccagatccgcttgtctgatgggcggtcatacaaaaaatcactgtctactgacagctatcgtgaagcatctgctttgatgattagcatcattccgcacatcccttttataaaatcattagctactccaatccctatcttcgaaaagtttttgtcagacttgatcgcgtcagaacgcaggattgcaagaaatccactcttaccccaacagcagataattgttccttctgaactcctgaaacctcagccgccagctgaaccggaaaaagtgctaaccctatcggatgcatgggcgatgtacaaaggcgaaaaggggcgcaactggacgaaatcgatctcaatggcaaatgagcgttacatggaagtgttgctaactgttttgggaggggaaattgatgttgcggcgatcactaagcaggacattaaacaggtgatggaagttattgagaacctccctaagcgagttgtgcagccttatcgctcaatgaccattcagcaattgatagaatgtgatgacgtgccaccggatgagctggtgggtgttgaggccatccataaacatctcaagctgtataaatcagtgttcaaaacttttcttactgagagcaaagacattctttcgaagtcgccaactgatggcgtagtggctgcaccatcgaaagccagatttggggcatacagcatttccgagatgaaaaagtttgtgggatgggcgcgcaagcagcccgacaactggcaaaaatgggtcactttgttgttggcatacactggggccagaaggggagaaataggaaggctggagaagtcacagatcaaattcgacgaagacagtcagcgctactacttcctgattgccgaaggaggtcaggggaaaaccgaaaatgcaacaaggcaggtagtcattcatcctaagttaattgaatggggtttcatggattacgttaatcgccagtggaaagagcggattttttcagaagtggcaggtacgaacatgacgaagatcggcaaagttttagctgatgttcgtgatcagcttgggattccgtatcaggatgactacgggcagcgccgcttggtgcatagtttcaggcacacaatgatttcaacctgtttagctggttgggtaggaaaccttgcgcacttgcaacaggtggttggccatgagaaaagcggagcaggcatcacccagcgctatctgcatacattccccttatcctcagtttcttatgtgattgacggcctgtgctgggaatcctga

SEQ ID NO: 113776 - DNA, 693 bp, Enterobacter aerogenes
atgtcagaggcagtgtttttcgtcgagaatgctgaagagttggcaaaacagaaaatggataatattaatcctgaactttctgaaaaattccagctcttaattaaatttctttcaagatttcctgaaagttgttcaaatccgcgttcgaaacaaattagaaaaaactttggtaaagaagaacatatagaatatttagctcaaaatttcaatgaaagtcggcttccgaaaaaaccaacgccacctactactatccctgatgaggttgtcagtttagtccttaatgtaagctttgatataccgcaagaaaatctcaataggattaaagaagaacatcgactctctatggcttctgaaaatattgttggagatcttctggaaagatatcttgctgaaaaattagagccatctggatggatatggtgttcaggaacaagtgtaaaagcagtggattttattcattatgacaatgaaaaagatgagtgggggcttctgcaagtaaaaaatagagataatactgagaactcttcaagtagcaaaattcgcgacaatacgccaattaaaaaatggtttagaacattctcacaaagagatgctacaaattgggagaatttccctgacgaagtttcatccaaagacctcaatgaggatgattttagagcttttgttgaaagctacttacgaaaaattaaataa

SEQ ID NO: 113777 - DNA, 1587 bp, Enterobacter aerogenes
atgatgccgattaactatagattagtgagtaaactcctaatcaggggtagctcgcatgacaagatacatatgttgagtaggcccagagggcacagaaggttggtgttattcagccgttattcaaatcgctgtaataattttattgactacaaaacgcatttggtacataattttgtttccaattggaaacaaaaagaatgcttgataatgaatgacatcattaccgtaacagaagcagcacagttgcttgagctaactccacaacgtgtaagaactatgtgcaagcagggtagcattgatgcataccaatccggtagaacttggttaataaaaagttcgagtgttgaaaagttgatgcttgttaatagcctaagcgatgctcaaaataaccacagcatgttggcttctgagccaaaaaacaaaccaaaagcgttaagttttttcagtggggctatggggctagatcttggtatagaacaagcagggtttgaaaccctactagcgtgtgaaatagataaagccgcaagagatactattttatctaataaacccgacatggctcttatcggagacattcgtgattacacaacagaggatattttaaaattagctggagtttcttctggtaatgaaattgatttgattatgggtggcccaccatgtcaagcgttctcaacagcgggaaaacgtttaggtctagaagatgagagagggaacgttttcattaaatatttagatgtcgccttggatatcagacctaagtatattgtaatcgagaatgttagagggttattatctgcgccaatgaagcataggccgcacaatgaacgtggtgaaggtttgccacctttaaaatctgaagaacagcccggtggagtacttcattatattatcagaataataaaaagtgcaggatactctgtttctttcaacttatataactctgctaatttcggtgttcctcaaattagagaaagggtaataataatatgttcacgggacggcagcagagttccctttctacaaccgacacatagtgaaaacggtgaatatggccttccaaaatggataacattgcgtgaaactataaataatttaaaaaatatcacccatgagcatgtgctattcccagaaaaaagattaaaatattatagacttttaaaagaaggtcaatattggaaacatttacctgaggatttgcaaaaggaagcattaggtaaatcgttctttcttggcggaggtaaaacaggtttcttacgacgggttgcatgggatcgtccatcacctacattggtgacgcacccagcgatgccagctactgacctcgctcatccagatgaattgagaccattatcagttcaagaatataaagtgatccaacaatttcctgaagagtgggttatcaaaggtaaacttctggataaatacagacaattgggtaatgctgtgcccattggtttaggattggctgttggaaaaaatattttagatcatatgaatggaagagaaatcgagtcattcccaaattttcgttactctcgatataaaaacacttctgacttagatatatttggagagttggtctaa

SEQ ID NO: 113778 - DNA, 312 bp, Enterobacter aerogenes
atgaatgcggatgacaaaaacagaaatcaaagaacagaaaaaaccatcaagcaaaaaatagcctcagcgcagatgcgtttgaatcgtctcaagatcaaagagaaatctttgtccaagagtgctgagacacgcctgaagatcatccttggggcagaagtggctaaagctatgggctgtaaagtagaagaagtggataaagagataataatagggctgatattacaatcatcgaatattagcattgaagataaagcaagattaaaattaagaggaaaaaagtttcttgaggatatgattgggcgacaggaatga

SEQ ID NO: 113779 - DNA, 660 bp, Enterobacter aerogenes
atgaactctatctattgggtgattttcatgggactgctgttaaacataccatcactggttcctgttttgcttctccataagagtcaaaagaacgtgaagatatctattgcgatcagactgtttctacttaacgctttcttagtgctgtcccttgtgacgctatcgcaaaatatcacgcaaaactacgggctgtttccagtatggctggtgttagctgcaatagtgctgtttgcggtcacgctagtaccaacggtaaaaatcgtgcgtaagcatttgactgttaggaaaagtcgggctgttatactctcatcattcctgattgtctatgctgtcaggtttcatggcgtgttttcagatttgaatggaactggatatacgattaacggctataacacagtatggacatccttctttctgtttgcctgtctactggcttatctcggttgtgctggacgtaaaacgtattctggttcttctgaatcgtcatctgcaccccaatcagattattttaagccgaacaaagaatatgaaacacaatctcaaattgactacgatattgctgtgaaggggcggagtgttctatctgatcccaatctaagcattcttgagcaacagcgttatcgggatgctcttgagaaaaaagaaagagaagattggtaa

SEQ ID NO: 113780 - DNA, 321 bp, Enterobacter aerogenes
atgaaccagcgagaatcccatagagacatcttttgtaagcgtttaaaagaagcgcggcttgctgctggtttgtctcaaaagaagctgggcattgcagccgggattgacgaatttgtagcaagcacccgcattaaccgatatgaaaaaggagtacatgaagcagatatccataccgctcagaaattagcacagacgctaaatgtcccattagcatatttttatgtggaaaatgatcaacttgctactattgtgatgaattttgataaactatctgagaaagatatagaaaatataattatcaaaatcaaaaaatctaattag

SEQ ID NO: 113781 - DNA, 351 bp, Enterobacter aerogenes
atgaaagagattatattgaacagtaatgaggaaacaaacaacaaacttattgccaacatcttacaagtatactgtgatgaaatatatgccatttatgaaaaacatcctgaaacagcaatcgatattttgaatgatggattcctttcaagcatcacatatgatgttttgataactcgtgagatgaagaaatactctatcaaaaatgatgtgtctgatattaatagaagagatttaaaagccacaatattgtattggcatcaagaacacatcattgaacttgtttcaaaaaatataaatcaggatgaaaatgaagatccgatttactggaagctaaaaatgacagttgtttga

SEQ ID NO: 113782 - DNA, 240 bp, Enterobacter aerogenes
atgattgatgaattccacgttatgtatatgtatagaaaaatccaagctgaagcggctatcactgatataaagacattgaaccaactcttgaagaagttccgcaaggtagtagcagaacggcgggaagaatactatcaggagattggtgagaaaaaggctcgtaagttaaaaataaaaaagatcctcaaattgatggagaaggataggatatcaccagaggatctcattgactggcagtag

SEQ ID NO: 113783 - DNA, 681 bp, Enterobacter aerogenes
atgaagccgtatgcaccttatacatacaaaagtaaaacagataaagtaatcgacaaaatacatggtagattgcttgcaattgtaattattattattgctgcgctgtctttatgcattgctttatataagttaactagtttcgctaaaactgatgtaatggtaaatgttatctatggtttatattttactataacgtttatagggctaatgataatgatattgccacctatcttaggagtaaagcatttaatagactggaaaagagaatcatttaatgattttatttgtgaaatctcgcatgatgaagaaaatgcaaaactacttataagttattcagaaattgaacttctatatgcaattcattggctacaacttaagataaatagaataacagtgagggttagtagtttctttggtgaaaaaacagcggtattatcaatcttgggtctttgctattcggcagtacaggcatcaattggatttgatacattgagtaaaacatttatcggggatctttctaacacgaactccactaatactgtcatcatgttcggattagcatttttgctaggtatatctctgggggcattgatgttaaaaaaagtagcaaatcatcagttatatctgaaagaaattgttgagttggcaataagaataaaaaaagatatccaaaatggataa

SEQ ID NO: 113784 - DNA, 216 bp, Enterobacter aerogenes
atgatctgtattgtaaacaaagtggatgataccgaacatggaataaaacttactcttgaaaatggtaatgacatttgtgtcaataattatagccattatctgttatctgagtctgtaagtcgttgcgaaaaagacaggataaagaatatttatattcgtatggtttcagaactcactctgataagtgaagaaactataaaatcacagatgttataa

SEQ ID NO: 113785 - DNA, 567 bp, Enterobacter cloacae
gtggcaaaatctgtacccgcaatttttctcgatcgtgacggcactattaatgtggatcacggttacgtccatgagattgatgagttcgagtttatcgagggcgtaatagatgccatgcgccagttgaaagagatgggctatgcgctggtggtggtgactaaccagtccggtatcgcccggggtaaattcaccgaagcgcaattcgagacgctgacggaatggatggactggtctctggccgatcgtggcgtcgatcttgatggcatctattattgtccgcatcacccgcagggaagtgtagaggcgtatcgtcagacctgtgattgccgtaagccacacccgggcatgtttatctctgcacaggaattcctgcacattgatatggccgcatcttatatggtgggcgataaactggaagatatgcaggcagcagcggcggcaggtgtaggtaccaaggtattagtgcgtaccggtaaaccggtcaccccagaagcagaaaatgcagccgactgggtgataactagtctggcagaactgccaaaagagattaaaaagcaccaaaaatag

SEQ ID NO: 113786 - DNA, 1032 bp, Enterobacter cloacae
atgattaaactttccaatatcaccaaagtgttccagcaggggaaccgaaccattcaggcgctgaacaacgtcagcctgcatgtgcctgctggtcagatttatggcgtcattggcgcatcgggtgcgggtaaaagtacgctgatccgttgtgttaacctgcttgagcgcccaacccagggcagcgtagaagttggcggccaggagcttaccgctctctcagaaaaagaactcaccaaagcgcgtcgccagattggcatgattttccagcactttaacctgctggcatcccgcaccgtgttcggcaacgttgccctgccgcttgagctggataacacgccgaaagaagaagttacgcgtcgcgtcaccgaactgctcgaccttgttggtctgggcgacaagcatgatagctacccggcaaatctgtccggtgggcaaaaacagcgtgtggccattgcccgcgcgctggcaagcaatcctaaggtgctgctgtgcgatgaagccaccagcgcgttagacccggccaccacgcgctctattctggaactgttaaaagacattaaccgtcgcctgggcctgacgattctccttattacgcatgaaatggatgtagtgaaacgcatctgcgactgcgtggcggtcatcagcaacggtgagctgattgagcaggacacggtgagtgaagtcttctcacacccgaaaacgccgctggctcagcagttcattcagtccacactgcatctggatattccggaagattatctggaacgtttaaaaacagacgcaacgcctgacagcgtcccgatgctgcgcatggagttcacgggccagtccgttgacgcaccgctgctgtccgaaaccgcgcgtcgctttaacgtgaataacaacattattagcgcgcagatggactacgccggtggcgtgaagttcggcattatgctgacggaaatgcacggcacacaggaagaaacccaggcggcaattgcctggctgcaagaacatcacgtaaaagtagaggtactgggttatgtctga

SEQ ID NO: 113787 - DNA, 654 bp, Enterobacter cloacae
atgtctgagccgatgatgtggctactggttcgcggcgtttgggaaacgctggcaatgaccttcgtatcgggcttctttggttttgtgattgggctgccggtcggcgtgctgctgtacgttacgcgcccgggtcaaattattgaaaacgcgaagctgtatcgtacgctctctgcgctggtgaacattttccggtctattccgttcattattctgctggtgtggatgattccgtttacgcgcgtgatcgtcgggacgtcgattggtttgcaggcagctattgtcccgctgaccgtaggcgcggcaccgtttatcgcccgtatggtggaaaacgccctgctggaaatcccaaccggcctgatcgaagcttcccgcgctatgggtgcgacgccaatgcagatcgttcgcaaagttctgctgccagaggcgctgcctgggctggtgaacgcagcaaccatcacgcttatcaccctggtcggttattccgcaatgggcggcgccgtaggtgctggcggtttaggccagattggatatcagtacggctatattggctataacgctaccgtaatgaataccgttctggtattgctggttgtgctggtttacttaattcaattctctggcgatcgtatcgtccgggctgttacgcataaataa

SEQ ID NO: 113788 - DNA, 816 bp, Enterobacter cloacae
atggcgtttaaatttaagaccttcgcagcagtaggcgcactgattggctcgctggcactggtgggttgcggtcaggacgaaaaagatccaaaccacatcaaagtaggcgttatcgtcggtgcagaacagcaggttgctgaggccgcgcagaaaatcgctaaagagaaatatggcctggacgttgaactggtgactttcaacgattacgttctgccgaacgaagcgctgagcaaaggcgacattgacgctaacgccttccagcataaaccgtacctggatcagcagatcaaagatcgcggctacaaactggttgctgtcggtaacaccttcgtttacccgattgccggttactccaagaaaattaaatctctggatgaactccagccgggttcacaggttgccgtccctaacgacccaaccaaccttggccgttccctgcttctgctacagaaagtgggcctgattaaactgaaagaaggcgttggcttgttaccgaccgttctggacgtaaccgaaaacccgaaaaatctgaaaattgttgagctggaagcaccacagctgccacgttctctggacgatgcgcagatcgccctggccgtgatcaacaccacttacgccagccagatcggcctgaccccagcgaaagatggcatcttcgttgaagataaagattccccgtacgtcaacctgatcgtgactcgcgaagacaacaaagacgcggagaatgtgaagaaattcatacaggcatatcagtctgaagaagtgtaccaagaagccaataaggtgtttaacggcggcgcggttaaaggctggtaa

SEQ ID NO: 113789 - DNA, 405 bp, Enterobacter cloacae
atgcgtgctttaccgatctgttttttagcactgatgctgagcggctgttctatgctaagcagatctcctgttgaacctgttcaaagcactgcaaccccgccaaaagcggagccagcaaaaccgaaagcgcctcgcgctgcgccggtacgtattattaccaaagccgacgagctggtcggtaagccattccgtgaactgggcgaagtgagcggcgaatcctgccaggcaacgaatcaggactccccacccaatattccgacagcccgcaagcgtatgcaaatcaacgcgtcgaaaatgaaagccaacgcggtgctgctgcacagctgcgaagtcaccagcggcacaccaggttgctatcgccaggcggtatgtatcggttctgcgcttaacattacggcgaaatga

SEQ ID NO: 113790 - DNA, 708 bp, Enterobacter cloacae
atgagttcatttcagttcgagcagataggcgttatccgctccccttataaagaaaagttcgccgtgccgcgtcagccgggtctggtcattaacggcggcggcgagcttcatcttgtggcgccgtataatcaggccgatgcagtgcgcgggcttgaggcgttcagccatttatgggtggtctttgtgtttcaccagaccatggaaggcggctggcgtcctaccgtgcgtccgcctcgtctgggcggaaatgccagaatgggtgtctttgccacccgctcaacctttcgtcccaaccccatcgggatgtcgctggtcgagctgaaaggcatacgttgtcagaaagatcaggtgatcctggagttaggtagccttgacctggttgatggcacgccggtcatagatattaagccttacctgcccttcgccgaagcgctgccggatgcccgggcaagctatgctcaggacgcaccgcaggcagatatggcggttcacttcacgtctgaaattacaacgcaaatcagcgagctggaaaagcgttatcctcgcctgcgtgactttatcgttgaagtgctggcccaggacccccgtcccgcctaccgcaaagaagaggaagccgggaatacgtacgccgtctggctgctggactttaacgtgcgctggcgcgtgactgcggcgggttttgaagtgtttgccctggaacccaggtaa

SEQ ID NO: 113791 - DNA, 1719 bp, Enterobacter cloacae
atgcgtactagccaatatctgctctccactctgaaggagacacctgccgacgccgaggtgatcagccaccagctgatgctgcgcgccgggatgatccgcaagctggcctccgggttatacacctggctgccgaccggcgtgcgcgtcctgaaaaaagtcgaaaacatcgtgcgtgaagagatgaacaacgccggtgctatcgaggtgttaatgccggtcgttcagccctctgaactgtggcaggagagcggtcgctgggagcagtacggtcctgaactgctgcgtattgccgatcgtggcgatcgtccattcgttctcggtccaacgcatgaagaagtgatcaccgatctgatccgtaacgagctgagctcttacaaacagctgccgctgaacttcttccagatccagactaagttccgtgacgaagtgcgtccacgctttggcgtcatgcgttctcgcgagttcctgatgaaagatgcttactctttccatacttctcaggaatcgctgcaagagacctacgacaaaatgtacgcggcctacagcaaaatcttctcccgcatggggctggatttccgtgctgtacaggctgataccggttcaatcggcggtagcgcctcccatgaattccaggttctggcgcagagcggcgaagacgatgtgatcttctctgactcctctgattacgccgcgaacatcgaatttgcagaagcgctggcaccaaaagaaccacgcggcgcggcaacgcaagagatgacgctggttgatacgccaaacgcgaaaactatcgccgagctggttgagcagtttactctgccgatcgaaaaaaccgtgaaaaccctgctggtgaaatcggctgaaggtagcgcttatccactggttgccctgctggtacgaggcgatcacgagctgaacgaagtgaaagccgagaagctgccgcaggttgccagcccgctgaccttcgcaacggaagcggagatccgcgccgttgtgaatgcaggtcctggttctctgggtccggtgaacatgcctgttccggtggtcattgaccgcaccgttgcggcgatgagcgacttcgctgcgggcgcaaacatcgacggtaaacactacttcggcatcaactgggatcgtgacgtggcgacgccggaagtggctgacatccgtaacgtggtcgcaggcgatccaagcccggacggcaagggtaccctgatgatcaaacgcggtatcgaagtaggccacatcttccagctgggcgataagtactcgcgcgcaatgaacgctgccgttcagggcgaagatggccgtaaccaggttctgaccatgggctgctacggcattggcgtaacgcgcgttgttgctgccgctatcgagcagaactatgacgaacgcggaatcgtctggccggataacatcgcgccgttccaggtggcgatcctgccaatgaacatgcacaagtcttaccgcgtgcaggagctggctgagaaactctacgctgagctgagcgcgaaaggtatcgacgtgctgatggatgaccgtaaagagcgtcctggcgtgatgtttgctgacatggaactgatcggtattccacacaccatcgtcattggcgaccgtaacctcgacagcgacgagattgaatacaaataccgtcgcaccggcgaaaaacagatgatcaagacgggcgatattcttgattacctggtgaaagccatcaaaggttaa

SEQ ID NO: 113792 - DNA, 699 bp, Enterobacter cloacae
gtgaaaaaagcattattatcagcgctggccgtgacaagcctgttcgcgctttttggctgtaataaccgttcagaaacgcaggtactacagccaacgcaaaatgaagaattaaagccgatgcagcaaagctggcgcggcgtattaccgtgtgcagattgcgagggcatcgaaacctctctgtttctgcaaaaagatggcacctgggtcatgaaccagcgttaccagggggcgaaagaaccgtcttcttttgcatcttacggaacatgggcgcgtacggctgagaagctggtattgacggataccacgggcgataaaaccttcttccgcgccaaaggcgaggggatggagatgctcgatcgcgaaggtaatccgattgaatcccagttcaactacacgttggccccggtaaaagcgaccctgccagccaccccaatggcgatgcgagggatgtatttctacatggcggatgcggcgatcttcactgactgtgcaaccgggaagaaagtcagcgtggcgaacaatgcccagctggagcgagactatgccgtcgcgcgcggcaacgacagtaagccagtgttgctgacggttgaagggcactttacgctggagccaaacccggatagcggcgagctggtgaaaacgctggtggcagataaagacgcgaagtttgctgcggggaaagactgcgaaagcaaataa

SEQ ID NO: 113793 - DNA, 417 bp, Enterobacter cloacae
atgattgtattgtcccgaaacgtcagcatccctgataacgagctggagagcaccgccatccgggcccagggagcagggggacagcacgttaacaaggcctcaacggctatccatttgcgctttgacattcgggcctccagcctgccagagtattataaagaaagcctgcttgccgccagccatcacctgatcaccagcgagggtgtgatggtgattaaagcgcaggagtatcgcagccaggagcttaaccgggaagcggcaatagcccggctggtcgcggtcatcaaagagctgacggctgtacaaaaaagtcgccgggcaacacgtccaacgcgggcatcgaaagaacgtcggttgtcatcgaaggcgcagaaatccaccgtaaaatcactgcgtggcaaagtccgtcacccataa

SEQ ID NO: 113794 - DNA, 546 bp, Enterobacter cloacae
atggcgctgaaagcgacaatttataaagctgtggtcaatgtggcggatcttgaccgtaaccagtttctggatgcgtcattgacgctggcgcgtcatccttctgaaacccaggagcgcatgatgctgcgcctgctggcgtggattaagtatgccgacgagcgtctgcaatttacccgtggtttaagcgcggaagatgaaccggaagcctggctgcgcaacgatcatctgggtatcgatttatggattgagcttggcctgccggatgaacgccggatcaaaaaggcctgcacccagtctgctgaagtggcgttgtttgcctacaaccagcgagcggcggagatctggtggcaacaaaataaaaataaatgtgcgctgttcaaaaatcttaccgtctggtatctggatgatgaacagctggcgcagctgagtgcgttcgccagccggacgatggcgctacaggcgacgattcaggacggcgccatctggctttccgattctcagaataatctggaaattcatctcacagcctggcagcccgcatcatga

SEQ ID NO: 113795 - DNA, 201 bp, Enterobacter cloacae
gtgaataattattgtgagttgattcgcagacggtatgcggagatcgccagcggagatctggggtacattccggatgcgttgggctgtgtattgaacgtgctaaatgaagtggcctctgatgagagcctttctgaatcggtcagggaaaaagcagcgtatgctgcggcgaatttactggtgagcgattatgtcgatgaatga

SEQ ID NO: 113796 - DNA, 261 bp, Enterobacter cloacae
atgtcgatgaatgatacctatcaacccatcaattgtgatgactatgacaacctcgaactcgcctgccagcatcatttaatactgacgctggagctaaaagatggcgaagtgctaaaggcaaaggccagcgatctggtttcccgtaaaaatgtggaatacctggttgtggaagatgcaggtgcaacgcgtgagctacgcctcgacaaaattgccagtttcagccatccggaaatcggcaccgttgtggtgagcgaatcctga

SEQ ID NO: 113797 - DNA, 1287 bp, Enterobacter cloacae
atgaccttacccgctatcgcgcacgccgtttcaccctatcgccagctgctggtggggttcagcggtggcctggattccaccgttttgctgcaccgccttaagctctggcgcgaccgtgagcctgacgtccagctgcgggcgatgcatatccatcacggcttaagcccccatgccgacgactgggtggcgcactgcgaagcggtgtgctcagggtgggcaatcccgctgatcgttgaacgcgtcacgcttgaggatgaggggctgggtattgaggcgcaggcgcggaaagcccgctacgccgcgttttccggcgcattacagcaaggggaagcgttggtcaccgcgcagcatctggacgaccagtgcgagacgtttttactggcgctcaagaggggcagcgggcctgcggggttatctgccatgcctgagcgcgctgattttgctgaaacagagctcatccgcccactactgggtgagacgcgcgcatcactggaagcttgggcgcagcagcatcatctgtgctggattgaagacgagagcaatcaggacgacagctacgaccgtaacttcctgcgcctgcgcgtcttaccgctgctgagtgagcgctgggcccatttttccgaagcggtggccagaagcgccatgctgtgtgctgaacaggaaagcttgctggatgagttgctgagcgaggagctggatacgctgattaccgctgacggtgccctgaacattgcgccattgaaagtgatgagccctctgcgtcgggctgctctgattcgtcgctggctggcttaccaccgtgcggttatgccgtcccgggcgatgctcaaccgtatctgggaggaagttgcacaggcgagggaagatgccgccccgtgtatacacctgaatggttatgacgtcaggcgctataaagggcaactctggtgggtgaaatctgtgccgtcgctggctgacgttgtgctcgactggccgtcgccggaaaaagcattaacgctaccgatgaatgccggtgtcgttgcgttaagccattcgggcaatgtgcgtctacctgagccggacgagaacgttaccatacgcttcaggaccagcggcatgctgcatatcgtcggtcgtaacggcgggcgtaagctgaagaaaatctggcaggaacagaacgttccgccctggcgacgtgataccacgccgcttctgttttacggcgacacgctcatcgcggcggcagaggtgttcatcactgaagaggggtgggctgaagcgggtgttaattttgaatggaaagcgtaa

SEQ ID NO: 113798 - DNA, 390 bp, Enterobacter cloacae
atgctgggtttaaaagcggttcatcatattgcgatcattgccaccgattacgcgaaaagtaaggcattctactgcgacgttctcggctttacgctgttgagcgaggcttaccgtgaggagcgcgactcctggaaaggcgatctggcgttaaacggacaatatgtgattgaactgttctcttttcctttcccgccagcgcgtccttcacgcccggaagcctgcggcctgcgccacctggccttcagcgtcgatgacctggacagcgcggtaaaacatctggaagcccacggcgtggcctgcgaagcgattcgtgtcgatccctttaccgataaacgtttcacttttttcaacgatccggacgggctgccgctggagctttaccagcagtaa

SEQ ID NO: 113799 - DNA, 2133 bp, Enterobacter cloacae
atgaacatcattgccatcatggggccacacggcgtcttttataaagacgaacccatcaaggagctggagcaagccctcaaagcacgcggataccagctgatctggccgcaaaacagcgccgacctgctgaaatttatcgaacacaatccgcgcatctgtggcgtgatattcgactgggacgaatacgacatggagttgtgcagcgatatcaataagctcaacgaatatcttccgctgtacgcgtttatcaacactcactcgaccatggacgtgagcgcgcatgatatgcgtatggcactatggttcttcgaatactcactcggcgttgccgaggacattgcgacccgcattcagcagtacaccggtgaatacctcgataacatcacaccgccgttcacgcgcgcgctgttcacctatgtgaatgaagggaagtacaccttctgtacgccaggccacatggcgggaacagcctatcaaaaaagcccggtgggatgtctgttctacgatttcttcggcggtaacacgctgaaggcggatgtgtcgatttcggtcaccgagttaggctctctgctggatcataccggcccgcatctggaagccgaagagtacatcgcccggacctttggcgccgagcaaagctacatggtgaccaacggtacctcaacctcgaacaaaatcgtcgggatgtacgccgcgcctgccggcagtacgctgctgattgaccgcaactgccataaatcactggcgcatttgctgatgatgagcgacgtggtgccgctctggctgtcgcctacgcgtaatgcgctgggtattctcggcggcattcctcgccgtgaattcgcgcatgaagccattgaaaataagatcgcagcgatccccgaggcaagctggcctgtgcacgcggtgatcaccaactccacctatgacgggctgctttacaacacgaactggatcaagcagacgctcgacgtgccgtcgatccactttgactccgcgtgggtgccttacaccaatttccacccgatttactcgggtaaaagtgggatgagcggcgagcgggtgccgggcaaggtgttcttcgaaacgcagtcgacgcacaaaatgctggccgcgttttcccaggcgtctcttattcacatcaagggcgagtacgacgaggacaccttcaacgaagcctttatgatgcacacgaccacgtcgccgagctacccgctggtggcgtccatcgaaacggcggcggcgatgctgcgcggtaatccgggtaaacgcctgatcaatcgttcggtggaacgggcgctgcatttccgaaaagaggttcagcggcttaaagatgaagcggacggctggttctttgatatctggcagccggaagagattgatgaggcagaatgctggcccgtcgcgccgggggagagctggcacggttttcgggatgccgatgcggaccacatgttcctcgatccggttaaggtgacgatcctgacgccgggcatggatgagcagggcgtgatgggtgaggaagggatcccggctgcgctggtggcgaagttccttgatgagcgcggcgtggtggtggagaaaaccggcccctataatttgctgttcctgttcagcatcgggatcgataaaacccgcgcgatggggctgttgcgcggactgatggagtttaagcgtgcatatgatctgaacctgcgggtgaagaatatgctgccggatctctacgcggaagatcctgacttctatcgcaatatgcgtattcaggatctggcccaggggatccacaggctgatccgccagcacgatctgccgcgcctgatgttgcaggcatttgatgttctgcctgaaatgaagctgacgccgcacagggcgtggcagcgccaggtgaaaggggaggttgaaaccgttgagctggagaacctggtcgggcgggtatcggccaacatgatcctgccttatccgccgggcgtgccgctgctgatgccgggtgaaatgatcaccgaggagagccgggcggtgctcgatttcctgctgatgctctgttcggtagggcgccactatccgggctttgaaacggacattcatggcgcgaaacgcgatgataacggcgtgtactgggtgagagtcctaaaataa

SEQ ID NO: 113800 - DNA, 960 bp, Enterobacter cloacae
atgagtctgaatttccttgatttcgaacagccgattgcagagctggaagcgaaaatcgattctctgacagccgtgagccgtcaggatgaaaaactggatattaacatcgacgaagaagtgcatcgtctgcgcgaaaaaagcgtagaactgacgcgcaaaatctttgccgatctcggcgcatggcagatcgcccagctggcgcgtcatccacagcgtccgtacaccctggattatgtccgcctggcgtttgacgaatttgacgaactggcaggcgaccgcgcatacgctgacgataaagctatcgtcggcggtatcgcgcgtctggatggacgtccggtgatgattattggtcatcagaaaggccgtgaaaccaaagagaaaatccgtcgtaacttcggtatgccagcgccagaaggctaccgtaaggccctgcgtctgatggagatggctgagcgtttcaatatgcctatcatcaccttcatcgacacgccgggtgcttacccgggtgttggcgctgaagagcgcggtcagtctgaagccatcgcacgcaacctgcgtgagatgtctcgcctgaaagtgccggtcatctgtaccgttatcggtgaaggtgggtccggcggtgcgctggcaattggcgtgggcgataaagtgaatatgctacagtacagtacctattccgttatctctccggaaggctgtgcctccattctgtggaaaagtgccgataaagcgccgctggctgctgaagcgatgggcatcattgccccacgtctgaaagagctgaagctgatcgacaccgttatccctgaaccgctgggtggcgcgcatcgtaagccggaagtgatggctgcttccctgaaagcgcagctgctggcagatctggcggacctggacgtgctgagcacagaagatctgctcaaccgtcgttatcagcgtctgatgacctacggttacgcgtaa

SEQ ID NO: 113801 - DNA, 3483 bp, Enterobacter cloacae
atggctgaaccacgtttcgtacacctgcgggtgcatagcgactactccatgatcgatgggctggcaaagaccgggccgctggtaaaaaaggcggcctcgcttggcatgcctgcgctggcgatcaccgattttaccaacctgtgtggcctggtgaagttctacggaacggcgcatggcgcaggattaaagcccatcgtcggcgcggattttcatgtgcagagcgacctgctcggcgatgagatgacgcaaatttccgtgttagccatggataacacgggttatcagaacctcactctgctgatctcaaaagcctaccagcgcggttacggcgcactgggtccatggattgaccgcgactggctggcggagctgaacgaaggtttgctgctgatctccggtggccgtatgggagatgtcggcaaatgtctgctacgcggtaataacgcgctggtggatcagtgcgtctcgttctacgaagagtatttcccggatcgttattacctggagctgatccgtaccgggcgtgtggatgaagagagctacctgcatgcggccgtcgccctggcggaagcgcgtggcctgcctgtggtggccaccaacgatgtgcgcttccttgaggcgggtgattttgacgcgcatgaaattcgcgtcgccatccacgacggcttcaccctcgacgatccgaaacgtccgcgcaactactcatcgcagcagtacatgcgcagcgaagaggagatgtgtgagctcttctcggacatcccggaagcgctggaaaacagcgtagagattgccaagcgctgtaacgtcaccgtgcgtctcggcgaatacttcctgccgcagttcccgacgggagacatgaccaccgaagatttcctggtcatgaaatcgaaagagggtctggaagagcgtctggaattcctcttcccggatgaagcggtccgtaaagagaaacgtcctgaatatgacgagcgcctggatattgaactccaggtgatcaaccagatggggttcccaggctacttcctaatcgtgatggagttcatccagtggtcgaaggataacggcgtgccggtaggtccgggccgtggttctggtgccggctcgctggtggcgtatgccctgaaaattaccgatctcgatccgctggaatttgacctgctgttcgaacgtttcctcaacccggaacgtgtctccatgcccgactttgacgtcgacttctgcatggaaaaacgcgaccaggtgattgagcacgtggccgatatgtatggtcgtgatgcggtttcgcagatcatcaccttcggtacgatggccgcgaaagcggttatccgcgatgtgggccgcgttctgggccacccgtacggttttgtcgatcgtatctctaagctggtgccgcccgatccgggcatgactctggcgaaagcctttgaagctgaacctcagctgccggaaatctacgaagccgacgaagaggtcaaagcgctgatcgacatggcgcgcaagctggaaggcgtcacgcgtaacgccggtaagcatgcggggggtgtggttatcgccccgaccaaaatcaccgactttgcgccgctgtactgcgatgaagcgggccagcatccggtcacccagttcgacaagaacgacgtagaatacgccgggctggtgaagttcgacttcctcggcctgcgtacgctgaccatcatcaactgggccctggagatgatcaacgcccgtcgcgagaagaacggcgagcctccgctggatatcgcggctatcccgcttgatgacaagaaaagtttcgacatgctgcaacgctcggagacgacagccgtcttccagcttgaatcccgcggcatgaaagatttgattaagcgtctgcaaccagactgcttcgaagatatgatcgcgctggtggccctgttccgtccggggccgttgcagtcggggatggtagataactttatcgaccgtaaacacgggcgcgaagagatttcctacccggacgtgcagtggcagcatgaaagcctgaaaccggtactggagccaacctatggcatcatcctgtatcaggaacaagtcatgcagatcgcccaggtgctttctggttatacccttggcggcgcagacatgctgcgtcgtgcgatgggtaagaaaaagccggaagagatggccaagcagcgttccatctttgaggatggggcgaagaaaaacggcgtcgatggcgaactggcgatgaaaatcttcgacctggtggagaaattcgccgggtacggatttaacaaatcccactccgccgcctatgctttggtttcgtatcaaacgctgtggctgaaggctcactatcccgctgaatttatggcggcggtaatgaccgccgatatggacaacaccgagaaggtggttggtctggtggacgagtgctggcgcatggggctgaagatcctgccgccggatattaactctggcctgtaccatttccacgttaacgatgacggggaaatcgtctatgggatcggcgcgatcaagggcgtaggtgaggggccgatcgaggcgatcatcgaagcgcgtaacaacggcggctatttccgcgagctgttcgatctgtgcgcccgcaccgataccaaaaaactgaaccgccgggtgctggaaaaactgatcatgtccggcgcgtttgaccggctggggccacaccgcgccgcgctgatgaactcgctcggcgatgcgctgaaagcagccgatcagcacgcgaaagcggaagccattggccaggcggatatgttcggcgtgctggcggaagagccagagcagattgagcagtcttattccaactgccagccctggccagaacaggtggtgctggatggggagcgtgagacgttaggcctgtacctgacggggcacccgatcaaccagtatctgaaagaaattgagcgctatgtcggcggccacaggcttaaagacatgcatccgacagaacgtggtaaaatcaccacggctgcggggctcgtgattgctgcaagggtaatggtcaccaagcgcggcaatcgtatcggcatctgtaccctggatgaccgttccgggcgtctggaggtgatgttgttcaccgacgcgctggataaataccagcaattgctggaaaaagaccgcatacttatcgtcagcggacaggtcagctttgatgacttcagcggggggcttaaaatgaccgcccgcgaagtgatggacattgacgaagcccgggaaaaatatgctcgcgggcttgctatctcgctgacggacaggcaaattgatgaccagcttttaaaccgactccgtcagtctctggaaccccaccgctcggggaccattccagtacatctctactatcagagggcggatgcacgtgcgcggttgcgctttggtgcaacgtggcgtgtctctccgagcgatcgtttactgaacgatctccgtggcctcattggttcggagcaggtggaactggagtttgactaa

SEQ ID NO: 113802 - DNA, 597 bp, Enterobacter cloacae
atgatggaatttatttatccccatacccacctcgttgccggtgtggatgaagtcggtcgtggcccgttagtgggtgccgttgtgaccgcggcggtgatcctcgatccagcccgcccgatcgttggcctgaacgactcgaaaaaactgagtgaaaagcgtcgcctggcgctgttcgatgaaattaaagaaaaggcgctggcctggagtctcgggcgcgcagagccggatgagatcgacgatctgaacattctgcacgccaccatgctggcgatgcagcgtgccgtcgctggcctgaagattgtacctgagtatgtgctgatcgacggtaaccgttgcccggcgctgccgatgccttccatggctgttgttaaaggcgatagccgcgtcgcagaaatcagtgcggcgtcaatcattgccaaagtgacgcgcgatgccgaaatggccgcgctggacctcacttatcccgcgtatggtttcgcccagcacaagggatatccaacggctttccatctggaaaagctggctgaacatggcgcaactgaacatcatcggcgcagctttggcccggtgaaacgcgcgctgggactggtgtcctga

SEQ ID NO: 113803 - DNA, 1149 bp, Enterobacter cloacae
atggtcgacagtcgtccgcttaccatcgccctggtcgccggagaaacctccggcgatattcttggtgcaggtcttatccgcgcgcttaaagcccgtgtacccaatgcccgctttgtgggcgtggctgggccgctgatgcaggccgaaggctgtgaagcctggtatgaaatggaagagctggctgtgatgggcatcgtcgaggtgttgggacgcttgcgtcgcctgctgcatattcgcgccgaccttacccgccgctttaccgaccttaagcccgatgtatttgtcggcattgatgcgcctgatttcaatattacccttgaagggaacctgaaaaagcaggggatcaaaactatccattacgtcagtccgtccgtgtgggcgtggcgacagaaacgcgttttcaaaatcggacgatccactaatctggtgctggcttttctgcctttcgaaaaagcgttttacgacagatttaatgtcccgtgccgttttatcggtcataccatggcggatgccatgccgctggatccggataaaaacgcggcgcgtgacgaactgggcatcccgcatgatgtgcactgtctggcgctgctgccagggagccggggtgcggaagttgaaatgctcagtgccgatttcctgaaaacggcgcaaattcttcgcaagacttatcccgatcttgaagtggtcgtgccgctggtgaatgccaaacgccgcgagcagtttgagcgtatcaaagccgacgtcgccccggatcttcacgtccgcctgctggacgggaaagggcggcaagccatgtttgcgagcgatgccgcactactggcttccggcacggctgcgctggagtgtatgctggcaaaatgcccaatggtggtcggttatcgcatgaagccgtttaccttctggctggcaaaacgtctggtaaaaacagattacgtatccctgccaaacctgcttgcgggtcgcgagctggtgaaagagctcttgcaggatgaatgccagccgcaggcgctggctgatgcattactgccgctgctggccaacggtaaaaccagccaccagatgcatgataccttccgtgaactgcatcaactgatccgctgtaatgctgatgagcaggcggccgatgcggtgctggagttagcacaatga

SEQ ID NO: 113804 - DNA, 789 bp, Enterobacter cloacae
gtgattgataaatccgcctttattcatcctaccgccattgtggaaacgggtgccatcattggtgccaacgtccacattggcccgttttgtattgttggaccccatgtcgaaattggtgagggtacagtactgaaatctcacgttgtcgtgaatggtcataccaccattggctgcaacaatgagatctatcagttcgcctccatcggcgaagttaaccaggatctcaagtatgctggcgaaccgacccgcgtggaaatcggcgatcgtaaccgcattcgcgaaagcgtcaccattcatcgtggtacaacgcaaggcggtggattgacgaaggtgggcagcgacaacctgtttatggttaatgcgcatattgcgcacgactgtaccgtgggtagccgctgtattctcgccaacaacgcaacgctggcgggacacgtatcggttgatgatttcgccattattggcggcatgaccgcagtccatcagttctgcatcattggtgcacacgtgatggtcggcggatgctccggtgtggcgcaggacgtcccaccgtttgtgattgcgcagggcaaccatgccacgccgtttggcgtgaacatcgaaggtctcaagcgtcgtggttttagtcgcgaagcgattactgccatccgcaacgcgtacaaactgctgtaccgtagcggtaaaacgctggaagaggctaagccggaaattgccgagctggcgaataagcaccctgaagtgaaaacgttcatggaattctttgaacgttcaacccgtggtctgattcgttaa

SEQ ID NO: 113805 - DNA, 456 bp, Enterobacter cloacae
ttgactactgacactcatactctgcatattgaagagattttagaacttctgccgcaccgctatccgtttttactggtagaccgtgtgctggattttgaagaaggtcgttttctgcgcgcagtgaaaaatgtctccgttaacgagccgttcttccaggggcacttccctggtaagcctatcttcccgggtgtattgatcctggaagcgatggcacaggctaccggtattctggcgtttaaaagcgtaggtaaactggaaccgggtgaactctattacttcgcgggtatcgatgaagcgcgcttcaagcgtccggtcgtgcctggtgatcaaatgatcatggaagtcacttttgaaaaaacgcgtcgcggcctgactcgcttcaaaggcgtagctatggttgacggcaaagttgtttgcgaagcgacaatgatgtgtgcgcgtagccgggaggcctga

SEQ ID NO: 113806 - DNA, 1026 bp, Enterobacter cloacae
atgccttcaattcgactggctgatttagctcagcagttggatgcagaattacacggtgatggcgatatcgtcatcaccgctgttgcgtccatgcaatctgctaaagcaggcactattaccttcatggtaagccctaagtaccgtgaacacctggcccagtgccaggcgtctgccgttgtgctgacgcaggacgatcttccgtttgccactagcgctgcactggtagtgaaaaatccctacctgacctatgcacgcatggcccaaattcttgataccacgccgcagccggcacagaacattgcagccagtgctgcgattgatccgacggctcagctgggtaacaacgtatcagtcggcgcaaacgccgttatcgaatccggcgttgttttgggtgataacgtggtgattggccctggctgctttgttggaaaaaatacgaaaattggcgcagggtctcgtctgtgggccaatgtctctgtctaccatgaggttgagattggcgagaattgtctcgttcagtccagcacggtgattggttctgacggatttggttacgccaacgatcggggtaactgggttaagatccctcagctgggtcgcgtgattatcggcgatcgtgtggagatcggcgcttgcacaactatcgaccgcggtgcgcttgacgacaccattattggtaacggtgttatcatagacaaccagtgccagattgcacataacgttgtgattggcgacaataccgcagttgcgggtggtgttatcatggcaggcagcctgaaaattggccgttactgcatgattggcggtgccagcgtgatcaatggccatatggaaatatgcgacaaagtcacggtgacggggatgggtatggtgatgcgtccaatcactgagcctggcgtttattcctcaggtattccgctgcaaccgaacaaggtctggcgtaaaacagctgcactggtgatgaatattgatgatatgagcaagcgactcaaagcgattgagcgcaaaatcgatcaacaagactaa

SEQ ID NO: 113807 - DNA, 495 bp, Enterobacter cloacae
gtgaaaaagtggttattagctgcaggtctcggtttagcgatggcaacttctgctcaggcagcggataaaattgcaatcgtcaacatgggtaatttgttccagcaggttgcacagaaaaccggtgtttctgcaacgctggaaaacgaattcaaaggccgtgcgagcgaactgcaacgtatggaaggtgatcttcagtccaagatgcagcgtcttcagcgtgatggttctaccatgaaagcgagcgagcgcagcaaactggaaaaagacgtcatgtctcagcgccagaccttctctcagaaagcacaggctttcgagcaggatcgtcagcgtcgttctaacgaagagcgtggcaaactggtgacgcgtattcagtctgccgttaaagcagtagcagccgatcagagcatcgatctggttgttgatgcgaacgccgttgcattcaacagcagcgatgttaaagacatcaccgctgatgttctgaaacaggttaaataa

SEQ ID NO: 113808 - DNA, 2418 bp, Enterobacter cloacae
atggcgatgaaaaagttgctcatagcgtcgctgctgtttagcagcgcgaccgtatacggtgctgacgggttcgtagtgaaagatattcatttcgaaggccttcagcgtgtcgccgttggtgcggccctcctcagtatgcctgtgcgccccggcgatacggttaatgatgaagatatcagtaacaccatccgtgctctgtttgccactggcaactttgaggatgtccgcgtcctgcgcgatggtgatacgctggtggttcaggtaaaagaacgtccaacgattgccagcatcactttctccggtaacaaatcggtgaaagacgacatgctcaagcagaaccttgaggcatcgggtgttcgtgtgggggaatctctggaccgcacaacccttgcagacattgaaaaaggtctggaagatttctactacagcgtcggtaaatacagcgcgagcgttaaagcggttgttacaccgctgccacgtaaccgtgttgacctgaaactggtcttccaggaaggtgtttctgcgaagatccagcagatcaacatcgtgggtaaccacgcgttcagcaccgacgaactgatctccaacttccagctgcgtgacgaagtgccgtggtggaacgtggtaggcgatcgtaaataccagaaacagaaactggcgggtgaccttgaaaccctgcgcagctactatctggatcgcggttacgcccgtttcaacatcgattcaactcaggtgagtctgactccggacaagaaaggtatctacattaccgttaacatcacagaaggcgataagtacacgctttcgggtgttgaagtcagcggcaacctggcaggacattcagctgaaattgaatctctgaccaaaattcagccgggcgatctgtacagcggatctaaagtcaccaaaatggaagacagcattaagaagctgctcggccgttatggttatgcgtatccgcgtgtgcaaacgcagccggaaattaacgacacggataaaaccgttaagctgcacgttaacgttgatgcgggcaaccgcttctacgtgcgtaagatccgcttcgaaggtaacgatacctctaaagactccgttctgcgccgtgaaatgcgccagatggaaggggcatggctgggaagcgatctggtagatcagggtaaagagcgtctgaaccgtctgggctacttcgaaacggtcgataccgatactcagcgtgtaccaggtcgtccggatcaggttgatgttgtttataaagttaaagaacgtaataccggtagcttcaacttcggtattggttacggtactgaaagtggcgtgagcttccaggtcggtgttcagcaggataactggctgggtacgggctactctgtcggtatcaacgggacgaaaaacgactaccagacctactctgagttctccgttaccaacccatacttcaccgttgacggtgtaagcctgggcggtcgtatcttctataacgactttaaagcggacgatgcggacctctcctcgtataccaacaagagttacggtctggatggtacgcttggcttcccggttaacgaatacaacaccttgcgcgcaggtttagggtacgtgcataacgacctgtccaacatgcaaccgcaggtggcgatgtggcgttacctggactccatcggtcagtcggcgagtacgtccagcgatgataacggtttcgccgcggatgacttcaccttcaactacggttggacctacaaccgtcttgaccgtggctacttcccgacggaaggttcacgcgtcaacctgaacggtaaagtgactatcccgggctcggataacgagttctacaaggtcacgctggatacggcgtcctacttcccaattgatgaagatcacaagtgggttgttctgggtcgtacccgttggggttatggtgacggtattggaagcaaagaactgccgttctatgaaaacttctacgccggtggttcaagcaccgtgcgtggcttccagtccaataacattggtccgaaagcggtttattacggcggtaatgacgaagataactgcgcaagccgtgatcctaagcaagtatgtagctctgatgacgcagtaggtggtaacgctatggccgtggcgagcctcgagttcatcacgcctacgccgtttatcagtgataagtatgcgaactccgtgcgtacctccttctttatggatgcaggtacggtgtgggacaccaactgggagaacaccgcccagatgcgtgcggcgggggttccggactacagcgatccgagcaacattcgcatgtccgcaggtatcgcattacaatggatgtcaccgctggggccgttggtcttctcttacgcccagccgtttaagaaatacgatggagacaaagcggagcagttccagtttaacattggtaaaacctggtaa

SEQ ID NO: 113809 - DNA, 1353 bp, Enterobacter cloacae
atgctgagcattctctggaatctggcggcgttcattgttgcactgggtgtactgattaccgtgcatgaatttggccatttctgggttgcccggcgctgtggtgtgcgggtggagcgattctcgattggctttggcaaatcgctctggaagcgcaccgataagcatggcaccgagtttgtcattgctctgattcccctgggcggctatgtcaaaatgctcgacgaacgcgttgagcctgtcgccccggaacttcgccatagcgcgtttaacaataaaactgttggacaacgtgctgccatcatcgctgccggcccggtagccaatttcatcttcgctatcttcgcttactggctggtgtttatcatcggcgtgcctggcgtgcgcccggtcgtgggcgaaatcactacgggttctattgcggcaacggcgcaaattacaccgggaatggaacttaaagcgattgatggtatcgaaacccctgattgggatgccgtgaggttacaactggttgccaaaattggtgatgagcagacaaccgtcagcgtatcgccatttggttccgaccagcggcaggaaaaagtgctggatttacgccactggcgctttgagccagacaaagaggaccctgtcgccgcactcgggattcgaccgcgcggcgcgcagatcgagccggtattagccgaagtacaggccaaatcggcagcgagtaaagcaggtttacaagcgggtgacaggatcgttaaagtcgatggtcagccattaacacaatggatgacctttgttactctggtgcgcgataatccaggcaagccgctcgcgctggaagtggaaaggcaggggagttcgctctcactgactctcaccccggataccaaatcgggcggcggtaaggcggaagggtttgcaggcgttgtgccgaaagtgatcccactgccagatgagtacaagacaatacgccagtatgggccgtttagcgccatcgttgaggccacggataaaacatggcagctgatgaagcttacggtcaacatgttggggaaattgataaccggtgatgtgaaactgaacaacctcagtgggccaatttcgattgctcagggggctgggatgtcagcggagttcggggtgatttactatctcatgttccttgcgctgattagcgtgaacctggggataatcaacctgttcccgcttcccgtattagatgggggccatctgctgtttttagcgattgaaaagctaaaaggcggaccggtatccgagcgagttcaagactttagttatcgcattggctcgattttgctggtgctgttaatggggcttgcacttttcaatgatttctctcggttgtaa

SEQ ID NO: 113810 - DNA, 858 bp, Enterobacter cloacae
ttgctgaagtatcgcctgatttccgcttttgtattaatacccgtcgtcatcgcagcgctgtttttactgcctccggtgggattcgctattgttacgctggtggtgtgtatgctcgccgcgtgggaatgggggcagcttagcggctttacctcgcgcactcagcgggtatggctggcggtactctgtggttttttactggccctgatgctgtataccttgcctgaatatcatcatgatgttcaccagccgctggttgccggatccttatggatatcgctggcctggtggattgctgcgcttgttttagtgcttttctatccgggctctgcggcgatctggcgcaactctaaagtgttgcgccttatttttggtctgctcacgattgttccgtttttctgggggatggttgcgttgcgcgcctggcactatgacgaaaaccactacagcggcgcgatatggctgctttatgtgatgattctcgtctggggggctgactccggggcctatatgtttggtaaactgttcggcaaacataaactggcgccaaaggtttctccgggcaaaacctggcaaggcttcatcggcggcctgtttacggcagcgattatctcctggggctatggcgtctgggcgaatcttgaggttgccccctccacgctgctggtatgttcgattttcgcggcgctggcatcggtgctgggtgatttaaccgagagtatgtttaagcgtgaagcagggattaaggacagtggtcacctgattccaggacatggcggaatactggatcgcattgacagccttaccgcggctgttcccgtatttgcttgcctgcttttactggtgtttgggacgatataa

SEQ ID NO: 113811 - DNA, 759 bp, Enterobacter cloacae
atgttgtctgcgaatcaaccaataagcgaaaacttgccagcacatggctgtcgccatgttgcaatcatcatggatggcaatggccgctgggcgaaaagacaagggaagatacgagcctttgggcataaagctggggcgaaatctgttcgccgcgccgtctcttttgccgccaataacggcattgatgcgttaacgctctatgcttttagcagtgagaactggaatcgacctgcgcaggaagtgactgcgttgatggaactgttcgtgtgggcgctcgatagtgaagtaaaaagcctgcaccgccacaacgtccgcttgcgtattattggcgaaaccagtcgctttaactcacgtttgcaggaacggattcgcaaagcagaagcgctgacggaaaataataccggcctgacgctcaatatcgcggcgaattacggcggacgctgggatattatccagggggttcggcatttggctgagcaggttcaggaagggctgttaagacccgaccagattgatgaagaggcgctgagtcagcaaatctgcatgaatgaactggcacccgtggatttggttataaggacagggggggaacatcgcataagtaactttttgctgtggcaaattgcctacgccgaactttactttacggatgttctttggccagattttgatgaacaagactttgaaggtgcgctgcatgcctttgccaatcgagagcgtcgtttcggcggcaccgagcctggtggcgataacgcctga

SEQ ID NO: 113812 - DNA, 1200 bp, Enterobacter cloacae
atgaagcatctcactctcctcggctcgactggctctatcggttgcagcactctcgacgttgtacgtcataatcctgacagctacaccgtggccgcgcttgtggccggaaaaaacgtgcagcgaatggtcgaacagtgcctggagtttaccccccgttttgcggtgatggatgacgaagagagcgcccgccaggtgaaagcgctgttgcaggagaagggctgccgtaccgaggtactcagcgggcaacaggcggcttgcgatatggccgcgcttgatgaagttgatcaggtcatggcggcaatcgtcggggcggcgggtcttctgccaacgcttgccgctattgatgcggggaaagatgtcctgcttgcgaacaaagagtcgctggtcacctgcggacgcctctttatggaggcggtaaaacagcgtggggcgcgtcttttgccggtcgatagcgaacacaacgcgatttttcagagtttgcctcaaccttttcaacaaaacctggggtacgctgacctggagcagaatggcgttgtgtcgattctgcttaccgggtctggtggcccgttccgtgaaacgccactgtctgaattgagcgcaatgacgccggatcaggcgtgtcgtcatccgaactggtcaatggggcgtaagatctccgtcgattcggccaccatgatgaacaaaggtctggaatacattgaagctcgctggctgttcaatgcgtcggcgaaacagatggaagtgctgatccacccgcagtcggtgattcactcgatggtgcgctatcaggacggcagcgtgctggcccagctgggcgaaccggatatgcgtacgcctattgctcatacgatggcgtggccaaaccgcgtaaaatcgggcgttaagcctctcgatttttgtaagctgagttcactgacgtttagcgagcctgattatgaccgttatccctgtctgaaactggcgatgacggccttcgatcaggggcaggcggcgacaacggcgcttaatgcagccaatgaagtgaccgttgaagcattcctgaatcagcagatccgctttactgacatcgccgcgttgaatttatccgtgctggagatgatggatttgcgtgagccgcagagcgtcgaagaggtgctggccgtggatgaacaggcacgcattgttgcgcgtaaacaggtgacacgtctcgcaggctggtga

SEQ ID NO: 113813 - DNA, 558 bp, Enterobacter cloacae
gtgattaacgacatcagaaaagatgctgaagtacgcatggaaaaatgcgtagaagcgttcaaaaaccaaatcagcaaaatccgtactggccgtgcttccccaagcctgctggatggcatcatcgtagaatattacggtacgccaacgcctctgcgtcagctggcgagcgtgacggtagaagatacccgtaccctgaaaatcaacgtgttcgaccgctcaatgagcccggccgttgaaaaagcaatcatggcatctgacctgggtctgaacccaagctcagccggcgcggatattcgcgttccactgcctccgctgacggaagagcgtcgtaaagacctgatcaaagtagttcgtggtgaagctgagcagggtcgtgtttccgtacgtaacgtgcgtcgcgatgcgaacgataaagtgaaagccctgctgaaagaaaaagagatcagcgaagacgacgatcgtcgttctcaggacgacattcagaaaatgaccgacgcggccatcaagaaaattgatgcggcgctggcagaaaaagaagcggaactgatgcagttctga

SEQ ID NO: 113814 - DNA, 726 bp, Enterobacter cloacae
atggctaccaatgcaaaacccgtgtacaaacgcattctgcttaagctgagtggcgaagcgctgcaaggatcggaaggcttcggtattgacgcaagcatccttgatcgcatggcacaggaaatcaaagaactggtcgaactgggtattcaggttggcgtggtcattggcggtggcaaccttttccgtggtgctggtctggcgaaagcggggatgaaccgcgtagtgggcgaccacatgggtatgctggcaaccgtgatgaatggcctggcgatgcgtgatgcgcttcatcgcgcctatgtgaacgctcgcctgatgtccgctattcctttgaatggcgtatgcgataactacagctgggcagaggccatcagcctgctgcgcaacaaccgcgtggtgatcctctccgccggtacgggtaacccgttctttaccaccgattccgcagcctgcctgcgcggtatcgaaatcgaagccgatgtggtgctgaaagcgaccaaagtagatggcgtgtttactgccgacccggcaaaagatccttcagcgaccatgtacgatcagctgacctacagcgaagtgctggaaaaagagctgaaagtgatggatcttgccgcctttactctggctcgtgaccacaaactaccgatccgtgtcttcaatatgaacaagcctggcgcgctgcgtcgcgttgttatgggcgaaaaagaaggcactttgatcacggaataa

SEQ ID NO: 113815 - DNA, 852 bp, Enterobacter cloacae
atggctgaaattaccgcatccctggtaaaagagctgcgtgagcgtactggcgcaggcatgatggattgcaaaaaagcgctgaccgaagcgaacggcgacatcgagctggcaatcgaaaacatgcgtaaatccggtgcgatcaaagcagctaagaaagcaggcaacgttgctgctgacggcgtgatcatcaccaaaatcgacggcaactacggcatcattctggaagttaactgccagactgacttcgttgctaaagatgctggtttccaggcatttgctaacaaagttctggacgcagcggttgcaggcaaaatcactgacgttgaaattctgaaagcacagttcgaagaagagcgtgtagcgctggttgctaaaatcggtgagaacatcaacatccgtcgcgtttcttccctggaaggcgatgttctgggctcttaccagcacggcgcgcgtatcggtgttctggttgcggctaaaggcgctgacgaagagctggttaaacagctggcaatgcacatcgctgcaagcaaaccagaattcgttaagccagaagacgtgtctgctgaagtggtagagaaagagtaccaggttcagctggacatcgcgatgcagtctggtaagccaaaagaaatcgcagagaaaatggttgaaggccgcatgaagaaattcaccggcgaagtttctctgactggccagcctttcgtaatggatccaagcaagtctgttgctcagctgctgaaagagcacaacgctgatgtaactggcttcatccgcttcgaagtgggcgaaggcatcgagaaagttgagactgacttcgcagcagaagttgctgcaatgtccaagcagtcttaa

SEQ ID NO: 113816 - DNA, 726 bp, Enterobacter cloacae
atggcaactgtttccatgcgcgacatgctcaaggctggtgttcacttcggtcaccagacccgttactggaacccgaaaatgaagcctttcatcttcggcgcacgtaacaaagttcacatcatcaaccttgagaagactgtaccaatgttcaacgaagccctggctgagctgaacaagatctcttcccgtaaaggtaagattctgttcgttggtactaagcgcgctgcaagcgaagctgtgaaagatgctgctaacagctgcgaccagttcttcgtgaaccatcgctggttgggcggcatgctgaccaactggaaaactgttcgtcagtccatcaagcgcctgaaagatctggaaacccagtctcaggacggtactttcgataagctgactaagaaagaagcgctgatgcgtactcgtgaactggacaagctggaaaacagcctgggcggtatcaaagatatgggcggcctgccagacgcgctgttcgtaatcgatgcagaccacgagcacatcgcaatcaaagaagctaacaacctgggtatcccggtattcgctatcgttgataccaactccgatccggacggtgttgacttcgttatcccgggtaacgacgacgcaatccgtgctgttagcctgtacctgagcgctgtagctgctaccgttcgtgaaggccgttcccaggatctggcttctcaggcggaagaaagcttcgtagaagctgaataa

SEQ ID NO: 113817 - DNA, 795 bp, Enterobacter cloacae
atggctatctctattaagacacctgaagaaattgaaaagatgcgcgtcgccggtcgtctggccgcggacgtgctggaaatgatcgagccgtttgtgaaaccgggcgtcagcactggcgaactggatcgcatctgtaacgactatatcgtcaacgagcagcacgcggtctccgcctgccttggctatcacggtttcccgaaatccgtctgcatctctattaatgaagtggtttgccacggcattccggatgacgagaagctgctgaaagatggcgacatcgtcaacatcgacgtgaccgtgattaaagacgagtaccacggcgacacttctaagatgttcatcgttggcaagccaacgattctgggcgagcgtctgtgcaaagtgacgcaagagagcctctacctggcgctgaaaatggtgaagccgggcatccgcctgcgcaccatcggcgccgcaatccagaaatttgtggaagcggaaggtttctccgtggtgcgcgaatattgcggtcacggtattggtcgtgtgttccatgaagaaccgcaggttctgcactacgatgcagacgacggcggcgtagtgctgcaaaagggcatgaccttcactatcgaaccaatggtcaacgcgggtgattaccgcatccgtaccatgaaagatggctggacggtaaaaaccaaagacagaagcttgtctgcccagtacgagcatactattgtggttacagacaacggctgcgaaattatgacgttgcgcaaggatgacaccatcccggcgatactgacgaacattgagtga

SEQ ID NO: 113818 - DNA, 2676 bp, Enterobacter cloacae
atgagtaatctcttacccgaacagtatgctaacacagcacttcccaccctccccgaccagcctgataacccgggcgtctggccaccgcatgagctgacctgcgcgcatatcaaagcccacatggaagttttccatcgctggctgggtagcgcatttgacgcaggcgtttcggccgagcagctcattgaagcgcgcaccgaatttatcgaccagctcctgcaacgtctgtggatcgactacggtttcggccaggtgagcgacgtcgcgctggttgcggtcggcggctatggccggggtgaactgcatccgctctctgatatcgacctgctgatcttaagccgtaaaaaactgccggacgatcgggcgcagaaaatcggtgaactgttgaccctgctttgggacgtaaagctggaagtgggccacagcgtacgcacgctggaagagtgtctgctggaagggttatctgacctgaccgtcgccaccaacctgattgaaacccgcctgctgattggcgacgttgcgctgttcctcgaactgcaaaagcacatctttagcgacggcttctggccttcggaaaaattcttcgccgcgaaagtcgaagaacaaaaccagcgccaccagcgttatcacggtaccagctataatctcgaaccggatattaaaagcagccccggtggcctgcgcgatatccacacgctgcaatgggtcgcccgtcgacattttggagcaacatcactggacgaaatggtcgggtttggttttctgaccgaagccgaacgtaacgaactcaatgagtgtctgcatctgctgtggcgcatccgttttgccctgcacctggaagtcacccgctacgataaccgcctgctgtttgaccgacagctcagcgtggcgcagcgcctgaattaccagggcgagggcaacgagccggtcgagcaaatgatgaaggatttcttccgcgtcacccgccgcgtctctgagctaaaccagatgctgttacagctgttcgatgaggcgatcctcgcgctgacggcagacgaaaaaccgcgtccgattgatgacgaatttcagctgcgcggcacgcttatcgatctgcgcgacgaaacgttgttcattcgcgaaccggaagcgatcctgcgaatgttctacaccatggtgcgcaacagcacgatcaccgggatctactccaccaccctgcgtcatctgcgccatgcacgacgccatctgaagcagccgctgtgttacatcccggaggcgcgctcgctgttcctgagcatgcttcgtcatccgggcgccgtcagccgcggtctgctgccgatgcaccgtcacagcgtattgtgggcctatatgccccagtggtcgcatattgtcgggcagatgcagttcgacctgtttcacgcctatacggtagatgagcacacgatccgcgtcatgctgaagctggaaagcttcgctaaagaagagacgcgatcccgccatccgctgtgcgttgatctgtggccacgtctggcgcacccggagctgatcctgatcgccgccctgttccatgatatcgccaaaggtcgcggcggcgaccactccgtgctcggtgcccaggacgtgctgaaatttgccgagctgcacggcctgaactcgcgtgaaacgcagcttatcgcctggctggttcgccatcatctgctgatgtcagttaccgctcagcgtcgtgatattcaggatccggaagtgatcaagcagttcgccgaggaagtgcaaacggagaaccgcctgcgctacctggtctgcctgacggtagccgatatctgcgccaccaacgaaaccctgtggaacagctggaagcagagcctgctgcgcgaactctacttcgccaccgaaaaacagttgcgtcgcgggatgcagaacacccccgacatgcgcgagcgtgtgcgccaccatcagttgcaggcgctggccctgctgcgcatggataacatcaacgaagaggcactgcatcagatttgggcgcgctgtcgcgccaactactttgtgcgccacagcccaaaccagcttgcctggcacgcccggcatctgctgaagcacgacctgacaaaaccgatgattctgctcagcccgcaggccacgcgcggcgggacggaaattttcatctggagcccggaccggccttatttgtttgcagcggtctgtgccgagctggacaggcgtaacctgagcgtgcacgacgcgcagatttttaccacccgcgacggcatggcgatggacacctttattgtgctggagccggacggcagcccgctgtcgtcggacaggcatgaggggatacgctttggcctcgagcaggcgattacgcagcgcagctggcaacctccgcagccgcgtcgtcaggcggcaaaactgcgccactttaccgtcgataccgaggtcaatttcctgccgacccataccgaccgtaaatcgttccttgagctgattgcgctcgaccagccagggctgctcgcccgcgtcggtcaggtttttgccgatctgggaatttcgcttcacggcgcccgaattacaaccattggcgaacgagtagaagatttatttataatcgcgacggccgaccggcgtgcccttaataatgacctgcaacttgaagtgcaacaacggttgacagcagccctcaatccaaacgataaagggtga

SEQ ID NO: 113819 - DNA, 825 bp, Enterobacter cloacae
atgcagcagttacagaacgttattgagtccgcttttgagcgtcgcgccgacatcactccggcaaatgtggataccgtgacccgtgaagcggtaaaccaggttatttccctgctggattccggcgcgctgcgcgtggcagaaaaaatcgacggtcagtgggttactcatcaatggctgaagaaagctgtgctgctctctttccgtatcaacgataaccaggttatcgacggagcagaaagccgctacttcgataaagtgccaatgaaatttgcggattacgacgaagcgcgcttccagaaagagggcttccgcgtagtaccaccggcggccgttcgtcagggtgccttcatcgcacgcaacaccgtgctgatgccatcctacgtgaacatcggcgcctacgttgacgaaggcaccatggtggacacctgggctaccgtcggctcctgcgcgcagatcggtaaaaacgttcacctgtccggcggtgtgggcatcggtggcgttctggagccacttcaggctaacccaaccatcatcgaagacaactgcttcatcggcgcacgttccgaagtggttgaaggcgtgatcgtcgaagaaggttctgtgatctccatgggcgtttatattggccagagcacccgtatttacgatcgcgaaaccggtgaaattcactacggccgcgttccagccggttccgttgtggtttccggcaacctgccgtctaaagatggcaaatacagcctgtattgcgcggtcatcgtgaaaaaagtggacgcgaaaacgcgcggtaaagtgggcatcaatgaactgctgcgcaccatcgattaa

SEQ ID NO: 113820 - DNA, 390 bp, Enterobacter cloacae
atgtacgataatctgaaaagtctgggcattaccaatcctgatgaaattgatcgttatagtctccgccaggaagccaataacgatattttgaaaatctattttcacaaggacaaaggagagttcttcgccaaaagcgtgaagtttaaataccctcgccagcgtaagaccgttgtcgctgacggtatcggtcagggatataaagaagtacaggaaatcagccctaacctgcgctacgtgatcgacgaactcgatcaaatctgccagcgcgatcgcagcgaagtcgatctgaaacgtaagatccttgacgacctgcgtcacctggaaagcgtagtcaccaataagatcagcgagattgaagcggatcttgagaaattgacgcgtaacaaatga

SEQ ID NO: 113821 - DNA, 1158 bp, Enterobacter cloacae
atggctggctggcatcttgataccaaaatggcgcaggatatcgtggcgcgaaccatgcgcatcattgataccaatatcaacgtaatggatgcccgcgggcgcattatcggcagcggcgatcgtgagcgtattggggaattgcacgaaggggcgttgctggtgctctctcaggggcgcgtggtcgacatcgatgacgccgtggcgaaacatctgcacggggtccgtcaggggatcaacctgccgctgcgtctggaaggagagattgttggcgttatcggtctgaccggcgaccctgaatcgctgcgtaaatacggtgagctggtctgcatgacggcggagatgatgctggagcagtcgcgtctgatgcacctgctcgcccaggacagccgcctgcgtgaagagctggtgatgaatttgattcaggctgaggagcacacgcctgccctgagcgaatgggcgcagcgtctgggtatcgacctgaatcagccgcgcgtggtcgccgttattgaggtggatagcggccagcttggtgtggacagcgccatggtggagctacagcagctgcaaaacatgctggcgacgccggagcgtaacaacctggtggcgattgtctctttgacggaaatggtggtgctcaagcctgcgcttaatcagtttggtcgctgggacgcggaagatcatcgtcgccgcgttgagctgctaatcgagcgcatgaaggagaacggacagctccgttttcgcgtcgcgctgggaaattactttaccgggccgggaagcatcgctcgttcatggcgaacggcgcgcaccaccatgatggtgggtaaacagcgcatgccggagagccgcagttatttctatcaggatctgatgctgccggtcctgctcgacagcctgcgcggcggctggcaggccaacgagctggcgcgtccgctggtgcgtctgaaagcaatggacaacaacgggctgctgcgccgcacgttgcaggcgtggttccggcataacgtgcagccgctggcaacgtcaaaagcgctgtttattcaccgtaatacgctggagtataggctaaaccggatctcggaactgacggggctggatttagggaattttgacgaccggctactgctgtatgtggcgttgcagctggatgaacagagatga

SEQ ID NO: 113822 - DNA, 1434 bp, Enterobacter cloacae
atgaaaaaaaccacattagcaatgagtgcactggctctgagtttaggtttagcgctgtcccctctggcgatggcggccgagacagcttcctcggcagcgactgcgcagcagatgccaagcctggccccgatgctcgaaaaagtgatgccatcggtggtgagtattaacgttgagggcagcacgaccgtcaatacgccgcgtatgccgcgtaatttccagcagttcttcggcgataattcgccattctgccaggacggttcgccattccagagctccccgttctgtcagggcggcggcgcaggggatgacggcatgggcggcggccagcagcagaaattcatggcactcggctcgggcgtgattattgatgcagcgaaaggctacgtggtgaccaataaccacgtggtagataatgctaacaccattaaggtgcagatgagcgatggccgtaaattcgatgccaaagtggttggtaaagacccgcgctccgacatcgcgctgattcaaatccaggatccgaagaacctgacggcgattaagcttgccgactctgacgcgctgcgcgtgggtgactacaccgtcgccatcggtaacccatttggtctgggcgaaaccgtgacctcgggtatcgtctctgcgctgggacgtagcggcctgaatgcggaaaactatgaaaacttcattcagacggatgcggccattaaccgtggtaactccggcggtgcgctggttaacctgaacggtgagctgatcggtatcaacaccgctatcctggcaccggacggtggcaacatcggtatcggctttgctatcccgagcaacatggtgaaaaacctgactgcgcagatggtgcaatatggacaggtgaaacgcggtgagctggggatcatgggtaccgaactgaactccgagctggcgaaagcgatgaaagtggacgctcagcgcggcgcattcgtaagccaggtcatgccgaactcttcggcggcgaaagccggcattaaagcgggtgacgtgatcacctctctgaacggtaagccgatcagcagctttgccgccctgcgtgcggaagtgggttctatgccaatcggcagtaaagtgaccctcggcctgctgcgtgaaggtaagccggttaacgtgagcctggaactgcaacaaagcagtcagaatcaggtcgattccagcaccatcttcagcggtattgaaggtgccgagatgagcaacaaaggggcagataaaggcgtggtggtgaacaacgtgaaagcgaactcacctgctgcccgtatcggcctgaaaaaaggtgatgtgatcatgggcgctaaccagcagccggtgaaaaacatcgctgaactgcgcaaaattctcgacagcaagccttctgtgctggcactgaatattcagcgtggtgatacctctatttatctcctgatgcagtaa

SEQ ID NO: 113823 - DNA, 1515 bp, Enterobacter cloacae
atggcaccaatcgattttcgcaccaaaattaactggcaccgacgtttccgttcgccacagggcgataagagcgaacatgagatcctgcgcattttcgaaagcgatcgcggacgcatcatcaactcgcccgccatccgtcggttacagcaaaaaacccaggtgttcccgctggagcgtaacgctgcggtgcgtacgcggttaacgcactccatggaagtgcagcaggtggggcgctacattgcgaaagagatcctcagccgccttaaagagcaacgtctgctggaaacctacggactggatgaactgaccgggccgttcgaaagcatcgttgagatggcctgcctgatgcacgatatcggcaatcctccctttggtcatttcggcgaggccgccatcaatgactggtttaaacagcggctttttccctctgacgccataagccagccgctcagcgatgaccgctgtgtggtaagcgatttatgcctgcgtgaaggcgaagatagcctgaacgatctgcgccgtaaggtgcgccaggatctgtgtcatttcgaaggtaacgcgcaggggatccgtctggtgcactccctgatgcggatgaatctgacctgggcccaggtgggctgtattcttaaatacacgcgtcccgcatggtggaccggagaaacgcccgccacgcatagctacctgatgaaaaaaccgggctattacttatcggaagaagcatacatcgcgcggttgcgtaaagaactgtctctgacccctaatggccgttttccattgacatggattatggaagcggctgatgacatttcttattgcgtggccgatctggaagacgcggtggaaaaaagaatattcagcgtcgaggagctgtatcagcatcttcatgatgcctggggagagcatgaaaaaggttctctgtttgcgcaggtcgtcgagaatgcctgggataaatcgcgttcaaattcgctgagccgcagtaccgaagatcagttctttatgtatttgcgggtgaacacgctgaataaactggtgccgtatgcggccgcccgtttcattgataatttgccgatgatatttagcggggaatttaatcacgccctgctggaagatgagagcagttttagtcagcttcttgaattatataaaaacgtggctgttcgccatgttttcagccacccggatgtcgaacagctggagctgcaaggataccgggttatcagcgggttgctggagatttatggcccgctgctccagctgacggtcgatgagtttagcgagctggcaaataatgaacgtgttcgccgcctgccgattgaatctcgtctctatcagaagctttcaacccgccaccggctggcatacattgaagccgtcagtaaaatagatcgccattcttcccaatggccagtcatggaatattattatcgctgtcgtcttatccaggactatatcagcgggatgacagatttgtatgcctgggatgaataccgcaagcttatggccgttgaataa

SEQ ID NO: 113824 - DNA, 699 bp, Enterobacter cloacae
atgaaaatcggcattattggtgcaatggaagaagaagttacgctgctgcgtgacaaaattgagaaccgtcagaccctctccctcggtggctgtgagatctacaccggccagctgaacggtgttgacgtggctctgctgaaatcaggcatcggtaaagttgcagcggcactgggcgcgaccctgctgcttgagcgctgcaagcctgacgttatcattaatacgggttctgcgggcggtctggcgccgacgctgaaagtgggcgatatcgtggtttccgacgaagcgcgttaccacgatgcagatgtcaccgcattcggctacgaatatggtcagcttccgggctgcccggccgggtttaaagcggatgataagctgattgccgccgctgaaagctgcattaacgagctgaacctcaatgcggtgcgtggcctgatcgtcagcggcgatgcctttatcaacggctctgtcggtctggcgaaaatccgtcataacttcccgcaggctgtggccgttgagatggaagccacggccatcgcgcacgtatgccataacttcagcgtgccgttcgtggtcgttcgcgctatctctgacgtggcggaccagcagtcccacatcagcttcgacgaattcctggccgttgcggcgaaacagtccaccgtgatggtggaaaccctggtgcagaaactggcgcgtgggtaa

SEQ ID NO: 113825 - DNA, 810 bp, Enterobacter cloacae
gtgggtaaggtgtcattcagggcgctggtcgccctgcttctgctcgctccggcctggctcatcgccgcgccgcgggtgatcactctctctcctgccaatacggaactggcgtttgccgccgggatcacgcccgttgcggtgagcagcttttccgattatccaccgcaggccgcccatatcgaacaggttgccacctggcagggaatgaacctggaacgcatcgtggcgctaaagcccgatctggtcctcgcctggcgcggcggtaatgccgaacggcaggtgaaccagctctcttcgctgggaataacggtgaaatgggtggacgcggtgagcatcgaacaggtggcgcaaaccctccgtgacctcgcgcctttcagccctaccccccaacgcgccgggcaggctgcacagcagatgctcaacgactatgccgcgctaaaagcccgatacggcacgcaaccgaaacaacgcgtttttctgcaatttggcagccagccgctgttcactaccgggaaaggctcgatccagaaccaggtgcttgaaacctgtggaggtgaaaatatctttgccgaaagccgggttccctggccccaggtcagtcgtgagcaggttcttgcgcgacaaccgcaggccattgtggtggtcggaaatgcgagcgagattcctaaaatagaacaattctggcatcggcagcttaaaattccggtcatcgcactcaacagcgactggtttgaacgcgccagcccgcgtattatcctcgccgcaaaacaactctgcgccgaactggcagagagtcactcaaacagataa

SEQ ID NO: 113826 - DNA, 624 bp, Enterobacter cloacae
atgctcgtgtattggctggatattcttggcacagccgtttttgctatctccggcgttttgcttgccggaaaactgcgcatggacccttttggcgtactggtactcggcgttgttacggcggtgggaggcggaacgatccgcgatatggcgctggcaaatggcccggtattttgggtaaaagatcccacggatctggtggtggcgatggtcacctgcctgttaaccatcgtgctggttcgtcagcctcgcagactgccaaaatggatattgccggtgctggatgccgtcggtctggcggtctttgtgggaataggcgtgaataaagcctttattgccgggactggcccgctggtggcgatctgtatgggcgtgttaaccggcgtgggcggagggattattcgcgacatactggcgcgagaagtcccgatgatcctgcgaacggaaatctacgcgacggcctgtatcatcggggggattgttcacgccacggcgtattacacctttgctgtcccgctggagaatgcggcgatgctggggatggtggtcacgctggtgatccgtttagcggcgatacgctggcacctgaagctgccgacgtttgcgctggatgaaaattcaagatag

SEQ ID NO: 113827 - DNA, 345 bp, Enterobacter cloacae
atgagtgatgacgtagcgttgccgctggaatttaccgaagcagcagcgaaaaaagtgaaaaccctgattgccgacgaggacaatccggatctgaaactgcgtgtttatattaccggcggcggctgtagtggcttccagtatggttttacctttgacgatcaggttaacgatggtgatatgactatcgagaaacagggcgtcgcgctggtggttgacccgatgagcctgcaatatctggtgggcggttcagtggactacactgaaggtctggaaggttcgcgctttgtggtgactaacccgaatgcgaccagcacctgcgggtgtggttcttcgttcagtatttaa

SEQ ID NO: 113828 - DNA, 1401 bp, Enterobacter cloacae
atgaacgagaacacaccttcttttgaacaacaacagtttacgcgcgcgaagcaccgggtcagtatccggcggctgctcaaccgtgacaaaaccccgttagccattctgctggcagccgccgtggtcggtacgctggccgggctggtgggggtcgcattcgagaaagcggtcaacgcggtgctcaactggcgcataggtaccgtcgccagctttgccgatcgggaatggctggtctgggtgtgggcctttggcctttcggcgctgtttgccatggtggggtattttctggtgcgtaaattcgcacctgaagcaggtggctcggggatccctgaaattgagggggcgctggaggaactacgcccggttcgctggtggcgggtgcttcctgtgaaatttatcggcgggatgggaaccctcggggcgggcatggtgctcggtcgggaagggccaacggtacagctgggcggtaacgtcgggcgcatggtcggcgatctgttccgtatgcgcagcgccgaagcacgacatacactgctggcgacgggggccgcagcggggctgtctgcggcgtttaacgcgccgctggcgggtatcctgtttatcattgaagagatgcgcgcccagttccgctacaacctgatctccattaaagcggtgtttaccggcgtgattatgtcgagcattgtctttcgcgtctttaacggcgaaggagcggtgattgaagttggcaagctgaccaatgcgccggtcaatactttatggctgtatctggttcttgggatgatttttggcgtcgtcggcccgctttttaacaccctgattttacgggcgcaggatatgtttcagcgcatccatggcggaaataccacgaaatgggtgctggtgggaggcctgcttggcggcgtgtgcgggatcctcggtttcatcgaaccgaatgcggcgggcggcggtttcggcctgattcccattgccgcggcggggaatttcagcgtaggcctgctgctgtttatgtttatttctcgcgtcatcactacggtattgtgcttctcctccggcgcaccgggcggcattttcgctccgatgctggcactgggaacgctgctgggtacggcgttcgggatggcggcggcggcaggtttcccggcctaccatctggatgcggggacgtttgcggttgcgggaatgggggcgctgctggcggcctccctgcgcgcgccgctgaccgggatcgtactggtgctggaaatgaccgacaattaccagctcattttgccaatgatcattacctgtctcggcgcgacactattagcccaattcctgggtggaaaaccgctatactccaccattcttgcccgtaccctggcgaaacaggaagctgaacaggccctgaagcagaatacttga

SEQ ID NO: 113829 - DNA, 1281 bp, Enterobacter cloacae
atgagcaagtctgaaaacctctacagcgcagcccgcgagcttatcccaggcggcgtgaattcacccgtgcgcgcctttaccggcgtgggtggcaccccgctgtttatcgaacgtgcggatggggcatatctgtatgatgtggatggtaaagcctatgtcgattacgtcggctcctggggcccgatggtactggggcacaaccacccggcgatccgcaacgcggtgattgaagccgctcagcgcggcctgagcttcggcgcgccaaccgagatggaagtcaaaatggcggagttggtcaccgagctggtgccaacgatggacatggtgcgtatggtgaactccggtaccgaagcgaccatgagcgctatccgtctggcgcgcggttttaccggtcgtgacaagatcatcaagttcgaaggttgttatcacggccacgccgactgcctgctggtaaaagccggttccggcgcgctgacgctcggtcaaccgaactccccgggggtgccggctgatttcgcgaaacacacgctgacctgcacctataacgatctgaacaccgttcgcgccgcgttcgagcagtatccgcaggagatcgcctgcatcatcgttgaaccggtggcgggcaacatgaactgtattccaccgcagccggatttcctgccgggcctgcgcgcgctgtgcgatgagttcggcgcgctgctgatcatcgacgaagtgatgaccggtttccgcgtcgcgctggcgggggcgcagtcatactacggcgttgagccggatctgacctgcctcggcaaaatcattggcggcggcatgcctgtcggcgcgtttggcggccgtaaggacgtgatggacgcgctggcgccaaccggtccggtttaccaggcgggtacgctctccggtaacccgattgcgatggcggcgggctttgcctgtctgaccgaagtggcgcagccgggtatccacgaaaccctgacggaccggacgacgcagctggcaaacggcctgctggaagccgcagaagacgcgggtattccgctggtggtaaaccacgtcggcgggatgttcgggattttcttcaccgatgcgaaaaccgtgacctgctatcaggacgtggtgaaatgcgacgtggaacgcttcaaacgcttcttccatctgatgctggaagaaggcgtgtatcttgcgccgtcagcgtttgaagcgggctttatgtccgtggcgcacagcgaagaagatatcaataacaccatcgacgcagcgcgtaaggtgtttgcgaagctctaa

SEQ ID NO: 113830 - DNA, 1983 bp, Enterobacter cloacae
atgagcacgcgtatggctcgtttcccaatgttgctgttagcgctcatttttctggctgccctgatgttaaccggctttaacctgagcacggcgttaccgcgcgatcaatgggcagccgcgtttgccgcaccggatatcgataatattcagcaaatgctgttccactacagcctgctgccgcgtctggctatctccctgctggtcggggcgggactgggactggtgggcgtactgtttcagcaggtgctgcgtaacccgctggcagagccgaccacgctgggcgtggcgacgggggctcagctggggatcaccatcaccactctctggaccctgccgggagcgttaacctcgcagtttgccgcgctggcaggcgcatgtgtggtcggtgcgctggtctttggcgtggcctggggaaaacgtctctcgccggtcacgctgatcctcgcggggctggtcgtcagcctctactgtggggcgatcaaccagctgctggtgctgtttcaccacgaccagctgcaaagcatgtttatgtggagtaccggcacgctcacccagaccgactggagtatcgtccagcgcctgtggccgcagctgttcggcggcgtggtgctgacgctgctgctgctgcgtccgctgacgttgatgggcctcgatgacggcgtggcgcgcaatctggggctggcgctgtcgctggcgcgtctggcggccctgaccctggcgattgtgctgagtgcgttactggttaacgccgtcggcatcatcggttttatcggcctgtttgcgccgttgctggcaaaaatgctcggcgcacgccgtctgctggcgcggctgatgctggctccgctgattggcgcgctgatcctctggctttccgaccaactcattctctggctggcgcgcgtctggatggaagtttccacgggctcggtgacggccctgatcggcgcgccgctgctgctgtggctgttgccgcgcctgcgcagcattagcgccccggcaatggatgccggcgataaagtacatgccgaacgtcagtcggtggtgtggttcagccttgccgggctggcggtgctggttatcgcctcgtttgccgcactctcgctgggacgtgacgccacgggctggcactgggcgacgggggatttgctgcatgaactcatgcagtggcgctggccgcggatcttctccgcgctgattgcgggcgtcatgctggcggtggccggctgtattatccagcgtctcaccggcaacccgatggcaagcccggaagtattagggatcagctccggagccgcgtttggcgtagtgttaatgttgttcctcgtgccgggaaatgcgttcggctggctgatgcctgccgggagtatcggcgcggcagtcacgctgatgattatcctgatcgcctccgggcgaggggggttctcacctcaccgcatgctgctggccgggatggcgctcagcaccgcgtttactatgctgctgatgatgttgcaggcgagcggcgatccgcgcatggcgcagatcctgacctggatttccggttcaacgtacaacgccaccggcagtcaggtggtgcataccgggattgtgatgatcgtgctgctggcgattgtgccgctgtgccgtcgctggatgaccattctgccgctgggtggagataccgcccgcgcggtcggggtggcgctgacgccaacgcgtatcgccctgttgctgctggccgcgtgcctgacggcgacggccaccatgactatcggcccgctcagttttgtcggattaatggcgccgcacatcgcccgtatgatgggcttccgcaggactttgccgcatatcgtgatctctgcgctgacgggcggagcgatcctggtttttgctgactggtgcggaaggatggtgctgttcccgtatcagatcccggcgggcctgctgtcgacctttatcggcgcgccgtactttatatatctgttgagaaagcagagtcggtaa

SEQ ID NO: 113831 - DNA, 891 bp, Enterobacter cloacae
atgctggatttaacattcattagccgccgtcgcctgctgacggccatggcgctctcaccgctgctgttaaagatgggcccggcccgcgctgcggctatcgatccgcaccgcatcgtggcgctggagtggttgcccgtcgaactgatgatggcgcttggcgtgacgccttacggcgtggccgatattcccaactacaccctgtgggtgaatgagccaaaactgccggactccgtcatcgacattggcctgcgtacggagccgaaccttgagcttctcacccagatgaaaccgtcttatttattctggtctgcggggtatggcccgtcggaagagaccatggcgaagattgcgcccggacggggcttttcctttagcgacggcaaaaagccgctgaccatggcaaaaaattccatccacgagatggcgcagtttctcaaccgtgaggctcaggcgaaaaaacatctcgatgaatttgatgcgctgattgattccctcaagccgcgctttgcccaccgtggcgatcggcctttgctgatggtaaccctgctggatgcccgccatatgcttgtctttggaaataactgtctgttccaggaagtgctcgacagctttggcattcgcaatgcctgggaaggcgagatgacattctggggcagtaccgccgtgggtattgaccgtctggcggcgtttcgtgatgtggacgtgctgtgcttcgatcacgggaacgagcgcgagatgcaaaccctgatggcgaccccgctctggcaggcaatgccgttcgtccgcgagcagcgcttcctgcgcgcgccagcggtatggttctacggcgcgacgctgtcggcaatgcattttgcccgcgtgctggacaatgcactgggaggcaaggcatga

SEQ ID NO: 113832 - DNA, 903 bp, Enterobacter cloacae
atgctactggggagcaggacgccaggttgttgccaccgcgaccttccgcttctaacctctttatgggcacggttcgccgtgccctttttatttaagttggctgacatgcaggataataaaacgcaatccgactccaccttcacgcttaacaatctctcctttcgcgtacccgggcgcaccttgctgcatccgctctctttgacgtttcccgcaggtaaagttaccggtttaatcgggcacaatggttccggtaaatcgacgctgctgaagatgctgggtcgtcatcagccgccgtccgagggcgacatattgctggatgaccagccgctggcgagctggagcagtaaggcctttgcccgcaaggtggcctatctgccgcagcagttgccgcaggcggaggggatgacggtgcgcgagctggtggcgattggacgttatccgtggcacggtgcgctcgggcgttttggcgtcgctgacagagagaaagtggaagaggcgatcgcgctggttgggttaaaaccgctggcgcaccgtctggtggatagcctgtccggtggcgagcgtcagcgcgcatggatcgcgatgctggtggcgcaggacagccgctgcctgctgctcgacgaacccacttcggcgctggatattgctcatcaggttgacgtcctggcgctggtgcatcgcttaagtcagcagcgcggcctgacggtgattgccgttctgcatgatatcaacatggcggcacgctattgcgactacctggtagcgctgcgcggcggtgaaatgatcgctcagggtacccctgccgaactgatgcgcagcgaaacgctggaacatatctacggtattcctatgggcatcctgtctcacccagccggggctgcacccgtgagctttgtctactga

SEQ ID NO: 113833 - DNA, 2211 bp, Enterobacter cloacae
atggcgctttccaatactgctcagccaattaacacgtcgctgcgtaaaatcgcggtcgtcgtagccacagcggttgccggcatgtctgcttatgctcatgccgccgaaaccccgaaaaaagaagaaaccattactgttactgccgcaccggctgcgcaggagagtgcctgggggcctgcaccgacgattgcagcaaagcgcactgcaacggcgacgaaaaccgatacaccgatcgagaaaaccccgcagtccatttccgtggtcacacgtgaagagatggacatgaaacagccggggacggttaaacaggcgctggcctacacgccgagcgttttcgcaacgcgcggcgcctccacgacctatgacgtggtttctattcgtggttttacgacctccagtacagtgaacaccaaccagtatctggacggtatgaagctgcaaggggataactactctgaagcgtcgatggacccatacttcctggagcgcgtagagctgctgcgaggcccgacgtccgtactgtatggaaaaagccaccctggcggcgtagtgagtatggtcagcaagcgtccaaccacggaaccgttaaaagaaattcagttcaaaatggggacggataacctgtggcagactgggtttgacttcagcgacgcgattgatgataacggcgtgtggtcctaccgtctgaccggcctgggacgcagtgaaaatgcgcagcaggagatggtgaagtctactcgttacgcgattgcgccgtctttcagctggcgtcctgatgataaaaccgatttcactttcctgagcaacttccagagcgatccggatgcgggttactacggctggctgccgcgtgaaggtaccgttgtgccttactatgatgctaacggaaaggcgcacaaactgccgaccgatttcaacgaaggcgatgaagacaataagatctcccgtcgtcagaaaatggtgggttacagcttcgcgcatgaattcaacgacaccttcaccgtgcgtcagaatctgcgttataccaaaatcaatacgctttaccgttcagtttacggtaatggctatatcgctccggcccagatcagccgtgcgtacgtgcgctcagatgaagacctcaactcgttcacggttgatacacagctccagtcgaaattcgcgaccggtgccgttgaccatacgctgctgacgggggtggattaccttcgtatgcgcaatgatattgatgctgactacggtaccgccgatccgatcagcatgaacaatccgcagcacggcaatgcgaacgtcaatgtgaacttcccgtatgccatgctcaatcgtcaggagcagaccgggctctatgcgcaggatcaggcggaatgggataagtgggtactcaccatgggtggccgctatgactttgcaaaaacgtctgcctttaaccgtaataacgggaccaccgcggaaattaacgatcaggcatttacctggcgcggggggattaactacctgttcgacaacgggattaccccatacttcagctacagtgaatcctttgaaccgctctctggcaccacccagggcggcaaaccgttcgatccggcgcgcggcaagcagtatgaagcgggcgtgaagtatgttccgaaagatctgcctgttgtggtgacggccgcggtctatcagctgaccaagaacaacaacctgaccgccgatccggcgaacccgaccagcggctttagcgtgcagggcggtgaaattcgctcccgtggctttgaactggaagcgaaagcggcagtgtcggctaacgtgaacgtgacggcggcctacagctacaccgatgcggaatatacccacgatacctggtatgaaggtcgtcgtccggcagaagtaccgcgcaacatggcatccctgtgggcggattacaccttccacgagacggcgctgagtggcctgaccgtcggtgcgggcgcgcgttacatcggtaacacggtgacgtactactcctcagcgtcgcctaaagcctatgagtcctttaacgtcgcgggttatgccctggcggatgcgaccgtgaaatacgatctggcgcgcttcggtctgccgggatcttccgtcggcgtcaacgtgaacaacatctttgaccgtgaatacgtctccagctgctacagcgagtatgcatgctactggggagcaggacgccaggttgttgccaccgcgaccttccgcttctaa

SEQ ID NO: 113834 - DNA, 996 bp, Enterobacter cloacae
atgaggcgtagcaaagaactattcatcagcgcaatggctggcctaatcatgctgttttcagctccggcattcgcaacttgtacatttacgggaggcggaagtagcgggggaattgttaccttcaacattcccgctgtcatccagcttgagccagacgttcaggtcggtaccattatttatgacgccagcgtggaatcaggtgaaattgcgcaaagatgtgatggtgattccgttcgggtacgtagaggctatctctcattgagtgatgctgatgcgcgtgaagatgttttacccggagtgtataaaaccaacgtgaccgggattggcattcgcgttgcagcgtctacaacccagttccccagctataccgaagaagacattatcaggccggaaacttatcttggcacgatcagaagcttttcaacgaattacaatttccgggctaccgctcagttgatcgttattggtgaagtcgaagagggcgatcttaatacgtccctgttaacctcacatgaaacttacgataacgacgtgataggcgaaattcgcttttcaccaaccagtgtgcacattacgacaaacacctgtaacctggcggataaaaacatctacgtgccgctggaaacggtcaatgcgcacgattttaacggtcagtattctgacatcctgaccgacagtcgtttcaggattgatattacggactgcgccgccgggacaaaaattgattatcagttcaccagtgcagggtcgactggcgtaacggatggcaatatcctcaatattgctaccggagacaacgctgcaagcggcgtaggcattcaaatcctcgacaagaacgatgcggtgttacagttcgaccagagctacacggcaataacccgtacccaggacaacgtcccggttgagatcccactcaaagcccgttacatcaaaacgggagaggttaaagccgggaaagtcgacgccgtcgcgactttcgaactcttctatcgttaa

SEQ ID NO: 113835 - DNA, 2478 bp, Enterobacter cloacae
atgtcgtcatctccactctacaaacaggttctgaagggaatcgcgttagcgctgctcgcgatgatccagcctgtgagtgcagatgacgaatttaacctgcggatcctcgagatggacactccgctggaaaacacctcaacgctaaaaaatttcattaatgataatggcttactgcccggaaactttctgacgaccattatgtgggatcgggatgttctggataaacgcacggtgagttggatcttgtctgacgataagcagcgcctgttaccggagctgaccaaagcggatctgcgtgcattaggggtaaaagtcgacacgatcccggacatgaaagatctggatgatgcggtgataatcgatgacatctcccattttattgataatgcccgctacgattacgaccaggataatcagaccctcaagctggtgatcccgcaaaaataccgcgatcaggctgcggccggggctatcgagccgaaattctgggatgacggtgctcccgccgcctggacaagctaccagtttagcggctctcagcagcactatcgttctggtaaaacgtcatctgcatggcttggcctggagtcggggatcaacctcggggcgtggcggttgcgtaacaacagcacctggagtgacaacgccggttgggatgcaatcgccagtacgctgcaacgtgatatcaaaaccctgcaaagccagcttgagataggccagacgtacactaacggcgagcttttcgacagcgtccaaatgaccggcgtgaagctggaaacggatacttccatgctgcccaccagccagcaggggtttgcccccgtggtgcgtggtatcgcaaatagcgatgcaaaggtcaccatcaggcaaaacggctacaccatttatcaaagcaacgtctctccggggccatttgagatccgcgatttaagccaggtcacatccggcccggatctggaggtgacggtggaagaggccgacggcagcgaacacagcttcatccaggccagcgcatcggtaccggtgctacagcgggaaggggcatttaaatattcgctggcggcagggcgttatcgcggtaatgaaggtgaggacgagcccccttttctgcaagggacggtcatttacggcctgccttatggcgtaacaacatacgccggcgcgctcgttgcatcgtcgtatcaggctatgctggcgggaacaggggccgatcttggccgtttcggatcggcatccgtggatgtgaccgccgcccgtacggcttttgatgatggacgagatgatgcccgcgggatgtcatggcgtgcgcagtattccagggatattccggatacagacaccaccgtgacgcttgccagctaccgttattccacctcagggttttatacctttcaggaagctgtcgaccagcgtgacagcgagattgacgatgggatttatacctatcggcgaaccaataatcggcgcagccgcatgcaggttaatctttcccaacgcgtttcggactggggatcggcttaccttaatggttatcagcaggattactggaacatggcgggacacgagcgcagcgtcagtgcggggctaagctccggctggcgcggtataacctggtcggtaagctacagcctgacgcgtacgccggacgccaataccgatcggcaaatggcgttgatggtcaacgtacctctttcacgctggctagcgaacgcatggtcaacttacagcgccaacactgccagcggtggattcgtttcgcatcaggtagggatcggcggcacggcacttgagaacaataacctcagctataacctccagcagacctatgccagtcaagatactggctatggcggcagtgtatccgggcgctaccggggatctgccggtgatgtcgggctggggtataactacgggggcgataaccgacagtggaactacagcgcgcagggttcaattgttgcgcatgaacatggagtaaccctggggcaatccgtccgcgacgcctttgccattgtccatatcaaagatggcgataacgtcaaagtacagaacgggcgagggatctacaccgatcgctttggtaacgcgattgtcccttccctgacggcctaccggaaaaacggtattacggtcaacacccaggatcgtgaagatattgaaattgccgccgctacccaggatgttgtcccaacaaaaggtgcggccatctcagcgatttttgatgcacgagtggggaagcgtgcgcttatcacgctgcttttccacggcaagccggtacctttcggcgccattgtcacgcaggaaagtgcaacggctatcgtcggtgatgaaggagaagtctggcttaccggtctgcatgaagcggtttccctgaatgtgcagtggggtgacgggcgcgatcaacggtgtgcgtgggcgggggatctccctcccgggcgctcagcaactattttgaaaatgacggtaaattgccaatga

SEQ ID NO: 113836 - DNA, 681 bp, Enterobacter cloacae
ttgattatctcttgctgttcagtacaggcaagtgtggttctcggtggcacgcgaattatttatccatcgaataaatccgaagtacaaatagcactcaaaaataaagaccctcatactcgatatctggtgcaaagctgggtgagttaccccaacgatgcaaaagcacctttcatcattacgccgcctgtctataaattacaggaaaatcgtcagacccttttgcacatcatttttaccggcgataaaaaaaatctgcccgcagatcgcgaatctttatttctggcgaatgtgaaatccgtctcggcgttatcacctgacttaaaagacaagaatacgctgcaattcgcgatgaaaacgcgtctgatgctgttctggcgtcctgctgatttgaaagaaaccgatgcgctacaagcctatgaaaaaatcaccttccgccgccaggggaacaagctcattgcgaaaaaaccaacgccgttttacgtctcctttggcgagctggccgtgggcgggaaaagtgtccctgtgactgacacaagaacaacgccgggggcgatttcaatgatggtcgcacctttcagcgagcaatatttttctgtgcctcaatctgcaaacgggcccgtgacgtggactgctattagcgatttcggcgcgcaaacctcccagcgcaagcaggctctttaa

SEQ ID NO: 113837 - DNA, 573 bp, Enterobacter cloacae
atgagtaaatatgttgtttcaacggtgctggccagcacgtttatggctgcactttctctgccggtatttgcagcgaatgattctggtacggtaaatttcgccggaaaaattgtggcggatacctgtgaaattgatgttgatggctcggggtccaatacttccaccgtcacatttgcagatacttatccttctgattttggtactgacggtcaggtcgggacgtcgaaggcctttaagattgaagtgaaaaaatgtgatccgctggttgccaaactgaacctcaagttcagcggcaccacaacggatgcggaatacaagcgcctgaagaacgatctttccggcgctggcaatgcgaccaacgttggcatcattgtcagtaatgaaaatgggactaaggaggacgtggttttcaacggatcagaaccggaagccggtaccgatgttgcgaacgatgccactggcgccacagcatctgtctttaattacaccgcgaaagttattcaggttggtgataacaaaccaacagcaggtcactactcctcatctgcaacgttcgaggttgtttatcgctaa

SEQ ID NO: 113838 - DNA, 2523 bp, Enterobacter cloacae
atggcggggaatgaccgcgagccaataggacgtaagggaaagccgacgcgtccggcgaaagaaaaggtaagccgtcgtcgcctcagagatgaggagtatgacgatgactatgaagacgattatgaggatgaagaaccgatgccacgtaaagggaaaggcaaagggcgtaagcctcgtggtaagcgcggctggttctggttgctgctgaagctgttcattgtttttgttgtcctgatcgcgatttacggcgtttatctggatcagaagatccgcagccgtatcgacgggaaagtctggcaattgcctgcggcagtgtacggccgcatggtgaaccttgagccggacatgtccatcagcaagaacgagatggtgaagctgctgcaagccacgcagtatcgtcaggtcacgaaaatgacccgtccgggtgaatttaccgtccaggcgaaaagcattgagatgatccgccgtccattcgacttcccggacagtaaagaagggcaggtgcgcgcgcgtctgacctttgacggcgatcgcctggaaaccattgagaacatggataacgatcgccagttcggtttcttccgtctcgatccgcgtctcatcaccatgctgtcgtccgcaaacggcgaacagcgcctgttcgtggcgcgtaatggcttcccggatctgctggtagataccctgctggcaaccgaagaccgccacttctacgagcacgacggtattagcctttactccattggtcgtgcggtactggcgaacctgactgccgggcgtacggtgcagggggcaagtaccctgacccagcagctggtgaaaaacctgttcctctccagcgagcgctcttactggcgtaaagccaacgaagcgtacatggccgtgctgatggatgcgcgctacagcaaggatcgcattcttgagctgtacatgaacgaggtgtacctcggtcagagcggtgacaacgagatccgcggcttcccgctggcgagcctgtactactttggtcgtccggtagaagagctgagccttgaccagcaggcgctgctggtgggcatggtgaaaggcgcgtcgatctacaacccgtggcgtaacccgaaactggcgctggagcgacgtaacctggtgctgcgtctgctgcaacaacagcaggtgattgaccaggagctgtacgacatgctgagcgcgcgtccgctgggcgttcagccgcgcggtggggtgatctctccgcagcctgcctttatgcagatggtgcgtcaggagttgcagtctaagctcggggataaagtgaaagatctctccggcgtgaagatctttaccacctttgactccgtggcacaggacgccgcagaaaaagcggcggtagaaggtattccggcgctgaaaaagcagcgtaagctgagcgatctggaaaccgcgatggtagtggttgaccgtaacaccggcgaagttcgtgccatggtgggcggtgctgagccgcagtttgcgggctataaccgtgccatgcaggcgcgtcgttcaattggttcactggcaaaaccggcgacctatctgaccgcgctgagccagccgaatctttatcgcctgaatacctggattgccgatgcgccaatttccctgcgccagcctaacggccaggtttggtcaccgcagaacgatgacagacagttcagcggccaggtcatgctggtggatgcgttaacccgctcgatgaacgtgccaacggttaacctcggaatggcgctgggcctgccggccattaccgacacctggcagaagctgggggtaccgaaagatcagctgcacccggtgccagcgatgattctgggggcgcttaacctgacgccaatcgaagtggcgcaggcgttccagaccatcgccagcggcggtaaccgtgctccgctttccgctctgcgttcggtgattgccgaagatggctccgtgctgtatcagagcttcccgcaggcagaacgtgcagttccggcgcaggcggcctatatgacgctgtggaccatgcagcaggttgtccagcgcggtacaggccgtcagctgggagcgaagtatccgggcctgcatctggcgggtaaaaccgggaccaccaacaacaacgtcgatacctggttcgccggtattgatggtcgtgaagtggtcatcacctgggtggggcgcgataacaaccagccgaccaaactgtatggcgcgagcggtgcgatgtcgatttaccagcgctacctggccaaccagtctccggtgccgctgaacctggttgccccggaagatatcgttgatatgggcgtggacgcatcgggcaactttatctgcggtggcgggatgcgtacgctgccggtctggacgactaacccggatgcgctgtgtcagcaaagtcagccagaagaaccgacaggtaacccgttcgatcagtcttctcaaccccagcagccgcagcaacagccgcagcagcagaatgagaagaaagacagcgacggtgtcgccggctggatcaaggacatgtttggcggaaactaa

SEQ ID NO: 113839 - DNA, 2430 bp, Enterobacter cloacae
gtgtcctctttgcccgtcgccgtcgtccttcctgagctactcgcagccttagaacatgcgccacaggttttgctcagcgcgcccaccggagcgggtaaatccacctggctgcccctgcaaattctgcgcgaggggagcatcagcgggaaaattatcctgctggagccgcgcaggctggcggcgcgcaatgtggcgcagcgcctggctgaactgctgaatgaaaaaccgggcgagacggtagggtaccggatgcgcgccgaaacctgcgttggaccgtccacgcggctggaggtggtcaccgaaggtattctcacccgtatgctgcaaaacgatccggagctgaccggcgtcgggctggtgatccttgatgaatttcacgagcgcagcctccaggccgatctggcccttgcgctgctgctcgacgttcagcaggggctgcgcgacgaccttcggttgctgattatgtcggcgacgctggataacgagcggctccggcagacgctccctgacgcgccgatgatctcctctgaagggcgtgcgttcccggtcgagcgccgctatcagccgctgcctgcccatcagcgttttgacgaagcggttgccatcgccaccgccgaattgctccgtcaggaacccggctcgctgctgctgtttttacccggcgtaggcgaaatccagcgcgtacaggagcagctggcatcccgggtgaacagtgacgttatgctgtgcccgctctacggcgcgctgccgttggctgaccagcgcaaggcgatccttcccgcaccggcggggcagcgcaaagtggtgctggcaaccaatatcgcggaaaccagtttgaccatcgaaggcattcgcctggtggtggacagtacgcaggagagggtggccagttttgatccgcgtaccgggctgaccaggctactgacgcagcgcatcagccaggcctcaatggtgcagcgcgcagggcgagcagggcgtcttgagccgggtatttgcctgcatttaaccagcgccgagcaggcggagcgtgcggcattgcagagcacgcctgagattttacaaagcgatctctccgggctggtgatggatctgatgcagtggggctgcccggaccctgaccagctcacctggcttaatcctccgcctgtcgtgaacctttccgccgcgcgcagcctgctgacccagcttggcgcgctggaagacgagcgactgacggcgcgcggtcagaaaatggcggcgctgggcaacgatccgcgtctggcggcaatgctggtggcagcacagggcgacgatgaaattgccacggcggcaaaactggcggctattcttgaggagccgccgcgcggtggcagcagcgatctgggacaggccttttctcgccatcagggaaactggcaacaacgcgcgcagcagctgtgtaaacgcctgaattgccggggcggttcgcctgacagcgataaagttatccctctgctggcccaggccttcccggacaggatcgcgcgccgtcgcgggctggatggtcgctatcagctggcaaatgggatgggcgcgatgctggacagcgatgacgccctgacgcgtcacgaatggctgatcgcgccgctcttgctccagggcagccattccccggacgcgcgtattttacaggcggttgccgtggatattgacgccctgacgcgtgcctgcccgcagctgcttcagcaatctgacatcgtggaatgggatgatgcccagggcacgctgaaggcgttacgtcgtagccagattggcaaactgacgctcgggacgaaaccgctggcgaagccgtcggaggaagagttacaccaggcgatgctgaacggcattcgggaaaaagggctgagcgtactgaactggacgccggaggccgaacagtatcgcattcgcctgcattgcgccgcgaagtggctgccggaacaggggtggccagcggtgaatgatgagacgctgctcgcgacgcttgaacaatggctgttgccgcagatgaacggcgtacactcgctgcgcgccctgaaggcgcttgatgttaaggcagcgttacagaatttactggactggtcgttacgtcaacgtctggatagtgaactgcctgggcattacactgtgccaaccgggagccggattgccattcgttatcatgaggataatccgccggcgctggcggttcggatgcaggagatgtttggtgaggccaccacgccatccatcgctgaagggcgcgtgccgttagtgcttgagctgctttcgcctgcgcatcgtcccttgcagatcacccgcgatctgggggcgttctgggcggggagctatcgtgaggtgcagaaagagatgaaagggcgatatcccaaacacgtctggccggacgatccggcgaataccgcgccgacacggcgcacgaagaaatattcgtaa

SEQ ID NO: 113840 - DNA, 555 bp, Enterobacter cloacae
atgtctgagtcaaaacggctattcttcgccattgaattacccaccacgcttcaacggcagattgttcgctggcgcgccagccacttccccgcagaagcgggccgccccgtcgtcgccgccaatatgcacctgacgttagcctttcttggtgaagtaagcgctgaaaagcagcgcgcgttaagcgcaatggccggacgcatttcgcagccggggtttacgctgcatcttgacgatgccgggcaatggctgcgctctcgggtggtctggctggggacgcggcagccccctcgcggactgctacagctcgccaacatgctgcgggcgcaggccgcgcgcagcggctgttatcagagcccgcagccgtttcatccccacattaccctgctgcgcgatgcgggtcaggccgttgccatcccgccaccgggctttcactggtcctttcaggtgaatgaatttgcgctgtacgaatctgcctttgtacaaggacgcacccgctatactccgcttcagcgctggacgctgggcgacacgttaaggaatcctgatgaagtttag

SEQ ID NO: 113841 - DNA, 705 bp, Enterobacter cloacae
atgaagtttagccctgcactccagcccgccacgctgatccagcgttacaaacgctttctcgctgacgtgatcacccctgagggcgaaacgctcacgctgcactgccctaacaccggcgccatgaccggttgcgccacgccgggtgacacggtctggtattccacatcagaaaatactaaacgcaaatatcctcatacctgggaaatgaccgagacgcaaagcggggcatttatttgcgtgaataccctgcgcgcaaatcagctggttaaggaagccctgacaaatggaatgcttcctgaactggtgggttacggcacgcaaaaaagcgaagtgaaatatggcgatgaaggcagcagaattgattttatgttacaggcggaagaccgccctgagtgctatattgaagtgaaatcagtgacgttagcggaacaggaaaacggcttctttccggatgcggtaacgctacgtggccagaagcatctgcgagagctaatgagtgtagcggcggcgggcaagcgcgccgtgttgctgtttgcggttctgcattcagccattgaacggttttccccggcccgtcatattgatcctaaatacgcgcaattgttgaatgaggcacaaaagcagggggtagagattttcgcctataaagcggaactttctgccgataatatgactctgagatcctctcttcccattgtcttataa

SEQ ID NO: 113842 - DNA, 456 bp, Enterobacter cloacae
atgcaagaagggcaaaaccgtaaaacatcgtccctgagtattctcgccatcgctggggtggagccgtatcaagagaagccgggcgaagagtatatgaacgaagcccagctgtcgcacttcaagcgtattcttgaagcatggcgtaatcaactcagggatgaagtcgatcgcaccgttacacatatgcaggatgaagctgctaacttcccggacccggtcgaccgtgccgctcaggaagaagagttcagcctcgaactgcgtaaccgtgaccgcgagcgcaaactgatcaaaaagatcgaaaaaacgctgaagaaggtcgaggacgaagattttggctactgcgaatcctgcggtgttgaaatcggtattcgtcgcctggaagcgcgtccaacagccgatctgtgcatcgactgtaaaacgctggcagaaatccgcgaaaaacagatggccggctaa

SEQ ID NO: 113843 - DNA, 891 bp, Enterobacter cloacae
atgtctgaatctcactatatcgggcgctttgcgccatctccctccggtgaattacacttcggctcattaattgccgcgctcggcagctacctacaggctcgcgcccgccagggtcaatggctggtccgcattgaagatatcgatcctccacgtgaagttcccggtgcagcagacactattctgcgtcagctggaacattacggtcttcactgggacggcgacgtactctggcagtctcaacgccatgatgcctaccgtgaacgtctggcgtggcttgctgaacagggcctttcctataactgcacctgcacgcgggcgcgtattcagagcgtaggtggcgtttatgacggccactgccgtacgcggcacaacggtcctgagaatgccgccgtacggctgatacagcgttctccggtgacgcagtttaccgacgtactctcaggaacaattcaggcggatgaacgcctggcgcgtgaagattttattattcaccgtcgtgatggtttgtttgcctataacctggcggtggttatcgatgaccatttccagggcgttacggaaatcgtgcgcggggcggatctggttgagcctaccgtgcggcaaatatcgctttaccagcagtttggctgggcggtgccggattacatccatctgccgctggcagtcaatgaacagggaaataagctatcgaaacagaatcatgccccggcgctgcctgacggcgatccgcgcccggttttgatcgacgcgctgcgatttctcaaccagaatgtaacgcaggaatggcaggatctgagtctggatgaattgctgaaaacggccattgctgactggacgcttatggccgtgccaaaaatccagcattctcaaatgcgttgcgctgagctatga

SEQ ID NO: 113844 - DNA, 1344 bp, Enterobacter cloacae
atggcgaacgacgctattgcacagccacacatgtcggtcattccgcgtgagcagcacaatatttcccgcaaagatatcagtgaaaatgccctcaaggtgctctatcgtctgaataaagcaggctacgaggcctatctcgtcggcggcggggtgcgcgatttactgctgggcaaaaaaccaaaagatttcgacgtgacgaccagcgccacgcctgagcaggtgcgtaaattattccgcaactgccgtctggttggccgccgtttccgtctggcgcacgtgatgtttggaccggaaattattgaagtggcgaccttccgcggtcaccacgaagcgggcgttaacgatcgcacgacttcccagcgcggccaaaacggcatgctgctgcgtgacaacatcttcggctctattgaagaagatgctcagcgtcgcgatttcaccatcaacagtctttactacagcgtggcggattttaccgtgcgcgattacgtcggcggtatgcaggatctgaaagacggtctgattcgcctgatcggcacgccggaaacacgctatcgcgaagatccggtccgaatgctgcgcgctgtgcgtttcgccgccaagctgaacatgcgtatcagcccggaaaccgcagagccgatcccgcgcctggcgacgctgatcaacgacgtgccccctgcccgtctgtttgaggagtcgttaaagctgctccaggcaggctacgggtttgaaacctacaacctgctgcgtgagtacaacctgttccagccgctgttcccgaccattacccgctacttcaccgaaaacggtgacagcgcaatggagcggataattgcgcaggtgctgaagaacaccgatacccgtattcataacgatatgcgcgtgaatccggcgttcctgttcgcggccatgttctggtatccgctgctggaaacggcgcagcgcattacccaggagagcggtctcgcctattatgatgcgttcgcgctggcggcaaacgacgtgctggacgaaggctgtcgcacgctggcgatcccgaaacgtattaccacgctggtgcgtgatatctggcagcttcagctgcgtatgtcccgccgtcagggtaaacgcgcctggaagctgatggagcatcctaagttccgcgccgcgttcgatctgctctctctgcgtgctgaagtggaaaggaacccggaactacagcgcctggcgcagtggtggggcgagtttcaggtttctgcgccaccggagcagaaagatatgcttacggatctggatgatgaaccggcaccgcgccgtcgtcaccgtcgcccgcgcaagcgcgcaccgcgtcgtgaaggtacggcatga

SEQ ID NO: 113845 - DNA, 480 bp, Enterobacter cloacae
atgacccttgcatatatcgccatcggcagcaatctggcctctccgctggagcaggttaacgctgccgtgcaggccctgggagagatcccccaaagccgcattgtcgcgctgtcctcattttaccgtacgccgccgctcggcccgcaggatcaacctgattatctgaacgccgccgtggtgctggaaacgacccttgacgcagaaacgctgctggataatacccagtgtattgagctacagcagggtcgtgtccgcaaagccgaacgctggggaccgcgcacgctcgatctcgatattatgcttttcggtcacgaggtgattaacaccgaacgcctcaccgttccgcattacgacatgaaaaaccgcgggtttatgctctggccgctgtttgaagtcgcgcccgatctcaccttccctgacggctcctcgctgcaagccgttctgcaaaatctcaacgcggataaaccggcccgctggtaa

SEQ ID NO: 113846 - DNA, 792 bp, Enterobacter cloacae
atgaaaccaaccaccatctccttattgcagaaatgcaaacaggaaaaaaaacgcttcgccactatcaccgcgtatgactacagcttcgcaaaactgtttgccgaagaagggatcaacgtcatgctggtcggagactcgttagggatgacggtacaaggacatgattccactctgccggtcacggtcgaggatattgcttaccatacccgcgccgtgcgccggggtgcccccgcctgcctgctgctttccgatctgccgtttatggcgtatgccaccccggagcaggccttcgaaaatgcggcgacagtgatgcgcgccggcgccaatatggtcaaaatcgaaggcggcgcctggctggtcgatacggtgaaaatgctcaccgaccgcgccgtgccggtttgtggtcatttggggctgacgccgcagtcggtcaacatctttggcggatataaggtgcagggccgaggcgatgcggcgcagacgctgtttgatgatgccgtggcgctggaagccgcgggcgcgcagctgctggtgctggagtgtgtgccggttgagctggctaagcgtatcactgaggcgctgtcgattccggtgatcggcatcggtgcgggtaacgtcaccgatggccagattctggtcatgcacgacgccttcgggatcaccggcggccatattccaaaatttgctaaaaatttcctgtcagaagcaggcgacatgcgtgctgctgtgcggcagtatattgccgaggttgagtccggcgtttatccgggcgaaaaacacagtttccattaa

SEQ ID NO: 113847 - DNA, 852 bp, Enterobacter cloacae
gtgctaatcatagaaaccctgccgctgctgcgtcagcatattcgtcgggcgcgtcaggaaggtaaacgtatcgcccttgtcccaaccatgggcaacctgcacgatggccatatgaagctggtcgatgaagcgagagcccgggcagatatcgtggtagttagtatcttcgttaacccgatgcagttcgatcgcgaagacgatctggcgcgctacccacgtaccttgcaggaagattgcgagaagctcaaaaaacgtcatgcggatatcgtcttcgcaccggcacccgcagatgtgtatccccagggtaccactgaatcgacctacgtcgacgtgccgggtatttcgaccatgctggagggcgccagccgcccgggccatttccgtggcgtctccaccatcgtcagcaagctgtttaacctggtgcagccggacatcgcctgctttggcgagaaagatttccagcagttggcgctgatccgcaaaatggttgccgacatgggctacgacatcgagatcgtcggcgtgccgattgtacgcgcgaaagatggcctggcgctcagttcccgtaacggctatctgaccgccgaacagcgtaaaattgcgccgggcttaagcaaagtcatgaatacgatggcagagcaactgctggcaaaagagttaacagcagaagagattatcgccctggctgaacaggcgctgaacgagaaaggtcttcgtgctgacgacgttcaaattcgggatgccgatacgcttctggcacttacagagaccagcaaacgtgcggtaattctggtggcggcatggctcggccaggcccgccttatcgataacaaagtggttgagctggcgtag

SEQ ID NO: 113848 - DNA, 381 bp, Enterobacter cloacae
atgattcgcaaaatgctgcaaggtaaacttcaccgtgtgaaagtcactcaggccgacctgcattatgaaggctcctgcgcgatcgaccaggattttctcgacgcggcgggtattctcgaaaacgaagccattgatatctggaacgtaaataacggcaaacgcttctctacctacgccattgccgctgagcgcgggtccaaaatcatctccgtcaacggtgcggcggcgcactgcgcggacgtaggcgatatcgtgattatcgccagctttgtcatgatgtctgacgaagaagcgcgtcgctggcagccaaaagtagcctactttgaaggcgacaatgagatgaaacgtaccgcgaaggcgattccggtacaggttgcctga

SEQ ID NO: 113849 - DNA, 609 bp, Enterobacter cloacae
atgatttctaaaaaatatggtttggcaattgctatggcaagcgtattggctgcgggttcagcggtagcagcagatcctgacaccggcactattactttccacggcatggtttctaacaatacttgccaggtctcccttgaccagaaaatcgatcagaacggtaacgattttgacgtgactctggacactgtatttgtgcgtgatttcgcaaacgcactgggtagcaccagcaccctgggtgaaaagaaattcagcctttcactgaccggttgtgataccgcaactgtgaagaaagcatctgcacagttctcttcctgggctggctcctcttctaccgaaggcggtctgctggttccaccaagcaatgctcagggttcagctaagaacgttaacctggtgctgtcaaacgacggtaactcagctaccgatcagatcaaaattgaccagactaacaactcccagaaagcaaccatcgatgaaacttctggcgcaggaaacctgtactaccgcgtagcgtacacccagggtcagggttgggatgcaacaagtaatccagtttctgctggtaccgtgcaggcacaggttgccttcaccatgatttacgaataa

SEQ ID NO: 113850 - DNA, 210 bp, Enterobacter cloacae
atgtctcattcagtcttcattaaaagttttcaagccgtattgctcgcaactgccgttttggccacatcgaatgcaagtgcggatattgttatttccggcacccgtattatctatccacagtcatcgaaggatgttgttgttaatctcgataaccatggaaccaaaccgcttttggttcaaacctgcttgatgatgggcgtgatggcgtaa

SEQ ID NO: 113851 - DNA, 2592 bp, Enterobacter cloacae
atgttatttaaacgttctcttttatgtcttacgataagtgcagcattgcctttttatgcctgtgcagaaaatatcacgccagcaaaagatctgcctgataatgaagaagaggtcgagtttaacgatcaatttcttttaaatggcagcgctaatattgatattaatcgtttttcacatggcaacccggttttaccggggacctatcgcactaagatcaacctgaacggtaaactgaagtccaccgtggaggtcacgtttaaagataacggaacacctcgtgcgaccccgtgcataacaaaactgctgctgtcacaatcgggtgtcgacaccagcacattgcctgacggaccggaagacgatgaaacctgcgtcgatattaaaaaatctttcgctggcgctacggttagctatgacagtggcaagcaggctatggattttaattttccccagatttatgtgctgaaacgcccggcgggctatgtcgatccatcgttgtgggataacgggattcctgccgctctgctctcttatgacatgaacggctggcgtagcgagaacaacggcagtacatcagaaagtgcatatgtagggttacgctatggtctgaatatggggccatggcgcctgcgctcgcgtggcaattttaactgggacaaagatagcggcacaaaatactccagtcaggatgtctatttgcagcgcgatattacaccattgagtgcccagtttgtcatcggcgactcttacacgcgtggcgaggcatttaactctatgagccttcgcggcgcacgcatgtacagtgacgatcgcatgttgccaatggggtccacaggctacgcgcctgtcattcggggtgtcgcgaacagtaacgcgaaggtcagcgtcacgcagagcggcaataagatttatgaaacctcggtgccaccaggcgcgtttgaaataaacgacctgagtaccacaggttacggaaatgatttactggtaacgattgaagaagcggatggcagcaaacgctcctttaccgtacccttttcatccgtcacgcagatgctccgtccgggagcctctcgctgggacgtcggtttaggtgaattaaatgacgattcactgattgatgcgcctaaagtgggttacggtacgctttactatggcctgaataatacgttcacgggttatattggcgcgcaatataccgacatggatttttatgccggtattctcggcgtggcaatgaacacccctgttggtgcgtttgcattcgacgttacgcaatcttatgcagatattgaggggctggataaattaagcgggcaaagttatcgtttaacctacagcaaaatgattgagtcgacgaatacttcctttaacgttgcggcttatcgtttctcgacggaagactacctgacgcttaacgatgcggcgcaacttcaggacagtattaggcaccagaagtactcaaaccgtagctatgactcaaacgaagcgctatatgcagactatcagcgcaccaaaaaccaggtgcaaattagtcttaaccaaccgctaacctccggagaagacaattttggctccctgtatgtaagcggcacctggcaggattactggaacgcgacgggctctacttccaattacaatattgggtataacaatagcttcacctacggcagctacagcttgtcattacagcgaacctatgatcagaacggcaagaaagacgatagcgtttatttaagcctaagcattccattaagtgtattctcaaaagatagagggaatgccggtggattctcaaacatcaatatgggattacgttccgaccttaaaggcggcacaagctttaacacgtccgcgggtggaaatacgcaagataataaggtgagttattccgttagcgcctcgtcaaacagtggtaattatggtgacctgaatcagataagcggctacgggtcctataacagtgaatatggcccgctggggttatctgcctcttttggtgatgacaacagtaaacaatattctgcctcctataacggtggcatggtcatccattcaggaggtattgcatttgcgccagggagtattggtgacaacgatgcgctggcactggtcaaagcgagtggtgcgaaaggcgccggtatcggctttggtaacagcgaaataggcagttccggctatggcattctgccttatatgtctgcctaccgtgaaaaccgcgtataccttgatatcagcacgctggaaaacgacgttgaaattaaaaacaccagtgaaattacggttccccgcagtggttccgttgtgctggttgattttgcaaccgatgaaggtcgttcattaattttagaacttaagcgcaccgataacggatttattcctttaggcgctgatgttttaaatgaaaaaaatgaatctattggcaccgtgggacaggcggggcaagcctatgtccgcggcgttgaggatgaaggcacgcttcatgttgtctggggaagcgataaagacagtaaatgtgacgtgcattataacgtctcatcacatgctcaaaaagtaggacttacaacggtgctcagcaatcaagtgtgccagatgtaa

SEQ ID NO: 113852 - DNA, 576 bp, Enterobacter cloacae
atgaaaaaaaatctttatagcctgtcagtcgttgccgtaacgatgctggcgttatcaggttcggcgctcgccgagggcacgaatctcgatgttaactttacggccaatatccgtgaaaccacttgtgatatgaaactgatgggcggtacgggttccgatacggatcaaacactgctcattggtaacggcggccaggtgcgtctcgacgatgtcaaagctggcaccgcaaatgccaatttcaaaattgtgattgttgaatgcccggcctctctgacctcactgaaagccacggtaaaaggaagccaatcgggttatttgcttagcggccttgttaatcaaaaaccaaaagccgatggaggcgcagatttctctgctgttgaaattgccagagccagcgcaccggaggccccttttatcatcaactctgacgatgatgctaagcgactggtctggagtgcaacagaaatccagaataaagaagttcctttagtagccacaatacgtgaaaccaaagttaatagcatgacagttggtgattttgaggctactgcgacttttgaatttagctacgagtaa

SEQ ID NO: 113853 - DNA, 564 bp, Enterobacter cloacae
atgaaatttaaatctacttttatcgccctgtccgtttctgcacttctgtattcgggaatggcaaacgcagcaattacaggtactgacagtgttaaattaacgataaaatcaaaaatagtctcgggcacgtgtacagcaaaagtgcttaacggtgcaggaactgcgtccactgaaattgcgtttggcgacgtatataaaaccgatctggtaaataagactcgtgtcgagccgttaaaaattgcctttacaaactgctctggtgtaactaaggcaacggtagccgcagcgagtggtgcaggtgggggatgctcgggtccgaaaacggacggagattcttattctgctgggttagcaacaggcttcgaaatctggtcaggagttgtagatactggcgtaatgttgagttgcaaaaggcctccggcggcacaggaggtcaccattgctgacggtgtaggggaattcccgatgaactcacgcattgtgattgcgaaagacagaaatattgccgatgttggcacaggtgccgttactgcgccagtaaccttcacagtcacctatcaataa

SEQ ID NO: 113854 - DNA, 609 bp, Enterobacter cloacae
atgcaacaatcaccgtttaatttacaccagcccggtcttgtgttgcttatcggtctggctggtagcactctgcctggcgtaagccaggcaggttcaggtatggatgtaaacctgacagcaaacatcgttaataatacctgtcggctaagcgtcgaaaacggcggagagatcactttgccgaccgtgtcacgagactggttttataacagcgacaagagcgatcgtttatcgccaaacgatgatgaagctggaacgccttttaccatccacgtagatgactgctatgcgagcagtacagaaggcgcaacgattaacaaactaaaatttagttttgctccgcaaaatggtttctggagtaatcacaaccaggtgtttaaaaacgatgccacagccggtgcggctgaaaatgtgggtatcgttattttttcagatacgttcaaaactaacgtcctgaacagcgacgggacatcaaacgttatttacgatgtcggtggaagtagtgagaactatataaaggattatggcttttacgcacgttatcagaatattggaacgatcaccagcggtgtggttatgagtaatgttctggttaatgtcagctacgaataa

SEQ ID NO: 113855 - DNA, 1071 bp, Enterobacter cloacae
atgaaaaaatatctcactatattagctctcgtgatgctcggaattagtagcacaacgcatgcggcattagaatgcaaatttaacagcaatgacacgctgctcatcatgtctccgggtacacaaccggttattactcccctgcccgttgggacggtaacgacacctgtacagatcagcaacacgataattatggagacgacaccatcattgtcatcacattgtgctgttggtgacgacggtgaaaacgtttatcaaatgacaaacaatgccatgcatattggagagattgatggaaaagccacgtttaggacaaacgttccggggatagtctacacgctggcattttaccctgatggcaacggcgtaacggcctggtttccacccaatgcgaatgcgttctaccttaccggcaacgaccatgataatgaaggtgccgtggatggcaaaacgtggcatgttcgcatggaattctggcaaacaaacggatttgtaggtattcctcttgacgaggatttcttgaccgcaagcagcggtcctatcggacaaattgtccttggcgatccggattcagcaatagacgatcatccacgccctctggtaaatatgtccgagatgtcatttagcattccattaaatcgcccgacctgtgtcttacgtgcgcccacaacggtaaatcttggtgactggtatcccgcagaagtcgaaaacgggaataccagcaaagtcgagttccatgttacgggtacatgtgtaaatacaaccgctgtttactatacgttatcctccacacataccaccgcagataaaaaatattttaccaataccgtcgagaatacaggtggtgttactgcggcaggaggcgtcggcgtcatgattacggattctgaaaatgatcattaccccgtgccggcagacagttatcaacgagtcatcgctataggagagattgttggggatcctgttagtattattgacagatcactttgggccacgttggtcaaaaccggtagcgatccggtaaccgtcggtgttttcggtaccaccgtgaccattcagaccacgtacgaataa

SEQ ID NO: 113856 - DNA, 1299 bp, Enterobacter cloacae
atgtcgcttttgctacaatggcgactgattttccgtatcgatttatatcccatgctcatgcgcgttatctttatccttctgctactggtctccggtggtgcgtctgccagcctgaccagtcagcaaggccttcctgcccaatatatgcaaaccaccgaagatgcggccatctgggcgcaggtgggaaatgccgtcgtgaacgtgggcaatgtccgcgccgggcagatcctcgccgtctttccggccgcggcggattactatgaatttcgtttcggattcggtacggggtttattgataaagagcacctggaaaaagtgcagggtaagcaacgcgttgaggatagtctgggcgatctgaacaagccgctcagcaatcaaaacctcatcacctggaaagacacgccggtgtataacgcccccagcagcggaagcgcgccctttggcaccttaagcgccaatcttcgctatccgattctgaataagctgaaagatcgcctgaaccagacctggtttcaaattcgcatcggcaatcgtctggcgtggatcagcagcctggatgcacaggaagataacggactgccggttctgacctaccaccatatcctgcgtgatgaagagaacacccgttttcgacatacctccacgacaaccagcgtacgtgcgtttaataatcagatggcctggttacgcgatcaaggctataccacgctgacaatgtaccagcttgaagggtacgtgcgtaacaagatgaacctccccgcgaaagcggtggtgatcacttttgatgatggcctgaaatcggtgagccgctacgcgtatccggtgctgaaagagtatggcttcaacgcgacggcgtttattatctcatcccgcatcaaaggtcacccgcagaagtgggatccccgatcgctacagtttatgagcgttcaggaaatcaagggcatccaggatgtgttcgacattcagtctcacacccactttctgcatcgcgtggatgggtataagcaccccatcttattgagccgcagctatcacgtgatcctgtacgattttgaacgctcacggcgtgcactggcgcagttcaacccgcgcgtgctgtatgtttcgtacccgtttggcgggtatgacaataaagcgattaaagccgcgaatgatgccggttttcatctggcagtgacaacggtgaaggggaaggtgaagccgggggataatccgttcttactgaagcgactgtatattctgagaacggattcgctggagacgatgtcgcggctgatcagcaatcagccgcaggggtag

SEQ ID NO: 113857 - DNA, 441 bp, Enterobacter cloacae
atgctgggatgggttatcacctgccacgatgaagaggcacaggaaatgctcctgaagctggaggcccgatttggccctctggcgcaatgtcgtgcggtaaattactggcgagggctgagcaccaatatgctaagccggatgatgtgcgacgcgctgcatgaaaccgacaccggtgatggcgtgatttttctcaccgacagatcgggcgcggcgccttaccgttcagcggcgttaatgagccataagcatgataactgtgaagtaatctccggtatcagcctgcctttactcgaagcgatgtatccgctgcgcgcaacgttgagtagcgctgagtttcgtcacgccattgtggcgcagggctcgccgggcgtgagcagcctgtggcaccagcagcagaagaatccgcctttcgttctgcttcacgatctgtataagcattaa

SEQ ID NO: 113858 - DNA, 771 bp, Enterobacter cloacae
atgacgcatctttactgggtcgcgctgaaaagcatctgggcgaaagagattaaccgctttatgcgcatctgggtgcaaaccctggtgccgccggtgatcaccatgacgctctacttcatcattttcggcaacctgattggctcccgcattggtgagatgcacggctttacctatatgcagtttatcgtgccgggcctgatcatgatggcagtgatcaccaacgcttacgcgaacgtggcgtcctcattcttcagcgccaagttccagcgtaacattgaagagctgctggtggcgccagtgccgacgcacgtcattatcgccggttacgtgggcggtggcgtggcgcgcgggctgtgcgtgggtattctggtgacggcgatttcgctgttcttcgtgccgttccaggtgcactcgtggctgttcgtggcgctcacgctattgctgacggcgatcctgttctcactggccggcttgctgaacgccgtgttcgccaaaacgttcgatgacatcagcctgatcccgaccttcgtgctgacgccgctgacctatctgggcggggtgttctactccctgacgctgctgccgccgttctggcaggcgctgtcgcacctgaacccgattgtctatatgatcagcggcttccgctttggtttcctcggcattaccgatgtcccgctgttcaccaccgttgtggtgctggcggtatttatcgtggcgttctatctgctgtgctggtatttgatccagcgtggacgtgggctgcgtagctaa

SEQ ID NO: 113859 - DNA, 927 bp, Enterobacter cloacae
atggcgattgcactggagcttgaacagctcaaaaaaacctacccggggggcgtccaggcgctgcgcgggatagatcttaaagtcgaagcgggagatttctacgcgcttctggggccgaacggggcgggaaaatcgaccaccatcgggattatcagctcgctggtcaataaaacgtctggccgcgttagcgtgtttggctacgacctgcaaaaagacgtggtcaacgccaagcgccagctggggctggtgccgcaggagttcaacttcaacccgttcgagacggtacagcagattgttgttaaccaggcgggttactatggcgttgagcgcaaagaggcgcttgagcgcagcgaaaagtatctcaaacagcttgacctgtgggagaagcgtaacgagcgcgcgcggatgttgtccggggggatgaagcgccgcctgatgattgctcgcgcgctgatgcacgagccaaagctgctcatcctcgatgaaccgaccgctggggtggatattgaactgcgtcgttccatgtggggcttcctgaaggatctgaacgacaaaggcaccaccatcatcctgaccacacactacctggaagaggcggagatgctgtgccgcaatatcggcatcattcagcacggtgagctggtggaaaacacctcaatgaagaacctgctctccaagctgaaatcagagacctttatcctcgatctggcggcgaaaagcgccctgccgaagctggaggggtataactatcgcctggtcgatacctcgacgctggaggtagaagtgctgcgcgagcaggggatcaacagcgtgttctcccagctgagcacgcagggcgttcaggtattaagcatgcgtaacaaagcgaaccgactggaagagctgtttgtctctctggtgcacgataaacaaggagacaaggcatga

SEQ ID NO: 113860 - DNA, 663 bp, Enterobacter cloacae
atgaacgacatagatacactcatcagcaacaatgcactatggtcaaaaatgctggtggaggaagaccccggattttttggaaaactggcacaggcgcagaacccgcgctttctctggattggatgttccgacagccgcgtccccgccgaacgtctgaccggtcttgaaccgggcgaactgtttgttcaccgcaatgttgctaacctcgttattcataccgatctcaactgcctttcggttgttcagtatgccgttgacgttctggaggttgagcacatcattatttgtggccactacggctgcggcggcgtacaggcggcggtcgaaaatacagagctggggttaatcgataactggctgctgcacatccgtgatatctggttcaaacatagctcactgctgggcgaaatgccgcaggagcgccgtctcgacacgctgtgtgagctgaacgtgatggagcaggtctataacctgggccactcgacgattatgcagtctgcctggaaacgcggacagaaggtctccatccacggctgggcgtacggtattcacgacggcctgctacgcaatctggaagtgaccgccaccaaccgcgaaacgctggaacagcgttaccgctcgggaattgccaacctcaagcttaagcacgttaaccataaataa

SEQ ID NO: 113861 - DNA, 537 bp, Enterobacter cloacae
atgaaacatactgttgaagtgatgatcccggaagccgagatcaaagcgcgtatcgccgaactgggtcgtcaaatcaccgaacattacaaggacagcggcagcgaaatggtgctggtcggtctgttgcgtggctctttcatgttcatggcagacctgtgccgtgaagtgcaggtgccgcacgaggtcgattttatgaccgcctccagctacggcagcggcatgtccacaacccgtgatgtgaaaatcctgaaagatctggatgaagatattcgtggcaaagatgtgttgattgttgaggacatcatcgactccggcaacacgctctctaaagtgcgtgagatcctgagcctgcgtgaaccaaaatcactggcgatttgtactctgctggataagcctgagcgccgtgaagtgcaggtgccggtggagttcgttggtttctccatcccggacgaattcgtggtgggttacggcattgattacgcgcagcgttatcgccatctgccgtatgttgggaaagtagtgattctggacgaataa

SEQ ID NO: 113862 - DNA, 2391 bp, Enterobacter cloacae
atggctgaaacaaaaactaaacagccgcgtctactggtgacattaacagccgcgtttgccgcattctgcgcgctgtatttgttaatcggtggcgtatggctggtcgcgattggcggctcctggtactacccgattgcgggtctggttatggttggcgtaaccgtcctgcttttacgcagaaaacaatctgctctgtggctgtacgcagcgttactgctcgcaaccatgatctggggcgtctgggaagtcgggttcgacttctgggcgttgacgccgcgcagcgacattctggtcttcttcggtatctggctgatcctgccgtttgtctggcgtcgtctgatcgtcccttccagtggcgccgtggccggtctggtcgttgccctgctgattagtggcggcatcctgacctgggccggttttaacgacccgcaggagatcaacggtacgctgaacgcggaatccacgccggctgcggctatttcgcaggtggcggacggtgactggcctgcttatggtcgtaaccaggaaggtcaacgctactccccgctgaagcagatcaacgcggacaacgtgaaaaacctgaaggaagcctgggtattccgtaccggcgacctgaagatgccaaacgatccgggtgagctgaccaacgaagtgaccccaattaaagtgggcaacatgctctacctgtgtacggcgcaccagcgtctgttcgcgctcgacgcggctaccggtaaagagaaatggcactttgatccacagctgaactccaacccgtcgttccagcacattacctgccgcggcgtctcttaccacgaagcgcgcgccgataatgccagcccggaagtcattgccgactgtcctcgccgcattatgctgccggtgaacgatggccgcctgtttgccattaacgctgagaccggcaagctgtgcgaaaccttcgccaataaaggcattctgaatcttcagaccaacatgccggacaccacgccgggcctgtatgagccgacctccccgccaatcatcaccgacaaaaccatcgtgattgccggttcggtaacggataacttctctacccgtgaaacctccggcgttatccgtggtttcgacgtgaacaccggtaaactgctgtgggccttcgacccgggcgcgaaagatcctaacgcgatcccatcggatgaacacacctttacctttaactcaccgaactcctgggcaccggcagcgtatgacgcgaagctggacctggtctacctgccgatgggcgtgaccacgccggatatctggggcggtaaccgtacgccggagcaggaacgttacgccagctccatcgtggcgctgaacgcaacaaccggtaaactggcatggagctaccagaccgttcaccacgatctgtgggatatggatatgccgtcccagccgacgctggcggacattaccgttaacggtaaaaccgtaccggtgatttacgccccggcgaaaaccggtaacatcttcgtgcttgatcgtagcaacggtaagctggttgttcctgcgccggaaaaaccggttccgcagggtgcggccaaaggcgactacgtcaccaaaacgcagccgttctctgacctgagcttccgtccgaagaaaaatctcagcggtgcagacatgtggggtgccaccatgtttgaccagctggtatgccgcgtgatgttccaccagctgcgctacgaagggattttcaccccgccgtcagagcagggtacgctggtcttcccgggtaacctggggatgttcgaatggggtgggatctccgttgaccctaaccgtcaggtcgccatcgctaacccaatggcgctgccgttcgtttcccgcctgatccctcgtggtccgggtaacccaatggagcagccgaaagatgcgaaaggcagcggtaccgaagccggtatccagccgcagtatggcgttccttatggtgtgaccctgaatccgttcctttctccgttcggtctgccgtgtaaacagcctgcctggggttacatctccggtctggatctgaagaccaacaagatcgtctggaagaaacgtattggtacgccacaggacagcatgccgttcccgatgcctgttccagtgcctttcaatatgggtatgccaatgctgggtggcccaatctccaccgccggtaacgtgctgttcatcgcggcaaccgcagataactacctgcgcgcgtacaacatgaccaacggtgagaaactgtggcaaggccgtctgccagccggtggacaggcaacgccgatgacctatgaagtgaatggcaagcagtacgttgtcatctctgcgggtggtcacggttcgtttggcacgaagatgggcgactatattgtcgcgtatgcactgcctgacgacgctaagtaa

SEQ ID NO: 113863 - DNA, 1101 bp, Enterobacter cloacae
atggggctggccggcctggtgctgattgaagacgatgaaagccgcctgctgcgcctgccgaaacagtggggaatcgacgatgtcccggtgattgtgcaggacaaaaaattcaacgctgacgggcaaattgactatcagctggacgtaatgagcgcggcggtaggctggtttggcgatacactcctgaccaacggcgcgatctacccgcagcatgccgcgccaaaaggctggctgcgcttacgtctgcttaacggctgtaacgcccgctcgctgaacttcgccaccagcgataaacgcccgctttacgtggtggcaagcgacggcggcctgctgccggagccggtgaaggtgagcgagctgccgatgctgatgggggagcgcttcgaggtgctggtggatatcagcgatggcaaagcgtttgacctggtgaccctgccggtcagccagatggggatggccgttgcgccgtttgataagccgcatccggtcctgcgcattcagccgctacagatcaccgcctccggtacgctgccggagaccctcaccacgctgccagcactcccgtcgctggacgggcttacgcagcgtaaacttcagctttctatggacccgatgctagacatgatgggcatgcaggcgctgatgaagaagtacggcaatcaggccatggcgggaatgcatcacggccagatgatgggccatatgaatatggaccacggtaaaatgggcggcatggatcacggcggccatggtttcgatttccacaacgccaaccgcatcaacggcaaagcgttcgatatgaacacgcccatgttcgccgccacgaaagggcagtttgaaagctgggtgatttcaggcgaaggcgacatgatgctgcacccgttccatatccacggcacgcagttccgtattctgtctgaaaatggtaaagcgccggaggcgcatcgtgcgggctggaaagatacggtgagggtggaaggcggcgtcagcgaggtgctggtgaagtttgaccacgaggcgccgaaagagtttgcctatatggcccactgtcatctgctggagcatgaagatacggggatgatgctcggttttaccgtataa

SEQ ID NO: 113864 - DNA, 399 bp, Enterobacter cloacae
atgctcaaaagatcgcctgctggaaataaggaaatgcacatgcaacgtcgtgattttttaaaattttctgccgcactgggggttgccagcgcgttacctctctggagccgcgccgtttttgccgccgacagaccggctttacccattcctgaattactcgccgcagatgcccgcagccgcattcagcttgtggtgcaggccggtaaaaccacgttcggtcagcacgccgccacgacgtggggctataacggcaatctgctcggcccggcgttgcagttacgcaaagggaaggcggtgacggtagacattcataacacgcttgcggaagagaccacgctgcactggcacgggctggaagtcctcagggcattatcaggcctggtggtaaacgcagcgtaa

SEQ ID NO: 113865 - DNA, 348 bp, Enterobacter cloacae
atgaagacgtttttcagaacaattttgttcgccagcctgatggcgatgtgtgcgaacagttacgcgctaagtgaaaacgaagcggaagatatggccgatctgacggcagtttttgtttttctgaaaaacgattgtggttaccagaatttacccaatgggcaaattcgtcgcgcactggtcttttttgcccagcagaaccaatgggacctcagcaactacgacagcttcgacatgaaggcgctcggtgaagacagctaccgtgatttaagcggtattggcattcccactgctaaaaaatgcaaagcgctggctcgcgattcactcagcctgctcgcctacgtgaagtaa

SEQ ID NO: 113866 - DNA, 870 bp, Enterobacter cloacae
atgaccgaaaaaacggtatggcaagaaacgctgcatgaccagtttggtcagtattttgccgtggataacgtgctctatcatgagaaaaccgatcatcaggatttgataatcttcgaaaacgccgcctttggccgcgtgatggcgctggacggcgtggtgcaaaccaccgagcgcgacgagtttatctatcacgaaatgatgacccacgtcccgctgctggcccacggccacgcgaaggacgtgctgattatcggcggcggcgacggcgcgatgctgcgtgaagtctctcgccatcagaatgtcgaaaccatcaccatggtggaaatcgacgccggtgtggtgtcgttctgccgccagtatctgcccaaccataatgccggcagctatgacgatccgcggtttaatctggttatcgacgatggcgtcaattttgttaaccagaccacgcaaacgtttgatgtcattatctctgactgtaccgaccctatcggtccgggcgcgtcgctgtttacctcgtcgttttacgaaggctgcaagcgctgcctgaagcctggcggaatttttgtggcgcaaaacggcgtttgcttcctgcaacaggatgaagcgcttgatagccaccgtaagctgagcacctattttgctgacgtcagcttttaccaggcggcgatccccacttactacggcgggatcatgacctttgcctgggcgacggataacgacgttctgcgccatctctctaccgagatcgtgcaggcccgcttccaccaggccggactccagtgccggtactacaacccggcgatccacaccgcagcctttgcgttgcctcaatatctgcaagacgcgctgtcctcaaaggaggtgaactaa

SEQ ID NO: 113867 - DNA, 795 bp, Enterobacter cloacae
ttgaaaaagcttaaactgcatggctttaacaatctgaccaaaagcctgagtttttgtatttacgatatctgctacgccaaaacagcagaagagcgcgatggttacatcgcctatatcgatgaactctacaacgccaaccgtctgaccgagatcctgacagagacctgctcgattatcggcgcgaacatcctgaatatcgcgcgccaggattatgagcctcagggtgcgagcgtcaccattctggtgagtgaagagccggttgacccgaagcttatcgacaaaaccgagcaccccggcccgctgccggaagtggtagtcgcccacctggataaaagccacatctgcgtgcacacctacccggaaagccacccggaaggcgggctgtgtaccttccgcgcggatattgaagtgtcgacctgcggcgtgatttcaccgctgaatgcgttgaattatttaatccaccagctggaatccgatatcgtcactattgattatcgcgtgcgcggttttacccgtgatatcaacggcatgaagcacttcattgatcatgagatcaactccattcagaacttcatgtccgaggacatgaagtcgctgtacgacatgatggatgtgaacgtctatcaggagaatatcttccataccaagatgatgcttaaagagttcgatcttaagcactatatgttccataccaggccggaagatttaagtgaagaagagcgtaaggtcattaccgacctgctctggaaagagatgcgcgaaatttactacggccgtaacattccgaccgtgtaa

SEQ ID NO: 113868 - DNA, 363 bp, Enterobacter cloacae
atggattacgaatttttgcgcgacatcaccggcgtggtgaaagtgcgaatgtcgatggggcacgaagccgttggacactggtttaacgaagaggtgaaagagaaccttgcgctgctggatgaagtcgaacaggcggcggaaacggtgaaaggcagtgaacgctcctggcaacgcgccgggcacgaatacacgctgtggatggatggcgaagaggtgatggtgcgcgccaaccaacttgagttctcgggtgatgagatggaagaggggatgagctactacgacgaagagagcctgtcgctttgcggcgtggaagacttcctgagcgtgttgaacgcctaccgcgattttatgcaacagaagtaa

SEQ ID NO: 113869 - DNA, 2598 bp, Enterobacter cloacae
gtgctagaagaataccgtaagcacgtagcagaacgtgccgccgagggaattgtacccaaaccgttagatgcaacccaaatggccgcgctcgtcgagctgctgaagaacccgcctgagggcgaagaagaattcctgttagatctgctgatcaaccgtgtaccgcctggcgtagatgaagctgcctacgtaaaagccggattccttgccgccgttgccaaaggcgaagccacctccccactggttactcctgaaaaagcgattgaactgctcggcaccatgcagggcggctataacattcatccgctgattgacgcgctggataacgacaagctggcgccaattgctgccaaagcgctctcttcaacgctattgatgttcgataacttctacgatgtggaagaaaaagccaaagcaggcaacgtttacgcgaagcaggtgatgcagtcctgggccgatgccgaatggttcctgaaccgccctcagcttgctgaaaaaattaccgttaccgtctttaaagtgaccggtgaaaccaacaccgatgacctttctccggcgccggatgcatggtctcgcccggatatcccactgcacgccctggcgatgctgaaaaacgcccgtgaaggcattgagccggatcagccaggcgtggttggcccgatcaaacagatcgaagccctgcaacaaaaaggtttcccgctggcttacgtcggtgacgtggttggtaccggttcttcccgtaaatccgccaccaactccgtgctgtggttcatgggcgacgacattccgcacgtgccgaacaagcgcggcggcggcctgtgcctcggcggcaaaattgcgccaatcttcttcaacaccatggaagatgcgggcgcgctgccaattgaagtggacgtgagcaacctgaacatgggcgacgtgattgacgtttacccgtataaaggcgaagtgcgcaaccacgaaaccaacgaactgctggccagctttgagctgaaaaccgacgtgctgatcgacgaagtgcgtgccggtggccgtattccgctgatcatcggccgtggcctgaccaccaaagcgcgtgaagcgctgggtctgccgcacagtgacgtattccgtcaggcgaaagacgtggccgagagcaaccgcggttactctctggcgcagaaaatggtgggtcgcgcctgcggcgtcactggtatccgtcctggcgcgtactgcgaaccgaaaatgacctccgtggggtctcaggacaccactggcccaatgacccgtgatgaactgaaagacctggcgtgcctgggcttctcttccgatctggtgatgcaatccttctgccacaccgcggcgtatccgaagccggttgacgtaaccacgcaccacacgctgcctgacttcattatgaaccgtggcggtgtctccctgcgtccgggcgacggcgttatccactcctggctgaaccgcatgctgctgccggataccgtcggtaccggcggtgactcccatacccgtttcccaatcgggatctccttcccggcgggttccggtctggtggcgtttgccgcagcgaccggcgtgatgccgctggatatgccggaatcggtgctggtgcgcttcaaaggtaaaatgcagccgggcattaccctgcgcgatctggtgcacgcgatcccgctgtatgccattaaacagggtctgctgaccgttgagaagaaaggcaagaaaaacatcttctctggccgcattctggaaattgaaggtctgccggatctgaaagtggagcaggcgttcgagctgaccgatgcctctgccgagcgttctgcggcgggctgtaccatcaagctgaacaaagagccgattattgagtatctgacctccaacatcgtgctgctgaagtggatgatagcggaaggctacggcgaccgtcgtacgctggagcgtcgtattcagggcatggaaaaatggctggcggatccgcagctgctggaagccgacgctgacgcagagtacgcggcggtgattgagatcgatctggcggatatcaaagagccaatcctgtgtgcgcctaacgatccggacgatgcgcgtctgctctctgacgtgcagggcgataagatcgacgaagtgttcatcggctcctgtatgaccaacatcggccacttccgtgctgccggtaagctgctggatacccacaaaggccagctgccgacccgtctgtgggtggcgccgccaacccgtatggatgcggcgcagctgaccgaagagggctactacagcgtgtttggtaagagcggggcgcgtatcgaaatccctggctgttccctgtgtatgggcaaccaggcgcgcgtggccgacggtgcgacggtggtttccacctcaacccgtaacttccctaaccgtttaggaaccggggcgaacgtttacctggcctctgcggagctggcggcggttgcggcgctgattggcaaactgccaacgccggaagagtaccagacctttgtggctcaggtagataagacggcggtggatacttatcgttatctgaacttcgaccagctctctcagtacaccgagaaggctgacggggtgatcttccagaccgcagtataa

SEQ ID NO: 113870 - DNA, 1455 bp, Enterobacter cloacae
atgaagttgccttttaaaccacatcttcttgttctgctttgcagtgcggggctgtttgccgcctcgggcgtcatgttcgttaaaagccgcgcaacggaacccgctcccgcacttgcgccggtagccccgcagctccccgccccgacagcacaacctgccccggtggcgactccggcctataccgccgcgcagatcgatcagtggacagcgcccattgcgctctatcccgacgcgctgctgtcgcaaattctgatggcctcaacctatccggcgagcgtgattcaggccgcccagtggtcaaaggacaaccctaaaatgcagggcgataccgccattcaggcggtcagcgggcagccatgggatgccagcgtgaaatcgctggtcgcctttccgcagttaatgtcgctgatgggggaaaacccgtcgtgggtacagagccttggcgacgcctttctggcccagccaaaggatgtgatggattccgtgcagcgtctgcgcctgctggcgcagcagacaggcacgttgcaatccaccccgcagcagaccgtcaccaccgtgaaaaaatctgcgccagcctccgccagtacagccgcgacgtcaacgccggctagtccgacggtgattaaaattgagccagccgatccacaggtggtttatgtccctacctacaacccttccaccgtttacggcacgtggccaaacgccagctatccgcctgtgtatctgcccccgtctcccggccagcagtttaccaatagtttcgtcagaggctttggctatagcctcggcgtagccactacctatgcgctgttcagtaacatagactgggacgatgacgacgaacatcatcacgatcatgatgacgatcaccacggcggttattcgcataacggcgataacattaatattaatgttaataacttcaataagatcaccggcgagcaccgtaccgataatcatcaggtctggcagcataatccggcctaccgcaacggcgtgccctacgccaatagccagcttgccagccgctatcatcagacttcagtgccgggagggctgagcgctacccggcagcagacggtcaaccgcgatagccagcggcaggctgcgatggcgcagatacagcagtcgacgggcaaaaccctcacacagctacagcatggcgacgcgcatttcccgcaacattcagcgtccgcgcagcagctgaagcagctctctcagcgcagcaactatcgcggctacgacagcgcgcggccccacgcacaacagatgaataatactcttgcgcaaaccagacgcccgacgcaggttcagcatcagccgctgcgggcaaacgccctgagcggcaacgacagccgctcggccaactggcaggcccagcaccagcgcgggctggaaagccgccagcagctgtccgaacatcataccgaacaccgtgaattccatcgtcgttaa

SEQ ID NO: 113871 - DNA, 792 bp, Enterobacter cloacae
atgaacatgaaaccgatcggtggaatgctgttgttgatggtatccaccttcgcctgcgcccagcaatctttctccacgcctgagcaggcggccaatgccctgacgaaggccatcagcgagcagaatgagagcgcgatggccgacctgctgggggataactggcgcgactatctgccacctgaaggggttgatccggaggcggtagctcgattcctgcgtgactggaagattaaccatcgtaccgaaatcagcggcgatatcgcccatctgtcagttggcgataacggctggcaactccccataccggtagtgaagaaaaaagagggctggcaatttgatatgcagaaagcggctaatgagatcctgacccgcgaaatcggccgcaacgaactcgcggctatcggagcgctgcacgcctacgtcgacgcacagcagagctactacgccatgaaccatcgctatgcgcacaagattgtcagcacaccagggctaaaagacggcctgtactggcccatctcgccgggcgaagcgccaagcccgctgggtcccgccttcagcccgccggagcctggtatgggctatcacggttatcggttccgcattctgccggataaaaatggctttgcgatggttgcatggcccgtgagctatggtcagacgggggtaatgagctttgtcgttaaccaggatgacaaggtgcatcaggcagacctcggcaacgattcggcacaaaaagcgcaggcgctcgctgcataccacccggataaaacctggcagcctgtccccccctga

SEQ ID NO: 113872 - DNA, 1425 bp, Enterobacter cloacae
atgagcacagaaatcaaaactcaggtcgtagtacttggggcaggcccggcaggttactccgcagcatttcgcgccgcggatttaggtctggaaaccgtcatcgtagaacgttacagcaccctcggcggtgtttgtctgaacgtcggctgtatcccttctaaagcgctgctgcacgtagcgaaagttatcgaagaagccaaagcgctggctgaacacggtatcgtcttcggcgagccgaaaaccgacatcgacaaaattcgtacctggaaagagaaagttatcactcagctgaccggcggtctggcgggtatggccaaaggccgtaaagtgaaagtggtaaacggtctgggtaaattcaccggtgcgaacaccctggaagtggaaggcgaaaacggcaaaaccgtgattaacttcgacaacgcgatcatcgcggcaggctctcgcccaatcgaactgccattcattccacatgaagatccacgcgtgtgggattccaccgatgcgctggagctgaaaaccgttcctaagcgcctgctggttatgggcggcggtatcatcggtctggaaatgggtaccgtgtaccatgcgctgggttcagagatcgacgtggttgaaatgttcgaccaggttatcccggctgccgacaaagacatcgttaaagtcttcaccaaacgcatcagcaagaaattcaacctgatgctggaaaccaaagtgactgccgttgaagcgaaagaagacggtatttacgtttccatggaaggcaaaaaagccccttccgaaccacagcgttacgacgccgtgctggtggctatcggtcgtgtgccgaacggtaaaaacctcgacgcgggcaaagctggcgtggaagtggacgaccgtggcttcatccgcgttgacaaacagctgcgcaccaacgtgccgcacatctttgctatcggcgatatcgtcggtcagccaatgctggcgcacaaaggtgttcacgaaggtcacgttgccgctgaagttatcgccggcatgaagcactacttcgatccgaaagtgatcccatctatcgcctacaccgagccagaagttgcatgggtcggtctgactgagaaagaagcgaaagagaaaggcatcagctacgaaaccgccaccttcccgtgggctgcttctggccgtgctatcgcgtccgactgcgcagacggtatgaccaaactgatcttcgacaaagagactcaccgcgtgatcggtggtgcgattgtcggtaccaacggcggcgagctgctgggtgaaatcggtctggctatcgaaatgggctgtgacgcggaagacatcgcgctgaccatccacgctcacccgactctgcacgagtccgtgggcctggcggcagaagtgtttgaaggtagcatcaccgacctgccaaacgcgaaagcgaagaagaaataa

SEQ ID NO: 113873 - DNA, 1896 bp, Enterobacter cloacae
atggctatcgaaatcaatgtaccggacatcggggctgatgaagttgaaatcaccgagatcctggtcaaagtgggcgacaaagttgaagctgaacagtcgctgatcaccgtagaaggcgacaaagcttctatggaagtcccgtctcctcaggctggcatcgttaaagagatcaaagtctctgttggcgataaaaccgagaccggtaaactgatcatgattttcgattccgccgacggtgcagcagctgctgcacctgcgcaggaagagaagaaagaagcagcacctgctgctgctccagcagcggccgcggcagcgaaagaagtgaacgtgcctgacatcggcggtgacgaagttgaagtcactgaaatcctggtgaaagtgggcgataccgttgcggccgagcagtcactgatcaccgtagaaggcgacaaagcctctatggaagtgccggcaccgttcgcgggtaccgttaaagagatcaagatcaacaccggcgacaaagtgtctacaggttccctgatcatgattttcgaagtggcgggcgctgaaggcgctgcggctccagcgaaagcggaagctgctccggctccggctgctgcaccagcggctgctggcggcgtgaaagacgttaacgtaccggacatcggcggtgacgaagttgaagtgaccgaagtgatggtaaaagtgggcgacaaagttgccgctgaacagtcactgatcaccgttgaaggcgacaaagcttctatggaagtgcctgcgccgttcgccggtaccgttaaagagatcaaaatcaacaccggcgacaaagtatctaccggctctctgatcatggtcttcgaagtggaaggcgcagcacctgccgccgctccagctgccgcggctgctccggcaccggctgctgcaccggctcaggctgctaaaccggctgctgcccctgctgctaaagcagaaaaatctgagttcgctgaaaacgacgcttacgtccacgcgactccgctgattcgtcgcctggcgcgcgaattcggtgtgaacctggcgaaagtgaagggcactggtcgtaaaggccgtatcctgcgcgaagacgttcaggcttacgtgaaagatgcggtgaaacgcgccgaagctgcacctgctgctgccggtggcggtatcccgggcatgctgccatggccgaaagtggacttcagcaagttcggtgaaatcgaagaagtggaactgggccgtatccagaaaatctcgggtgctaacctgagccgtaactgggtaatgatcccgcacgttacccacttcgataagaccgatatcaccgatctggaagcgttccgtaaacagcagaacgccgaagctgagaagcgtaagctggacgtgaagttcactccagtggtcttcatcatgaaagcggttgccgctgcccttgagcagatgcctcgcttcaacagctccctgtccgaagacggccagaagctgacgctgaagaagtacatcaacatcggtgttgcggttgatacgccaaatggtctggttgttccggtcttcaaagacgtgaacaagaagagcgtcactgagctgtcccgtgaactgaccaccatctccaaaaaagcgcgtgatggtaagctgactgccggcgaaatgcagggcggctgcttcactatctccagcatcggcggcctgggtaccacccacttcgcaccgattgtgaacgcgccggaagtggctatcctcggtgtgtccaagtccgcgatggagccggtgtggaatggcaaagagttcgtgccgcgtctgatgatgccaatctctctgtccttcgaccaccgcgtgatcgacggggctgatggtgcgcgtttcatcaccatcatcaacaacatgctgagcgacattcgccgcctggtgatgtaa

SEQ ID NO: 113874 - DNA, 2664 bp, Enterobacter cloacae
atgtcagaacgtctccaaaatgacgtggatccgatcgaaactcgcgactggctacaggcgatcgaatcggtcatccgtgaagaaggtgttgagcgcgctcagtatctgattgatcagctgctttcagaagcacgcaaaggcggcgtgaaagtggcttcaggtgcaggggctagcaactacgtaaacacgattgccgtcgaagacgaaccggaatacccgggcaatctggatctggaacgccgtatccgttctgctatccgctggaacgccatcatgaccgttctgcgcgcatccaagaaggacctggaactgggtggccacatggcgtccttccagtcttctgcgaccatttacgaagtgtgcttcaaccacttcttccgtgcagctaacgagaaagatggcggcgatctggtgtacttccagggccacatctctccgggcatctatgcacgtgccttcctggaaggtcgtctgactgaagagcagatgaacaacttccgtcaggaagttcacggtaagggtctgtcttcttacccgcaccctaaactgatgcctgagttctggcagttcccgaccgtatctatgggtctgggtccaatcggtgcgatctatcaggctaaattcctgaagtacctggaacaccgtggtctgaaagacacctctgagcagaccgtttacgccttcctgggcgacggtgaaatggatgagccagaatctaaaggcgcgatcaccatcgcgacccgtgagaagctggacaacctgtgcttcatcatcaactgtaacctgcaacgtctggatggtccggtaaccggtaacggcaagatcatcaacgaactggaaggcatcttcgcaggtgctggctggaacgtgatcaaagtgatgtggggcggtcgttgggatgagctgctgcgtaaagacaccagcggtaaactgatccagctgatgaacgaaaccgttgacggcgactaccagaccttcaaatccaaagacggtgcctacgttcgtgagcacttcttcggcaaatatcctgaaaccgcagccctggttgcagactggactgacgagcagatctgggcgctgaaccgcggtggtcacgatccgaagaaagtttacgctgcactgaaaaaagcgcgtgaaaccaaaggtaaagcgactgtgatcctggcccacaccatcaaaggttacggcatgggtgataccgcagaaggtaaaaacatcgctcaccaggttaagaaaatgaacatggacggcgtgcgttatatccgcgaccgtttcaacgttccagtgaccgatgagcaggtagaaaaactgtcttacatcaccttcccggaaggttctgaagagcacaagtacctgcacgaacgtcgtcaggcgctgaaaggctacctgcctgctcgtcagcctaacttcaccgagaagctggaactgccagcgctggaagatttctctcagctgctggaagagcagaacaaagagatctctaccactatcgctttcgttcgtgccctgaacgtgatgctgaagaacaagtcgatcaaagatcgtctggttccaatcatcgccgacgaagcgcgtactttcggtatggaaggtctgttccgtcagatcggtatctacagcccgaacggtcagcagtacaccccgcaggaccgtgagcaggttgcatactacaaagaagacgagaaaggtcagatccttcaggaaggtatcaacgaactgggtgcaggcgcatcctggctggctgctgcgacttcttacagcaccaacaacctgccgatgatcccgttctacatctactactccatgttcgggttccagcgtatcggtgacctgtgctggcaggcaggcgaccagcaggctcgcggcttcctgatcggtggtacttctggtcgtacgaccctgaacggtgaaggtctacagcacgaagatggtcacagccacattcagtctctgactatccctaactgtatctcttacgacccgtcttacgcgtacgaagtggcagtcatcatgcatgacggcttgcagcgcatgtacggtgaagcgcaagagaatatttactactacatcaccaccctgaacgaaaactaccacatgccggcaatgccagcaggtgccgaggaaggtatccgtaaaggtatctacaaactcgaaaccatcgaaggtagcaaaggtaaagttcagctgctgggctccggttctatcctgcgtcacgttcgtgaagcagcgcagatcctggcgaaagactacggtgtgggttccgatgtgtactctgttacctccttcactgaactggcgcgtgatggccaggattgtgagcgctggaacatgctgcacccaatggaaaccccacgcgttccgtacatcgctcaggtgatgaacgacgcgccagcggtggcgtctactgactatatgaaactgttcgctgagcaggctcgtacttacgttccagctgatgattatcgcgtactgggtactgacggcttcggtcgttctgacagccgcgaaaacctgcgtcaccacttcgaagttgatgcttcctacgtggtagtagcagcactgggcgaactggctaaacgtggcgaaatcgataagaaagtggttgcagacgcaatcaccaaattcaacatcgatgcagataaagttaacccgcgtctggcgtaa

SEQ ID NO: 113875 - DNA, 765 bp, Enterobacter cloacae
atggcctacagcaaaattcgccaaccaaaactttctgatgtgattgagcagcagctggagtttttgattctcgaagggacactgcgcccgggcgagaagctcccgccagaacgcgagctggcaaaacagttcgacgtttcacgcccctctctgcgtgaggcgattcaacgtctcgaagcaaagggcctgttgctccgtcgccagggtggcggaacctttgtgcaaaacagcctgtggcagagcttcagcgacccgctggtagaacttctctctgaccacccagaatcccagtttgatctgcttgagacccgtcacgcgctggaaggtatcgcggcttattacgccgcccttcgcagcactgatgaagaccgcgtacgtattcgcgagctgcatcaggccattgaacgggcacagcagtccggcgatttagacgccgagtccaatgccgtcgtccagtatcaaattgccgtcaccgaagcggcgcacaacgtggtgctcctccatctgctacgctgcatggagccgatgctggcccagaacgttcgtcagaattttgaattgttgtatgcccgtcgggagatgctcccgctggtaagcaaccatcgcacccgagtattcgaggcgataatggccggggaaccggagcaggcgcgcgaagcgtcgcaccgccatctggctttcattgaggaaatcttgctggaccgcagccgtgaacaatcgcgtcgcgaacgttcattacgccgcatacagcaacgaaaggattaa

SEQ ID NO: 113876 - DNA, 1371 bp, Enterobacter cloacae
atggaagctcaacagcatggcgatcagctaaagcgcggccttaaaaaccgccatattcagctcatcgccctgggcggtgctattggtactggcctgtttctgggcagtgcatcggttatccagtcggccggtccgggcattattctggggtacgcgattgcgggttttattgcatttctgattatgcgccagttaggtgaaatggttgttgaggagccggtcgcaggctcattcagccacttcgcctataaatactggggcagcttcgcaggtttcgcctcggggtggaactactgggttctgtacgttctggttgccatggccgagctgaccgccgttgggaaatacattcagttctggtacccggagatccccacctgggcgtctgcggcggccttcttcgtcattatcaatgccattaacctgaccaacgtaaaagtgtttggtgagatggagttctggtttgccatcatcaaagtgattgccgttgtagcgatgatcatcttcggcggctggctgctgttcagcggcaacggcggtccgcaggccaccgtgcgcaacctttgggagcaaggcgggttcctgccgcacggcatgaccggtctggtgatgatgatggcaattatcatgttctccttcggcggtctggagctggtgggcatcaccgccgcggaagccgacaacccggagcagagcatcccgaaagccactaaccaggttatctaccgtattctgatcttctatgtgggctccctggcggtcctgctctccctgctgccatggacgcgcgtgacggcggataccagcccgtttgtgctcatcttccacgagctgggcgacaccttcgtggcgaacgcgctcaacgtcgtggtgctgaccgccgcgctctccgtttataacagctgcgtttactgcaacagccgtatgctgttcggcctggcgcaacagggcaacgcaccgaaagcgctgcttaccgttgataagcgtggcgtaccggttaataccatcatcgtgtcggcggtcgtgacggcgctgtgcgttctgattaactacctggcaccggaatctgccttcggtctgctgatggcgctggtggtttccgcgctggtgattaactgggcgatgattagcctcgcgcacatcaagttccgccgcgccaagcaccagcagggcgtaaccacgcgcttccctgccctgctctatccgctggggaactgggtttgcctgctgttcatggcagctgtgctggtcatcatgctcatcaccccaggcatggcgatttccgtctacctgatcccggtctggattgcgatcctcggcgtgggttatatggtgaaacagaaaaatgccaaaacggtgaaagcgcactaa

SEQ ID NO: 113877 - DNA, 1398 bp, Enterobacter cloacae
atgaataacaacaaactgtcagtaaaagaaaagatcggctatggcatgggtgacgccggatgcaacattatctttggcgccatcatgttatttgttaactacttttatacggatatttttggtctggctcctgcactggttggcgttttactcctgtccgtacgcgtcattgatgccatcacggacccaattatgggcgcgattgccgaccgtacccgcagcaaatatggccggtttcgtccatggctgctgtggattgccttcccctatgcgctgttcagcattctgatgttcaccacgccggagtggagctataacagcaaagttatctatgcctttgtcacctacttcctgctgtcgctgacctatacggctatcaacattccctactgctcgctgggcggagtgatcaccaacgacccgaaagagcgcgttgcctgccagtcctaccgttttgttatggttggtatcgccactctgctgctgtcgctaacgctcctgccgatggccgactggttcggtggggataacaaagccaaaggctaccagatggcgatgaccgtgctggcgctgattggtacctgcatgttcctgttctgcttcgccacggtgcgcgagcgcgtgcgtccggcggtgcaaacccatgacgaactgaaaaacgacctgaaagacgtgtggaagaacgaccagtgggtgcggatcctgctgttaaccctgtgcaacgtctgccctggctttatccgcatggcggccaccatgtattacgtcacctgggtcatggggcaaagcacccatttcgccacgctgtttatcagcctgggcgtggtcggcatgatgttcggcagtatgctggcgaaagtgctgaccgaccgctggtgtaagctgaaggtcttcttctggaccaacatcgtgctggcgattttctcctgcgccttttacttcttcgacccgaaagcgacgacaactattgtcgtgctctacgtcctgctgaacatcctgcaccagatcccgtcaccgctgcactggtccctgatggccgacgtggatgactacggcgagtggaaaaccgggaaacgcatcaccgggatcagcttctccggcaacatcttcttcctgaagctgggtctggcgattgccggggcaatggtcggcttcctgctctcctggtacggctacgacgcgggcgcaaaagcgcagagcgcggacgccatcaacgggatcgtgctgctgtttaccgtcattcccggcattggatacttaattaccgcgggcgtagtacgtctgctgaaagtggaccgtgagaccatgaagcagatccagtccgatctggaaaagcgtcgcaccaactatcgcgagctgaacgattatcaggaactcaaagccgctgagactaaataa

SEQ ID NO: 113878 - DNA, 951 bp, Enterobacter cloacae
atgcaaacctggccaaacccgtttattgaacaacgcgccgacccgtatatcctgcgtcacgatgggcaatattactttatcgcctccgtaccggagtacgatcggctggcgatccgctgcgcggactcgctggaaggtttacgcgatgccgaagaggtggttgtctggcgcaagcccgacaccggcccgatgagccagctgatctgggcaccggagctgcatcatatcgacggcaggtggtacatctattttgccgccacgcatacccaggcgcttgatcagctcgggatgttccagcatcgcatgtttgccattgaatgcgcagacggcgatccgctcaccggtacgtgggtggaaaaagggcaaatcaaaaccccgtttgacaccttcgcgctggatgccaccacctttgttcatcagggtaaacgctggtatctgtgggcgcaaaaagccccggatatttccggtaactccaatctttacctgtgtgaaatggaaaatccgtggacgctgaaaggcgagccggtgatgctcagtaaaccggaatatgactgggagtgccgtgggttctgggtcaacgaaggcccggcggtgctgttccatggcgataagctgtttatcagctattccgccagcgccaccgacgagaactactgcatgggattactgtgggcagacctgaatgccgatccgcaaaacccggctaactggcataaatccccgcgcccggtgtttgtcaccagctacgaaaaccgtcagtatgggccaggccataacagctttacgcagacgccggaaggcgaagatgtgctggtctaccacgcgcgaaactacactgaaattgaaggcgatccgctttacgatcccaatcgccatactcgcctgaaactcatccgctggaacgaaaacgggatgcctgatttcggcatcccgcccgcagatacgctgtaa

SEQ ID NO: 113879 - DNA, 855 bp, Enterobacter cloacae
atgacgttgtttaccatgctgctggttatgatcgctgaacgcctgtttaagctcggcgagcactggcatctggatcatcggctggaggtgttattccgccgcatcaggcatttttccatgctgcgcacgttgctgatggcggcaggcgtgatggcgattacgttcctgttgctgcgctcgctttacggcctctttttcaacgtgccgctgctggtggtgtggatcctgctcggcgtgctgtgtattggcgcgggcaaggtgcgtttgcactatcacgcgtatctgaaagccgcttcccgggatgatgcccacgcgcgcggcgcgatggcgagcgagctgacgatgatccacggcgtaccgccggactgcgatgaacgcgagtttctgcgggagctgcaaaacgcgctgctgtggatcaacttccgttactacctggcgccgctgttctggttcgtggtgggcggaccctgggggccggtactgctgatgggttatgcgttcctgcgcgcctggcagacctggcttgcccgctatcttacgccgcatgaacgtctacagtccggcattgatgccatcctgcacgtgctcgactggcttccggtgcgtctggtaggcgtggtctatgccctcatcggtcacggtgaaaaggcgctgcccgcgtggtttgtctcccttgcagaccgccatacctcgcagtatcaggttttaacccgactggcacagttctcgctggcgcgtgagccgcacacggataaagtcgcaacgccaaaggctgccgtctcgatggcaaagaaaacgtcgtttgtggtggtggtgattgtggcgctgctgacgatttacggcacgctggtttaa

SEQ ID NO: 113880 - DNA, 564 bp, Enterobacter cloacae
atgttgttagaaaacggatggctggtggacgcgcggcatgtaccgtcgccgcaccacgactgccgcccggaggatgaaaagcccacactgctggtggttcacaatattagtctcccgccgggtgagtttggcggtccgtggatcgatgcgttattcactggaacgatagatcccgatgcccaccccttctttgctgagattgcgcatctgcgcgtatcggcgcactgtctgatccgtcgtgatggcgaagtggttcagtatgttccttttgataagcgagcctggcatgctggcgtgtcgatgtatcaggggcgcgagcggtgcaatgatttctctattggaattgaactggaaggaacggacaccacgccttacaccgatgcgcaatatgagaaactggttgctgtaacgcaaacgttaatcgggcgctatcccgccattgcagacaatattacagggcacagcgacatcgcccccgaaagaaaaaccgaccccggcccggcgtttgactggtcccggtttcacgccatgcttaccacgtcgtcagataaggagataacatga

SEQ ID NO: 113881 - DNA, 894 bp, Enterobacter cloacae
atgccgcctcgccgctataaccccgaccaccgacgtgacgcgcttctggaacgtattaatagtgatatcccggcaagcgttgcccatgccctgaaagaagatctcggcggcgacgtcagcgccgataacgatattaccgcccaattgttgccaaaagagacacgctcgcatgcggtgatcatcacccgcgaagcgggggttttctgcggcaaacgctgggttgaggaggtctttacccagctggcaggcgacgaggtgcaggtaacatggcacgttgaagacggtgatgcggtcacggcgaatcagccactgttcgagctggacggcccgtcccgcgtcttgctgaccggtgaacgcaccgcgctcaattttgtgcaaacgctctctggcgttgccagtgaagtacgccgctacgttgacctgctggcaggcacccgcacgcagctgctggatacccgtaaaaccctgccgggcctgcggaccgcgatgaaatacgcggtactctgcggtggcggcgccaaccatcgtctggggctatccgatgccttcctgatcaaagagaaccacattattgcctctggctcggtgcgtcaggccgtggaaaaagccttctggctgcatccggatgtgccggtcgaagtggaagtggaaacgctggaggagctggacgaggccattaaagcgggggctgacatcatcatgctcgataacttcgacacggagcagatgcgtgaagcggtcaaacgcacaaacggccaggcgcagcttgaggtgtccggcaacgtgacgttcgacaccatccgcgaatttgctgaaaccggcgtcgattacatctccgttggcgccctgaccaagcacgtccgcgccctcgacctctcgatgcgcttcaaataa

SEQ ID NO: 113882 - DNA, 438 bp, Enterobacter cloacae
atgaacagacaacaaggatttaccctgattgagctaatggtggtcattggcattattgccatcctgagcgccattggcgtcccggcctatcagaactacctgcgaaaagcggcgctcaccgatttgctgcaaacgttcatcccctaccgcaccgccattgagctttgcgccctggatcgtggtggtgtggatagctgcgacgcaggcaccaatggcatcccctccccgacaaccacacgttacgtttcagcgatgagcgtggcaaagggggccgtatcgttaacagggcaggaaagccttaacggacttgaagtgctcatgacaccgatctggagcgacggtaacggtatgacgggctggacgcgtgactgcaaaattgcgtccgacacggcgctcagacaagcttgtgaagatgttttccgcttcgacaacaactga

SEQ ID NO: 113883 - DNA, 1380 bp, Enterobacter cloacae
atgaataccgaacagctaatgacgctctgtcagcgccatcacgcactgctactcgcaagcgacgccgatatgatcagcattgcggtggtgggtaatcctgcctctgagctgatggaagcgttacgcttcgccacgcagaagcgtattgatattgagtgctggacggcagaacggatggaaaaacggcttcagtccgtctcatcatcacacctgccgggcatagcgccaaactcagccgctgacgtgctcagtacaacgttgcagcaggcagtaaaccagcgggcttctgacatccatattgaaccgacggagcacggctaccagatccgtttgcgaatcgacggtgttctctacccgcaaccgccgatctctgccgccctcgggacgacgcttgccgcacgcctgaaggtgctgggtcaactggatattgcggagcgccgcctgccgcaggacggccagtttacggtggagctggcaagcatccccgtatcttttcgtatcgcaacccttccctgtagcggcggagaaaaaatcgtgcttcgtctgcttcaccaggtacagcaggcactggagcttgaacagctggggatgagcgcagaccagcaggcccgttttgccagggcgcttaacagccctcaggggttgattctggtcaccggcccgaccggtagcgggaaaacggtgacgctgtacagcgcgttacaggcgcgaaatacccctgacgtcaatatttgcagcgtggaagatcccgttgaaatcccgcttgcaggcttaaaccagacacagattaatccgcgcgcggggctgacctttcagagcgtgctgcgtgccctgctcaggcaggatcctgacatcattatggtgggtgaaattcgtgacggcgaaacggcagaaattgccattaaggcggcgcaaaccgggcatctggtgctgtccaccctccatactaattcgacgactgaaacgctggtacggctgcaacagatgggcgtcgcgcgctggatgatctcttcggcgctctcgatggtgattgcccagcgactggtgcgccgtttatgtccgtactgccgacaggaagccagccgccacaccgaattaccccgcacgctgtggccccggccgcttcctcgctggcaacccaccggctgcgatcgctgctaccacggtttttatggtcgcgtagccatttttgaagtgctcgtcatcgacgacacgctgcggcaggccatcgccagcggagcaagcacggaggtgattgggtccagcgctcgtcaggcgggaatgacctctttgtttgagcatggctgcatggccgtagaacaagggctgaccacgctcgaagagctgttgcgcgtcctgggaatgcccgatggctgctaa

SEQ ID NO: 113884 - DNA, 1185 bp, Enterobacter cloacae
atggctgctaattcgctctggcgctggcgtgccctgaacaccgagggggaggtgcaaaccggcaccctctgggccatcgaccgtgacgcagcttacacggctctggtgcttaaacaactgcacccgctggcgctaaaacgctgtcagcagcgccaccgatggcaggtgcagcactgctacgatatttttcgccagctcgccacgctgctacaggctggactcacgctatcccaaagcctgcacatgctggcggaacagcatcctttgcagcactggcaggcgctgctgcacagtcttgctgatgacctgagcgaaggttgcgccctgtcagaggccatgaagaaatggccagaggtgtttagccctctttatgtctcaatggtgaagacgggtgagctgacgggtaagctcgaagcctgctgccgtcagcttgcgcagcaacaaaaatcccagcagcagcttagtgcgaaggtgaagaaagcgctgcgctatccgctgatcatcctgacgctggccgttttcgtggtgctggcgatggtcacgctggttttgcctgagtttgctgcaatctacaaaacgttcaacaccccgctccctttgctcacgcaggcagtcatggggctggcggccttggttcaggcgcatatcctcacccttttgaccctgctcgtggcaatggttgtcatcgcctgtaagctgcggcggcatccacgctggcagtatgtcttgttacacgtaccggtgatgggcacgctgacgcgcgggcaaaaactggggcagatttttaccgtgctgtcattaacccagcaggccggaattgcctttttacaaggactggagagtgtggaggagaccgttgagaggggctactggcaggagaaactccgtgagatacgcagcgatatcgaacaggggatgcccgtgtggtcctccttccagaaggcctctgtttttacgccactgtgtattcagctcattcgcaccggagaagtgtcgggttcactggatgtgatgctgatgaatctggcccgccaccatacggaacagacatttcagcaggcagacaatctggcggcgcttcttgagcctttgctactggtcgtgacgggtctgattatcggcacgctggtggtggcaatgtatctgccgattttccatctgggggatgcaatgagcgcggggtaa

SEQ ID NO: 113885 - DNA, 1044 bp, Enterobacter cloacae
atgcgtatcgaagaagatctgaagttaggtttcaaagacgttcttatccgccctaaacgctctacactgaaaagtcgctcagacgttgaactcgaacgtcaattcacctttaagcattccggtcagacgtggtctggcgtgccgattatcgcggccaacatggacaccgtcggaaccttcgagatggcgaccgcactggcgcaattcgacatccttactgcggtacacaaacactacagcgctgaagagtgggatgcgtttgtcgcctccgcctcggctgacgtggtgaagcatgtgatggtctcgaccggtacctctgatgcagatttcgagaaaaccaaacagatcctgaacgccaatccagcgctgaattttgtctgcattgacgtggcaaatggttattccgagcatttcgttcagttcgtcagcaaggcacgtgaggcctggccaaccaaaaccatcatcgcgggcaacgtggtgaccggtgaaatgtgtgaagagctgatcctctccggggccgacattgtaaaagttggcattggcccggggtccgtttgcaccacgcgcgtgaaaaccggtgtgggttatccgcagctgtctgcggtaattgaatgcgctgacgctgcgcacggtctgggcggccagatcatcagcgacggtggctgcaccatgccaggcgatgtcgcgaaagccttcggcggcggcgcggatttcgtgatgctcggcggcatgctggcaggccacgaagagagcggcggtaccgtggtggaagagaacggcgagaaattcatgctgttctacggaatgagctctgaatccgcgatgacccgtcacgtgggcggtgtcgcgaaataccgtgcggcggaaggcaaaaccgttaagctgccactgcgcggcccggtcgaaaacacggcgcgcgatatcctcggcggtctgcgttctgcctgcacctacgttggtgcttcccgcctgaaagagctgacgaaacgcacgacgtttatccgcgttcaggagcaggaaaaccgcgtatttaatagcctctga

SEQ ID NO: 113886 - DNA, 621 bp, Enterobacter cloacae
atggggtatatcgtcgcattaaccggcggcatcggtagtggtaaaagcaccgttgcgcacgcgtttgctcgtctcggcatcacgattatcgacgccgatatcattgcccgtcaggtggtagaacccaatacacccgccttaaacgccatcgaagcgcattttggtcgccgtgtgatacaggctgacggcaccctgaatcgtcggcagctgcgtgagtgcatattttccgatccagcggaaaaagcctggcttaatgccctgctccaccccattatccaccaggaaactcagcgtcagattgccgcagccctttcgccctatgtgttgtgggtggtcccgttactggtggaaaatcagcttcaaaataaagcagacagaacgctggtgattgacgtttcccgcgaaacgcaaatccagagaaccatggcgcgtgacaatgtttctcgcgagcatgctgaacaaattcttgccgcacaggccacgcgcgaagcgcgcctcgccattgcggatgatgttattgataataacggcgcaccagatgccattgcatcggatgttgctcgtctgcacgcgcagtatctgaccttcgccgcgcaggccgttgcacaggaaaaaccataa

SEQ ID NO: 113887 - DNA, 744 bp, Enterobacter cloacae
atgtcgactcatatcctttttgagcacccgcttaacgaaaaaatgcgtacctggctacgcatagaatttcttattcaacagctttcacaacatctgcctgtcaacgatcacgccacggcgctgcattttttccgcaacgtgggcgatctgctggatgtgattgaacgcggcgacgtccgcactgagctgttgaaagagctggagcgccagcagcgtaaattacaggcctgggccgaagtaccgggcgtggatcaaagtcgaattgacgctttacgcaagcagctgaaaaacagcagcacgaccctgatggccgcgccgcgcgttggccagtttttacgagaggatcgtctgattgcgctggtgcgccagcgcctgagcataccgggcggatgctgtagctttgacctgccaacgctgcatatgtggctgcacatgccgcaggaacagcgcgatcgccaggtgaacagctggctgggcagcctggagccgatgaatcagacgttatccctgatcctcgatcttgtgcgtaactctgccccgttccgcaaacaaaccagtctcaacggtttctatcaggataacggcgacgacgccgatcttctgcgcctgaacctgtctcttggcgagcagctttacccgcaaatttccggacataaaagccgtttcgcgatccgctttatgccgctggacagtgaacatggcaccgtgccggaacgcctcgattttgaactggcctgttgttaa

SEQ ID NO: 113888 - DNA, 195 bp, Enterobacter cloacae
atgtctgacgtaaccaccgtaaactgcccaacctgtgggaaaactgtcgtctggggagacgtaagtccatttcgcccattctgctgtaagcgctgtcagcttatagacctgggcgaatgggcggcggaagagaaacgcattccgagcgaaggcgatctctcggatagcgatgactggagcgaaaaccagcagtaa

SEQ ID NO: 113889 - DNA, 396 bp, Enterobacter cloacae
atgatgaaaacactgcaaattgctgtcgggatcattcgcaacccgcaaaatcagatcttcattacccaacgtgccgccgatgcgcacatggccaacaaatgggaattccccggcggaaaaatcgaatcaggtgaaacgccggagcaggcgctggtgcgtgagcttcaggaagaggtggggatcaccccgcttggcgcaacgctgttcgataagctggagtaccagtttccggatcgtcacatcacgctgtggttctggctggttgaaaactgggaaggtgagccgtggggaaaagaggggcagccgggtaactggattgagcttcaggccagcgatgcggaaaaattcccgcctgccaatgagcctgtgatcctccggctggccgcacaaccgtag

SEQ ID NO: 113890 - DNA, 2706 bp, Enterobacter cloacae
atgctaatcaaattgttaaccaaagtttttggtagtcgtaacgatcgtaccctgcgccgcatgcgcaaagctgtgaacgtcatcaacggtatggaaccggcgatggagaagctcactgatgatgagctgaaagcgaaaaccgcggagttccgtgcgcgtctggagaaaggtgaaaccttagaaagcctgatcccggaagccttcgccgttgtacgtgaggccagtaaacgcgtgttcggcatgcgtcacttcgacgtgcagctgctgggcgggatggtgctcaacgagcgctgcatcgcggaaatgcgtaccggtgaaggtaaaaccctgacggcaacgctgccggcttacctgaatgcgctgacgggtaagggcgttcacgttgttaccgtcaacgactatctggcgcagcgcgacgcagaaaacaaccgtccactgttcgaattcctcggcatgaccgtgggcattaacatgtccggcctgccggcacctgccaagcgtgaagcctataacgcagatatcacctacggcaccaacaacgaatacggcttcgactacctgcgcgacaacatggcgttcagcccggaagagcgcgtccagcgtaaactgcactatgcgctggtggatgaggttgactccattctgatcgatgaagcgcgtaccccgctgatcatctccggcccggccgaagacagctccgagatgtaccgtaaagtcgacaaaatcattcctcacctgctgcgtcaggagaaagaagactccgatactttccagggggaaggtcacttctccgtggatgaaaaagcgcgtcaggtcaacctgaccgaacgcggcctggtgaaaatcgaagagttgctggtggctgaaggcattatggaagagggcgagtctctgtactccccgagcaacatcatgctgatgcaccacgtaacggccgcactgcgcgcgcacgcccttttcacccgcgacgttgactacattgttaaagacggcgaagtcatcatcgtcgatgaacacaccggccgtactatgcagggacgtcgctggtccgatggcctgcaccaggccgtggaagcgaaagaaggcgtggatattcaaaacgaaaaccagacgctggcatccatcaccttccagaactacttccgtctgtacgagaagctggcggggatgaccggtaccgcagataccgaagcgtttgagttcagctccatctataagctggataccgtggtagtacctaccaaccgtccgatgatccgtaaggatatgccggacctggtatacatgactgaagcggaaaaaattcaggcgatcattgaagatattcgcgaacgtaccgcgaagggccagccggtactggtggggaccatctccatcgagaaatccgaagtggtatccaacgagctgaccaaagcaggcatcaaacacaacgttctgaacgccaagttccacgctaaagaagcagatatcgttgcgcaggccggttacccggctgccgtaaccatcgccaccaacatggcgggtcgtggtaccgatattatgctcggcggtagctggcaggccgaagtggcggagctggaaaacccaaccccagagcaaatcgcgcagatcaaagccgactggcaggtgcgtcatgacgcggtgctggcatccggtggtctgcacatcattggtaccgagcgtcatgaatctcgtcgtatcgataaccagctgcgcggtcgtgcaggtcgtcagggtgatgccggttcttcccgcttctatctgtctatggaagatgcgctgatgcgtattttcgcctctgaccgtgtgtccggcatgatgcgtaaactgggcatgaaacctggcgaagcgatcgagcacccgtgggttaccaaagcgattgccaacgcccagcgtaaagtagaaagccgcaacttcgatattcgtaagcagctgctggaatatgatgacgttgccaacgaccagcgtcgtgcgatctacacccagcgtaacgaactgctggacgtgtccgacgtgagcgaaaccatcaacagcattcgcgaagatgtgttcaaagccactatcgacgcgcacattccgccacagtctctggaagagatgtgggatatcgaaggtttgcaggaacgtctgaaaaacgacttcgatctcgaactgccaatcaaagagtggctggacaaagagcctgagctgcacgaagagacccttcgcgagcgtatctacgaaaccgcgctggacgtctacaagcgtaaggaagaagtggttggcgcagagatgatgcgtcactttgagaaaggcgtaatgttgcagaccctggactccctgtggaaagagcacctggcggcaatggactacctgcgtcagggtatccatctgcgtggttatgcgcagaaagatccgaagcaggagtacaagcgtgaatccttctccatgtttgctgccatgctggagtcgctgaagtatgaagtcatcagcaccctgagcaaagttcaggtgcgtatgccggaagaagtggaagcgatggagcagcagcgtcgtgaagaagctgagcgtctggcacagatgcagcagctgagccatcagaccgatgaaagcgaagccgcagcggcaatcgcagcgcagacgggcgatcgtaaagtcggtcgtaacgatccgtgcccatgcggttccggcaaaaaatacaaggcgtgccacggccgtctgagttaa

SEQ ID NO: 113891 - DNA, 516 bp, Enterobacter cloacae
gtggtggagcaagtgagcggaatactgacgcgctggcgacaatttggcagacgttacttctggccgcatctcttattggggatggtcgcggcgagtttcggcttgcctgtgctcagcaacagcgcagacgcggccacgccagcacgttccacgacgaccaaacacgatctcaccacacgggttaacttcactaatctcgcatggcttgaagctagccgccgtcctaatttctccgttgattactggcagcagcacgcgattcgcacggttatccgccatctgtcgttcgcgatggcgccacagacgatgcctgttgcggaagaaacgctgccggttcaggctcagcatcttgccctgctcgatacgcttaatgcgcttctgacgcaggacaaccagccgccagtgaccgtaaatcagacggcgcaaacggattttgtttcccctgcatccttctctgtttcgacatggattagccaggttcacggcatccgtgccgggcctcaacgcctcagctaa

SEQ ID NO: 113892 - DNA, 918 bp, Enterobacter cloacae
atgatcaaacaaaggacacttaaacgtatcgttcaggcgacgggtgtcggtttacataccggcaagaaagtcacactgacgttacgccctgcgccggccaataccggggtcatctatcgtcgcaccgacttgaatccaccggtagattttccggccgatgccaaatctgtgcgtgatactatgctctgtacttgtctggtgaacgagcatgacgtgcggatttctaccgtagagcacctgaacgccgccctggcgggtctgggtatcgacaacattatggttgaagtcgatgcgccagaaatcccgatcatggacgggagtgctgctccgttcgtttatttgttgctggatgccggcatcgaagaactgaactgcgcgaagaaatttgttcgcattaaagagaccgttcgcgtcgaagatggcgacaaatgggctgaattcaaaccgtacaatggtttctcgttggacttcaccatcgattttaaccatccggctattgactccagcacccagcgctatgcgatgaacttctctgcggatgcgttcatgcgtcagatcagccgagcacgtaccttcggctttatgcgtgatatcgaatatctgcaatcccgcggcctgtgcctgggcggcagcttcgattgtgccatcgttgttgacgattatcgcgtactgaacgaagacggcctgcgttttgaagatgaatttgttcgtcacaaaatgctggacgcgatcggcgacctcttcatgtgtggtcacaacatcattggtgcatttaccgcgtttaaatccggtcatgcactgaacaacaaactgttgcaggccgtcttggcaaaacaagaagcctgggaatatgtgaccttcgaagacgaagctgaactgccgctggcgttcaaagccccgactatggtcctggcgtaa

SEQ ID NO: 113893 - DNA, 1152 bp, Enterobacter cloacae
atgtttgaacctatggaattaaccaacgacgcggtgattaaagtcatcggcgtcggtggcggcggcggtaacgccgtagagcacatggtgcgcgagcgcatcgaaggtgttgaattcttcgcggtgaacaccgatgcgcaggcgctgcgtaaaacggctgttggccagacgattcagatcggtggtggcatcaccaaaggtctgggagcaggggctaacccggaagtgggccgcaacgcggctgaagaagatcgtgaagcgctgcgcgctgcactggacggtgcagacatggtcttcatcgcagcgggtatgggcggcggtacaggtaccggtgcagcacccgttgtggcggaagtcgctaaagatttaggtattctgaccgttgctgtcgtgaccaagcctttcaactttgaaggtaagaagcgtatggctttcgcggagcagggtatcaccgagctgtccaagcacgtggactctctgattaccatcccgaacgacaagctgctgaaagtgctgggtcgcggtatctctctgctggacgcctttggcgcggcaaacgacgtgctgaaaggcgcggttcagggtattgctgaactgattacccgtccaggtctgatgaacgttgactttgcagacgttcgcaccgtgatgtccgagatgggctacgcgatgatgggctctggcgtggcgagcggcgaagaccgtgcggaagaagccgctgaaatggcgatctcttctccactgctggaagatatcgatctgtctggtgcgcgcggcgtgctggtcaacattaccgctggctttgacctgcgtctggatgagttcgaaaccgtgggtaacaccatccgtgcgttcgcctctgacaacgcgaccgttgttatcggtacgtcccttgatccggaaatgaacgacgaactgcgtgtgaccgttgtggccaccggtatcggtatggacaagcgtcctgagatcaccctggtgaccaacaaacagactcagcagccggttatggatcgttaccagcagcacggtatggcgcctctgactcaggagcaaaaacccgctgcgaaagtggtgaacgacccaactccacaaacggcaaaagagccagattatctggatatcccggcgttcctgcgtaagcaagctgactaa

SEQ ID NO: 113894 - DNA, 1257 bp, Enterobacter cloacae
atgatcaagtcgacggacagaaaattggtagtaggactggagattggcaccgcgaaggttgccgctttggtaggggaagttctgcccgacggtatggtcaatatcattggcgtgggcagctgcccctcccgtggtatggataaaggtggggtaaacgaccttgagtcggtggtgaaatgcgttcagcgcgccatcgaccaggctgaattgatggcagattgccagatttcctctgtctatctggccctgtctggtaagcacatcagctgccagaatgaaatcggtatggtgccgatttctgaagaagaggtgacgcaggaagacgttgagaacgttgtccacacggcgaaatccgtgcgtgttcgcgacgagcaccgtgtgctgcatgtgatcccgcaggaatacgcgatcgactaccaggaaggcatcaagaatccggtcggtctctcgggcgtgcgtatgcaggcaaaagtgcacctgatcacatgtcacaacgatatggcgaagaacattgtaaaagccgttgaacgttgtggcctgaaagttgaccaactcattttcgccggtcttgccgcgagctattccgtgctgaccgaagacgaacgtgaactgggcgtctgtgtggtcgatattggtggtggtacaatggacatggccgtctataccggcggtgcgttacgccacaccaaagtgatcccgtacgccgggaatgtggtgaccagcgatatcgcttacgcctttggtacgccaccgagcgatgcagaggcgattaaagtgcgccatggttgcgcgctgggctctatcgtcggcaaagacgagagcgttgaagtgccgagcgtaggcgggcgaccgccgcgcagcctgcaacgccagacgctggcagaggtgattgagccgcgttataccgagctgctcaacctggtcaacgaagagattttgcagttacaggaacagcttcgccagcagggtgtgaaacatcatctcgcggcggggattgtattaaccggcggggcagcgcaaattgaaggtcttgcggcctgcgctcagcgcgtgttccatacgcaggtgcgtattggtgcgccgctgaatattaccggtttaacggattacgctcaggagccgtattactcaacggccgtgggcctgctgcactacgggaaagaatcccatttgagtggtgaagcagaagtggaaaaacgcgtctcggtggggtcttgggtcaaacgacttaacacctggttgcgaaaagagttttaa

SEQ ID NO: 113895 - DNA, 843 bp, Enterobacter cloacae
atgtctcaggctgcattgaacacgcgcaaccgcgatgacgaagaagaatattcctcttcgcgccggagtaatggaacgcgtcttgcagggatcatcttcctgctcggggtgctgtgcaccgtgtttatcagcggctggatggtgctgggctggatggaagacgcgcagcggttgccgctgtcgaagctggtggtgaccggggagcgacactacacgcgtaacgatgacattcgccagtcgattctggcgcttgggtcgcctggcacctttatgacgcaggacgtcaacattatccagagtcagattgaacgtctgccgtggataaaacaggcgagtgtcagaaaacaatggccagatgaattgaagattcatctggttgaatatgtgccgattgcgcgttggaatgatcagcatatggttgacgtagacggaaattcgttcagcgtcccgagcgatcgtgtcaacaagcagaatttaccgatgttgtatggcccggaaggcagcgaaaacgaagtattgcagggttttcgtgagatggggcaggtgctggctaaggatcgctttacgttaaaagatgctgcgatgacggcgcgccgttcctggcagttgaccctaacgaatggcattaagctcaatcttggccgcggcgacacaatgaaacgtctggcgcgttttgtagaactttacccggttttacagcagcaggcgcagacggatggcaaacggataagctacgttgatttgcgctatgactcaggcgcagcagtcggttgggagccggctccggtcgaggaacctaatcagcaacaaaatcaggcacaggtacaggcagaacaacaatga

SEQ ID NO: 113896 - DNA, 921 bp, Enterobacter cloacae
atggctgataagattgctgtcctgtttggcggcacttccgccgaacgcgaggtttctctgaattcgggcgctgccgtgctggcgggcctgcgtgaaggtggtgtggacgcgcatccggttgatccgaaagaggtggacgtcacgcagctgaaagcgatgggcttcgataaagcctttatcgcgttgcacggtcgcggcggtgaagacggcacgttgcaggggctgctggagctgatcggcatgccgtacaccggcagcggcgtgatggcatccgccatctccatggataaactgcgcagcaaactgctgtggcagggggcggacctgcccgttgcgccatgggttgcactgacgcgtcgtgaatatgaattgggtctgtcggacagcgttaatacacgcattgcggcactgggcttaccggttattgtgaagccgagccgtgaagggtcgagcgtgggaatgtccaaagtcgataaagctgtagatttggctgacgctttagcactggcatttcaacatgatgaagaagttctgattgaaaaatggcttagcgggccggaatttaccgtcgcgatgcttggcgaagaaattttaccgtcaattcgcatccaacccgccggagtcttctatgattatgaggcgaagtatctctctgatgagacgcaatatttctgcccagcgggtcttgaagcagagcgtgaggccgaattacagtctctggtgcttaaagcctggaatgtgctgggatgtcgtggctggggacgcattgacgtgatgcttgacggtgacgggcaattttatctgctggaagcaaacacgtctccgggtatgaccagccatagccttgtgccgatggcggcgcgtcaggcgggaatgagcttctcgcagttagtcgtacgtattctggaccaggcgggctga

SEQ ID NO: 113897 - DNA, 1476 bp, Enterobacter cloacae
atgaatacacaacaactggcaaaactgcgttctatcgtgcccgagatgcgtcgcgtccggcacattcactttgtcggcatcggtggtgctggcatgggcggtattgccgaagtgttagctaacgaaggctatcagatcagcgggtctgacctggcgccaaaccctgttacgcagcagctggcgtcgctgggggcgactatctatttcaatcatcgcccggaaaacgtgagcgatgcgagcgtggttgtggtgtccagcgctatctccgcggataacccggaaatcgttgcggcgcatgaggcgcgcatcccggtgatccgtcgcgcggaaatgctggcggaactgatgcgtttccgtcacggcattgcggtggccggtacgcacggtaaaaccaccacaacagcgatggtctccagcatttatgcggaagcgggtctcgacccgacgttcgttaacggtggtctggtgaaagccgctggcgtgcatgcgcgtctgggccacagccgttatctgattgcggaagcggatgagagcgatgcgtcgttcctgcatctacagccgatggtggcgatcgtcaccaacatcgaagctgaccatatggacacttaccagggcgacttcgagaacttaaagcagacctttattaacttcctgcacaacctgccgttctatggccgtgcggtgatgtgcgtggacgatccggttattcgcgagctgctgccgcgcgtcgggcgtcaaattacgacctacggcttcagcgaagacgcggatgtacgcgtagaagattacaagcagatcggtgcgcaggggcatttcaccctcgcgcgtcaggataaagacctgctgcatgtcaccctgaacgctccgggacgtcacaacgccctgaatgcggcagcggcggtggctgttgcgacagaagaaggcattgacgatgaagcgatcctgcgcgcactggagagcttccaggggacgggccgtcgcttcgacttcctcggtgaattcccgctggagccggtaaacggtaagccaggttctgcgatgctggtagacgactacggtcaccatccgacggaagtggacgcaaccatcaaagcggcacgcgcgggttggccggaaaagaatctggtcatgatcttccagccgcaccgttacacgcgtactcgcgatctgtatgacgattttgccaacgtcctttcgcaggtcgataccctgctgatgctggatgtttatgcagcgggtgaaactccgattccgggtgcggacagtcgttctttatgtcgtaccatccgtggacgcggtaaagtggatcctattctggttcccgagccggcgcaggtggctgaaatgcttgccccggtcctgacgggtaacgatctgatcctgattcagggcgcgggaaatatcggcaaaatcgcccgtaccttagctgaaatcaaactgaagccgcaaactcaggaggacgagcgtcatggctga

SEQ ID NO: 113898 - DNA, 1065 bp, Enterobacter cloacae
atgaatcaaccgaagcggttaatggtgatggcaggcggtaccggtggacacgtgttcccgggactggcggttgcgcaccatttaatggaacagggctggcaggtacgctggctgggaaccgcagaccgcatggaagccgatctggtacctaaacacggtatcgagatcgactttattcgtatttctggccttcgtggcaaagggatcaaggcgcagctgctggcgccggtgcgcattttcaatgcctggcgtcaggcgcgcgccattatgaagcgttttaagcctgacgtcgttctgggcatgggcggttacgtttccggtccgggcggactggcggcgtggtcactgggcatccccgttgttctgcatgagcagaacggtattgccgggttgaccaacaaatggctggcaaaaatcgccaccaaagttatgcaggccttccccggggcattcccgaaagcggatgtcgtagggaatccggtacgtgtggacgtgctggcgctgccgctgccagatacgcgtctggcgggtcgcgaagggccggtgcgcgtgctggtcgtcggcggttcccagggcgcacgtattttaaaccagacgatgccgcaggttgcggcaaaactgggtgatgcggtgaccatctggcaccagagcgggaagggcgctcagcagaccgttgagcaggcctacgtgcaggaaggtcagccgcagcataaagtgactgaatttattgatgatatggccgcagcctatgcctgggccgatgttgtggtctgtcgctcgggcgcgctgacggtgagcgaaatcgccgccgccggtttaccggcgctgtttgtgccgttccagcacaaagaccgacagcagtactggaatgcgctgccgcttgagaaagcgggcgcagcgaagatttttgagcagccacaatttaccgctgatgcggtcgccactaccctggcgggctggaaccgggatgtattactggagatggcgcaacgcgcacgcgcgaccgctatcccggatgcaacggaacgggtggcaaaagaagtgagcctggcagcccaggcataa

SEQ ID NO: 113899 - DNA, 1245 bp, Enterobacter cloacae
atgcgtttatctctccctcgcctgaaaatgccgcgcctgccaggatttggtatcctggtatggctgtttacggcgctgaaaggctgggtgatggcttcccgggataaagattccgatagcctgatcatgtacgaccgcacgctgttctggctcacgctggggctggcagcgatcggctttattatggtcacctcggcgtcaatgcctgtcggacagcgtctggcaaacgacccgttcctgtttgccaagcgtgacgggctgtacatcattctcgcgttctgcctggcaatgatcaccttacgcctgccgatgtcgttctggcagcggcacagtacagccatgctcatcgcctcaatcatcatgctgttgatcgttctggttgtcgggagctccgttaacggggcatcacgctggattgcctttgggccactgcgtatccagcccgcggagttcaccaaactgtcgttgttctgctacctggctaactacctggtgcgtaaagttgacgaagttcgtaacaaccttcgtggcttcttaaaaccgatgggcgtgattctggtcctcgcgatcctgctgctggcgcagcccgacctcggtacggtagtcgtactgtttgtcactacgctggcgatgctgttcctggcgggcgcaaaactgtggcagttcattgccatcatcgggatggggatttcggcggtggtgctgctgatcctcgccgagccctaccgtatccgccgtgtgacctcgttctggaacccatgggaagatccgttcggcagcggttaccagctgacgcagtcgctgatggcgtttggccgcggcgaagtctggggtcaaggcctgggcaactcggtacaaaaactggagtatttaccggaggcgcacaccgacttcatcttctccattattggggaagaactgggttatatcggtgtggtattggcgctattaatggtattcttcgtcgctttccgcgccatgtcgattggccggaaagcgctggagatcgatcaccgcttctccggtttcctggcctgctcaattggtatctggtttagcttccaggcgctggtaaacgttggggcggcagcgggtatgctgccgaccaaaggtctgacgttgccgttgatcagttatggtggttcgagtctgctgatcatgtcgacggccatcatgtttttgttacgcatagattatgaaacgcgtctggagaaagctcaggcgtttacacgaggttcacgatga

SEQ ID NO: 113900 - DNA, 1317 bp, Enterobacter cloacae
atggcagattaccagggcaaaaaagtcgtaatcatcgggttgggcctcaccggcctctcctgcgtggactttttccttgcgcgtggcgtgacgccgcgcgtgatggatacgcgcgtctctccatcgggtctggacaagctgccggagcaggttgaacgccacctgggtggtctgaatgatgagtggctgctggccgccgatctgatagttgccagccccggtatggcgctggcgcatccttccctgaacgccgccgcggatgcgggcgttgagattgtcggcgatatcgaactgttctgccgggaggcgcaggccccgatcgtcgccattaccggttcaaacggtaaaagcaccgtcaccacgctggtgggggaaatggcgaaggcggcgggcaaaaatgtcggcgtgggcggtaacattggtctgcccgctctgatgctgcttgataaagggtgtgagctgttcgtccttgagctttccagcttccagctggaaaccacttcaagcctgcatgcggcggcggcgacgatcctaaacgtcaccgaagatcatatggacagatacccgttcggcttgcagcagtaccgtgcggccaaactgcgcgtttatgaaaatgccaaagtttgcgtagtgaatgccgatgatgcactcaccatgccggtgcgcggcgcagacgaacgctgcattagcttcggtattaacatgggtgactatcaccttaatcgtcagcagggcgaaacctggctacgtgtgaaaggtgagaaagtgctgaacgtgaaagaaatgatgctctccggccagcataactacactaatgccctggcggcgctggcgctggcggatgctgttggcctgccgcgatcttcaagcctgaaggcgctcaccacctttaccggcctggcgcaccgcttccagctggcgctggagcacaacggcgtacgctggattaatgattccaaagcgaccaacgtgggtagcaccgaggcggcactgaacggtttgcacgttgatggcacgctatacctgctgctgggcggcgacggtaaatcggctgacttctcctcgctgaagcagtacctcaacggtgataacgtgcgcctgtattgctttggccgcgatggcagcgagctggcggcgttgcgtcctgaagtcgccgagcaaaccgagaccatggagcaggcgatgcgcctcatcgccccacgcgtgaagcccggcgatatggtactgctctcgccagcctgtgccagcctcgatcaattcaagagtttcgaacagcggggtgatgtctttacccgcctggcgaaggagttaggctga

SEQ ID NO: 113901 - DNA, 1083 bp, Enterobacter cloacae
atgttagtttggctggccgaacatttggtcaaatattactcaggctttaacgtcttttcctatctgacgtttcgcgccatcgtcagcctgctgactgcgctgttcatctcgctgtggatgggcccgcgcatgattgcccgtctgcaaaaactctctttcggccaggttgtacgcaacgatggtccggaatcgcacttcagcaagcgcggtacgccgaccatgggcgggatcatgatcctgaccgcgattgtggtgtccgttctgctgtgggcctatccgtctaacccctacgtctggtgcgtgctgaccgtcctggttggctacgggatcatcggttttgttgacgactatcgtaaagtcgtgcgcaaagacaccaaaggtttgatcgcccgctggaagtatttctggatgtcggtgattgcgctgggcgtggccttcgcgctttatctggcaggaaaagacaccccggccaccgagctggtggtgccgttcttcaaagacgtgatgccgcagctggggctgttctacattctgctggcttactttgtgatcgtcggcaccggcaatgccgtcaacctgaccgatggtctggacggcctggccatcatgccaaccgtgtttgtcgcgggcggtttcgcgctggtggcgtgggcgaccggtaacatgaactttgcaaactacctgcacatcccgtacctgcgacatgcgggtgagctggtgatcgtctgtacggcgattgtcggggcggggctgggcttcctgtggtttaacacctatccggcgcaggtctttatgggcgacgtcggttcactggcgctgggcggtgcgctgggcattatcgccgtgctgctgcgtcaggagttcctgctggtgatcatgggcggtgtgtttgtggttgagacgctatcggtgattttgcaggtcggttccttcaagctgcgcggtcagcgcattttccgtatggcaccgattcaccaccactatgaactgaaaggctggccggagccgcgcgtcattgtgcgcttctggattatttcgctgatgctggtgctgattggcctggcaacgctgaaggtacgttaa

SEQ ID NO: 113902 - DNA, 1359 bp, Enterobacter cloacae
atgattagcattacgttaagccaggccgctgcggtattgcaggggatgctgcatggtcaggatctaaccattgaggctgtgaccaccgacacccgtaaggtgacggcgggctgcctgtttgtggcgctgaagggcgagcgttttgacgcccacgattttgcgcaacaggctaaagataacggcgcgggcgcgctgctggtcagccgtaagctcgatatcgatttgccgcagattgtggtgaaagatacgcgcctggcgtttggcgagctggcggcatgggttcgccagcaggtgccaacacgcgtcgtggcgctgacgggctcgtcgggcaaaacctccgttaaagagatgacggcggcgatccttagccagtgcggtaacacgctttatacggcgggcaaccttaataatgacatcggtgtaccgatgacgctgctgcgcctgacccacgagcatgaatatgcggtgattgagttaggggctaaccatcagggcgaaatcgcctggaccgtgagcctgacgcgtccggaagcggcgctggtgaataacctggcggcggcacatcttgaaggttttggttcgctggccggtgtggcgaaagcgaaaggtgaaatttataccggcctgccggatgacggcatcgccattatgaacgccgataacaacgactggctgaactggcagagcatcattggttcacgcaaaacctggcgcttctcaccgaatgcggcaaacagtgatttttcggcgaccaacattcatgtgacgtcacacggcaccgagttcaccctcacgaccccaacgggcgacatcgaggtgctgctgcccctgcccggtcgtcataacatcgccaatgcgcttgctgcggcagcgctctcaatggcggtaggtgcctcacacgcggcgatcaaagcaggtctggcaaatttaaaagccgtgccggggcgtcttttcccgatccagctggctgaaaacaaacttctgctggatgactcctacaacgctaacgtcggctccatgacggcggccgtgcaggtcttgtctgagatgccgggctatcgcgtgatggttgtgggcgatatggccgagctgggtgatgaaagcgaagcctgccatgttcaggtgggtgaagcggcgaaagccgccgggcttgaccgcgtattgagcgcaggcacgctgagcaaggccatttccgatgccagtgaagttggcgaacattttgccgataaatctgcactgatcgaacgcctgaaggcattgattacagaaaaacagattgtgactgttttagttaaaggttcacgtagtgccgccatggaagaggttgtgcacgcattacaggagaacgggacatgttag

SEQ ID NO: 113903 - DNA, 1488 bp, Enterobacter cloacae
gtggcagatcgtaatttgcgcgaccttcttgctccgtgggtgcctatgctacctgcgcgagcactgcgagagatggtactggacagccgcgtagcggcttctggcgatctttttgtggcagtggtgggtcatcaggcggacgggcgtcgttatatcccgcaggcgattgcgcaaggtgttgctgccattattgctgaggccaaagatgaggcaacagacggtgagatccgtgaaatgcacggcgtgccggtcatctatctcagccagctgaatgagcgtctctccgcgctggcaggacgtttttacaacgaaccttccgaccagttaaagctggttggcgtgacaggaaccaacggaaaaaccaccaccactcagctgatggcgcagtgggcgcagctgctgggcgaaaccggtgccgtcatgggcacggtggggaacggtcttctgggcaaagtaagcccgacggaaaacactacaggctcggcggttgacgtgcagcgtgtgctggcgggcctcgctgagcagggggcgaccttcgctgcgatggaagtctcttcccatggtctggtacaacatcgcgtggcggccctgaaatttgctgcctctgtctttactaacctgagccgcgatcaccttgattatcatggtgatatggagcactacgaagcggcgaaatggctgctttattccactcaccaccacgggcaggcgatcattaacgccgacgacgaagtcggtcgccgctggctggaaaaactgccggatgcggtggcggtgtcgatggaagatcgcattaatccgaactgccgcggccgctggctgaaggcggtcgaggtgaactaccacgatagtggggcgacgatccgcttcgcttccacctggggcgaaggtgaaattgaaagccgcctgatgggggcctttaacgtcagtaacctgctgctggcgctggcgacgctgctggcgctgggctacccgatggcggatctgctgaaaacgtctgagcgtttgcaaccggtctgtggccgcatggaagtgttcagcgcgccgggcaagccgacggtggtcgtggattacgcacacacgccggatgcgctggaaaaagcgctggaagcggcgcgtctgcactgcgcaggcaagctctggtgcgtgtttggctgcggtggcgatcgcgacaagggcaaacgtccgctgatgggcgccatagctgagcagttcgcagatattcccgtggtaaccgatgacaacccgcgtaccgaagagccgcgggccattatcaatgacattctggcgggcatgctggacgcgggtcgtgcgcgcgtggtcgaaggccgtgcggaggccgtgactaacgccattatgcaggcgcaggagaacgatgtggttctgctggccggtaaaggtcatgaagattatcagatcgtcggcaatcgtcgtctggattactccgaccgcgtgacggcagcgcgtctgctgggagtggtggcatga

SEQ ID NO: 113904 - DNA, 1767 bp, Enterobacter cloacae
atgaaagcagcggcaaaaacgctaaaaccaaaacgccaggaagaacaggccaactttgtcagttggcgttttgcgttgctttgcggctgcattttactggcgctgggtttcctgcttggacgcgtggcgtggctgcaaatcatcgcgcctgacatgctggtgcgtcagggggatatgcgttctctgcgcgtgcaggaagtttccacctctcgtgggatgatcaccgaccgctccgggcgtccgctggcggtgagcgtgccggtgaaggcgatctgggccgatccgaaagagttacacgatgcaggcgggatcacccttgataaccgctggaaggcgctgtcagacgcgttgaaaatgccgctggatcagctagcgtcgcgcgttaacgccaacccgaaagggcgctttatctatcttgcccgtcaggtgaaccctgacatggctgactacattaagaaactgaagctgcccggcattcatctgcgggaagaatcccgccgttactatccttcgggcgaagtcaccgcgcacctgattggttttaccaacgtggatagccaggggattgagggcgttgaaaaaagcttcgacaagtggcttaccggccagcctggcgagcgaatcgtgcgtaaagaccgctatggtcgcgtcattgaagacatttcctcgacagacagccaggccgcgcacaacctggccctgagtattgatgaacgcttgcaggcgctggtctatcgtgagctgaacaacgccgtcgcgtttaacaaggcggaatcgggcagcgccgtgctggtggatgtggcgacaggtgaagtgctggcgatggccagtagcccctcatacaacccgaataattttgccggtacagcaaaagatgcaatgcgtaaccgctccatcaccgatgtgtttgaacccggctcaaccgtaaaacctatggtggtgatgacggctctacagcgaggcatcgtcaacgaaaataccgttctgaatacgattccttatcgaattaacggtcacgaaatcaaagacgtggcacgttacagcgaactgaccctcaccggggtcttacagaagtcgagtaacgtcggtgtgtcaaaactggcgttagcgatgccgtcctcagcgttagtagatacttactcacgttttgggctgggaaaggcgaccaatttggggttggtcggagaacgcagtggcttatatcctcaaaaacaacggtggtctgacatagagagggccaccttctctttcggctacgggctaatggtaactcccttacagttagcgcgagtctacgcaacgattggcagctatggcatttatcgtccgctgtcgatcaccaaagttgatccaccggttccgggggaacgtgttttcccggaatctatcgttcgtaccgtcgtgcatatgatggaaagcgtcgcgttacctggcggtggcggcgtgaaggccgcaattaagggctatcgtatcgccattaaaaccggtacagcgaaaaaagtggggccggacggccgctatatcaacaaatacattgcctataccgcaggcgtagcgcctgcaagcaatccgcgttttgcgctggtggtcgtcatcaacgatccgcaggcgggtaaatactacggcggcgccgtctccgcgcctgtgttcggggctattatgggcggcgtgttgcgcaccatgaacattgaaccggatgcgctggcgacgggcgaaaaaagtgaatttgtaattaatcaaggcgagggaacaggtggcagatcgtaa

SEQ ID NO: 113905 - DNA, 366 bp, Enterobacter cloacae
atgatcagcagagtgacagagaccctaagcaaagttaagggatcgttaggaagcaacgagcgccatgccttgcctggcgtgatcggcgacgatcttttgcggtttgggaagctgccactctgcttgttcatttgcatcattgtgacggcagtcatggtggtcaccaccgctcaccatacccgtttattgactgcgcagcgcgaacagatggtactggaacgcgatgcgctggatattgaatggcgaaatctgatccttgaagaaaacgcgctcggcgatcacagccgggttgaacggatcgcaacggaaaaactgcaattacagcatgttgatccttcgcaggaaaatatcgtagtacaaaaataa

SEQ ID NO: 113906 - DNA, 942 bp, Enterobacter cloacae
atgatggaaaattataaacatacaacggtgctgctggatgaggccgttaacggcctgaatattcgtccagacggcatctatattgatggcacttttggtcgcggtggtcactcgcgtttgatcctctctcagcttggagcggaaggacgcctgctggcaattgaccgcgatccgcaggcgattgccgttgcgcaaaccatcgatgatcctcgcttttccatcgtgcatggacctttctctgcgcttgcggattatgtcgctgagcgcggcctgaccggcaagatcgacgggattcttctcgatcttggcgtctcttcaccacagcttgatgatgcagaacgcggcttctcctttatgcgtgatgggccgctggatatgcggatggacccgacgcgcggacaatccgccgccgagtggctacaaactgctgacgaagcggatatcgcctgggtaatcaaaaccttcggtgaagaacgctttggcaaacgtattgcccgcgccatcgtggagcgcaaccgcgttgagccaatgacccgcaccaaagagctagcagaagtcatcgcggcggcaacgccggtgaaggataagcacaaacatcctgcgacccgtaccttccaggcggttcgtatttgggtaaacagtgaactggaggaaatagagctggcgctaaaaagctcgctcgacgtgctggccccgggtgggcggttatccatcatcagcttccattcgctggaagatcgcatcgtaaaacgctttatgcgtgaacaaagccgcggtccgcaggttccagctgggctgccgatgacggaagaacaactcagaaagctgggaggccgacagttgcgagcattaggcaagttgatgccgggcgaagaagaggtggcagagaatccacgtgcccgtagttcagtgctgcgtattgcagagaggacgaacgcatga

SEQ ID NO: 113907 - DNA, 495 bp, Enterobacter cloacae
ttgtgggttaaagtggtgaggaggggtgaggctggcatgttccgtggagcaacgttagtcaatctcgacagcaaagggcgtttatcggtaccaacccgatatcgcgaccagctgattgagaacgcttcgggtcaactggtttgcaccattgacatcaactccccctgcctgctgctttaccctttgcctgaatgggaaatcattgagcaaaagctgtcgcgactgtcgagcatgaacccgcaggaacgccgcgtacagcggctgttattgggacatgccagtgaatgtcagatggatagcgccgggcgattattgattgcgcctgtgttgcggcaacatgccggtctgactaaagaagtgatgctggtcgggcagttcaacaagtttgaactgtgggacgaaacgacctggtatcaacaggtcaaggaagatatcgacgctgagcagtctgattccgcaacattatcggaacggctgcgggacttgtctctataa

SEQ ID NO: 113908 - DNA, 1005 bp, Enterobacter cloacae
gtgaaactggatgaaatcgcccggctcgccggcgtgtcgagaaccacggccagctatgtgattaacggtaaagcaaagcagtatcgtgtcagcgataagaccgttgagaaagtgatggcagtcgttcgtgagcataattaccatccgaatgctgtcgccgcaggtttacgtgccggacgcacccgctcgattggcctggtgatcccggatctggaaaacaccagctatacccgcatcgccaactatcttgaacgtcaggctcgtcagcggggctatcagctgttgattgcctgctccgaggatcagcccgacaacgagatgcgctgcattgagcatctgctgcaacgtcaggttgacgccatcatcgtgtcgacctctttaccacccgagcatcctttctatcagcgctgggcgaacgatccattcccgattgtggcgctggatcgtgctttggatcgtgaacatttcaccagcgtcgtaggcgccgatcaggacgatgcagaaatgctggctgccgagctgcgtaccttcccggcggaaacggtgctctatcttggcgctttgcctgaactatccgtgagcttcctgcgtgaacaagggttccgtacggcgtggaaagacgatccgcgtgacgttcattatctgtatgccaacagctatgagcgcgaagcggctgctcagctgttcgagaaatggctggaaacgcacccgatgccgcaggcgttgtttaccacctcgtttgccctgttgcagggggtgatggacgtgacgttacgtcgcgatggcaagctgccatccgatctggcgattgcgaccttcggcgataacgaactgctcgacttcctgcaatgtccggtgctggccgtggctcagcgtcaccgcgacgtcgccgagcgcgtgcttgagattgttctggcaagcctggatgaacctcgcaaaccgaaacccgggcttacgcgtatcaaacgtaatctctatcggcgcgggattttgagccgccattaa

SEQ ID NO: 113909 - DNA, 492 bp, Enterobacter cloacae
atgcgccggatattatctgtattactggaaaatgagtcgggcgcactgtcacgcgtcattgggctttttgcgcagcgcggatacaacattgaaagcctgaccgttgcgccgaccgatgatccaacgctctcccgcatgacgatccagactgtcggcgatgcgaaagtgcttgagcagatcgaaaagcaattgcacaagctggtggacgtgttgcgcgtcagcgagctggggcagggggcttacgtcgaacgtgaagtgatgctggtgaaaattcaggccagcggttatggccgtgaagaggtcaagcgtaacacggatattttccgtgggcagatcattgacgtcacgccttctatatatactgtgcagcttgccggaacgagcgataagctggatgcgttcctggcctccgtcagggatgtggcaaaaattgttgaagttgcgcgctctggcgttgttggcctctcgcgcggcgataaaatcatgcgttag

SEQ ID NO: 113910 - DNA, 1725 bp, Enterobacter cloacae
atggagatgttgtctggcgcggaaatggtcgtccgatcgcttatcgatcagggcgtgaaacaagtgttcggctatcccggaggcgcggttctcgatatttatgacgcgctgcacacggtaggcggtattgatcatgttctggttcgtcatgaacaggctgctgtgcatatggctgacggcctggcccgcgccacgggcgaagtgggtgtagtgctggtcacttcggggccgggagcgaccaatgccatcaccggcattgcgactgcgtatatggactctattccactggtcattctctccggacaggtggcgacgtcactgattggctatgatgcgtttcaggaatgcgacatggtggggatctcacgccccgtggtgaagcacagctttctggttaagcaaacggaagatatcccgggcgtgctgaaaaaagccttctggctggccgccagcggtcgtcctgggccagtggttgtcgatctgccaaaagatattctcaatcccgcgaataaactgccttacctgtggcctgagtcggtgagcatgcgttcgtataatccgacgacgcaagggcacaaaggccagattaagcgtgcgctgcaaacgctgctggctgcgaaaaagcccgtagtctatgtggggggcggcgccgtcaatgcagcctgtgaaacgcaactacgcgaactgattgagaagctgaatcttcctgtcgcgtcatcgctgatggggctgggggcattcccggctacccaccgtcaggcgctgggcatgctgggtatgcatggcacctatgaagccaatatgacgatgcaccattctgatgtgatttttgccgtcggcgtacgttttgacgatcgcaccaccaataacctggcgaaatactgtccgaatgcgacggtgctacacattgatatcgatcctacttctatctctaaaacggtgccggcggatgtgcccatcgtgggggacgcacgacaggtgctggatcaaatgttggaactgctggcgcaggagaccgcctctcaaccgctggatgagatccgtgactggtggcagcaaatcgaacaatggcgcggccgtcagtgccttaaatacgacacgcagagtgaaaacatcaagccgcaggcggtgatcgagacgatctggcatctgaccaaaggcgaggcgtatgtcacttctgacgtaggccagcatcagatgttcgctgcgttgtattacccgtttgataaaccgcgtcgctggatcaactcaggcgggcttggcacgatgggctttggtctgcccgccgcgctgggggtgaagctggcgttgccgaacgaaacggttatctgcgtaacgggtgatggcagtatacagatgaatattcaggagctttctactgcgctgcaatatgagttgccagtgctggtgcttaacctgaataacggttacctcggtatggtgaagcagtggcaggatatgatttattccggccgtcactctcagtcttatatgaagtcacttccggactttgtccgtctggctgaagcctatggtcatattggcatgcgggtaaccgatccgtcagagctggaagcgaagctcggcgaagcgcttgagcacgttaaaaacaatcgcctcgtcttcatggacgtcatcgtcgacggcacagagcacgtttatccgatgcatatccgtggcggtggtatggatgaaatgtggttaagcaaaacggagagaacctga

SEQ ID NO: 113911 - DNA, 945 bp, Enterobacter cloacae
atgccagaaaataatattaaccaaccacagccttatgatggggttaagcctcagttacgcacagtggatctcaacctgttaactgtatttgatgcagttatgcaggagcagaatattacgcgagcagcgcaatctctgggaatgtctcaacctgccgtgagtaatgccgtagccagacttaaggtgatgtttaacgacgagttattcgtccggtatggaagaggtatccagcccacggcgcgtgcattccagctattcggttcgattcgtcaggcgctacagctggttcaaaatgagcttcccggctcagggtttgaacctttaagcagtgagcgggttttccatctctgtgtttgcagtccgttagacaattatttgacgtctgttatatataataaagttgaacagattgctcctaatattcatctcgtttttaaatcatctttaaatcaaaacactgagcaccagcttcgttatcaggaaacggagttcgttctgggctacgaagagtttcgccgtccagagtttgcctgtgttccgttgtttaaagatgaaatggtgttagtcgccagcaaaaaacatccacgcatgaattcgccgctgcgtgaaagcgatgtttacagcgagcagcatgccgttgttgctctggacagatatgcttcgttcagtcagccgtggtatgacactgccgataaacaagccagcgtggcctatcaggggatggcgatggtcagcgttttaaatgtcgtttctcagacgcagctagtcgctattgcaccgcgctggcttgctgaagagttctccgattcgctgagcctgcaaattttacctctgccgctcaagctgaatagccgtacctgttatctttcctggcatgaagcggcggggcgggataaagggcatcagtggatggaagagttgctgatcaatatttgtcgtcgataa

SEQ ID NO: 113912 - DNA, 1572 bp, Enterobacter cloacae
atgagccagcaagtcgttattttcgatactactttacgtgacggtgaacaggcattacaggcgagcctgagtgttaaagaaaaactgcaaattgcgctggccctcgaacgcatgggtgtagacgtaatggaagtcggctttcccgtctcctcgccgggtgatttcgagtcagtacagaccatcgcccgcaccatcaaaaacagccgcgtatgcggtctggctcgctgcgttgagaaagatattgatgtggccgcggaatccctgaaagttgcagaagccttccgtatccatacattcattgccacctcccccatgcacattgcaaccaagctgcgcagcacgctggatgaagtgatcgaacgtgcggtgtatatggttaaacgcgcgcgtaactatactgatgacgtcgaattctcctgtgaagatgcaggccgcacgccgattgacgatttggcccgtgtagtggaagccgcgattaatgccggagccagaaccatcaacatcccggataccgtcggctacaccatgccgtttgagttctctaacatcatcaccggcctgtacgatcgcgtgccaaatattgataaagccatcatctctgttcacacccacgatgatttgggtctggctgtgggcaatgccatcgccgccgtccacgccggcgcgcgtcaggtagaaggggcaatgaacggcattggtgaacgcgccggcaactgctcgctggaagaagtgatcatggcgatcaaggtgcgcaaagacattatgaacgtacacactcgcatcaatcacaacgaaatctggcgcaccagccagaccgtgagccagatttgcaatatgccgatcccggcgaacaaggcgattgttggtactggcgcgttcgctcactcctccggtattcaccaggatggcgtgctgaagaaccgtgaaaactacgaaatcatgactccggaatccatcggtctgaaccaggttcagctgaacctgacctcacgctctggccgcgcggcggtgaaacaccgtatggaagagatggggtatcaggacagcgattacaacatggatcagctgtacgacgcattcctgaagctggctgacaagaaaggccaggtcttcgattacgacctggaagcgctggcatttatcaacaaacagcaggaagagccagaacacttccgtctggactacttcaccgttcagtcaggctcaagtgatatcgctaccgcctccgtcaagctggcctgcggcgatgaaattaaagcggaagccgccaacggtaacggccctgtggatgccatttaccaggcgattaaccgcgtcactgagtacgacgtagagctggtgaaatacgacctgacggcaaaagggcacggtaaagacgccctgggccaggttgatatcgtcgtcaactataacggtcgccgcttccacggtgtgggtctggcgacagatatcgtcgaatcctccgcgaaagcgatggtgcatgtcctgaacaacatctggcgcgcagccgaagtcgaaaaagagttgcaacgcaaagctcagaataaagagaacaacaaggaaaccgtgtga

SEQ ID NO: 113913 - DNA, 1092 bp, Enterobacter cloacae
atgtcgaagaattaccatattgctgtgttgccgggtgacggtattggcccggaagtgatgacacaggcgctgaaagtactggaagccgttcgttcgcgttttgcgatgaaaattaccaccagccactacgacgtgggcggtattgccattgataaccacggtactcccctgccgaaagggactgtagaaggctgcgagaatgccgatgccgttctgtttggctcagtgggtggccctaagtgggaacacctgcctccagcagagcagccagagcgcggcgcgctgctgccgctgcgtaaacacttcaaactgttcagcaacctgcgtcccgcgaagctgtacccggggctggaagagttctgcccgctgcgcgccgatatcgccgccaacggtttcgacattctctgcgtgcgtgagctgaccggcgggatctacttcgggcagccaaaaggccgcgaaggcagcggtcagcatgagaaagcgtttgataccgaggtgtatcaccgttttgaaattgaacgtatcgctcatatcgcgtttgagtcagcgcgcaaacgccgccgtaaagtgacctctattgataaagcgaacgtgctccagtcgtctattttgtggcgcgaaatcgtcagtgaagttgccaggcagtacccggacgttgagctgtcacatatgtatatcgacaacgcaacgatgcagctgattaaagatccgtcccagtttgacgtgctgctgtgctccaacctgttcggcgatattctctcggatgaatgcgcgatgatcaccggctccatgggcatgctgccctcggccagcctgaacgaagaaggctttggcctgtacgaaccggcgggcggctccgcgccggatatcgcaggtaaaaacatcgccaacccgattgcgcagatcctctccctggctctgctgctgcgctacagcctggatgcaggcgatgcagcaaccgcaattgaaaacgccattaaccgggcattagaagaaggcgtccgtaccggtgatttagcacgcggcacggcggcagtcagtaccgatgaaatgggcgacatcattgcccgctatgtcgctgaaggggtgtaa

SEQ ID NO: 113914 - DNA, 1401 bp, Enterobacter cloacae
atggctaagacgttatatgagaagttgtttgatgcgcacgttgtttacgaagcaccaaacgaaaccccactgttgtacatcgaccgtcatctggtacacgaagtgacctctcctcaggcatttgacggcctgcgcgcgcataagcgcccggtgcgtcagccgggtaaaacctttgccacgatggatcacaacgtttccacccagaccaaagacatcaatgcatctggcgagatggcgcgtatccagatgcaggagctgattaagaactgtaacgagtttggcgtggagctgtacgatctgaaccacccctatcagggcatcgtccacgtaatggggcctgagcaggggattactctgccgggcatgaccatcgtctgcggtgactcccacaccgcgacgcacggcgcatttggcgccctggcgttcgggattgggacctctgaagttgaacacgttctggcgacgcagaccctgaagcagggccgcgccaaaaccatgaagattgaagtgaagggtaaagctgcgccgggtatcaccgcgaaagatatcgtgctggcgattatcggcaaaaccggcagcgcaggcggcaccggtcacgtcgtggaattctgcggcgacgctatccaggcgctgagcattgaaggtcgtatgaccctgtgcaacatggccattgagatgggcgccaaagcaggcctggtggccccagacgaaaccaccttcaactatgtgaaggggcgtctgcatgcgccgaaaggtcagaattttgacgacgcggtagcgtactggaaaaccctgaaaacggacgagggggcaatttttgataccgttgtgacgttacaggcggaagaaatcgccccgcaggtcacctggggcaccaacccgggccaggtgatttccgtcaacgacagtattcctgacccggcctcctttgccgatccggtcgaacgtgccagtgcggaaaaagcgctggcttacatggggctgaaacccggcgtaccgctgaccgacgtgagcattgataaagtattcattggctcctgtaccaactcccgtattgaagatttacgcgctgcggcagaaatcgctaaaggccgcaaagtggcgccgggcgtgcaggcgctggttgtgccaggctccggtccggtgaaagcccaggcggaagcggagggtctggataagatctttatcgaagcaggcttcgagtggcgcctgccgggttgctccatgtgtctggcgatgaacaacgaccgcctgaatccgggcgagcgctgtgcttccaccagcaaccgtaactttgaaggccgtcagggccgcggtgggcgcacccacctggtcagcccggcaatggccgccgctgcggcagtcaccggtcatttcgccgatattcgcagcctgaaataa

SEQ ID NO: 113915 - DNA, 606 bp, Enterobacter cloacae
atggcagagaaatttacccaacatacgggccgggttgtccctctggacgccgctaacgtcgatactgacgcgatcattcctaagcagtttttgcagaaagtgacgcgcacgggttttggtgcgcatctgttcaacgactggcgtttcctcgacgataaaggcgaagtgccgaacccggaattcgtcctgaactttccggaatacaaaggggcttccattctgctggcgcgggaaaactttggctgcggatcgtcgcgtgaacatgcgccctgggcattaaccgactacggctttaaggtggttatcgccccgagcttcgcggatatcttctacggcaacagcttcaacaaccagctgctgccggtgacgctgagtgacgaacaggtcgatgaactgtttgcgctggtgcaggcgaatccggggatttcgtttgaggtggatctggaagcggaagtggtgaaagccggggataagatctacagcttcagcattgatgcgttccgccgccactgcatgctgaacggtctggatagcattggcctgacgctgcaacacgaagaggctatctccgcttacgagaaaaaacagcctgcgtttatgggttaa

SEQ ID NO: 113916 - DNA, 153 bp, Enterobacter cloacae
atgccaaaacgtactctgctgttaggtttgtttctgatctgtacgacgctgttgatcttcacctggatggtgcgcgactcgctgtgtgagctgcacttcagacaggagaaaacagagctggcggcagtgttggcttacgaagcaaaacgttag

SEQ ID NO: 113917 - DNA, 1179 bp, Enterobacter cloacae
atgctctggttgatgacgatggggcgacgcctgaatggcgtgtacgccgcttttatgctggtggccttcatgatgggcgtggccggcgcgcttcaggcgccgacgctgagcctgtttctcagccgcgaggtgggggcgcagccgttttgggtgggcctgttctacaccgtcaacgccattgccgggatcctcgtcagcctgtggctggcgaaacgatccgacagccagggcgatcgccgcaagctgatcctcttttgttgcgccatggccgtgggcaacgcgctgctgtttgccttcaaccgccattacctgacgctcattacctgcggcgtgctgctggcctctctggcgaacaccgccatgccgcaactgttcgccctggcccgggagtacgccgacagctcggcgagggaagtggtgatgttcagctcggtgatgcgtgcgcagctctctctcgcgtgggtcatcggtccgccgctggcgtttatgctggcgctgaactacggcttcaccaccatgttttccatcgcggcggggatttttgtcatcagcctggcgctgatagcctttgcgctgccatcggtggcgcgcgtagagcaggtgacggacaagcccatcacgcaggtgagcggctggcaggataaaaacgtccgcatgttgtttatcgcctccacgctgatgtggacctgcaacaccatgtacattattgatatgccgctgtggatcagcagcgatctgggactgcccgacaagctcgcgggtattctgatgggcaccgctgccgggctggagatcccggcgatgattctggcgggttactacgtcaaacgtttcggaaagcgtcggatgatggtcgtcgccgtggcggccgggatactgttctacgcggggctgatcctgttccattcgcgtgaagccttgctggcgttacagctgtttaacgcggtgtttatcggaatcgttgccgggataggcatgctctggttccaggatttaatgccggggcgcgcaggctccgcgaccacgctgtttaccaacagtatctctaccggcgtgattctggcaggggtgattcagggggcgctgtcgcaaagctatgggcatgcatccgtgtactgggtgatcgcagcgatttcgctcgtcacgctgatgctgacgtgccgggtaaaagacgtttga

SEQ ID NO: 113918 - DNA, 153 bp, Enterobacter cloacae
atgaagaggtctaccgcacgtcagttttatcagcactatttttcagcgacaaagggagtgtcctggctggcccgccagtgcgcagagcagcggctgagaatactggaagatctgatgcagtgggacgttacgaaatcgacctcttctcgctaa

SEQ ID NO: 113919 - DNA, 1656 bp, Enterobacter cloacae
atgccttccggtcgtctgcaacaacaatttatccgcctctggcagtgctgcgaggggcaatcgcaggagaccacgctgaacgagctggccgagctcctcaactgctcccggcgtcatatgcgcacgctccttaataccatgcagcagcagggctggctaaactgggaggccgaagccggacgcggcaagcgttcgcgcctgactttcctttataccggcctggcgttacagcaacagcgagcggaggatctgctggagcaggaccgcatcgatcagctggtccagctggtgggcgacaaagccgccgtgcgccagttgctggtctcgcatctgggacgcagctttcgtcagggacgccacattctgcgggtactttactaccgcccaatgaaaaatctgttgcccggtacggcgttacgtcgctctgaaacccacatggcccggcagatattcagcggtctgacgcggataaatgaggaaaacggggaactggaagcggatattgcccatcactggcaacaggtgtctccgctgcactggcgcttctttctacgccccggcattcatttccaccatggacgcgagctggagatgcgcgacgttatcgcctctttagagcgcgcccgcacgctgccgctctattcgcatatcgcacggatccactctccaacggcctggacgctggatattgagctttcgcagccggacaaatggcttccgtggcttctgggctacgtgccatcaatgatcctgcctgccgagtggcgatccctgaacaatttttccagccagccgattggtacgggcccctactccgtttcacggaacaacagtaatcaactgaagatccgcgcctttgatgattactttggctatagggcgttgatcgacgaagtgaacgtctgggtgttaccggatctcaacgaagagctgagcgcaggcctgaccctggaagggccaacagccggtgaaaaggcgttcgaaagccgcctggaggagggctgctactacctgctctttgatagccgcagccatcgcggggcaaaccacgacgtccgcaggtggataagccatattctggcgcccgctaacctgatttatcacgcagaggagcaataccagacctggtggttcccggcctatggcctgctcccacgctggcaccatgcgcagcccgtccgcagcgaaaagcctgccggactggagaccatcaccctcagctactatcgcgaccacattgagcaccgttttctggcgaggatcatgagcacgctgctggcagccgaaggcgtgacgctggcgatacaggaagtcgattatgatgaatggcatcgcggagacgtcatcagcgatatctggctcaacagcgcgaattttacgctgccgctggatttctcgctcttttctcacctgtacgaggtgcccctgattcagcactgtatcaaccgggactggcagcaggacgccgcgcggtggcgggcgggagaaatggatctggccgcctggtgtcaggaattactgaccgggcagacgatcgtaccgctgattcaccactggctgctgatccaggggcagcgcagcatgcgcggtctgcggatgaataccctcggctggtttgattttaaatccgcctggtttgcgccgccggagccataa

SEQ ID NO: 113920 - DNA, 984 bp, Enterobacter cloacae
gtgttaaaaaacgttcttcctctgctggcgctggttgcgctgcctgtttttgctaagcctgttctgacggtctacacctacgactccttctccgccgactggggccccggcccggtggtaaaaaaagcctttgaagccgactgcaactgcgagctgaaattcgtggcgctggaagatggcgtctcgctgctcaaccgtctgcgcatggaaggcaaaaacagcaaagccgacgtggtgctcgggctggataacaacctgctggaagccgccacccaaaccagactgttcgccaaaagcggcgtggcggcagatgccgtcaacgtaccgggcggctggaaaaacgacaccttcgttccctttgattacggctactttgcgtttgtctacgataaaaacaagctgaagaatccgcccaaaagcctgaaagagctggtcgaaagtgaccagaaatggcgcgtaatttatgaagatccgcgtaccagcacgccgggtctggggctgctattgtggatgcagaaagtctacggggataaaacgccggaagcgtggcagaagctggccgcgaaaaccgttaccgtcaccaaaggctggagcgaagcctacggcctgttcctgaaaggcgaaagcgatctggtgctgagctacactacctctccggcctaccacattatcgccgagaagaaggataactacgccgccgcgaactttgctgaagggcattatttgcaggtggaagtagccgcccgcaccgccgcgagcaaacagccggagcttgccgaaaaattcctgaaatttatggtctccccggcattccagaatgctattccgacaggaaactggatgtacccggtcactgacgttgcgctgccggcaggctttgagcagctaaacaagccgcaaacctcactggaatttacgccgcagcaggttgccgcccagcgcgccgcatggattagtgaatggcaacgcgccgtcagccgctga

SEQ ID NO: 113921 - DNA, 1611 bp, Enterobacter cloacae
atggcaacgcgccgtcagccgctgatccccggctggttagttcccgggctgctcgccgccatactgatggtggtcgtcagcctgggtgcattccttgcgctgtggtttaacgcgccagagagcgatctgctcgccctctggcacgacagctatctctggcacgtcatccgtttctccttctggcaggcgtttctctccgcgctgctgtcgacgatcccggccattttccttgcacgcgccctctatcgcagacgtttccccggcaggcttgccctgctgcggctgtgcgcgatgacgctgatcctgcccgtgctggtggcggtgttcggcattctgagcgtctacggtcgacagggctggctggcatccctcttcaacctgcttggtctggaatggaccttctccccttacggcctgaaaggcattctgctggcgcatatttttttcaatatgccgatggcgacgcgcctctttttacaggcgctggaaaacattcccggtgagcagcgtcagattgccgcccagcttggcatgcgcggctggtcgttcttccgctttgtcgaatggccgtggctgcgacgccagattgccccggtggccgcgctaatctttatgctctgcttcgccagcttcgcgaccgtgctttctctcggcggcgggccgcaggccaccaccattgagctggcgatctatcaggccttaagttacgactacgatccgggccgcgccgcgctgctggcgatggtgcagatggtctgctgcctggcgctggtgttactcagccagcggctgagtaaagcgatccccacaggcagcaatcacttgacaggctggcgcgatccgcaggacagcctgcacagccgcgtcgcggattttatgctgatcgcgctggccctcctgcttctgctgcccccgctgctggccgttatcgttgatggcctgaatcgcaatgtgttgtcggtactgcaacagcctgtcctgtggcaggcgacgtggacctcattgcgcatcgcgctggcagccgggctgctgtgcgtgatcctgaccatgatgctgctctggagcagccgcgagctgtacgcgcgtcatgcctgtaaagccggacacgcgctggaactgacgggtatgctgatcctggcgatgccgggtattgtgctggcgaccggattctttttactgttcaacagcaccatcggcctgccggaaagcgccgacggcatcgtcatttttaccaacgcgctgatggctatcccttacgcgctcaaggtgctggaaaacccgatgcgcgacgtcaacagccgctacagtttgctgtgtcagtcgctgggcatgcagggctggaagcgtctgaaggtggtcgaactgcgcgcgctaaagcgtccgctggctcaggcgctggcgtttgcctgcgtgctgtcgattggcgattttggcgttgtggccctctttggcaacgaggatttccgcacgctgccgttctggctttatcagcaaattggctcctatcgtagccaggacggcgccgtcacggcacttttactgctggtgctgtgctttgcgttatttaccgttatcgaaaaacttccggggcgtgatgttaaaactgactga

SEQ ID NO: 113922 - DNA, 654 bp, Enterobacter cloacae
atgcgttttaccctctccgttcgtcagggagagcgaatcgcagtgcttggccccagcggggccggaaaaagtaccctgctcaatctgattgccggttttttgcagcctgccagcgggtcgatcgtcattgataatggcgaatatacctacgctccgccggctaagcgcccggtgtcgatgctgtttcaggaaaacaatctgttcaatcatcttacggtgtggcagaacatcgcgctgggtatggatccggggttaaaactcagtgttgcgcagcgtcagacgctggaggcgatcgccgaacaaatgggcctggctgcgtttatcaacagactaccgggtgagctttccggcggccagcgccagcgcgtggcgctggcacgctgtctggtgcgcaagcagccgctgctgctgctcgacgaacccttttcggcgctcgacccggccctgcgtcaggagatgctctcactggttgaggaggtttgcgagcgcgagcaactgacgatgctgatggtttcgcatagcatcgaagatgccgcacgcatcgcgccgcgatcggtagtgatcgcggagggacgtattttgtgggatggaacaaccgacgccttaatgagcgggaaagaaagcgcgtcaggattactgggtataagaccgtag

SEQ ID NO: 113923 - DNA, 768 bp, Enterobacter cloacae
atgcaggcattgctggaacattttattacccagtccgttatgtattcgctcatcgccgtggcgctggtggcgtttctggagtcgctggcgctggtcgggctgatcctgcccggcaccgtgatgatggcggggcttggggcgctgatcggcagcggcgaggtcaatttctggcaggcgtggatggccggtattattggctgtttgctgggggactggatctccttctggctgggctggcgctttaagaagccgctgcaccgctggtcgttcatgaaaaaaaataaagcgctgctggataaaaccgagcacgcgctgcaccagcacagcatgttcaccatcctcgtggggcgcttcgttggcccaacgcgcccgctggtgccgatggtggccgggatgctggatctgcccgtcgcgaagtttgtggtgccgaacatcatcggctgcgtcttctggccgccgttctacttcctgccggggatcctggcgggcgcggccatcgatattcctgacggtatgcaaagcggtgagttcaagtggctgctgctgggaacggcggtcctgctgtggctggcggtctggctctgctggcgcctgtggcgcagcgcgaaagccagtgttgatcgcctgacgcgctatcttccgcgctctcgcctgctctggctggccccgctgacgctgggggtggctgtcgtggcgctggtggcgctgattcgccacccgctgatgccggtgtacggtgagatcctgttgaaggtggtgagccgttaa

SEQ ID NO: 113924 - DNA, 846 bp, Enterobacter cloacae
atggccgaaccgcaaaacgatcccttactgccgggctactcatttaacgcccatctggtggcggggctgacgccaattgaggccgagggatatctcgatttttacgtcgatcgccctcttggcatgaagggatatatcctcaacctgaccgtacgcggagaaggggtcgtcaaaaacggggctcagcagtttatctgccgccccggtgatatgctgctgttcccgccgggggagatccaccactacgggcgccatccggatgccaaagagtggtatcaccagtgggtctatttccgtccgcgcgcctactggcaggagtggctctcgtggccggccattttcgcccataccggtttatatcgcccggatgaggcgcatctggcgcagttccgtgagctgttcgcacagattattgaggcagggcaggcgggcgggcgctacgccgaactgctggccatcaacctgcttgaacaggtgctgctgcgccgcatggaggccatcaacgagtcgcttaatccgccgctggacaaccgcgtccgcgacgcctgccagtacatcagcgaccaccttgccgacagccagtttgatattgccagcgtcgcccagcatgtgtgtctgtcgccgtcacggctctctcatctgttccgccagcagcttggcgtgagtgtactcagctggcgtgaggatcagcgcatcagccaggcgaaactgctgctcagcaccacccgaatgcctatcgccaccgtcgggcgtaacgtcggctttgaagatcagctctatttctctcgcgtgtttaagaagtgcaccggtgccagcccgagcgaattccgtgcgggatgtgaataa

SEQ ID NO: 113925 - DNA, 1710 bp, Enterobacter cloacae
atggcaattgcaattggcctcgattttggcagcgactcagttcgcgcgctggcagtggactgtacgactggccaggagatagcaaccagcgttgagtggtatccgcgctggcaagaggggcgctactgcgatgcgccgaacaaccagttccgccaccacccgcgtgattacattgaatcaatggaagcggcgatcaaaaccgtgctggcagagttgacggacgcccagcgggccgatgtcgtggggattggcgtcgacagcaccggctcaacgcctgcccctgtcgatgccgaaggccgcgtactggcgctgcgaccggagtttgccgacaacccgaacgccatgtttgtgctgtggaaagaccataccgccgtggaagaggcggaagccatcacccgcttatgccatcagccgggcaaaactgactactcacggtatatcggcggaatttactccagcgagtggttctgggccaagatcctgcacgttacccgcgcggacgcgtcggtcgcacaggcagccgcgtcatggattgagctatgcgactgggttcccgccctgctctccggcaccactcgcccgcaggatatccgccgcggccgttgcagcgccgggcataaatcgctgtggcatgaaggctggggggggctgcctccggcaacgttcttcgatgaactcgacccgatcatcaacaaaaacctgacatacccgctgtttaccgacaccttcaccgccgatattccggtcggcacgctctgcgaagagtgggcgaaacgcctcggtctgccgcaaaacgtgaccatttccggcggcgcgttcgactgccatatgggtgcggtgggcgcgggtgcgcagcccaacacgctggtgaaagttatcggcacctccacctgtgacattctgacggcagataaagccagcgtcggcgaccgcgcggtgaaaggcatttgcggtcaggttgacggcagcgtggtacccgattttatcggcctcgaagcgggtcagtccgccttcggcgatatctacgcctggtttggccgcgtgctcggctggccgctggatcagctggctgccgcgcatcctgaactgaaaacgcagattacggcgagcaaaaaacagctcctgccgcagctcaccgaagcctgggcaaaaaatccgtctctcgaccacctgccggtggtgctggactggttcaatgggcgtcgtacgccgtttgccaaccagcgtctgaaaggggtgattaccgatctcaacctcgcgaccgacgcgcccgcgctgtttggcggcctgatcgccgccaccgcattcggcgcgcgcgccattatggagtgcttcaccgggcagggcattgacgtgaacaacgtgatggcgctgggcggcatcgcccgtaaaaacccggtgattatgcaggcctgctgcgacgtgctgaaccggccgctgcaaattgtggcctccgatcagtgctgtgcgctgggcgccgcgattttcgctgccgtggccgcaggcgtacatgcggatatcccgaccgcgcaacagcacatggcgagcgccgtcgaaagtacgctccagcctcagactcagcaggcacaacgctttgaacagctttatcagcgctaccagcaatgggcaaaaagcgccgaacttcactatctccctgtcgccgccccggccaaaagcaccgcggacactacggcaaccctgacacattaa

SEQ ID NO: 113926 - DNA, 1503 bp, Enterobacter cloacae
atgaccatttttaataattatgaagtgtggtttgtgattggcagccagcatttgtacggaccggaagcgttgcagcaggtgacgaaacacgcggagcacgttgtgaatgcgctgaacgcggaagccaaactgccgtgcaaactggtgctgaagccgctgggtaccaccccggacgaaatcaccaacatttgccgcgatgccaattacgatgacaaatgcgctggcctggtggtgtggctgcacaccttctcgccagccaaaatgtggatcaacggcctggctatcctcaacaaaccgctgctgcaattccacacgcagttcaacgcctccctgccgtgggacagcatcgacatggacttcatgaacctgaaccagaccgcgcacggcggccgcgagttcggcttcatcggcgcgcgcatgcgtcaacagcatgccgtggtgaccgggcactggcaggacggtcaggcacaaaaacgtattggctcctggatgcgtcaggcggtatctaagcaggatacccgccacctgaaagtggtgcgtttcggcgacaacatgcgcgaagtggcggtcaccgacggtgataaagtggccgcgcagattaaatttggcttctccgtcaacacctgggcggtgggcgacctggtgcaggtggtgaatgacatcagcgatggcgacgttaacgcgctggtggacgagtacgaaagcagctatcgcctgacgcctgcggcacaggtcaacggtgacaagcgccagaacgtgctggatgccgcacgtattgagctgggcatgaagcgttttctggaacagggcggcttccatgccttcaccaccacctttgaagatctccacggcctgaaacagctcccgggtctggcggtacaacgtctgatgcagcagggctacggctttgcgggcgaaggcgactggaaaactgccgctctgcttcgcatcatgaaggtgatgtcgaccggtctacagggcggcacctcttttatggaggactacacctaccacttcgagaacggcaacgatctggtgctcggctcgcacatgctggaagtgtgtccatccatcgcggttgaagagaaaccgatcctcgacgtgcagtacctcggcattggcggcaaagcggatccggcccgtctgatcttcaacacccgtaccggcccggccattaacgccagcctgattgacctcggcgatcgtttccgcctgctggtgaactgcgtcgatgcggttgaaaccccgcattctctgccgaagctgccggtcgccaacgctttgtggaaagcgcagcctgacctgccaaccgcctcggaagcctggatcctggccggcggcgcgcaccacaccgtattcagccacgcgcttgacctgaacgatattcgtcagtttgccgagctgcacgacatcgaactgaccgtgattgataacgacacccgtctgccagcctttaaagacgcgctgcgctggaacgaagtctattacggttcaaaacgctaa

SEQ ID NO: 113927 - DNA, 696 bp, Enterobacter cloacae
atgttagaagatctcaaacgtcaggtactcgaagccaacctggcgctgccaaaacataacctcgtaaccctgacatggggcaacgtcagcgccgttgaccgggaaaaaggggtgttcgtgatcaagccttccggcgtggattacacggtaatgaccgcagaagacatggtggtggtcagcatcgaaacgggtgaagtggttgaaggcaataaaaagccctcctccgatacgcccactcatcgcctgctgtatcaggccttcccgaccatcggcgggattgtgcatacccattcgcgtcacgcgaccatctgggcgcaggcgggccagcctattccggccaccggcaccacccacgcggactacttctacggcaccattccctgcacgcgtctgatgaccgatgcggagatcaacggtgagtacgaatgggaaacggggaacgtgattgtcgaaaccttcgaaaaacagggaatcgacgcggcgcaaatgcccggcgtgctggtgcactcccacggcccgtttgcctggggtaaaaacgcggaggacgcggtgcacaacgcgatcgtgctggaggaagtcgcctatatggggatcttctgccgccagttggcaccgcagctgccggatatgcagcaaaccctgctggataagcattacctgcgtaagcacggtgcgaaagcctactacgggcagtaa

SEQ ID NO: 113928 - DNA, 2358 bp, Enterobacter cloacae
gtgacgcaggcgcaagaaggctttttactgaccagacactggcgggatacccctcagggtactgaggttgaattctggctggcaacggacaacggcccactaaacgttacgctcccgccgcaggagtccgtggcctttattcctgaagctcacgtcgagaaagtgaaacaactgctacgcggcgaaaacaactggcgccttacgccgctccaactgaaagatttccaccgccagccggtttacggcctctactgccgcgcccatcgccagttgatgcgctatgaaaagctgcttcgtgaagcaggcgtgacgctttacgaggccgacattcgcccgcctgaacgctttctgatggagcggtttatcaccgcccccgtctgggtagatggcaccgcgcaaaacggcaggatcgttaacgcgcgcctgaagcctaatccgcactatcgcccgccgctaaagtgggtgtcgctggatattgaaaccacccgccacggcgaactgtactgcattggtctggaaggctgtgggcagcgggttgtctatatgctcgggccgccgaacggcgatgcgtccgcgctggattttaatctggagtacgtcaacagccgcccgcaactgctggagaagcttaaccagtggtttgccgagcacgacccggacgtgctgatcggctggaacgtggtgcagtttgacctgcgcgtgctgcaaaaacatgccgagcgttaccgtatcccgctgattctggggcgcggcaacagcgagctggagtggcgtgagcacggttttaagaacggcgtattctttgcacaggccaatggtcgcctgattatcgacggcatcgaggcactgaaatccgccttctggaacttctcttccttctcgctggaagcggtcgcccaggaactgctcggcgaaggtaaatccatcgacaatccctgggaccgaatggacgagatcgaccggcgctttaacgaggataaaccggcgctcgctacctataacctgaaagattgcgagctggtgacgcagatcttccacaaaaccgagatcatgccgttcctgctggaacgcgcaacggtgaacggtctcgcggtcgacaggcacggcggctcggtagcggccttcagccacctctatttcccgcggatgcaccgggcgggctatgtcgcccctaatctcggcgacgtgccgccgcaggccagccccggcggttacgtgatggattcacggcccggactgtatgactcggtactggtgctggattataaaagcctgtacccgtcaattatccgcacgtttctgattgatccggtggggctggtggaggggatggcccagccagacgatgcgcacagcaccgaagggtttcttggagctcgcttctcgcggaaaaaacactgcctgcccgaaattgtgggaaacatctggcacggccgcgacgaggcgaaacgccacggcaacaagccgctctcacaggcgctgaaaatcattatgaacgccttttacggcgtgctgggtaccagcgcctgccgcttctttgatccccggctggcgtcttccatcaccatgcgcgggcacgacattatgcgccagaccaaagcgctgattgaatcccggggctatgacgttatttatggcgataccgactccacctttgtctggctgaaagcggcccattcagaagacgacgccgcgcgaatcggcaaagaactggtcgcctacgtgaacgactggtggcgcgaaaatttgcaaaaagagcggttaaccagcgcgttagagctggagtttgaaacccattttgcccgctttttaatgccgaccattcgcggaaccgaccagggcagcaagaagcgctacgccgggctgattcaggaaggtgacacgcagcggatggtctttaaagggctggagacggtgcgcaccgactggacgccactggcgcagcagttccagcagacgctctacctgcgggtgtttcgcaacgagccgtatcaggactacgtgcgcgacaccatcgccagcctgatggcgggtgaactggatgaccagctggtgtatcgcaagcgcctgcgccgcccgctggccgaatatcaacgtaacgttcctccccacgtacgcgccgcgcggctggcggatgaagagaatgttcgccggggccgtgcgccgcagtatcagaaccggggtacgatcaaatacgtctggacaactaacggcccggaacccgttgattaccagcagtctccgctcgattacgatcactacctgacccgccagcttcagccggttgcggagggaattttaccgttcatcaatgacgactttgctacactagtgacaggacaacttgggctattttga

SEQ ID NO: 113929 - DNA, 2907 bp, Enterobacter cloacae
atgccttttacacttggtcaacgctggatcagcgatacagaaagcgaacttggattaggaaccgtcgttgccgtcgatgcgcgcatggttaccctccttttccctgctaccggtgaaaaccgcctgtacgctcgcaatgactcccctgttacccgcgtaatgttcaatccgggcgacaccgtgaccagccacgaaggctggcagctgaaggttgaagacgtaaaagaagagaatggactgctcgcctacattggaacgcgtcttgataccgacgagacgaatgttatcctgcgtgaagtgctgctcgacagcaaactggttttcagcaagccgcaggaccgtctgtttgccgggcaaatcgaccgaatggatcgcttctccctgcgctaccgcgcgcgtaagttccagagtgaacagtaccgcatgccgtggagcggcctgcgcggccagcgtaccagccttattccccatcagctgaatatcgcccatgacgtgggccgtcgccatgcgcctcgcgtgctgctggctgacgaagtgggcctgggtaaaaccatcgaagcaggcatgatcctgcaccagcagctgctctctggcgctgccgagcgcgtgctgattgtggtgccggaaacgctgcaacaccagtggctggtcgagatgctgcgccgctttaacctgcgcttctccctgttcgacgacgagcgctatgccgaagcccagcacgacgcggacaacccgtttgaaaccgaacagctggtgatctgctccctggacttcgtacgccgcagcaagcagcgcctggagcacctgtgcgacgcagaatgggatctgatggtcgtcgacgaagcgcaccacctcgtctggagcgaagatgcgccaagccgtgaatacatggcgattgagcagcttgccgagcgcgtaccgggcgttctgcttctgaccgccaccccggagcagctgggtcttgagagccacttcgcccgtctgcgcctgctcgatccgaaccgattccacgattttgagcagtttgttgaagagcagaaaaactaccgtccggtggcggacgccgttgcgctgctgctggccggtaatcgtctctctaatgatgaacttaacaccctcagcgatctgatcggcgagcaggatattgagccgctgcttcaggccgcgaacagcgacagcgataatgcgggatctgcgcgtaaagagctgatcgacatgctgatggaccgtcacggcaccagccgcgtgctgttccgcaacacccgtaacggcgtgaaaggcttcccgaaacgcgagctgcacaccatcaaactgccgctgccgacccagtaccagacggcgattaaagtctccggcattatgggcacccgtaaatcagcggaagatcgcgcgcgcgatatgctctacccggagcaaatttatcaggaatttgaaggcgacactggcacctggtggaacttcgatccgcgcgtggagtggttaatgggttatctgaccgcgcaccgttcccggaaggtgctggtgatctgcgccaaggcagccaccgccctgcaacttgaacaagtgctgcgcgagcgcgaaggtattcgcgccgccgtgttccatgaaggcatgtctattatcgagcgcgaccgcgctgcggcgtggtttagtgaagaggacagcggcgcgcaggttctgctgtgctccgaaatcggttctgaaggccgtaacttccagttcgccagcaatcttgtgatgttcgatctgccgtttaacccggatctgctggagcagcgtatcggccgtctggatcgtatcggtcaggcgcacgatattcagatccacgttccgtatctggagaaaaccgcccagtccgttctggttcgctggtaccacgaaggcctggatgcgtttgaacatacctgcccgacgggccgcaccatttatgaccaggtgcatagcgatctgatcggttaccttgcggcgccggaaaacaccgagggctttgatgagctgatcaaatcctgtcgagagaagcacgacgcgctgaaagctcagctggagcagggtcgcgatcgcctgctggagatccactccaacggcggtgaaaaagcgcagcagctggccgaaagtatcgaagaacaggacgatgacaccagcctgatcagcttctccatgaacctgttcgacatcgtcggcattaaccaggacgatcgcggcgagaacatgatcgtgctgaccccgtccgatcatatgctggtgccggatttcccgggcctgccggaagacggctgcaccatcacctttgagcgtgatgtggcgctttcccgcgaagatgcacagttcatcacctgggagcacccgctgatccgcaacggtctggatctgatcctctccggcgataccggcagcagcaccatctccctgttgaagaacaaagccttgcctgtgggcacgctgctggtggagctgatctacgttgtggaagcgcaggcgccgaaacagcttcagcttaaccgcttcctgccgccaactccggtgcgtctgctgctggataaaaacggtacgaacctggccggccaggtggagtttgaaagcttcaaccgtcagctgagcgcggtgaaccgccataccggcagtaagctggtgaatgcggtgcagcaggacgtgcatgccattctgcaactgggtgaagcccaggccgaaaaagcggccagagtgctgatcgatgcggcgcgtagcgaagccgatgagaagctttctgccgagctgtcgcgtctggaagcgttgaaagcagtgaaccctaacattcgtgacgatgagctggccgccattgagagcaaccgccagcaggtgctggaaagcctgaatcaggcgggatggcgtctcgacgccctgcgtcttatcgttgtgacgcatcagtaa

SEQ ID NO: 113930 - DNA, 660 bp, Enterobacter cloacae
atggtaatggagccctacaatcccccgatggatccgtggctggtcattctgtatcaggacgagcacattatggtggttaacaagccgagcggcttgttatccgtgccggggcgtctggaagagcataaagacagcgtgatgacgcgtatccagcgtgattatccccaggccgagtctgtccatcgtctggatatggcgaccagcggcgtgattgtggtggctctgaataaagcggcagaacgcgagctgaagcgtcagttccgcgagcgcgagccgaagaaacagtatgtcgcgcgcgtctggggccatccggcgcaggcggaagggctggtggatttaccgctgatttgcgactggccgaaccggccaaagcagaaggtgtgttacgaaaccggcaaggccgcgcaaaccgagtatgaagtgctggagaacgcgccggataacaccgcgcgcgtcctgctgaagccgattaccgggcgctcccaccagctgcgtgtgcatatgcttgcgatgggtcaccccattctgggggacaggttctatgcgccgccggaagcgctggcgttagcgccgcgcctgcaactgcatgcgcagacgctcaccatcacccaccctgctttcggcaacgccatgacgttcaaagccccggtggacttctga

SEQ ID NO: 113931 - DNA, 816 bp, Enterobacter cloacae
atgcagtattggggtaaaataatcggcgttgcgttcgcaattattatgggtgccggattctggggtgtcgttcttggcctcattatcggccatatgtttgataaagcacgcagccgcaaaatggcctggtttgctaaccagcgcgagcgccagtcactctttttctccaccaccttcgaggtgatggggcacttaaccaaatcaaaaggacgcgtaacggaagccgatattcaggtggccagcgtctttatggatcgcatgaatctgcacggcgaatcccgcatcgcggcgcagaatgcgtttcggattggtaaatcagatcactacccgctgcgtgaaaaaatgcggcagttccgtagcatctgtttcgggcgttttgatttaattcggatgtttctggaaattcaaatccaggccgccttcgcggatggctctctgcatccgaatgaacgggacgtcctgtatgtgattgctgaagagttgggcatttcccgcatgcagttcgatcagttcctgcgcatgatgcagggcggcgcgcactttggcggcggttatcagcagcaatcgtccggcggcggctggcagcaggcgcagcgtggccctacgcttgaagatgcctgtaacgtcctcggcgtgaagccgtctgacgatgttacgaccatcaaacgcgcctatcgtaagctgatgagcgagcaccatccggataagctggtggcgaaaggcctgccgccagagatgatggagatggcgaaacagaaagcgcaggaaatccagaaagcctacgagctaattaaagagcagaaaggttttaaataa

SEQ ID NO: 113932 - DNA, 2352 bp, Enterobacter cloacae
atgaaaaaacgtatccccacccttctggccacaatgattggcaccgccctgtatagccaacaggggctcgcagccgatctcgcctcgcagtgtatgcttggcgtcccaagttacaatcgcccactggtgaaaggcgatacgaatgacttacccgtcaccattaatgccgacagtgcaaaaggtaattatcctgacaatgcgacctttacgggcaatgtcgatattaaccagggaaacagtcgcctgcttgctgacgaagtgcaattgcaccagaagcaaccggaaggtgctcaggcgcctgtccgtacggtggatgcgctgggtaatgtgcactatgacgacaatcaggtcatcctgaaaggtccgaaagcctggtcgaatctgaataccaaagacaccaacgtctgggaaggtgattaccagatggtcggtcgtcaggggcgcggtaccgcggacctgatgaagcagcgcggcgaaaaccgctacaccattctcgaaaacggcacgtttacctcctgtttgccagggtcaaatacctggagcgttgtgggcagtgaagtgatccacgaccgtgaagaacaggttgcagagatctggaacgcccgttttaaactcggcccggtgcccattttctatagcccttacctgcaactgcctgtgggtgacaaacgtcgttcaggtttcctgatcccgaacgccaagtacagcacgtcgaactactttgagttctacctgccgtactactggaacattgcgcccaacatggacgccacgatcacgccgcactatatccataagcgcggtaacatcatgtgggagaacgaattccgctatctgaccaaggcgggcgcgggtctgatggaatttgattatctgccatcagataaggtgttccaggacgagcatccgagcgaaggtgataagcaccgctggatgtactactggaagcacgccggggtattggatcaggtgtggcgtttcaacatcgactacaccaaagtcagcgatccgtattacttcaacgactttgattctaaatacggctccagtaccgacggttacgccacgcagaaattcagcgtgggctacgccattgagaactttgacgcgacggtgtcgaccaaacagttccaggtatttgatacacaatcgcgtagtacctatggtgccgagccgcagctggacgtgaactggtaccagaacgatgtgggtcctttcgacacgcgcgtttatgctcaggcggtccatttcgtcaacaccaactcggatatgccggaatcaacgcgtctgcatatcgagccgacgatcaatctgccgtggtcaaacgactgggcgagcctgaataccgaagctaagctgatggccacccactaccagcagaaaaatctggactggtataacaaacgctatggcaccgatcttgaagagtcggtaaaccgtacgcttccgcaattcaaaatggacgggaagctgatcttcgaacgtgatatgggccttctcgccgatggatacacccagacgcttgagccgcgtatgcagtatctgtatgtgccttatcgcgatcagagcaaaattcaaaactacgactcttccttcctgcaatcagactacagcggcctgttccgtgaccgtacctacggcgggcttgaccgtattgcgtctgctaaccagttaacgactggcgtcacaacgcgcgtatatgatgatgctgccgttgaacgttttaacgtttctgttggtcaaatctactatttcaccgagtctcgtaccggtgatgacgacattaactgggagaaagacaacaaaacgggctcactggtatgggcgggcgacacctactggcgcatgacggatcgttggggtctgcgcggtggtgttcagtacgatacacgactggacaatatcgcgacgggcagcgcagccatcgaataccgtcgtgatgaagaccgcatgttgcagttgacgtaccgttacgccagcccggagtatatccaggcgacgctgccaaactatgcgaatacagaccaatacaaagacggtatttcacaggtgggtaccgccgcgagctggccgatcgccgatcgttggtcagtcgtcggggcctactactatgacacgaatgcccaaaaacctgctgaccagatgctgggtctgcaatacaactcctgctgttacgcaatacgtgtcggttacgaacgcaaacttaacggctgggatacgcaaaacagtcagggcaaatatgataacgtgatcggctttaatatcgagttgcgcggcctgagttctaactacggtctgggcacgcagcagatgctgcgctcgaacattctgccgtatcgtagttcattgtaa

SEQ ID NO: 113933 - DNA, 1287 bp, Enterobacter cloacae
atgaagaactggaaaacgctgctactcggtgtcgctatggttgcgaataccagcttcgcggccccacaggttgtcgataaagtcgcggctgtggttaacaacggcgtcgtgcttgaaagtgacgttgacggtttgatgaaatctgtaaagctcaactcgggcgaagcaggtcaacagcttccggatgacgctacgctgcgccaccagatcctggagcgtctgatcatggatcagattgttcttcagatgggccagaaaatgggcgtgacgatctctgacgagcagctcgatcaggcgatcgccaacattgcaaagcagaacaacattaccccggatcagatgcgtagccgcctggcctacgacggcatcagctatgccacctaccgtaatcagatccgtaaagagatgctgatttcagaagtgcgtaacaatgaagtccgtcgccgcgtcaccatcctgcctcaggaagtggatgccctggcaaaacaggtagggaatcagaatgatgccagcactgagcttaacctgagccacatcctgatcccactgccggaaaacccaacctccgatcaggcggctgaggcggaaagccaggcgcgcgctatcgttgagcaggcgcgtaatggcgatgacttcggcaagctggcgatcacctattccgctgaccagcaggcgctgaaaggcggccagatgggctgggggcgtattcaggagctgccatccctgtttgcccaggcgctgagcacggcgaagaaaggcgacatcgtcggtccaatccgttccggtgtgggcttccacattctgaaagtgaacgacctgcgcggccagagccagaacatttcggttaccgaagtgcatgcgcgtcatatcctgcttaagccgtctccgatcatgactgacgatcaggctcgtgcgaagctggaacagatcgcggcagacatcaagagcggtaaaaccaccttcgataaagcggcaaaagagttctctcaggatcctggctctgcaaaccagggcggtgacctgggttgggcggcagcggatatttacgatccggctttccgcgatgcgttaatgaagctgaataaaggccagatgagcgcgccggtacactcctccttcggctggcatctgatccagctgatggacacgcgcaacgtggataaaaccgacgcggcgcagaaagaccgtgcgtatcgcatgctgtttaaccgtaagttctctgaagaagccgcaacctggatgcaggaacaacgcgccagcgcttacgtgaaagtgttgagcaactga

SEQ ID NO: 113934 - DNA, 987 bp, Enterobacter cloacae
atgaaaccgcatcgtgttgtgatcacccccggcgaacccgccgggattgggcctgaccttgtggttcagctcgcccagcgcagctggccggtagagttggttgtctgcgcagatgcaacactgttacaagaccgggcagctttgctcggtctgcctttaacgctcctcccttacgttgaaggccaacagcccgcaccgcagcaggcgggtactctcaccctgctttctgttccgctccgtgcgcctgttgtccccggtgagttacacaccgaaaacggccactacgttgtcgagacgctggcgcgcgcctgtgacggttgccttcagggcgaatttgccgccctgatcaccggtccggtgcataaaggcgtgatcaatgacgcgggcattccgtttaccgggcataccgaatttttcgaagagcgttcgcacagcccgaaagtggtgatgatgctggcaaccgaagcaatgcgcgttgcgctggtaacaacgcacctgccgatcaaagccattccggatgccattacgcctgaactcctgcgtgagatcattggcattttgcatcacgatctgcaaaccaaattcggcattccgcagccgcatgtgctggtttgcggcctgaatccgcacgcgggtgagggcggacatatgggcaccgaagagatcgacatcatcattccggtgcttgaggagatgcgggcgaaggggatgaacctcagcgggcctctgcctgccgacacccttttccagcccaaatacctggataatgccgacgccgtactcgcgatgtaccacgatcagggtctgcccgtgctaaaataccagggctttggccgcggggtgaatatcaccctcggtttaccctttattcgaacgtccgttgaccacggtactgcgctggatctggcaggccagggaaaagcggatgtcggcagttttattacggcgcttaatctcgccatcaaaatgattgttaatactcaatga

SEQ ID NO: 113935 - DNA, 822 bp, Enterobacter cloacae
atgactaatcgagtccatcagggccacttagcccgtaaacgcttcgggcaaaacttcctcaacgatcagtttgtgatcgacagtatcgtttctgccattaatccgcagaaaggtcaggccatggtcgaaatcggcccgggtcttgccgcgctgaccgagccggtaggcgaacgcctcgacgaactgaccgttatcgaactcgaccgcgatctggccgcacgtctgcaaacgcacccgttcctcgggccgaagctgacgatttatcaacaggatgcgatgaccatgaacttcggcgaactgtcagaaaaaatgggacagccgctgcgcgtgttcggtaacctgccgtacaacatctccaccccgctgatgttccatctgtttagctatactgatgccattgccgacatgcacttcatgttgcaaaaagaggtcgttaaccgtctggttgcagggccgaacagtaaagcgtatggtcgtttaagcgtgatggcgcaatattactgcaacgtgatcccggtattagaagtaccgccttccgcgttcacgccgccgccaaaagtagattctgcggttgtgcgcctggtgccacataaaacgatgccgtacccggtcaaagacctgcgtatactgagccgtatcacgacagaagcctttaaccagcgccgtaaaacgattcgtaacagccttggcaatctgtttaccgttgacgtattagctgagttgggcatcgacccggcaatgcgtgcggaaaatatttccgtagagcagtactgcaagctggctaattacatcagcgacaatgcgccgccgaaggagagctaa

SEQ ID NO: 113936 - DNA, 378 bp, Enterobacter cloacae
atgattgattcgccccgcgtctgtgttcaggttcaaagcgtctacattgagtcccaatccacaccggatgaagaacgttttgtctttgcttataccgtaaccattcgcaatctggggcggatgcctgtgcaactgctcgggcgctactggcttatcaccaacggcaatggccgtgaaattgaagtccagggcgaaggcgtggtcggtgaacaaccccatatcgcccctggcgaagagtatcagtacaccagcggcgcggtaattgaaacgccgctgggtaccatgcagggccattatgaaatggtcgatgccgacggcaatgctttccgcattgctattcccgtattccgtctcgccgtacctacacttattcattaa

SEQ ID NO: 113937 - DNA, 849 bp, Enterobacter cloacae
atgtctacatatctgattggcgacgttcacggttgctacgatgaactgatcgcattattaaaacaggtcgacttcacccccgggcaggacacgctctggctgacgggcgacttagtggcgcgcggtcccggttccctggacgtcctccgctatgtcaaatcgctgggtgacagcgtgcgcatggtgctgggcaaccacgatctgcatctgctggccgtatacgccgggatcagccgtaataagccgaaagatcgcattacccccctgctggaagcaccggatgccgatgagttgctcaactggctgcgtcgccagccgctgctacagattgacgaagagaaaaagctggtgatggcgcatgccggcatcacgcctcagtgggatcttgagacggcaaaaacctgcgcgcgcgacgccgaagcggtgctggcgagcgactcctatccgttcttcctggatgcgatgtatggcgacatgccgaataactggagtgatgacctcagcggcctggcgcgactgcgttttatcaccaatgcttttacgcggatgcgctactgcttcccgaacgggcaactggatatgtattgcaaagatacgcctgaaaatgcccctgcgccgcttaagccatggtttgcgattccgggccccgtgacaaacgaatacagtgtggtatttggacactgggcatcgctggaaggaaaaggcaccccggaaaatatctatgcgctggataccggatgctgctggggcggggatttaacctgcttacgctgggaagataaaacttactttgtgcagccatccaaccgacagctggacttaggcgagggtgaggcagtcgcctcctga

SEQ ID NO: 113938 - DNA, 480 bp, Enterobacter cloacae
atgatcagtctgattgcagcgctggcggtagaccgcgttatcggcatggaaaacgccatgccgtggaacctgcctgccgatctcgcatggtttaaacgtactacgttaaacaagccggtagtgatgggccgcctgacctgggagtcgattggtcgtccgctgccgggtcgtaagaatattgtgatcagtagccagccgggcactgacgatcgcgttcagtgggttaagtccgtagatgaagccattgccgcctgcggcgatgccgaagagatcatggtgatcggcggggggcgtgtgtatgagcagttcctgccaaaagcgcagaaactgtatctgacgcacattgatgcggaagtggaaggggatacccatttcccggattacgatccggacgagtgggagtccgtattcagtgagtttcacgatgcggatgcgcagaactcacacagctactgcttcgaaattctggaacgtcgttaa

SEQ ID NO: 113939 - DNA, 1866 bp, Enterobacter cloacae
atggatagccatacgctgatacaggcgctgatttacctcggcgcggcggcattaattgtgcccgtggcggttcgtctggggctgggctcggtgctcggctatctgattgccgggtgtgtgattggcccctggggctttcggctggtgacggatgccgagtcgatcctgcattttgcggagatcggcgtggtgctgatgctgtttgtgattggtctggagctggatccgcagcggctgtggaaactgcgcgcctcggtgtttggcggaggcgccctgcaaatgctggcctgcggtctgctgttgggcgggttctgcattctgctggggatggagtggaaagtcgcagagctgatcggcatgacgctggcgctctcctcgacggcgattgccatgcaggcaatgaacgagcgtaatctgacggtgtcgcaaatggggcgcagcaccttctccgtactgttgttccaggatattgccgccatcccgctggtggcgatgatcccgctgctggcagccagcggcgcatcaacgacgctgggagcatttgccttatcagcgctgaaggttgccggtgcgctggcgctggttgttctgcttggtcgctacgtaacgcgtccgctgctgcgctttgttgctcgctctggcctgcgcgaagtattcagcgccgttgcgttattcctggtgtttggttttggattgctgctggaagaggccgggctgtcgatggcaatgggcgccttcctcgcgggggtcttactggcaagctccgaataccgtcacgcgctggaaagcgatatcgagccgtttaaaggattgctgctggggctgtttttcatcggcgtcgggatgtctatcgacttcgggacgctggtaacccatccgctgcgcatcatcattctgctggtgggtttcctggtcattaaaatggcgatgctgtggctgattgcccgcccgttaaatgtgccaaaaccgcaacgccgctggtttgccgtgctgctggggcaggggagtgagtttgctttcgttgtctttggcgcagcgcagatggcaaatgtacttgatccggaatgggcaaaagcgctgacgctggcggttgcgctgtcgatggccgcaacgccgatcctgctggtgctgctgacgcgtctggagaaaacgggaagcgaacaggagcgagaagccgatgagatcgacgaggagcagccgcgggtgatcatcgccggatttggccgcttcgggcagattactggccgtttactgctctccagcggtgtcaaaatggtcattctcgatcacgatcctgaccatgtcgatacgctgcgtaaattcgatatgaaagtgttttacggtgatgcgacccgcgtcgatctgctggaatccgccggggcggcgaaagccgaggtgttgattaatgccattgacgatccagagaccagtatgcagatggttgagctggtcaaagagcattttccgcatctgaccattatctcccgtgcgcgcgatgtggatcactacatccagctgcgtcaggcgggtgtggcagcccctgaacgtgaaaccttcgaaggggcgctcaaatctggccgcatggcgctggaaagcctggggcttggcgcgtatgaggcacgtgagcgtgccgatctgttccgccgttttaatcatgagatggtggaagagatggtggcgatggcgagcagtacggcaaccgaacgcgctgcggtgtttaaacgcaccagcaccatgctgacggagatcatcaacgaggatcgtaatcatctgtcgctggttcagcgccacggctggcaaggaacggaagagggcaagcatactggtgatcctgcggatgaaccggagagtaaaccctctgcgtga

SEQ ID NO: 113940 - DNA, 531 bp, Enterobacter cloacae
atgattctgataatttatgcgcacccctatccgcagcactcgcatgcgaataagcggatgcttgagcaggcaaggacgcttgaaaacgtagagatacgttccctctatcaactctatcctgatttcaatatcgatgtcgccgccgaacaggaggcgctctcccgtgccgatctgatcgtctggcagcatccgatgcagtggtacagcacgcctccgctgctgaaattgtggatcgacaaagttttctcccacggttgggcatatggacacaacggcaacgcgcttcagggcaaaagcctgatgtgggctgttaccaccggcgggggggaaagccactttgagattggcgccttccccggatttgacgtgctggcgcagccgctccaggctactgccttttactgcggtctgaactggcttgcgccttttgcgatgcactgtacctttgtctgcgacgatgaaaccttgcaggcgcaggctcgtcactacaaacaacgtttacttgagtggcaggagacgcacaatggatag

SEQ ID NO: 113941 - DNA, 2976 bp, Enterobacter cloacae
atgagcaacaaaccctcccaattaaataatacaaccaaaactctgggaaagatatttcctgccttgttgatatgcacccctgcggttgcgttttctgcaacgattgaccaatcaacttctgttcctcaagatttctcagccgatgctgaatatgttattaataaagacgtgacgatatcttccgcagatagtgaagcggcggtatctgtcactgggtttactatcaataatatcactaacgaagggaatatttccggtagggaaactggcctggatataaatactgccgcgcaacgtgttgtggtgaataacgaggaaggtgccgccatcacatcgaaatcggctacagctattagtattgaatcaatgcaaggtgaaattagcaaccgtgggaatataaccgcttttgaggatggtatattcgttagtgaaaactcatcggctgtaagtatttcaaatagcacaaccggagttattaaaggtaaaactggcctgaacgcacttgcaggcgttgccattaataatgcgggtacgatcactggcacagcgaatgatggaatcgctctgagcgagggtaacactaaggtcataaatactggtaacgtgcagggtgcgcaatacggttttaatgtaacgaataatgcaaaagtagatatcacgaatagcggaacgattagtggtgatacagccgctgttatgtttgccagcaataaaaataacaccctggtgcttgatacgggttccactcttatcggtgacgttatttccaccaattccacgggaaacactctcaccctgatcggcaccggtacggaagacagtaactttgtgggtctgaacgaaggcgacggttttgccagtataaaaatgatgggcgaaaattgggcgctgtcgggcgatctcgatattattggctctggcgattccttgctgatagacacgggcgcgttaaccctgtcaggcgcggtatcgaataccggtaatacacgggtggccaaagatgcttcgttgcaactgggcgatggcgaaaaaaccgcgaccctcagcggtgggctcaccaacaacggtaccgtcatttttaaccagggaagcgatttcactttcgccaccgacatgaccggtagcggtaacgtcgaaaaagttgattccaacaccctgaccctgacgggcaaaaatagctatacaggggatacggttctgcacggcggcaccacgctggtctccaccggcgcaacgctcggcgtcaagggcagtaacgccaccgttaccgttgaaaatggcgcgacctttgccaccgcaggcgaagtgaacaacaacatcgcggttcttagcggcggtacgctggcggcatggaatgcagtccagggtaactccacgctcagcgcttccggcgtcgataccatcaacggcaacgtgactaatggcggcacgctgttactcagtgcggctaataagagcgttggcaataattttacgattaatggcgactacaccggctctgacggtagccagatcgtgatgaacagcaccctgggtgaagataattcaccaactgatcacctcactattacgggtagcagcttcggtcagtctggcatcagcatcaccaacattggcggcgcaggcgcgcaaaccattaacggtatggaaattgtcagcatcggcggcagttccgaagcccaactgacgctggcaaaaccggtcgttgcaggcgcctgggaatatagcctctaccagcacagtgacggcaactggtatctggaatcaaaggcgacgccttctgatgagccttccgacgacaccgatgacggtggcaatactgatgatggcgataacaccgacaacggcggcaacaccgatgatggtggcaacaccttcaatggcggtaacaccgataacggtggcaacaccgatgatggtggcaacaccgacaacggcggcaacaccgataacggcggcagcaccgataacggcggcagcaccgataacggcggcagcaccgataacggcggcaacactgacaacggcggtaacaatgctccggaagtcatggcacctgaagtgggtgcttacttaggtaactaccttgccgcacagggcatgttcctgcataagcgtgacgatcgcgaccagatcaccttccgcaatgaagacgacctgaacacctggatgtacgttaagggtcgctatcacgagaacgatgcgggtggcgataaagtcagctacgacaccaccaccaccgtactgcaagtcggcagcgatttcatgagcaagccaatggataacggtatcctgcgtgctggcgggatgttcggtgcaggccaggcgaagacccactctgatgcgaagcacaacgtacgtgacgcacagggtaaggttgatggcttcaatgttgggctgtacgccacctggcaggaagatcagaaattacgtctgggcagctacgttgatacctgggccgcttacagctggtacaacaacaacgtcaccagcaatcgcaacgatgaagactacgatagtgaaggtttcgccgcgtctgttgaagtcggccacgcgtggataatccagtctgaaaatgaacgcacctggaagatcgagccgcaggcgcaggtgatttacagctatctcgatcaggaaaatcataccgatcgcgacggcgtacgcgtcactaccctggacaatgacagcgtctttggtcgtctcggcgttaaagcaagctacttccagcagaaggacgtcaaggcctggcagccgtacgttgcggttaactggttgaaaggtgctggtcaaaacgatctggcattcaacgacgagaccgtcagcaacgatacgccggaagatcgtggtcagttagagttgggcttaaccggcaacctgaacgaaaccacgacgatctcccttcgtgccagcggcgagtggggtgaaaacagctatgccgcctacggcggtcatattttgttaaaccatcgctggtaa

SEQ ID NO: 113942 - DNA, 234 bp, Enterobacter cloacae
atgcaaaataaactactgatcgcttccgttctggctgccaccgcaatgttcaccgtggcgggctgttcgtccaatcaggccgtaaaaaccaccgatggcaaaacgattgttactgacgggaaaccgcaggtggatgacgataccggtctggtatcgtacaaaaacgccgaaaccggtcaaactgaacagattaaccgtgaccaggttaaatcaatgggcgagctggataactaa

SEQ ID NO: 113943 - DNA, 3225 bp, Enterobacter cloacae
atgccaaaacgtacagacataaaaagcatcctgatccttggcgctggcccgattgtcatcggccaggcctgcgaattcgactactccggcgcgcaggcgtgtaaagccctgcgtgaagagggttaccgtgtcatcctggtaaactctaacccggccaccatcatgaccgacccggaaatggcggatgcgacctacatcgagccgattcactgggaagtggtacgcaaaattatcgagaaagagcgtccggacgcggtgctgccgaccatgggcggccagacggcgctgaactgtgcgctggagctggagcgtcagggcgtgctggaagagttcggcgtgaccatgatcggtgcgaccgccgacgcgattgataaagcagaagaccgtcgccgcttcgacgtggcaatgaaaaaaattggccttgataccgcacgttccggtatcgcgcacaatatggaagaagcgctggccgttgcggctgaagtgggttatccgtgcatcatccgtccttccttcaccatgggcggcaccggcggcggtattgcctacaaccgcgaagagtttgaagaaatttgcgagcgcggcctggatctctccccaaccaaagagctgctgattgatgaatcgctgattggctggaaagagtacgagatggaagtggtgcgtgataaaaacgacaactgcatcatcgtctgctccatcgaaaacttcgacgcgatggggatccacaccggcgactccatcaccgttgcgccagctcagacgctgaccgacaaagagtaccaaatcatgcgtaacgcctcgatggcggtactgcgtgaaatcggcgtggaaaccggcggctctaacgtgcagttctcggtgaacccgaaaaccggccgtctgattgttatcgaaatgaacccgcgcgtgtcccgttcctccgcactggcctccaaagccaccggcttcccgattgcgaaagtggcggcgaaactggcggtgggttacacccttgacgagctgatgaacgatatcaccggcggccgcacgccagcgtccttcgaaccgtccatcgactacgttgtgaccaaaattccacgctttaacttcgagaaattcgtcggtgccaacgaccgtctgactacccagatgaaatccgttggtgaagtcatggcgattggccgcacgcagcaggaatccctgcaaaaagcactgcgcggcctggaagtgggcgcgaccggctttgacccgaaagtcagcctggacgacccggaagcgctgaccaaaatccgccgcgagctgaaagacgcgggcgcagagcgtatctggtacatcgccgatgccttccgcgcgggcctgtccgtcgacggcgtatttaacctgactaacattgaccgctggttcctggtgcagattgaagagctggtgcgcctggaagagaaagtggcggagctgggcatcaacggcctggacgcagacttcctgcgcatgctgaagcgtaaaggcttcgccgatgcgcgtctggctaagctggcgggcgtgcgtgaagcggaaatccgcaagctgcgcgaccagtacgacctgcacccggtctacaagcgcgtggacacctgtgcggctgaattctcgaccgataccgcatacatgtactccacctatgaagaggagtgcgaagcgaacccgtccgtcgaccgcgacaagattatggtgctgggcggcggtccaaaccgtatcggccagggcatcgagtttgactactgctgcgtacacgcctcactggcgctgcgcgaagacggttacgagaccattatggtcaactgtaacccggaaaccgtctcgaccgactacgacacttccgaccgcctctacttcgagccggtcaccctggaagacgtgctggaaatcgtgcgcatcgagaagccaaaaggcgtgatcgtgcagtacggcggccagactccgctgaagctggcgcgcgcgctggaagcagcaggtgtgccggttatcggcaccagcccggatgcgattgaccgtgcggaagaccgcgagcgtttccagcaggcggttgaccgtctcaaactgaaacagccggcgaacgccaccgtgaccgcaattgaaatggccgttgagaaagcgaaagagatcggctacccgctggtggtgcgtccatcctacgtactgggcggccgcgcgatggaaatcgtctacgacgaagcggacctgcgtcgctacttccagacggcggtgagcgtttccaacgatgcgccagtgctgctcgaccgcttcctcgacgacgcggttgaagtcgacgtggatgccatctgcgacggcgaaagggtgctgattggcggcatcatggagcacatcgagcaggcgggcgtgcactccggtgactccgcctgttctctgccagcgtacaccctgagccaggagattcaggacgtaatgcgccagcaggtgcagaagctggccttcgagcttcaggttcgcggcctgatgaacgttcagttcgcggtaaaagacaacgaagtctatctgattgaagtcaacccgcgtgcggcgcgtaccgtaccgttcgtctccaaagcgaccggtattccgctggcgaaagtggcggcgcgcgtgatggctggccagacgctggctcagcagggcgtcacgaaagaaattatcccgccttactactcggtgaaagaggtggtactgccgttcaataaattcccgggcgttgacccgctgttagggccagagatgcgctctaccggggaagtgatgggcgttggccgtaccttcgcagaagcgtttgcgaaagcgcagctgggcagtagctccaccatgagaaaatctggccgtgcgctgctctccgttcgcgaaggcgataaagagcgcgtggttgacctggctgccaagctgctgaaacagggcttcgagctggacgccactcacggtacggcgattgtgttgggtgaagcgggtatcaacccgcgtctggtgaacaaagtgcatgaaggtcgtccgcacattcaggaccgcattaagaatggcgagtacacctacatcattaacaccaccgcaggtcgccaggcgattgaagactccaaactgattcgccgcagcgcgctccagtacaaagtgcattacgacaccaccctgaacggcggtttcgcgacggccatggcgctgaatgcggatgccaccgagaaggtgatttcggtgcaggaaatgcacgctcagattagcaagtaa

SEQ ID NO: 113944 - DNA, 1149 bp, Enterobacter cloacae
ttgattaagtcagcgctattggttctggaagacggaacccagtttatcggtcgggccataggggcaacgggttcggcggttggggaagtcgttttcaatacttcaatgaccggttatcaagaaatcctcactgatccttcctattctcgccaaatcgttactcttacttatcctcatatcggcaatgtcggcaccaatgcggctgacgaagaatcctctcaggtacatgcgcaaggcctggtcattcgcgacctgccgctgattgccagcaacttccgcaacaccgaagacctctcttcttacctgaagcgccacaacattgtggcgattgccgatatcgatacccgtaagctgacgcgtctgctgcgcgagaagggtgcacaaaacggttgtatcatcgcaggggataacctcgatgcgacgctggcgctggaaaaagcgaaagccttcccgggactgaacggtatggacctggcgaaagaagtgaccaccgctgaagcctacagctggacgcagggaagctggacgctggaaggcgacctgccggaagcgaaaccggaaagcgagctgccgttccacgtggtggcctacgattttggcgccaagcgcaacatcctgcgtatgctggttgaccgtggctgccgcctgacggtggttccggcgaaaacctctgctgaagatgttctgaagatgaacccggacggcatcttcctctctaacggtcctggcgacccggcgccgtgcgactacgctatcgacgccatcaagtccttccttgaaaccgacatcccagtattcggcatctgtctcggccatcagctgctggcgctggcgagcggagcgaacaccgtcaagatgaagtttggccaccacggtggtaaccacccggtgaaagatatcgacaacaacacggtgatgatcaccgcgcagaaccacggcttcgctgtggatgaagcgacgatgccagctaacctgcgcgtgacgcataagtcactgttcgatggtaccttgcagggtatccatcgcaccgataagcctgcgttcagcttccagggccaccctgaagccagcccgggcccacacgatgccgcgccgctgttcgatcacttcatcgaacttatcgagcaataccgtaagaccgctaaataa

SEQ ID NO: 113945 - DNA, 822 bp, Enterobacter cloacae
atgcatgatgcacagatccgcgtcgccattgcgggcgcgggtggacgtatgggccgtcagctgattcaggcggcactacagatggatggcgtggcgcttggcgcggcgctggagcgtgaaggttcatcgcttttgggagccgatgcaggcgagctggcaggcgcaggtcaaacgggcgttaccgtgcagagcagccttgaggcggtgaaagaagactttgacgtgtttatcgattttacccgccctgaaggcacgttggctcacctggcgttttgccgtcagcacggtaaagggatggtgattggcaccaccggttttgacgaggtcggtaagcaagccattcaggatgcgtccactgagattgcgattgtctttgcggcaaactttagcgtgggggtaaacgtcatgctgaaactgctggagaaggcggcgaaggtgatgggcgactacaccgacattgaaatcgtcgaagcgcaccatcgccacaaagtcgatgctccgtcaggcacggcgctggcaatgggcgaagcgattgcgtgtgcaatggataaagatttgaaagacatcgcggtctattctcgcgaaggccacactggcgagcgcgtgcctggcaccattgggtttgccaccgttcgcgcgggtgatatcgtcggtgaacataccgctatgttcgccgatattggcgaaaggatcgaaatcactcataaagcatccagccgcatgacatttgcaaacggggcggtacgttcgggattgtggctgaaaggtaagcgtaatggtctttttgatatgcgagatgtcctcgaactcaacaatttgtaa

SEQ ID NO: 113946 - DNA, 1008 bp, Enterobacter cloacae
atgacgggaattacactggccaatgtcgcgaaacgcgccggcgtgtcaacggcgacggtctcgatggtgctctgcaacaaaggccgcatttcgcaaagcacgcgcgaacgtgtgcttaaggcgctggatgaatccggctatgtctataaccagacggcagccaatttacgtaaccgcagcagtaaccaggtcgggctgctcttgcacgatatcaccaaccctttttacagcgagatgacggcagggctaagtcatgaaatggagcgccacgagctgatgctttttctggcgaatagcgaggaatcggcagagcgacagcaaaaatttgttgattcactgatgcgtaataacgtcggcggtatggtgctgtgtgcggctcgggaaacgccccaggccttttttgagggtctgaagcggcgcaatattccggcaatcatggttgtgcgcccgctgaacgatccggattttgattttgtcggaacggataacttcttaggcacgcagatggcgacggagcatctgctcagaatgggccatcggcatattgcgttcattggagggagccagaattcgggctctcgggcgcagcgtatcgggggctttaccagcaagctgctggagtacggcgtgacgccgaatcctgcctggatcagaacctctcacgccagccaaagcgacggcgcgcgcgtggcagaggcgttacttctcgagcatccacacatcagtgcggcgatttgctatcaggatgttgtggcgctgggggtgatgcaaagcttacgcaagatgggccgtgagccgggacgtgattttgcgctggtcggtttcgatgatattaccgaagcggctctggtgcagcccgcattgaccaccgtatcggtggcggcgaaagagattggtcgtaaggcaggggagttactttacagccgcatacagggcaacgacgaacccgccaaacgaatcattctgccgcctgcgctggtggtgcgggaatcatgcggttttcgctga

SEQ ID NO: 113947 - DNA, 1743 bp, Enterobacter cloacae
atgacaacctacgacaaattccccacggtggcgatacagggttttgatgacagcgcctggcaaggctgggaagcaataacccgcgttcttgagtcacaaacccaacagcgcagccgcacggtgctggtgattgactgctatccgggcgtgcgcatgaccgagcttgaagagaacgtgctgccgcgtctacgcccgacgctggcgatcaatgctgaacaggcgcgacgggatgagtgtgccattcatgagatgctggcgcgcaacctcacagacgatcgcgtctttggcgttctctcctgccaccagcttggagagtttttcgatcccgcgcgtctggaggcgttgcaggttcaggtgaaccagtgttccggggggctgattgtgatctacggacccggtgcgacgcttgtccatccgggtgatgtgctggtgtatgccgatctgccgcgctgggagatccagcagcgtatgcgccggggtgagactgggaactggggcgcagataatcagcaggaagatatgcttcgtcgctacaagcgcgccttttttgtcgaatggcgcgtcttcgatcgccacaaaacaccgctgctcaggcgcaccgattttttactggatacaacccagacgaaccagcccgcgatggtcagcggcgaggccctgcgagccgggctgaagcaaactaccacccagcctttccgcgtggcgccctttttcgatcctggcgtctggggcggccagtggatgaaacagcaattcgatctcgatccctctgcacccaattacgcgtggtgttttgactgcgtgcccgaggagaacagcctgttactgcgttttggcgcagtgcggatcgagatcccctctcaggatctggttttgcttgagccccgtgctctgctgggcgagaaagttcacgcacgtttcggcgcggaattcccgatccgttttgacttcctcgacaccatgggtggccagaatctgagcttccaggtccaccccattaccgagtacatccagcaacagtttgggatgcactatacccaggatgagagttattacattctggaagcggagccgggtgccgtcgtctatctggggaccaaaaccggcacagaccctgaggccatgatggacgatctcaggcgcgcgggtcgcggtgaaaaaccgtttgatgacgaccgcttcgttaatcagatcccggcaaaaaagcacgatcatttcctgatcccggctgggacggtgcactgctccggcgcgggaaccatggtgctggagatcagcgctacgccgtatattttcaccttcaaactgtgggactggggccgcctgggcctggacgggctgccgcgcccggtacacctggagcacggtgaaaaggtgatcgactggcagcgcgacgcgcagtgggttcatcagcatctggtgaatcagttcgaacctgtcgcggaaggaaacggctggcgtgaagagcgtactggcctgcacgagcgtgaatttatcgaaacccgccgccactggtttagcgaacccgttttgcaccacaccggcggcggcgtgaacgtgctgaatctggtagagggcgacgaagcaattgtcgacagcccaaccggtgcatttgagccgtttaccgtccattacgccgaaaccttcatcattccggcaagcgtaggtgactatcgcatttcaccttcagcccgtgcttccggacaccccctcgcgactatcaaagcctgggtaaggagctaa

SEQ ID NO: 113948 - DNA, 429 bp, Enterobacter cloacae
atgattcattttattgtcgccactcatgggccgttagccgccgcgctgctggagagcggccggatggtatacggcgagctccccggcgtacacgccatttgtctgaccgaacaggcgggaatagagggcttccggcaggatttcatctccacactggaagcggcaagcgtcaacgctgacggcgtgctggtgctgtgcgacatgcaaagcggcacgccgtggaacgtggcctgtgaggccgcgtttaacccacatacgcagccgccggtcgccgtggtggctggagtcaacttcccgatgctgctgcaaaccgatgaggtgatgatggctcgcgatgttcatcaggctgccgggcagcttatcgaacttactctgccgacgctggtacaggcgaaaccggcagatactgcacagacagacgatttttaa

SEQ ID NO: 113949 - DNA, 495 bp, Enterobacter cloacae
atgagtatttcttttgtacgcattgacgatcgcgtgatccacgggcagctcattacacgctgggccagggagctgccctgcgacggcatcgttgccattgacgatgccgttgcggccgatccgctgttatcgtcggtcatgaaaggagccgtatcagatactaaagtgtggctgttcgatacggcaaccgcgatcgaaaaactgccaaaagtgattgccagcgaaaagcgctatttcgtgattggcaaatctccactcacgctacagcgcattgagcaggcgggcattagcctgaaaaacagcaatggaaaaattaacgtgggcccgatgagcgcccgggctaacacgatcaccatcggcccgaatcaatcggtaacccaggatgaagcggcggcgttcgagtggctgaccgggcagggacacgcgattgaattccgcctggttcctgatgccagtttttatacctggcaggatgccagacaaaagctgaaataa

SEQ ID NO: 113950 - DNA, 798 bp, Enterobacter cloacae
atgattatcgaagcggctttaattggcctgctgtgttatctgggcgcactcagtagtccgtggcttttagggctgacgggcggctggtatctcatctcccgaccgctcatttccgggatgctggttggcctgatcctgggcgatatcaaaaccgggattatgattggcgtagcggtgcaggcggtgtatatcgcaatggtgacacccggcggctcgatgccagcagatttaaactttgtggcttatccggccattgcgctgggaatactttccggcaaaggacctgaggttgccgtcgcgctggcggcgactattgggatcgccggaaccattctcttcaatgcgatgatggtgctgaactccttctggaaccatcgtgcggatgtggcgctggagaacggcgacgagcacgggatctacctcaacagcgccatctggccgcaggcgatgaattttgtgctgcgctttgtgcctacctttatcgccgtcttttttggcgcacagtacattagcgggtttatggacagcctgccgcacatcgtcctctccaccatgaatgtgctgggcggcatcttgcccgccgtcggtattgccatcctgcttaagcagatcatcaaaagctataccatgcttatctactttctggtgggcttcgtctgcatcgttttcctgaaactcaatatggtcgcgctggtgatcgtgggcgccctgctggcactgattcattacaactataaacccgaggcaccgcaggccgtggcttcagcacctgtccctgacgacgaggatgaattctga

SEQ ID NO: 113951 - DNA, 819 bp, Enterobacter cloacae
atggaagaacgtaaactcacccgcaaggatctgcgccgctgctggcgagcgtggatgatgcacaacctctcctcaatgagctttgaacgccttgaatccttcggcttttgcctgagcatgctgccggtcgcaaaaaagctctatcccgacccggtacaacgtaccgagatgctgcgccgtcacgcgtcgttctacaacacggagccacagattggcgcgatcgttaacggtatggcgctggggctggaggagaaaaaagccaacggcgagccgattgacggtgaaaccataaataccctgaaggtaggcttgatggggccaattgccgggatcggcgattcgatgatccccggcatgctgatcccgatcctgcttagcattgggatggcgctggcggcaggcggaaatatcctcggtccactgttttataccgttgcctggctggccatcattatccctggctcctggttcctgtttctcaaaggctaccagatgggatcaggctccgtggagatgctggtcagcagcaaatctacccggctacgggaagcgctctcgctactgggtgtatttgtcatgggcggcgtggcggccagctacgtgaagctcggcaccgggctggagttcatcacccgggacggggttaacattcacgttcagcagatgctggacggtattttcccgcagctgcttccgctggcggtggtgctggggacctggtatctgatggcaaaacgcggcgtgtcgccggtaaaagccatgatattgctgcttatactggcagcgcttggcgtggcgtccggtttgtttgcaggataa

SEQ ID NO: 113952 - DNA, 771 bp, Enterobacter cloacae
atggctaactatggccttgatatgaccatcacccgtcagccgctcggtttttgctacggagaggatgttaccgggccgatgccggagatcagaacgctggatcagatccgcccgtcgctgcgcaatccggactgcgaagggcctgaacaggtatatgccatcgcgatggacgtggcgcgtctggcggacaggccggagctcgaaaaacgcatgctgctttttggtgtggtcacctacgcggcaggcacgcttggcgatgagccggtccgcagccagggacatgttcaccgtattagccagcacagcggatggtcgccccctgagctgtacgaaatctggcagggtaaagcgattatctacatgcaggagtatgtggacgacgatccgggacgttgttttgcggtactcgcggggccgggtgaaaaggtactggtccctcccggatggggccatgcgacgatttcggcctcgcccaatgagccgctgacgtttggtgcgtggtgcgatcgggaatatggctttgagtatgaggccgttcgtgcgcgaaaaggtctggcctggtatcccttagttcagggtaatcatattgtctggcagcataacagtcactacagaccagggcgcttgcagatgattacgccgagaagttatccggaatttggcattactgatgcgcctgtttatcagcagtttattgatgaccccgcacggttccagtttatttcgcgtccggataaagtcgcagaactgtggaataacttccatccataa

SEQ ID NO: 113953 - DNA, 555 bp, Enterobacter cloacae
atgaattcagacatctttttgccacctcagttgacgtgggctaccggcgcgctagccggcgggccgcttatccgcaaaacgactcgtcttgcggatcttcctgggatcttcgcagacggcgaggcgtggaagtgcggcaatcctcaaaaaagtgtgtatgacgtagacgtactgggctcgcccgtaggggaaggggcactcttcgttggggtaactcacctgcgtgcgggtaacgtgggcgatgagttctttatgactcgcggtcattttcatcagcgccgcgaacagggcgaggtctattttggcctgcgcggatgtggcttgttgctgctgcaaacggaggcgggcgacgcgcggcttgagcaggtgacggctggctccgtgcatattattcctccttttacagcgcatcgtttgattaacactggcaacgagacgctatcctcccttgccgtctggccgagcattgcgggacacgactatgcggcgctggcagagggcttcaccctgcggatctttgcctctggggaaggttacgaggtgcgccatggctaa

SEQ ID NO: 113954 - DNA, 951 bp, Enterobacter cloacae
atgcagatcctgttggctaacccgcgcggcttttgcgccggtgtagaccgcgctatcagcattgttgaaaacgcgctggagatttacggcgcgccgatttacgtgcgtcacgaagtggtgcacaaccgttacgtggtcgacagcctgcgcgagcgcggtgcgatttttatcgagcagatcagcgaagtgccggacggcgcaatcctcatcttctccgcgcacggcgtctctcaggcggtacgcaacgaggcgaaaagccgcgatctgaccgtattcgatgccacctgtccgttagtgacaaaagtgcatatggaagtggcgcgcgccagccgtcgtggtgaagagtcaattctgattggtcacgctggtcacccggaagttgaaggcaccatgggccagtacagcaacccggaagggggcatgtatctggttgagtcaccggaagatgtctttacgctggacgtgaaaaacgaagcccgtctgtcatttatgacccagacgacgctttccgtagacgacacctcagacgtgattgacgccctgcgccagcgcttcccgaaaatcgtcgggccgcgcaaagatgatatctgctatgcaaccaccaaccgtcaggaagccgtacgcgccctggctgaacaggcggatgtggtgctggtggtcggctcgaaaaactcctctaactccaaccgactggccgaactggcgcagcgtatggggaaagcagcttttctgatcgacgacgcaacggacattcaggaagcgtgggtgaaaaacgcggcctgcgtcggtgttaccgcaggcgcttcagcgccggatatcctggtgcaaaacgtcattgcccgcctgcaagagctgggcggtggcgaagcggtgccgctggaaggccgtgaagagaacattgtcttcgaagtgccgaaagagctgcgaatcgacgcccgcgaagtggaataa

SEQ ID NO: 113955 - DNA, 450 bp, Enterobacter cloacae
atgtctaaatccgtacagagcaacagcgcggttctcgttcatttcacgctgaagctggatgacggctccacggccgaatccacccgcaacaatggcaaaccggcgctgtttcgtctgggtgacacctccctgtctgaaggccttgagcagcagcttctgggtctgaaagagggcgagaaaaaagcgttttcgctggagccggatgcggcatttggcgtgccaagcccggacctgatccagtatttctcgcgtcgtgagtttatggatgcgggtgaaccagaaatcggggcgattatgctctttaccgctatggacggcagcgaaatgcctggcgtgatccgagaaatcaacggcgattctatcaccgtcgatttcaaccatccgcttgccgggcgtaccgttcattttgatgtcgaagtgctggagatcgatccggcactggaggagtaa

SEQ ID NO: 113956 - DNA, 501 bp, Enterobacter cloacae
atgagtaaaactctctgttcaacaggactgcgctggctgtggctggtggtggtggtgctgattattgatttgggcagcaagttcctgatcctccagaatttcgctctgggggatacggtcccgctgtttccgtcgcttaacctgcactatgcccgcaactatggtgcggcgtttagtttccttgccgacagcggtggctggcagcgctggttcttcgcgggtatcgctatcggtatctgcgtcgtgctggcggtgctgatgtaccgctcaaaggccacgcaaaagctgaataacatcgcctacgcgctgatcattggcggcgcgctgggtaacctgtttgaccgcctgtggcacggctttgtggtcgatatgatcgatttctacgtcggcgactggcacttcgcgacctttaacctcgccgatagcgcaatatgcgttggtgcggcgttaatcgtgctggaaggcttcttgcctaaaccggccgcgaaagagcaggcgtaa

SEQ ID NO: 113957 - DNA, 2817 bp, Enterobacter cloacae
atgagtgattataaatcaaccctgaatttgccggaaacagggttcccgatgcgcggcgatctcgccaagcgtgaaccgggaatgctggcgcgttggaccgatgatgacctgtacggcatcattcgtgcagccaaaaaaggcaaaaaaaccttcattctgcatgatggccctccatatgcgaatggcagcattcatattggtcactctgtaaacaagattctgaaagacattatcgtgaagtccaaaggactcgcgggatatgactcgccttacgttccgggctgggactgccatggtctgccgatcgagctgaaagttgagcaagagtacggtaagccgggtgagaagttcaccgccgcagaattccgtgcgaaatgccgcgaatacgctgccacccaggttgacggtcagcgcgctgacttcatccgtctgggcgtgctgggtgactggtcgcatccgtacctgaccatggacttcaaaaccgaagccaacatcatccgagcgctgggtaaaatcatcggcaacggtcacctgcacaaaggcgcgaagccggtgcactggtgcgtcgactgccgctctgcgctggcagaagcggaagtggagtattacgacaaaacctcgccttctatcgacgtggccttcgaagcggtcgatcaggatgcgatcaaagctaaatttggtctgcttggtgtaagcggcccgatctctctggtgatctggaccaccaccccgtggacgctgcctgctaaccgcgcgatctccctctctggcgagtttgagtatgcgctggtgcagattgatggccgtgcggttatcctggcgaaagacctggtcgaaagcgtgctgaaacgcgcgaacatcaccgattacaccgtgctgggcaccgtaaaaggtgacgcgctggaactgatgcgcttcaaacacccgttcctggacttcgacgttccggcgattctgggcgaccacgtcacgctggaagcgggtaccggtgcggtacataccgccggtggccacggtcctgacgactacaacatcagcctgaagtacggcctggaaatcgctaatccggttggcccggacggctcttacctgcctggcacctacccggcgctggacggtatcaacgtctttaaagctaacgacatcatcgttgatatgctgcgcaccagcggcgcgctgctgcacgttgagaaaatgcagcacagctatccgtgctgctggcgtcacaagaccccgatcatcttccgtgcaaccccgcagtggtttatcagcatggaccagaaaggcctgcgcgcgcagtctctgaaagagatcaaaggcgtgcagtggatccctgactggggccaggcgcgtatcgaatccatggtggctaaccgtcctgactggtgtatctcccgtcagcgcacctggggcgtgccgatgtctctgttcgtacataaagagacgcaggagctgcacccgaacactctggaactgatggaagaagtggcgaagcgcgtcgaagttgacggcattcaggcgtggtgggatctcgacgcccgcgacatcctgggcgctgacgcagacagctacgagaaagtgccggataccctggacgtgtggttcgattccgggtctacccactcctccgtggttgatgtgcgtccggagtttgctggtcacgctgccgatatgtatctggaagggtctgaccaacaccgcggctggttcatgtcatcgctgatgatctccaccgccatgaagggtaaagcaccttaccgccaggtattgacccacggcttcaccgtggatggtcagggccgtaagatgtccaaatctatcggtaacaccgtttctccgcaggacgtgatgaacaaactgggcgcggacattctgcgtctgtgggtggcctctaccgactacaccggcgaaatggcggtctctgatgagatcctgaaacgtgctgctgacagctatcgtcgtattcgtaacaccgcgcgcttcctgctggcgaacctgaacgggttcgatccggtaaaagacatggtgaagccggaagagatggttgtgctcgatcgctgggcggtaggctgcgcgaaagcggcgcaggaagatattcttaaagcctatgagtcttacgacttccacgaagtggtgcagcgcctgatgcgcttctgctccatcgagatgggctcgttctacctcgacatcatcaaagaccgccagtacaccgcgaaagcggacagcgtggcgcgtcgtagctgccagaccgcgctgttccacatcgcagaagcgctggtgcgctggatggcaccgatcatgtccttcaccgcggatgaaatctggggctacctgccgggcgaccgtgagaagtatgtcttcaccggcgagtggtacgaaggtctgttcgacctctccagcactgaagcaatgaacgatgccttctgggacgagctgctgaaagtgcgcggcgaagtgaacaaggttatcgagcaggcgcgtgcggacaagaaagtcggtggctctctggaagcgacggtgaccctgtacgccgaaccggagctggcggccaaactgaccgcgctgggcgatgaattacgatttgtcctgttgacctccggtgcgaaagttgcggattatgccgaagctactgctgatgctcagcagagcgagctgctcaaaggcctgaaggtcgcactgagcaaagccgacggtgagaaatgcccgcgttgctggcattacaccaccgatgttggccaggtggcggaacacgcagacatctgcggacgctgtgtaagcaacgtcgccggtgacggcgaaaaacgtaagtttgcctga

SEQ ID NO: 113958 - DNA, 927 bp, Enterobacter cloacae
atgaagctgatacgcggcatacataatctcagtcaagccccgcacgggtgcgtgctgaccattggtaattttgacggcgtgcatcgtgggcatcaggcgctgttgcagggattgcgtaaagaaggcgaggcgcgaggcttgcccgtcgtggtgatgattttcgagcctcagccgctggagctgtttgcaggcgagaaatcccccgcgcggctgacgcgtctgcgtgagaagttacgctacctggcggagtcaggggtggactacgtcctgtgcgtaaggttcgaccgtcgttttgccgcgctgaccgcacaaaattttgtcagcgacctgttggtcaggcagcttggcgtgcagtttctcgccgtgggcgatgatttccgctttggcgctggtcgtcagggcgatttcttgttattacagaaggctggcctggagtacgggtttgacgtcaccagcacgatgaccttctgtgagggcggcgtgcgcgtaagcagcacggcggtacgtcaggcgctggcgaatgatgaactggacacggcagaaacgctgctgggtcacccgttcacaatttcaggtcgcgtggtccatggcgatgcgctgggccgcacgataggtttcccgacggcgaatataccgctgcgtcgtcaggtctccccggttaaaggggtctatgcggtggaagtggcaggactgggcgagaagcctttctacggcgtcgccaacattggcacacgtccaacggttgccggtgtgcgtcaacagttagaagtacacctgctggacgttgtaatggacctgtatggtcgccatatagatgtgatactgcgtaaaaaaatacgcaatgaacagcgattcgcttcgctggacgaacttaaggcgcaaatcgcgcgagatgaattaacggcccgcgagttttttgggctttag

SEQ ID NO: 113959 - DNA, 264 bp, Enterobacter cloacae
ttggctaatatcaaatcagctaagaaacgtgccgttcagtctgaaaaggctcgtaagcacaatgcaagccgtcgctctatgatgcgtactttcatcaagaaagtatacgcagctatcgaagctggcgacaaagctgcagcgcagaacgcatttaacgaaatgcaaccaatcgtggatcgtcaggctgctaaaggtctgatccacaaaaacaaagcagcgcgtcataaagcaaacctgaccgcgcagatcaacaaactggcttaa

SEQ ID NO: 113960 - DNA, 900 bp, Enterobacter cloacae
atgtctcatttgaattacaaccatctttattacttctggcacgtttataaacagggctcggtcgtgggggcggcagaagcgctttacctgacgccacaaaccattaccgggcaaatcaaagccctggaagagcggttacagggcaagttgttcaagcgcaagggccgtgggattgagcccagtgagttgggcgagctggtgttccgctatgcggataaaatgttcaccctgagccaggagatgctggatatcgtcaactaccgcaaagagtctaacctgctttttgacgtgggggtggcggatgcgctgtccaaacggctggtgagtggcgtgctggatgcggcggtggtggaagatgaacagatccatttacgctgctttgagtccactcacgagatgctgctggaacagctgagccagcataagctggatatgattatttcggattgccctatcgattccacgcagcaggaaggcttgttctcggtgaaaattggcgaatgcggcgtcagtttctggtgcatcaatccgccaccggaaaaaccgtttcctgcctgcctggaagagcgccgcttgctggtgccgggtcggaggtccatgctcggacggaagctgctgaactggtttaactcgcaggggctgaacgtagaaattctcggtgagttcgacgatgcggcgctgatgaaagcctttggcgaagcgcataacgctatcttcgttgctccaacgctgtacgcgcacgatctctattcagacgacaaaataaccgagatcggcagggtggataacgtgatggaagagtatcacgccatattcgccgaaaggatgattcagcatccggctgtgcagcgaatctgcaatcgcgactattcggcgctttttacgccgccggcaatctga

SEQ ID NO: 113961 - DNA, 1176 bp, Enterobacter cloacae
gtgaaattactacaccgtttctttagcagtgaggcatccggcggcgtcatcctgattattgctgctgcggccgctatgctgctcgccaatatgggcatgacgcgcgatctctatcacgcatttctggaaacgcccgtcgagctgaaagtcggggcgctggaaattaacaagaacatgctgctgtggatcaacgatgcgctgatggcggtgttcttcctgctggtgggtctggaggttaaacgtgagctggtgatcggttcgcttgccagccgtcagcgcgcggcgtttccggtgatcgcggcgattggcgggatgatcgttccggcgttgctctttctcgcgtttgcgtggcaggatccggttgcgcgtgacggctgggcgatcccggctgcaacggatatcgcgtttgcgctcggggtcttagccttgctcggtagccgcgtcccggtagcactgaaaattttcctgatggcgctggcgattatcgatgatctgggcgctatcgtgattatcgcgctgttctacaccagcgatctgtcggttctgtcgctgagcgtggcggccgtggctattgtggtgctggccttgctgaacgtcttcaacgtccgacgtacgggtatttatattctggtgggcatggtgctgtggacggcggtgctgaagtctggcgtgcatgccacgctggcgggcgtcatcgttggcttctttattccgctgaaggagcaggacggcaaatcgccagccagacagctggagcatgtgcttcatccgtgggtgggctttatgatcctgccgctgtttgcgtttgccaacgcgggagtttccctggccggggttactctggacggactcacctccgtgctgccgctgggtatcatcgccggtctgtttatcggtaagccgctgggtatcagcctgttctgctggctggcgctgaagctgaagctggcgtcattgccaaacgggaccacctttagccagattatggccgtcggcgtgctgtgcggtattggattcaccatgtcgatctttatctcgacgctggcgtttggcgcaaacgcgcctgagcttatcgtctgggcaaaactcggcattctcatcgggtcattactggccgcagtcattggttataccttgttgaaggtgaaattgtccggacaggctgtccaggcataa

SEQ ID NO: 113962 - DNA, 1146 bp, Enterobacter cloacae
atggcaaagcaagactattacgagattttaggcgttccgaaaactgcggaagagcgtgaaatcaaaaaggcgtataagcgcctggccatgaaattccaccctgaccgtaatcagggtgacaaagaggctgaagccaaatttaaagagattaaagaagcctacgaagtcctgaccgatgcacaaaaacgtgcggcctatgatcagtacggtcacgcggcctttgaacagggcggcatgggcggcggtggatttggtggcggcggcttcggcggcggcgctgatttcagcgatatctttggtgatgtatttggcgatatcttcggcggcggacgtggtcgtcagcgcgcggcgcgcggcgcagacctgcgctacaacatggagctgacacttgaagaagcggttcgcggcgtcaccaaagagatccgtattccgacgctggaagagtgtgacgtttgccacggcagcggcgcgaaagcggggactcagccacagacctgcccaacctgtcacggttccggtcaggtgcagatgcgccagggcttcttcgcggtgcagcaggcctgtccgcactgtcatggtcgcggtacgctgattaaagatccgtgcaccaaatgccacggtcacggtcgcgtggagaaaaccaaaacgctgtccgttaagatcccggcaggcgtggatacgggcgaccgcatccgtctggcaggtgagggtgaagccggcgagcacggcgcaccggcaggcgatctgtacgttcaggttcaggtgaagcagcacgccatcttcgagcgtgaaggtaacaacctgtactgtgaagtgccgatcaactttgcgatggcggcgctgggtggcgaaatcgaagtgccgacgctggacggtcgcgttaacctgaaaatccccggcgaaacccagaccgggaagctgttccgcatgcgcggcaaaggcgttaaatccgttcgcggtggcgcgcagggtgacctgttatgccgcgtggtcgtggaaacgccggtcggcctgaacgataagcagaaacagctgctgaaagagcttcaggagagttttggtggcccgacgggtgagaaaaacagtccgcgctccaaaagcttcttcgatggcgtcaaaaaattcttcgacgatttaacccgctaa

SEQ ID NO: 113963 - DNA, 1914 bp, Enterobacter cloacae
atgggtaaaattattggtatcgacctgggtactaccaactcttgtgtagcgattatggatggcactactgcacgtgtgctggagaacgccgagggcgatcgcaccacgccttctatcattgcttatacccaggatggtgaaactctggttggtcagccggctaaacgtcaggccgtgacaaacccgcaaaacaccctgtttgcgatcaaacgcctgattggccgccgcttccaggacgaagaagttcagcgtgacgtttccatcatgccttacaaaatcatcgcagccgataacggcgatgcatggcttgatgtgaaaggcaccaaaacggcacctccgcagatctctgctgaagtgctgaagaaaatgaagaaaaccgcggaagattacctgggtgagccggtaactgaagctgttatcaccgtacctgcttacttcaacgatgctcagcgtcaggcaaccaaagatgctggccgtatcgcaggtctggaagtaaaacgtatcatcaacgaaccaaccgcagcagcactggcttacggtctggataaagaagttggcaaccgtactatcgcggtttacgacctgggtggtggtaccttcgatatctctattatcgaaatcgacgacgttgacggcgaaaaaaccttcgaagttctggcaaccaatggtgatacccacctgggtggtgaagacttcgatacccgtctgatcaactacctcgttgacgagttcaagaaagatcagggcattgacctgcgtaacgacccgctggccatgcagcgactgaaagaagccgctgagaaagcgaagatcgagctgtcttccgctcagcagaccgacgtgaacctgccgtacatcaccgcagacgcgaccggtccaaaacacatgaacatcaaagtgacccgtgcgaaactggaaagcctggtagaagacctggtgaaccgttctatcgagccactgaaagttgcattgcaggacgctggcctgtccgtgtctgacattcaggacgttatcctggtaggtggtcagactcgtatgccaatggttcagaagaaagtggctgaattctttggtaaagagccacgtaaagacgtgaacccggacgaagcggttgctatcggtgctgcggttcagggtggtgttctgacgggtgaagtaaaagacgtactgctgctggacgttaccccgctgtctctgggtatcgaaaccatgggtggcgtgatgactccgctcatcaacaaaaacaccactatcccgacgaaacacagccaggtgttctctaccgctgaagacaaccagtctgcggtaaccatccatgtgattcagggtgagcgtaagcgcgcggcggataacaaatctctgggtcagttcaacctggacggtattaacccggcaccacgcggcatgccacagatcgaagtcaccttcgacatcgatgctgacggtatcctgcatgtgtctgcgaaagacaaaaatagcggtaaagagcagaagattaccatcaaggcatcttctggcctgaacgaagcggaaatcgaaaaaatggttcgtgatgccgaagctaacgcggaatccgaccgtaagttcgaagagctggttcagacccgtaaccagggtgaccatctgctgcacagcacccgtaagcaggttgaagaagcgggcgataaactgccagcggaagacaaaactgcgatcgaaactgcactgagcgcgctggaaacgtctctgaaaggcgaagacaaagcggacatcgaagcgaagatgcaggagctggcacaggtttctcagaagctgatggaaatcgctcagcagcagcacgcacagcagcaggcgggcgctgatgcttcccagaacaacgcgaaagacgacgatgttgtcgacgctgagttcgaagaagtgaaagacaaaaaataa

SEQ ID NO: 113964 - DNA, 567 bp, Enterobacter cloacae
atgggcaacactaagttggctaatccggctccgctgggcctgatgggttttggcatgaccaccattctgctgaacctgcacaatatcgggatgttcccgatggacggcattatcctggcgatgggcattttttacggcggtatcgcacagatctttgcgggcctgctggaatataagaaaggcaacaccttcggcttaaccgcctttacctcttacggttccttctggctgactctggtcgcaattttgttgatgcctaaaatgggcctggcagaggcggcaaacgcccatttcctgggcgtgtacctgggactgtggggcgtgttcaccctgttcatgttcttcggtacccttaaggcgaaccgcgcactgcaattcgtcttcctgagcctgaccgtactgttcgctctgctggccatcggtcacctggcggataacgaaggcatcgttcacgttgccggctgggtaggtctggtttgcggcgcaagcgcaatctacctggccatgggtgaagtgctgaacgagcagttcgaccgcaccattctacctattggtgaaaaacactga

SEQ ID NO: 113965 - DNA, 1323 bp, Enterobacter cloacae
atgtcacataacacccgacctctgaatcgacaggactgcaaaaccctcacgctcgctgccctgggcggcgcgctggagttttacgacttcatcatctttgtcttcttcgccgccgttgtgggggcgctgtttttcccggcggatattccggaatggctgcgtcaggtacaaaccttcggcattttcgctgccggctatctggcgcgtccgctgggcggcattgtcatggcgcactttggcgatctggtcgggcgcaagaagatgtttaccctcagcatcctgcttatggccgtgccgacgctggcgattgggcttttgcctacctatgagtcgatgggcattatcgccccgttattgctgctgctgatgcgtattctccagggcgcggccatcggcggggaagtgccgggcgcctgggtgtttgtcgctgagcacgtcccggtgcgccgcatcggcattgcgtgcggaacgctgaccgcagggctgacgatcgggatcctgcttggctccgtggttgcaaccatcatcaataccagcatgacgcaacaggccgttcacgactggggctggcgtataccgttcctgctgggcggggcgtttgggctggtggcaatgtacctgcgacgctggttgcaggagacgccaatatttctggaaatgcagcagcggaaggcgctggcgcaagaactgccggtgaaaaccgtagtagtgcggcataaaaaagcggtagtggtgtcgatgcttctgacctggctgctgtctgcggggatcgtggtggtcattttgatgtcgccggtctggctgcaaaaacagtacggttttgcgcctgccgtgacgttacaggcgaacagtatcgcgacaattatgctctgctttggttgtctggccgccgggctggcggcggatcgtttcggcgcaagcgcgacctttattgtcggcagtttgcttctggccgcgtcgagctgggcattttatcatcttgcgggcacccatcctgaacagctgttcctgctgtacggtgtcgtcgggctgtgcgtgggcgtcgttggcgccgtaccgtacgtaatggtccgcgccttcccgccggaggtacgcttcactgggatctctttctcttataatgtctcgtatgccattttcggtgggctgaccccgattgtggtgacggtgttgatgggggtgtcaccccttgcacctgcgtggtacgtgctggcgttatcgctgatgggactggttttgggggtgtggcttcgccagtcagagggacgtcgtgcccgcgacgcgggcacgacagagggatcagtgtttttcaccaataggtag

SEQ ID NO: 113966 - DNA, 588 bp, Enterobacter cloacae
atgaataccttacgcatcggcttagtgtcgatttctgaccgcgcctccagcggtgtttatcaggataaaggcatccctgctctggaagcgtggctgggcagcgcgctcactaccccgtttgagatccagactcgcctgatcccggacgagcagccgatcatcgagcaaaccctgtgtgaactggtggatgagatgagctgccacctggtgctgacgacgggcggaaccggccccgcgcgccgcgatgtaacgccggacgcgacgctggctatcgccgatcgtgaaatgccgggcttcggtgagcagatgcgccagatcagtctacactttgtcccgacggccattctttcccgtcaggtcggggtgatccgcaaacaggcgctgatcctgaacctgccggggcagccgaagtcgataaaagagacgttggaaggggtaaaagccgaggacggcagcgttatcgtccacggtatctttgcaagtgtaccgtattgtatacaactgcttgacggtccgtatgtggaaactgacggcaacgtggtagcagcatttcgccctaaaagcgctcgccgcgaaacaatctcctga

SEQ ID NO: 113967 - DNA, 954 bp, Enterobacter cloacae
atgacggataaattgacctcccttcgtcagttcaccactgtcgtcgctgacaccggagatatcgcggcaatgaagctgtaccagccgcaggatgccacaaccaacccttctctgatccttaacgccgcgcagatccctgagtatcgcaaactgatcgacgaggcggtgacctgggcaaaagcacagagcaatgaccgcgcgcagcaggttgtggatgctactgacaaactggcagtgaacatcggtctggaaatcctgaagctcgttcctggccgtatctctaccgaagttgatgctcgcctgtcctacgacaccgaagcgtctatcgcaaaagcaaaacgcctgatcaaactgtacaacgatgcgggcatcagcaatgaccgtatcctgatcaaactggcgtctacctggcagggcatccgcgctgctgagcagctggaaaaagaaggcatcaactgtaacctgactctgctgttctccttcgcgcaggcgcgtgcatgtgccgaagctggcgtatacctgatttctccgttcgtgggccgtattctggactggtacaaagccaacaccgacaagaaagagtacgcggcgtctgaagacccaggcgtgatttcagtgactgaaatctacgaatactacaaacagcacggctatgagaccgttgttatgggcgcaagcttccgtaacgtcggcgaaatcatcgagctggctggctgtgaccgcctgaccatcgctcctgcgctgctgaaagagctggcagaaagcgaaggtgctatcgagcgtaaactgtcttacaccggcgaagtgaaagcacgccctgagcgcatcaccgagtccgagttcctgtggcagcacaaccaggatccaatggcggtagacaagctggcggacggtatccgtaagtttgctatcgaccaggaaaaactggaaaaaatgatcggcgacctgctgtaa

SEQ ID NO: 113968 - DNA, 1434 bp, Enterobacter cloacae
gtgcctgatttctttttctttatcaacgaagtcctctggggttcgatcatgatatacctgctttcaggagcaggtatctggtttacctggcgcagcggtctgattcagtttcgctatatccgcaaatttggcagaagtctgaaaaacagcgtcaccccacagccgggcggcctgacctcgtttcaggcgctctgtaccagcctggccgcgcgcgtcggcagcggtaacctggccggtgtcgcgctggcgatcggcgcgggcggtccgggcgcggtattctggatgtgggtgacggcgattatcggtatggccacctcctttgctgaatgctcgcttgcgcaactctacaaagaaaaagacggcaaaggtcagtttcgcggcggtcccgcctggtatatggctcgcgggctgggaatgcgctggatgggcgttctgttctcgatctttttgctgattgcctatggccttattttcaataccgttcaggcaaattccgtcgcccacgcgctgcgctttgccttcaattgtccggagtggctgacgggcggcgcgcttgcccttctcaccctgctgaccattgtgaccgggctcaaaggggttgcccgcctgatgcagtggttggttccgctgatggcgctgctgtgggtgtccaccagcctgatggtatgcgcgatacatatcgacgaggtgccgaacgtcatcgtcaccattttccaaagcgcgttcggctggcgcgaagcggcttccggcgcgctgggttacacccttagccaggcactcactgcgggttttcagcggggtatgttctccaacgaagcgggaatgggctccacgccgaatgccgccgcagcggccgcatcctggcccccacatcccgccgcgcagggcattgtacagatgattggcgtcttcacagacaccattgttatctgctccgccagcgcgatgataatgctgctggccggtgccgctgaacaaccgtccggtagtacggcaggcattcattgggtacaacaggcgctggtctccctcgtcggcagctggggcgcgggccttgtcgcacttgtcgtgggactttttgcctttagttccattgcggtgaactatatctatgccgaaaacaaccttatcttcctgaaagttgactcgcgtctggcccgcaacatccttcgcgcgggcgtgctggcgatggtgtttgtaggttgcctgctcagcatgccgatgatctggcaaatagcggacgtcattatggcgctgatggccatcacgaacctgacggccattttgctgctttcaccggttgtggcgctgatcgcgcgcgattatctgcgtcagcgcaagctcggcgtacagcccgtctttgacgcctcacgctatcccgaaatcgagtcacaaattgcccctggcacctgggatgatttgccgcggcaataa

SEQ ID NO: 113969 - DNA, 774 bp, Enterobacter cloacae
atgctgattctgatttcacctgccaaaacgctcgactaccagagcccgctcgccactgagcgttatacccagccggaattgctggactactcgcaacagctgatccacgaggcgcgtaagctttcggctccgcaaatcgcttcgctgatgagcatcagcgataaactcgccgacctgaatgccacccgttttcatgagtggcagcctgacttcacgcccgccaacgcccgccaggcgctgttggccttcaaaggtgacgtctacactggcctgcaagcagaaacgtttagcgaagccgatttcgattttgcccagctgcatctgcgcatgttatccggcctgtacggggtgctgcgaccgctggatctgatgcaaccgtatcgtctggagatgggtatccgcctggaaaacgctaaaggtaaagatctgtaccagttctggggcgatgtcattaccgacaagcttaacgcggcgctgcaagcccagggggacaacgtggtgatcaacctggcctccgatgagtacttcaaatcggtgaagccgaagaagctggatgcggacattatcaagccggtattcctcgacgagaaaaacggcaaatttaaagtgatcagcttctacgccaaaaaagcgcgcggtctgatgagccgcttcatcattcaaaaccgtctgacgaagccagagcagctcaccggctttaacagtgaagggtatttcttcgacgaggcatcgtcaggaaaaaacgagctggtgtttaagcgtcacgagcaataa

SEQ ID NO: 113970 - DNA, 288 bp, Enterobacter cloacae
atgtctacactgaaacctgcacttatcgcgctttcactgatgctggtcgctcccatggcggtgcaggcagctgagatcaccctcgtgccagcggtaaaactgcaaattggcgatcgggataataacgggcactactgggatggcggccgctggcgcgaccatgactggtggaaagcgcactatgactggcgcgataaccactggcgtccgcacgatgaacatcgcgatcgtgacgatcaccaccgtcatgacgatcgtcgcccgggcccggaccggaagcaccattaa

SEQ ID NO: 113971 - DNA, 1287 bp, Enterobacter cloacae
atgaaactctacaaccttaaagatcataacgagcaggtcagcttcgcgcaggcggtaacgcaggggcttggcaaaaatcaggggcttttcttcccccacgacctgccggaatttcagctgaccgaaatcgatgagctgctgaagcaggactttgtcacccgcagcaccaaaattctgtctgcctttatcggcgacgaaatcccgcaggagctgctcgaagagcgcgtgcgtgcggcgtttgctttcccggcgccggtgaagcaggtggagcctgacgttggttgtctggagctgttccacggtccgacgctggcgttcaaagatttcggcggtcgctttatggcgcagatgctgacccacatcagcggcgacaaaccggtgaccattcttaccgcgacttcaggcgataccggagcggcggtggcccatgcgttctacggcctgaaaaacgtccgcgtggtgatcctctatccgaaaggcaaaatcagcccgcttcaggaaaaactgttctgcacccttgggggcaacattgaaaccgtggcgatcgacggcgatttcgatgcctgtcaggcgctagtgaagcaggccttcgatgacgaagagctgaaggcggcgctggggctgaactctgccaactccatcaacatcagccgtctgctggcgcagatctgctactacttcgaagcggtggcgcagctgccgcaggacgcgcgcaatcagctggtggtttccgtgccaagtgggaacttcggcgacctgacggcaggcctgctggcgaaatcactcggcctgccggtgaagcgctttatcgccgccaccaacgccaacgacaccgtgccgcgtttcctgaaggacggaaaatgggcgccgaacgcgactcaggccacgctctccaatgcgatggatgtgtcacagcctaacaactggccgcgtgtggaagagctgttccgccgtaaggtctggcgtctgggcgatctgggttacgcagcggtgacggacgaaaccactaaagccaccatgcgcgagctgaaagcggtgggctatacctctgagccgcacgcggcgattgcctatcgtgccctgcgcgatcagcttcaaccgggtgagtatggcctgttcctcggcaccgcccatccggccaagttcaaagagagcgtggaagcgatcctgggggaaacgctgccgctgccaaaagagctggccgatcgcgccgacctgccgctgctgtctcatgagctgcccgcagactttgccgcgctgcgtaagctgatgatgacccgagcgtga

SEQ ID NO: 113972 - DNA, 930 bp, Enterobacter cloacae
atggttaaagtatatgccccggcttccagcgccaatatgagcgtcggatttgacgtgctgggcgcggcggtcacaccggtggacggttcgctgctgggcgatacggttacggttgaggcggcagagcgcttcagcctgaataacatcggccgcttcgccagtaagctgccgtctgaaccgcgcgagaatatcgtttatcagtgctgggaacgcttctgtcaggagatcggcaaaaacgtgccggtcgccatgacgctggaaaagagcatgccgattggttcggggctgggctcgagcgcctgctcggtggtcgccgcgctggtggcgatgaatgagcattgcggcaagcagctgaacaacaaccgtctgctggcgctgatgggcgagctggaagggcgcatctccggcagcattcattatgataacgtggcgccgtgcttccttggcggcatgcagctgatgattgaagaaaatggcatcatcagccagcaggtgccagggtttgatgagtggctgtgggtgctggcctatccgggcattaaagtgtctaccgccgaagcgcgtgcgatcctgccggcgcagtatcgtcgtcaggactgtatcgcccacgggcgtcatctggcgggctttattcacgcctgctacacccgtcagccgcagctggcggcgaaactgatgaaagacgtcattgccgagccgtatcgcacgaagctgctgccgggctttaacgaagcgcgacaggcatccatggatatcggcgcacaggcgtgcggcatctccggctccggcccgacgctgttcgccttatgcgacaagccagacaccgcgcagcgcgtggcggactggctctctaaacactacctgcaaaatcaggaaggctttgttcatatttgccgtctggacacggctggcgcacgagtactgggataa

SEQ ID NO: 113973 - DNA, 2463 bp, Enterobacter cloacae
atgcgagtgttgaagttcggcggtacgtcagtggcaaatgcagaacgttttctgcgtgttgccgatatcctggaaagcaacgccaggcaggggcaggttgccaccgtgctctctgccccggccaaaatcacgaaccacctggtggcgatgattgaaaaaaccatcggtggtcaggatgcactaccgaacatcagcgacgccgagcgtatctttgccgatctgcttcaggggctggccgacgcccagcctggtttcccgctggcgcagctgaaaagcaccgttgaacttgaatttgcccagattaaacacgttcttcacggtatcagcctgcttggtcagtgcccggacagcatcaacgcggcgctgatttgccggggtgaaaaactctctatcgccatcatggctggcgtgctggaagcgcgcggtcaccacgtgacggtcatcgatccggttgaaaaactgctggctgtgggccactaccttgaatccaccgtcgacattgccgagtcgacacgccgtattgcggcgagcaaaatcccgtctgaccatatgatcctgatggcaggctttaccgccggtaacgagaagggcgaactggtggtgctggggcgtaacggctctgactactccgctgccgtgctggcggcctgtttacgcgcagactgttgtgagatctggactgacgtcgacggcgtttatacctgcgatccgcgccaggtgccggacgccaggctgctgaagtcgatgtcgtaccaggaagcgatggagctttcctacttcggcgctaaagttcttcacccgcgtaccatctccccgattgcccagttccaaatcccttgcctgattaagaataccggtaaccctcaggcgccgggcacgctgattggcgccagcgcggatgaagatgacctgccggtgaaaggcatttctaacctcaataacatggcgatgttcagcgtctccggcccggggatgaagggcatggtcggcatggcggcacgcgtctttgccgctatgtcccgcaacgggatctctgtggtgctgatcacgcagtcttcttccgaatacagcatcagcttctgcgttccgcagggtgattgcctgcgtgcccgccgcgcgctggaagaagagttctatctggagctgaaagaagagctgctggagccgctctcgattcaggaacgtctggcgattatctctgtggtcggcgacggcatgcgcaccctgcgcggtatctccgccaaattctttgccgcgctggcgcgggccaatatcaatatcgtggcgattgcccagggctcatcagagcgttccatttccgttgtcgtggataacgatgacgccactaccggcgtgcgcgtggtgcatcagatgctgttcaacaccgaccaggtgattgagctgttcctggtgggcgtcggtggtgtcggtggcgcgctgctggagcaggtgaagcgccagcaggagtggcttaagaagaaacatatcgatttgcgcgtttgcggcattgcgaactcgaaagcgttgctgactaacgtccacggtctgaatctggaaaactggcaggcggagctggaagaggcgaaagagccatttaacctgggccgcctgatccgcctggtgaaagaatatcacctgcttaacccggtgattgttgactgtacctccagccaggcggtggccgatcagtacgccgacttcctgcgcgaagggttccacgtggtgacgccaaacaaaaaggccaacacctcgtcgatggattactatcaccagctgcggctggcggcgagtaagtcgcgccgtaagtttctgtatgacaccaacgtgggcgcgggcctgccggtcatcgagaacctgcaaaacctgctgaacgcgggcgacgaactacagcgtttctccggcatcctctccggctccctgtcgtttatcttcggcaagctggacgaagggatgagcttgtcggaagccacccgcgccgcgcgcgagctgggctacaccgagccggatccgcgcgacgacctctccggcatggacgtggcgcgtaagctgctgatcctggcgcgcgaaactggccgcgagctggagctttcggatatcgtgattgagccggtgctgccagcagaatttgatgacagcggtgacgtcagcgcctttatggccaggttgccgcagcttgacgacgcctttgccgcacgcgttgcgaaagcccgtgatgaaggtaaggtattgcgctatgttggcaacattgaagaagacggcgtctgccgggtgaagattgccgaagtggatggcaacgatccgctgtacaaggtgaaaaacggcgagaacgccctggcgttctacagccattattatcagccactgccgctggtgcttcgcggctatggcgcagggaatgatgtgacggcggcaggcgtgtttgccgatctgctgcgtaccctgtcatggaagttaggagtttaa

SEQ ID NO: 113974 - DNA, 693 bp, Enterobacter cloacae
atgcatctgtcgattgtgctggtggcaccagcaagagctgaaaatattggcgctgcggcgcgtgccatgaagactatggggtttaccgatttgcgtattgtggacagcacggcgcatctggagcctgctgcgcgctgggtggcgcacggttcgggtgatattctcgataatataaccacttacgctacgctcgccgacgcactccacgatatttcgtttaccgtcgcgacgaccgcgcgcagccgggcgaagtttcactattacgccacgcctgctgaactggtgccgatgctggaagagaaaagcctgtggctggagaaagccgcgctggtgtttgggcgagaagattccgggctgactaacgaagagctggagctggctgacgtgctgacgggcgcgccgatggtggcggattatccgtcactcaatctggggcaggcggtgatggtctattgctatcaattagcatccttaatacaaatttctcagccaccggtgacagtttcggatgaaaaccagctggcggcactgcgtgttcgtgcagataagcttcttgagcagttgggcgtcgctgacgatcaaaaaatggtggactggttacagcagcgcctggggcgtcttgagcagcgcgacacggcaatgctgcaccgattgcttcatgatattgaaaaaaaaattagccgagtaaaatag

SEQ ID NO: 113975 - DNA, 717 bp, Enterobacter cloacae
atgcagaccccgcacattcttatcgttgaagacgagttggtaacacgcaacacgttaaagagcattttcgaagcagaaggctacgatgtctttgaagcgaccgatggcgcagagatgcatcagatcctttctgaaaatgatatcaacctggtgattatggatatcaacctgccgggcaaaaacgggcttcttctggcgcgcgaactgcgtgaacaggcgaacgtcgcgttgatgttcctgacgggccgtgacaacgaggttgataaaattcttggtctggaaatcggcgcggatgactacatcaccaagccgttcaaccctcgcgagttaaccattcgtgcacgcaacctgctgtcccgcaccatgaatctgggtacggtaagtgaagagcgtcgtagcgtcgacagctacaaattcaacggctgggaacttgatatcaatagccgttcgctgattagcccgaacggtgagcagtacaaactgccgcgcagtgaattccgcgcgatgctgcacttctgcgagaacccgggcaagattcagtcccgtgcagaactgctgaagaaaatgaccggtcgtgagttgaagccacacgatcgtaccgttgacgtaaccatccgtcgtattcgtaagcacttcgaatctacgccggatacgccggaaatcatcgccacgatccatggtgaaggctatcgtttctgcggtgacctccaggagtaa

SEQ ID NO: 113976 - DNA, 486 bp, Enterobacter cloacae
atgaatggtaacaatatgaaatacaaggttttagtctttacagcactggcgctgatggcagggcgcgtggcacaggcggagcaaattggctccgtggatactgtgtttaaaatgtttgggccggaccacaaaattgtggtggaagcctttgacgatccggacgttaaaaacgtcacctgctatgtcagccgggcaaagaccggcgggattaaaggcggcctggggctggctgaagacacgtctgacgcggccatctcctgccagcaggttggcccggtggaattgagtgacaaaatcaaaaacggcaaagcgcagagcgacgtcgtattccagaaacggacctcgctggtgttcaaaaagctacaggtggtccgtttttatgacgcgaagcgtaacaccctggcttatctggcttattccgacaaagtcgtggacggctcaccgaaaaacgcgataagcgcggtaccgattatgccgtggcattga

SEQ ID NO: 113977 - DNA, 870 bp, Enterobacter cloacae
atggatcaggctggaattattcgcgacctgctcacctggctggaaggtcatctcgaccagcctttgtcactggataatgtggcggcaaaagcaggctattccaagtggcatctgcaaaggatgttcaaggatgtcaccggtcatgctatcggtgcctatattcgcgcacgtcgtttatcaaagtctgctgtcgcgttgcgcctgaccgcgcgaccaatcctggatattgccctgcaatatcgcttcgattcacagcaaaccttcacccgcgcctttaaaaaacagttctcgttaacgccagcgctttatcgccgctcgccggactggagctcctttggtatgcgtccgccgctgcgtctgggcgagtttgcgatgccaaaatatgaaatcatcaccctgccggaaacgcacctggtcggcaccacgcagagctactcctgttccctggagcagatctccgagttccgccatcagatgcgcgttcagttctggcgcgaatttttaagccatgctccggcgctcccgccgattctgtatggcctgaacgaaacgcatcccagccaggaaaaagacgacgagcaggaggtgttctataccacggcgctgacgcctgacatggcgaacggttacattcatggctcgaagcctgtcgtgctggaaggcggcgagtatgtgatgttctcatacgaaggtttaggaacgggcgttcaggagttcatcctgaccgtttacgggacctgcatgccgatgctgaatctgaatcgccgtaaaggtcaggacattgagcgctactatccggcgcaagatgctaaaccggaagaaggccctatcaatctgcgtatggaattcctgattccggtacgtcgttaa

SEQ ID NO: 113978 - DNA, 648 bp, Enterobacter cloacae
atgttacaggtataccttgttcgccacggtgaaacgcagtggaacgccgagcgacgtattcaaggccagtcagatagtcctctcaccgacaaaggcgtgcagcaagcgtggcaggtggcggagcgcgccagaacgctgggtatcactcacgtcatctccagtgatttaggccgcacgcagcagacggcacgcatcatcgccgatgcctgtggctgcgacgtgaccctcgaaccgcgtctgcgcgagctggatatgggcgtgctggaaaaacgtcctatcgatacgctgacggaaaccgaagaaggctggcgccgcacgctggtgaacggcactgaagatggtcgcatccctgaaggggaatccatgcaggagctgagcgtgcgcatgcatgccgcgctggccgagtgcctgaaactcccggcaggtagccgaccgctgctggttagccacggtatcgcgctgggttgcctggtgagcaccattctgggactgccggcttacgccgaacgccgtttgcgtctgcgcaactgttccatttcccgtatcgactatcaggaaagtgcctggctggcatcggggtgggtagttgagatggcaggggacatttcgcatcttgatgcccctgctctggacgaattgcagcgttaa

SEQ ID NO: 113979 - DNA, 516 bp, Enterobacter cloacae
atgcaccatgttgtctctgctaccaccaatcctgccaaaattcaggcaattctaagggcatttgaagagatcttcggcgaaggatcctgccatattgacgccgtcggcgtcgagagcggtgtgccggaacagccgtttggcagcgaggaaacacgcgctggcgcacgaaatcgcgtggcgaatgcaaaagccgccgcgccagacgctgacttctgggtcgcgattgaagcaggcatcgacgaaggggcgaccttcagctgggttgtcatcgaaagccgtgagcagcgcggcgaagcgcgttctgccacgctgccgctgccggaagtcatactggagaaagtccgcgcgggtgaggcgctggggccggtaatgtcgcactacaccggcattgatgaaattggtcgtaaagagggggcgattggcgtctttacgggtggcaagcttacgcgttcaggcgtttaccaccaggccgttattctggcgttaagtccgttccataacgcgatttatcgttaa

SEQ ID NO: 113980 - DNA, 330 bp, Enterobacter cloacae
atgacccagcattccccgtattcctcggccatggccgaacagcgtcatcaggagtggcttcgttttgtggagttgctccgccagtcttacgacaaagatctgcatttaccgttactacagctgatgctgacgcccgatgaacgcgaagcgctgggcacgcgggtacgcattattgaggaactgctgcgcggcgaaatgagccagcgcgagctgaaaaacgagctgggcgcgggtattgcgaccatcacccgtggttcaaacagcctgaagtcggcgccggttgaactgcgtcagtggctggaagcggtattgctgaaaaacgccggatga

SEQ ID NO: 113981 - DNA, 1938 bp, Enterobacter cloacae
gtggaaaaagccaaacgggtggtctggcgtctgctggctgccagcgtatgcgtaatggcggtaagccaggcggtgcatgccgattcactggatgaacaacgtaaccgctatgcccagattaaacaggcatgggacaacaagcagatggataccgtgcaggcgctgatgccgacgctgaaggattatccgctgtatccgtatcttgagtatcgtcagatcacggacgatctcatgaatcaaccgaccgtcaccgtgaataacttcattcaggcgaacccgaccctgccgcctgcgcgcaccctgaagtcccggtttgtgaacgagctggcccgtcgcgaagactggcgcggcctgctggccttcagcccggataaaccgggcgcgacggaagcgcagtgtaattactattatgcgaaatgggcgaccggtcagcaggaggaagcctggaccggcgcgaaagagctgtggctgacgggcaaaagccagccaaacgcctgtgacccgctgttcagcgcctggcgcgcctcgggcaagcaggatccgctctcttacctggaacgtattcgcctggcgatgaaggccggaaacacccggctggtcacagtgctggcgggccagatgcccgcagattatcagactattgcgtctgccgttatcagtctggcaaacgatcccaataccgtgctgacgtttgcgcgtactaccggcgcgaccgattttacccgccagatggcggcggtggcctttgccagcgtggcgcgtgatgatgtggaaaacgcccggctgatgatcccgcagctggtgcaggcccagcagcttaatgacgatcaaactcaggagctgcgcgatatcgttgcatggcgactgatggggacagatgtcaccgacgaacaggcgcgctggcgtgacgatgcggtgatgcgttcgaactctgtctcgctggtggagcgtcgcgtgcgcatggcgctgggaacgggcgatcgtcgtggcctcaatacctggctggcgcgtctgccgatggatgccaaagagaaagatgaatggcgttactggcaggcggacatgctgctggaacgtggtcgtgaagatgaagccaaagagatcctccactccctgatgcagcagcgtggattctacccgatggcggcggcgcagcgtctgggcgaggagtacaccctgaagatcgacaaagcgccagccaacgcgaacccggcgctgacgcaggggccggaaatggcgcgcgtgcgcgagctgatgtactggaatctggataataccgcgcgcagcgaatgggcgaatctggtcaccagccgtaccaccgatgagaaagcgcagcttgcccgctatgcatttgataatcgctggtgggatctgagcgtgcaggcgacgatcgccggcaaactgtgggatcatctcgaagagcgtttcccgctggcttataaggatctgttcgatcgctacaccagcggcaaagatattccgcaaagctacgcgatggccattgcccgtcaggagagcgcctggaacccgaaagtgcgttctccggtgggtgccagcggcctgatgcagattatgccgggtaccgcgacgcacacggtgaagatgtttaatattccatgctacagcagcccgtcccagctgctggatccggagactaacatcaacatcggtaccagctacttgcagtacgtctatcagcagttcggtaataaccgtatcttcgcgtcagcggcgtacaacgccgggcctggccgcgtgcggacatggcttggcaacagcgcagggcgcatcgacgccgtggcgtttgtcgagagcattccgttctcggaaacgcgcggctatgtgaagaatgtgctggcttatgacgcctactatcgctacttcatggggcagaaagataccctgatgagcgatgccgagtggcagagacgttactga

SEQ ID NO: 113982 - DNA, 1668 bp, Enterobacter cloacae
gtggctcaattcgtttataccatgcatcgtgtcggcaaagttgtcccgccgaaacgtcatattcttaaaaatatctcgctgagcttcttcccgggcgcaaaaatcggtgttctgggtctcaacggtgccggtaagtccaccctgctgcgcatcatggccggcatcgatacagacatcgaaggtgaagcccgtccgcagcctggcattaagatcggctacctgccgcaggaaccccagctgaacccggaacacaccgtgcgtgaatccgttgaagaagcggtatccgaggtggttaacgccctgaagggtctggatgaagtgtatgccaaatacgccgagccggatgcggacttcgacaaactggccgctcagcagggcaaatatgaagagattatccaggcgcacgacggtcacaacctgaacgtgcagctggagcgcgcggccgatgccctgcgtctgccagactgggatgcgaaaatcgctaacctgtccggtggtgaacgccgccgcgtggcgctgtgccgcctgctgctggaaaaaccagacatgctgctgctcgacgaacctaccaaccacctggatgcggaatccgtggcgtggctggagcgcttcctgcacgacttcgaaggcaccgtggtggcgattacccacgaccgttacttcctcgacaacgttgcgggctggatcctggagctggaccgcggcgaaggtattccgtgggaaggcaactactcctcctggctggagcagaaagatcagcgtctggcgcaggaagcatctcaggaagcggcgcgtcgtaagtctatcgagaaagagctggagtgggtgcgtcagggcgcgaaaggccgtcagtccaagggcaaagcccgtctggcacgcttcgaagagctgaacaacactgaataccagaaacgtaacgaaaccaacgaactgtttattccacctggagctcgtctgggggataaagtggttgaagtgaccaacctgcgtaagtcctacggcgaccgtctgctgatcgacgacctgaccttctccgtgccgaaaggcgctatcgttggcatcatcggtccgaacggcgcaggtaaatcaaccctgttccgcatgatgtccggtcaggaacagcctgacagcggctctatcatcctgggtgaaaccgtgaagctggcttccgtggaccagttccgcgacgcaatggataacagcaaaaccgtatgggaagaggtttccggcggtctggatatcatgcgtatcggcaacaccgagatgccaagccgcgcttacgttggccgctttaactttaagggcactgaccagggcaaacgcgtgggcgagctgtccggcggtgagcgcggtcgtctgcacctggcgaagctgctccaggttggcggcaacgttctgctgcttgatgaacctaccaacgacctggacatcgaaaccctgcgcgcgctggaaaacgccctgctggagttcccgggctgcgcgatggttatctcgcacgaccgctggttcctggaccgcatcgcaacccacatcctggactaccaggacgaaggtaaggtggagttcttcgaaggtaacttcaccgaatacgaagagtacaagaaacgcacgctgggcgcagacgcgctggagccgaagcgtattaagtacaagcgtattgcgaaataa

SEQ ID NO: 113983 - DNA, 900 bp, Enterobacter cloacae
atgtttaaacagcttcaggatatggcgctgtttgcgctggtggccgagatgggcagctttaccgcggcggcgcagaaggcggaactgccgaaatccagcgtcagccagcggattagccagctggagcagcaggtggggatccgtctgttgaatcgcaccacgcgcaggatcagcctgacgtttgcaggcgagcactatctggtgcactgtcgtgaaatgctggcggccagcgagcgcgcggagtatgccattcagcggctgcgcgaaaaccccagcgggcggctgcggatcacctgtccggcgggaattggcgcgacgctgctggcgcatatgaatgccgagttccagcttcgctatccggacgtgtcgctggatgtgtcgatctcagacgacgtggtggatctggtcgagtctggctttgacgtggcgctgcgcaccggcaaaccgcaggattcttccctgattggccgcatgattgggcactgtccgcgctacatgctggcctcgccccactacctggcgcgtcgggcgccgttaatccatccccgacagctggtggagcaccgctgcattacgcaccgggcatggtcggagtggcttctgcgaagcgagagtgaggattatcggtatctgccggataacgcccatatgaccgataacctggtgtacgcccgggaatgcgccattgccggggcggggatcacgctgttacccgcattcctgctggaagataagatcgaaaagggcgcgctggtgaaggtgctgccggcgtggagcgttgagggaaacgatctctggctggcctacccgagccgtaagctcaattcgcctgcgctgatgagctatatcgactttgcgatgcagtttgatgaggtgaagcggtattacgtgggcaaataa

SEQ ID NO: 113984 - DNA, 1002 bp, Enterobacter cloacae
atgtcagtgaaagccattgccgttaacccggaaaatccgtccaccttcgttgaaatcactccgccgatgccgcagcccggtgaacacgatctgctggtggaggtaaaagccgtctccgtaaacccggtggacaccaaggtacatgcaggcattgccaaaagcggactgaaggagccgcgcattctcgggtgggatgccagcggtatcgtacaagccgttggggctggcgtcaccggattcaaaccgggtgacgaagtgtggtacgcgggggatatcacccgtccgggcagtaataccacgcaccagctgatcgatgcgcgcattgtcgggcacaagcctgcaagccttgactgggccgccgcggctgcattgccgctgacggcgctcaccgcgtgggaaggcctgtttgaacggctgaagattcaggatgccgacgcagataaaacgctgctgataattggcggcgcgggtggagtcggatcgctggcgatcccgtttgcgaagcacaacagcaaggtgaagatcgtcgcaaccgcttcacgagaagattccgcccggtggtgtcgcgatcgcggggctgacattgttgtaaattaccgcgacctgaagggagaactggcgaaacaggggctcacctttgtggattacatttttatcctcaacgataccgacgggcactgggatgcggtcagcgatctgattgcccctcagggagacatttgttccatcgttgaaaacgcgcatccgctgaaccaggacaagctgaagtccaaatctgccgccctgcactgggagtttatgtacacccgtagcatgtaccagactgcggatatggcgcgtcagggtgagattttagatgaggtggcgaagctggtggataacggcgtggtggaaagctcgctcagcgaaacgctgcacgggctaagcgtggaaagcattaccgaagcgcaccgcagggtactggaggggcatatgcgtgggaaggtggtggttgagtattga

SEQ ID NO: 113985 - DNA, 1233 bp, Enterobacter cloacae
atgtcatcatttgactacatcaagaccgctatccgccagaagggctgcacgttgcagcaggtggcggacgccagcggcatgaccaagggctatctgagccaactgctgaacgccaaaatcaaaagccccagcgcgcagaagctggaagcgctgcaccgttttctggggcttgaatttccgcggatgcaaaagaacattggcgtggtgttcggtaagttctacccgctgcataccgggcatatctatctgatccagcgcgcctgtagccaggtcgacgaactgcatatcatcatgggttatgatgaaacccgcgatcgccagctgtttgaagacagcgccatgtcgcagcagcccaccgtgccggaccgcctgcgctggctgcttcagacctttaagtaccagaaaaatatacgcattcatgcttttaacgaagagggcatggaaccgtacccgcacggctgggacgtgtggagcaacggcatcaaagcgtttatggaagagaagggcattgcgcctaactggatctacacctctgaagagtccgacgcgccgcagttccgtgagcatctgggcattgagacggtgctgatcgatcctaaacgcaccttcatgaacatcagcggggcgcagatccgcgagaacccgttccgttactgggactacatcccgaccgaggtgaagccgttcttcgtgcgtacggtggcgatcctcggcggcgagtcgagcgggaaatcgacgctggtaaataagctggctaacatcttcaataccaccagtgcgtgggagtatggccgcgattacgtcttctcacaccttggcggcgacgagatggcgttgcagtattccgactacgataaaatcgcgctcggtcatgcccagtacattgattttgcggtgaaatacgccaataaagtcgcctttattgataccgatttcgtcaccacgcaggcgttctgcaaaaagtacgaagggcgcgagcacccgtttgtgcaggcgctgattgacgaataccgctttgatctggtgatcctgctggaaaacaacaccccatgggttgccgacggcatgcgcagcctgggcagctcggtggacaggcgggagttccagaccatgctggtagagatgcttaacgagaacaacgttgagtttgtgcatgtggaagagtcggactacgattcccgcttcctgcgctgcgtcgagctggtgaatgagatgatgggggagcagggttaa

SEQ ID NO: 113986 - DNA, 1386 bp, Enterobacter cloacae
gtggcgaaagctccaaaacgcgcatttgtctgtaatgaatgtggtgcggattatccgcgctggcaggggcaatgcagcgcctgccatgcctggaacaccatcaccgaagtgcgtggtgtggcggcttcgccgagcgtggcccgcaatgaacggctgagcggctatgcgggcaatgcaggcgtgtcgaaggtacaaaaactttcggatatcagcctggaagcgctgccgcgcttttccaccggattcaaagaatttgaccgcgtgctcggcggtggcgtagtgccgggcagcgccattctgatcggcggtaacccgggcgcgggtaaatcgaccctgctgctgcaaacgctctgcaagctcgccgaacagatgaaaaccctgtacgtcacgggggaagaatcacttcagcaggtggcgatgcgcgcgcaccgcctcggcctgccgaccggcaatctgaatatgctttcggaaaccagcatcgagcagatctgcatgatcgccgaagaagagcagccgaagctgatggtgattgactccattcaggtgatgcatatggctgacattcagtcgtcaccgggaagcgtggcgcaggtgcgtgaaaccgcggcctacctgacgcgctttgccaaaacgcgcggcgtggcgattgtgatggttggtcatgtgaccaaagacggctcgctggcgggaccgaaagtgcttgaacactgtatcgactgctcggtgatgctcgatggcgatgcggattcccgttttcgtaccctgcgcagccataaaaaccgctttggcgcggtgaatgagctgggcgtgtttgccatgaccgagcaggggcttcgcgaagtcagcaacccgtcggccatcttcctgagccgtggcgacgagatcacgtccggtagttcggtgatggtgctgtgggaggggacgcgtccgctgctggttgaaattcaggcgctggtggatcaatcgatgatgggcaacccgcggcgcgtggcggtcggtctggaacagaaccgcctggcgatcctgctggcggtgctgcaccgtcacggcggtctgcaaatggcggatcaggatgtgttcgtcaacgtggttggtggggtgaaggttacggaaaccagcgcggacctggcgctgctgctggcgatggtctccagcctgcgcgacaggccgttgccgcaggatctggtggtgtttggcgaggtggggctggccggcgagatccgcccggtgccgagcggtcaggagcgtatctccgaagcggcaaaacatggcttccgccgcgcgattgttccggccgccaacgtgccgaaaaaaatcccggaagggatgcaggtttttggcgttaaaaaactcgcagatgcgttaaatgtctttgacgacttataa

SEQ ID NO: 113987 - DNA, 969 bp, Enterobacter cloacae
atgccgaacattacctggtgcgacctgccaacggatgtctctttatggccaggattgccgctctctttaagtggcgatgaggtgatgcctctcgattaccacgctggccgtagcggctggctgctgtacggacgcggcctggataagcaacgcctcacccagtatcaaaccaaactgggcgcagcgatggtcatcgttgcggcctggtgcgtggaagattatcaggttattcgcctggcgggttccctgacgcagcgcgccacgcgtctggcgcacgacgccgggctggacgttgcccccctcggcaaaattccgcacctgaaaacgcccggcctgctggtaatggacatggactccaccgccattcagatcgaatgtattgacgagattgctaaactggcgggcagcggcgagctggtggcggaagtcaccgagcgcgcgatgcgcggcgagctggattttaccgccagcctgagacagcgcgtggcgaccctgaagggggccgatgctaacattttgcgtcaggtgcgcgatgaactgcccctgatgcctgggctgacgcagctggtgctcaagctggagacgctcggctggaaagtggcgattgcctccggcgggttcaccttctttgccgactacctgcgtgacaagctgcgtctgaccaccgtggtggcaaacgagctggagatcatggacggcaaactcaccggacaggtcatcggcgacatcgtggatgcgcagtacaaagccaatacgctgacgcgtctggcggagaaatatgccattccggtcgagcagaccgtcgccatcggcgatggcgcgaacgatctgccgatgatcaaagttgccgggctgggtattgcctaccatgccaagccgaaagtgaatgaaaagacggaagtcactatccgtcatgctgatctgatgggggtgttctgcattctctccggcagcattaatcaaaaatag

SEQ ID NO: 113988 - DNA, 645 bp, Enterobacter cloacae
atggctcgcgcaaaactgaaattccggcttcatcgcgccgtgattgtcctgatctgtctcgcactattagtggcgctgatgcagggggcatcctggtttagccagaatcaccaacgacagcgtaacccgcagtttgaggaactggcccggacgctggcgcgccaggtgacgctcaacgttgcgccgtctatgcgcaccgaaacgccggatgataagcgaatagcccaggtattgcgccagcttacggaaaacagccgcattctggatgcgggcgtgtacgatgaacagggcgacctgattgcccgcgcgggtgagcatgtcgacgtgcgcgacaggctggcgctggatggcaaaaaagccgggggttatttcaaccaacaaatcgtcgaacccattcagggcaagaatggtccgctcggctatttacgtctgacactcgacacccacaccctgccaaccgaagccaaacaggtggataacaccaccaatattttgcgcctgatgctgctgctctcgctggcgattggcgtggtactggcgcgcacgctgctccagggcaaacgcacccgctggcagcagtcgccgttcctgttaaccgccagcaagtcggttcccgaagaggaagagagcgagaagaaagaataa

SEQ ID NO: 113989 - DNA, 1017 bp, Enterobacter cloacae
atgtcgacgttacgcctgctaatctctgactcttacgatccctggtttaacctggcggtggaagagtgcatcttccgccagatgcctgccacccagcgcgtcctgtttctctggcgcaacgccgatacggtcgttattggtcgcgcgcaaaatccgtggaaagagtgtaacacccgccgtatggaagaggacaacgtccgcctggcgcgccgcagcagcggcggcggtgcggtgtttcacgatctgggcaacacctgctttacctttatggcgggcaagccggaatacgacaaaaccatctcgacctccattgtgcttaacgcgctcaattcactcggcgtgacggctgaagcctcgggacgtaacgatctggtcgtgaaaacgcctgaaggcgaccggaaagtgtcaggctcagcctaccgcgaaacgatggatcgcggattccaccacggcacattattgctgaatgccgatctgagccgtctggcaaactatctgaatccggacaagaaaaagctccaggctaagggaattacctccgtgcgcggtcgcgtggcgaatctggtggagctcctgccggggattacccatgaacgcatttgcgatgcgatccgcgaggcctttttcaggcattacggtgaacgcgtagaagccgaggtgatttctccggataaaaccccggatctgccaaacttcgcggaaaccttcgcccgccagagcagctgggagtggaatttcggtcaggcaccggcgttttcacacctgctggatgagcgatttacctggggcggcgttgagctgcactttgacgtcgagaaaggccatatctctcgtactcaggtatttacggatagtcttaatccggcaccgttagaagcgctggctgcacgtttgcagggctgtctctatcgggcagatatgctgcaacaggagtgtgacgcgttacgtgttgattttccggaacaggaacaagagttgcgggagttatcggcgtggattgcgcaggcagtacgctaa

SEQ ID NO: 113990 - DNA, 720 bp, Enterobacter cloacae
atggcaactcctcacattaatgcagaaatgggtgatttcgctgacgtcgtattgatgccgggcgacccgctgcgcgcgaagcacattgcagaaaccttcctcgaagacgtgcgtgaagtgaacaacgtgcgcggcatgctgggcttcaccggcacctataaaggccgcaaaatctccgtgatgggtcacggcatgggtatcccatcctgctccatctacaccaaagagctgatcaccgatttcggcgtgaagaaaatcatccgtgtcggctcctgcggcgcagtgcgcatggacgttaagctgcgtgacgtggtgatcggcatgggcgcgtgcaccgactctaaagtcaaccgcattcgctttaaagatcatgattttgcagccatcgctgactttgacatggtgcgtaacgcggttgacgcggcaaaagcgctgggcgttgacgcgcgcgtgggcaacctgttctctgccgatctgttctactcgccagaaggcgacatgttcgacgtgatggaaaaatacggcattctgggcgtggaaatggaagcggccggtatctacggcgtggcggctgaattcggtgcgaaagcgctgaccatctgcaccgtgtctgaccacatccgtacccacgagcagactaccgctgccgagcgtcagaccaccttcaacgacatgatcaaaatcgcgctggaatccgttctgctcggcgataaagagtaa

SEQ ID NO: 113991 - DNA, 1224 bp, Enterobacter cloacae
atgaaacgtgcatttattatggtgctggactcattcggcatcggcgcaaccgaagatgcagaacgatttggtgacgtgggttccgataccctgggtcacatcgcggaagcctgtgcaaaaggcgaagcggacaacggtcgtaaaggccctctgaacctgccaaacctgacccgtctggggctggtaaaagcgcatgaaggctctaccggtaagatcgcagccggtatggacggtaacgcggaagtggtgggcgcctacgcgtgggcgcacgagctctcttccgggaaagatactccgtccggtcactgggaaattgccggcgtgccggtgctgtttgactggggttacttttccgatcacgagaacagcttcccgcaggagctgctcgataagctggtgaagcgcgccaacctgccgggctacctcggcaactgccactcttccggtaccgtgattctggatcagctcggcgaagagcatatgaaaaccggcaagccgattttctatacctctgctgactccgtgttccagatcgcctgccatgaagagacgtttggcctggataaactgtacgagctgtgcgagatcgcccgtgaagagctgaccgaaggcggctacaacattggccgcgttatcgcgcgtccgtttatcggcgacaaagcgggtaacttccagcgtaccggcaaccgtcacgatctggccgtggagccaccggcgccgaccgtgctgcaaaaactcgtcgacgagaaagacggccacgtggtttccgtgggtaaaatcgcggacatttacgccaactgcggcattaccaaaaaggtcaaagcgaccggtctggatgcgctgttcgacgccaccatcaaagagatgaaagaagcgggcgataagaccattgtcttcaccaacttcgtggacttcgactcctcctggggccaccgtcgcgacgtcgccgggtatgctgcgggtctggagctgtttgaccgccgtctgccagagctgatggagctggtgggggaagatgacattctgatcctgaccgctgaccatggctgtgacccgacctggaccggtaccgaccacacccgtgagcacattccggtgctggtgtacggcccgaaagtcaaaccgggctcgctgggtcaccgtgagaccttcgcggacatcggccagacgattgcgaaatactttggtacgtctgacatggaatatggcaaggctatgttctaa

SEQ ID NO: 113992 - DNA, 1323 bp, Enterobacter cloacae
gtgtttctcgcacaagaaattattcgtaaaaaacgtgatggtcatgcattaagcgacgaagaaatccgcttttttatcaatggcattcgtgataacaccatctctgaagggcagattgcggctctggcgatgaccattttcttccacgatatgtcgatgcctgagcgcgtgtcgctgaccatggcgatgcgagattcaggaaccgttctggactggaaaagcctcaaccttaacggcccaattgtggacaaacactccaccggcggcgtgggcgacgtgacgtctctgatgctcggcccaatggtggcggcctgtggcggttacatcccgatgatttccgggcgcggcctgggtcataccggcggtacgctcgacaaactggaagccattccgggcttcgatatcttcccggatgacaaccgcttccgcgacattattaaagacgttggcgtggcgattatcggccagaccagctctcttgctccggctgacaagcgtttctacgcgacgcgtgacattaccgcgaccgtagactccatcccgctgatcaccgcctctatccttgccaaaaaactggcggaaggtctggatgcgctggtgatggatgtgaaagtgggcagcggcgcgtttatgccaacctatgaactctctgaggcgctggccgaagcgatcgttggcgtctccaacggcgcgggcgtgcgcaccactgcactgctgacggacatgaaccaggtgctggcctccagcgccggtaacgcggttgaagtccgtgaggccgtgcagttcctcacaggcgaataccgtaacccgcgcctgttcgatgtcaccatggcgctgtgcgatgagatgttaatctccggcaagctggccaaagacgacgcggaagcccgcgcgaagcttcaggcggtgctggacaacggcaaagcggcggagatctttggtcggatggtggcggcgcagaaaggcccgaccgacttcgtggaaaactacgcgaaatacctgcccaccgcgatgctcagcaaagcggtctatgcggacagcgaaggctttgtctcggctatggatacccgcgcgctcggcatggctgttgtgtctatgggcggcggtcgtcgtcaggcatcggacaccattgattacagcgtcggctttaccgatatggcccgtctgggcgacagcgttgacggccaacgtccgctggcggtgatccacgctaaagatgaagccagctggcaggacgcggcgaaagcggtgaaggcggcaatatctcttgacgataaagcaccggaaaccacaccgacggtctatcgtcgtatcactgaatag

SEQ ID NO: 113993 - DNA, 780 bp, Enterobacter cloacae
atgaccgatttaactgcaagcagcctgcgcgcgttgaaactgatggacctgaccaccctgaacgatgacgacaccaatgaaaaagtcatcgccctgtgccatcaggcgaaaacgccagtgggtaacaccgccgccgtctgtatctatccgcgcttcatcccgattgcccgcaaaacgctgaaagagcagggcacgccggacgtgcgcattgccaccgtaaccaacttcccgcacggcaatgacgatatcgacatcgcgctggcagaaacccgcgcggcgattgcgtacggcgcagacgaagttgacgtggtattcccgtaccgcgcgctgatcgccggcaacgagcaggtcggttttgacctggtgaaagcctgtaaagacgcgtgtgcggcggcaaacgtgctgcttaaagtgatcatcgaaaccggcgagctgaaagaagaggcgctgattcgtaaagcgtctgaaatctctatcaaagcgggcgcggatttcattaaaacctctaccggtaaagtgccggtcaacgctaccccggaaagcgcacgcatcatgatggaagtcatccgtgatatgggcgtgtccaaaaccgttggcttcaaaccggcgggcggcgtgcgtaccgcggaagacgcgcagcagttcctggcgattgccgacgagctgttcggcgccgactgggctgattcccgccactaccgcttcggcgcgtccagcctgctggccagcttgctgaaagcgctgggtcacggtgacggtaagagcgcaagcagctactaa

SEQ ID NO: 113994 - DNA, 1536 bp, Enterobacter cloacae
atgcccgacgccctgcaacaacgttgccagcacattgtgaccagcccggtgttaaccccggaacaaaaacgtcattttctggcgctggaagcagagaacaatctgccctatcccgctctgccagaggcggcccgggccgcgctggacgagggattcatctgcgacatgttcgaaggccatgcgccttacaaaccgcgctacgtgctgccggactacgctaaatttctggctaacggctcagaatggctggagctggaaggggcgaaagatctggatgatgccctctcgctgctcactatcctttatcaccatgttccgtccgtcacatcgatgccggtctatctgggccagctcgatgagatactcagcccctatgttaaaattctaacacaggatgaaatcgatagccgaataaaacgtttctggcgttacctggacagaaccctgcccgatgcgtttatgcatgccaatatcggcccggcggatacgcctgtcacccgagccatccttcgcgcggatgccgaactgaagcaggttgcgccgaacctgacctttatctacgacccggatgtaacccccagcgatctgctgctgagcgtggcggaaaacatttgtgaatgtagtaaaccgcatatttctaatggcccggtgaatgataaaattttcacaaaaggtcgctatggcgtggtgagctgttacaactccctgccgctggcgggcggcggcagcacgctggtgcgccttaacctgaaagcgattgcggaacacagccgctcaccggaagactttttcacccgtacccttccccactactgccagcaacaaatcgcgatcatcaatgcgcgctgcgattttctatatgaacaatccggcttctttgcgaatagcttcctggtgaaagaggggctgattgatgccgatcgctttgtgccgatgtttggcatgtacggtctggccgaagcggtgaatgtgctgtgcgagaaagcaggcattacgggacgttacggtaagaacgaacaggccaatgcgctgggctaccgcatcagtgaacagcttgcggcgtttgttgaaaacacgccggtgaaacacggctggcagcaccgcgcgatgctgcatgcccagtctgggatcagttccgattctggcaccacgccgggcgcacgtctgccgtacggcgacgaaccggaccctgtcagccacctgctggccgtggcgccgcatcataaacactatcattcggggatcagcgatattctcaccctggaggaaacggttaaacgcaatcctcaggctgtggtgcagctgtgcctgggggcgttcaacgccggtatgcgtgagttcaccgcgaatgtagccggaaacgacctggtgcgcgtcaccgggtatatggtgcggctctccgatctggagaaataccgggaggccggctcgcgcaccaacaccacctggctcggcgaggaggccgcgcgcaatacccgtattctggaacgtcagccgcgcgtgataagccatgaacagcagatgcgctttagttag

SEQ ID NO: 113995 - DNA, 861 bp, Enterobacter cloacae
atgaacagcagatgcgctttagttagtcaggtcatatccttctcctgcgttgacgggccgggcagccgcctggcgttgttcctccagggctgtaacctgcgctgcaaaacctgccacaacccgtggacgatagggcgctgcaacgactgcggcgactgtgttccccactgtcctcatgatgcgctggcaattcaggccgggcgcgtctggtggcaggagagtcactgtcagcagtgcgacacctgtctgcacctgtgtcagcagcaggcgacgccgatggcgcagcgctatagcgtcgaggagatcctctcccgggttcgcacgtccgcgccgtttattgagggcgtgaccgtcagcgggggtgaggccaccacgcagctgccgtttttggttgcgctgttcaccgcgatcaaagccgatccgtccctgcgccatctgacgtgcctggtggacagcaacggcctgttaagcgaaaccggctggcaaaagctgttaccggtgtttgacggcgcgatggtggatctgaaagcctggggcaatgaacatcaccgttttctgaccgggcgcgaaaacacgcagatcaagcagagcatccgctggctggccgatcgtcatcgcctgacggagctgcgcctgctggtgatccccgctcggtgtgattatctgcaccatctgccatcgctgaccgcttttatccacgcgttggggaacgttcctgtgcggatcaacgcgtttcatgctcatggggtttacggggaggcggcgcgatggcggagcgccacgccggaggacatcgagccgctggcgcaggccctggaacggcagcagatcacggtgatccgcccggccctttatttatag

SEQ ID NO: 113996 - DNA, 783 bp, Enterobacter cloacae
gtgacgcactgctttatcgatacccattgccactttgatttcccgccgtttagcggggaggaaacatcaagtattgcgcgcgcggctcaggccggtgtgagagccattattgtgcccgctattgaagcggcgagattcgacaaagttctggcgcttgcccgggagcacgatgcgctgtatgccgcgctgggtctgcatccgatcgttattgagcaccatcttgatgaccatctcgacaggctggatgccacgctgcaaaatgcggatacgaagctggttgccatcggtgagatcggcctcgatctctatcgtgaagatccgcagtttgagcgccagcagacgatcctggatgcgcagctccggctggcaaagcgccacgatctgccggtgatcctccactccagacgtacccatgacaaactggcgatgcacctgaagcgtatcgacgtgccgcgcaggggcgtggtccatggtttcgctggaagccttcagcaggcgcagcgttttattgagctgggctataagattggcgtcggtggcaccatgacctatccgcgtgccagcaaaacccgtgatgtgatggcgcagctcccgctgacctcgctcctgctggaaacggatgcgcctgacatgccgctgaatggttttcagggccagcccaaccgcccggagcaggcggcgcgcgtttttgatgtgctgtgtgagctgcgtcaggagcctgaagatgtgattgccagcgcgctgctggaaaacacccgcgcggtcttcggcatcacgctataa

SEQ ID NO: 113997 - DNA, 1053 bp, Enterobacter cloacae
gtggggcaacgaattcccgttacgctcggcaatattgcgccgctgacgttaaaaccgtttcatgcaggccagcttgcgctggtctgtgaagggggagggcagcgcggtatctttaccgccggcgtgcttgacgaatttatgcgcgcacaattcaacccgttcgatctctatttcggcacctctgccggggcgcagaacctctccgcctatgtctgcaaccagcccggctatgcgcgcaaagtgattatgcgctacaccacctccaaagaattcttcaatccggtacgcttcgtacgcggcgggaacctgatcgatctcgactggttactggatgccacctccagccagatgccgctggccatggataccgcgtcacgtctgttcgataccggcaaagagttctggatgtgcgccagccgtggcgatgactattcgccgggttacttttcgccgcagaaagagaactggctggatatcatccgcgcgtccagcgcgatcccgggattctaccgcaccggcgccctgctggaggggataagctatcttgacggcggtatcagcgacgcggtgccggtacaggaggcggcgcggcgcggggcaaaaaccattgtggtgatccgcacggtgccttcgcagatgtattacaccccacagtggtttaagcggatggaacgctggctgggcgacagcagcctgcaaccgctggtgaatatcgcgaagcagcatgaaaccacctacggcgcgatgcagcgttttattgaaaaaccaccgggcaagctgcgcatctttgaaatttatccgcctaaaccgctgttgagcatggcgctgggcagtcggctgcctgcgttgcgtatggattacaaaacggggcggctgtgcgggcgttacttcctggcgaccgtcgggaaaatgctggcggagcaaccgcctcttcatcggcataaaagcatcattttgccgcctgccgttgtggccaatgacgcggtggcgatgccgctggtggacgcgccgcaggccaacgatggcttactcgataacgaggatctggcgtga

SEQ ID NO: 113998 - DNA, 162 bp, Enterobacter cloacae
atgtttcgttggggcattatatttctggttatcgcgttaattgccgccgcattgggctttggtggactggcgggtaccgcggcatgggcagcgaaaattgtcttcgtcgtcggtattattctgttcctggtcagcctgtttacgggtcgacgtcgcccgtag

SEQ ID NO: 113999 - DNA, 618 bp, Enterobacter cloacae
atgaatatgacaagactgaagatttctaaaactctgctggctgtaacattgggtagtgtcctggtaagcggttctgctctggcggaaaccagcaccatggataaagcgcaaaattccgccaataccgcaggggaaaaaatcgatagctctatgaataaagtcggtaatttcatggatgacagctcaatcacagcaaaagtgaaagccgcactggtggatcacgaatccatcaagagcaccgatatttctgttaaaaccgacaacaaggttgtcaccctgagcggtttcgttgaaagccagacccaggccgaagaagccgttaaagtggcgaaaggcgttgagggcgtaagctccgtcagcgacaaactgcacgtacgtgacagcaaagaatcgtcggtgaagggctatgccggagatgcagcaactaccagcgaaatcaaagctaaactgttagctgacgacatcgtgccatcccgtatggtgaaagttgaaaccaccgatggtgtggtccagctgtccggtacggttgagaatcaggcacaaagcgatcgtgccgagtcaattgcgaaagctattgatggtgtgaaaagcgtcaaaaacgatctgaaaacgaagtaa

SEQ ID NO: 114000 - DNA, 1590 bp, Enterobacter cloacae
atgacgttgtctccttatctgcaagaggtggccaaacgccgcacttttgccattatctcgcacccggatgccggtaaaacgaccatcaccgagaaggtgttgctgttcggacaggcgatccagaccgcgggtaccgttaaaggccgtggctccagccagcatgctaaatccgactggatggagatggaaaagcagcgtggtatttcgattaccacctccgtgatgcagttcccgtatcacgactgcctggtgaacctgctggacaccccggggcacgaagacttctccgaagatacctaccgtacgctgacggcggtggactgctgcctgatggtgatcgacgccgcgaaaggtgttgaagatcgtacccgcaagctgatggaagtcacccgtctgcgcgatacgccgatcctcacctttatgaacaaactcgaccgtgacatccgtgatccgatggagctgatggatgaagtggaaaacgagctgaagattgcctgcgcgccaatcacctggccgattggctgcggcaagctgttcaaaggggtttaccacctctataaagacgaaacctacctgtaccagaccggtaagggccacaccattcaggaagtccgcattgtgaaaggtctggacaatcccgagctggacgccgctgtcggtgaagagctggccgcccagctgcgcgatgagctggagctggttaaaggcgcgtcgcacgagttcgacagagagctgttcctgagcggtgaaattaccccggtcttcttcggtaccgcactcggcaacttcggcgttgaccatatgctcgacggtctggtggagtgggccccgcagccgatgccgcgtaaaaccgacacccgcgaagtagaagcgaaggaagagaagttctccggcttcgtctttaaaattcaggccaacatggatccgaaacaccgtgaccgcgtcgcctttatgcgcgtggtttccggtaagtacgaaaagggcatgaagctgcgtcaggtccgtatcggtaaagacgtggtgatctccgacgcgctgaccttcatggcgggcgaccgttcgcatgtagaagaagcctatccgggtgacatcattggtttacacaaccacggtaccattcagattggtgataccttcacgcagggcgaaatgatgaagttcaccggtatcccgaacttcgcgccagaactgttccgccgcattcgcctgcgcgatccgctgaagcagaagcagctgctgaaaggcctggtccagctttccgaagagggcgcggtacaggtgttccgcccaatcgccaacaacgatctgatcgtgggcgcggtgggtgtgctccagttcgacgtggtggttgcccgtcttaagagcgagtacaacgtggaagcgatttacgaatcggtgaacgtggcgaccgcccgctgggttgaatgttcagacgtgaagaaattcgaagaatttaaacgtaagaacgaagttcagctggcgctggacggtggcgataacctgacctatatcgccccaaccatggtaaacctgaacctgacgcaggaacgttatcctgatgttcagttccgcaaaacgcgcgagcattaa

SEQ ID NO: 114001 - DNA, 678 bp, Enterobacter cloacae
atgaaatgggactggattttctttgatgccgacgaaacgctgtttacgtttgactcgttcggcggcctacagcggatgtttctcgactatagcgtgacgttcaccgcggaagattttcaggactatcaggcggtgaacaaaccgctgtgggtggattaccagaacggagccatcaccgcgttacagcttcagcatcagcgttttgacgtgtgggctgaacggttaaacgtcagtcctggggcgctgaacgaggccttcctgaatgcgatggcggatatctgcgcgccgctgcccggcgccgtttctctgctggattcgctgaaagggaaggtgaagcttgggatcattaccaacggctttaccgcgcttcagcagatccgccttgaacgcaccggcctgcgcgatcatttcgacgcgctggtgatctccgaagaggtgggcgtaccgaagccggatccgcgtattttcgattatgcgctggcgcaagcgggcaatcctgaccgcgatcgcgtgctgatggtgggggatacggcagaatctgatattctgggaggtatgagatcgggcctgtcgaccgtctggctgaatgcgcatggtcgcacgctgccggaaggcatcgagccgacctggaccgttacgtcattgaacgaactggagcagctcctgtgtaaacaatga

SEQ ID NO: 114002 - DNA, 444 bp, Enterobacter cloacae
atgaacacgatttcttccctcacgacggctgacctgaccaccgcgttcgcgattgaaacccgcgcccatgcctttccgtggagcgaaaagacgtttgccagcaatcagggcgaacgctatttaaatctccgcctggacgttgacggtgcgatggctgcgttcgccatcacgcaggtcgttctggacgaggcgacgctgtttaatattgcggtcgatcccgcttaccagcgccgcgggctgggcagggaactgcttgagcacctcattcgtgagctggaaacccgtgacgttttcaccctgtggctggaggtgcgcgcgtccaatgtcgccgccatcgcgctctatgaaagcttaggcttcaacgaggcgactatccgccgtaactactaccccaccgcagagggacgtgaagacgccattatcatggctctgccgattggataa

SEQ ID NO: 114003 - DNA, 414 bp, Enterobacter cloacae
atgatatcccgacgagactggcagttgcagcagctgggcattacccagtgggctttgcgtcgcccgacggcgttgcggggcgaaatagccatctccatacctgcgcatgtccgcctggtgatggtggcagaagcgccgcctgccctgaacgagcccctgattgaggatgtccttcgcaccctgaaggtgacccgcgatcaggtattacagctggcgcctgaaagcgtcgcgatgcttccccctgacagccgctgtaacagctggcgaatcggggcggtggacgagctacctcttgaaggaagccagatcagttcgccagcgctggacgaactgaaagccaacccaaaagcgcgtagcgcgctatggcaacaaatttgcgaatatgaacacgatttcttccctcacgacggctga

SEQ ID NO: 114004 - DNA, 1029 bp, Enterobacter cloacae
atgtctgcatttaccccggcaagtgaagtcttgctgcgtcacagtgatgatttcgaagaaagccgtattctgtttgccggagatatgcaggatgacctgcccgcgcgtttcgactgtgctgaaagccgtgcccacacccagtactatcaccactggcaggtgctgagccgccagatgggcgagcgcgcgcgctttagcctggcggcggagcagagcgatattgctgactgcgatacgctcatttactactggccgaaaaacaagccggaagcccagttccagctgatgaacctgctttctctgctgccggtcggctgcgatatttttgttgtcggtgagaaccgcagcggggtgcgtagcgcagagcagatgctcgaagcctgggcgccgctgacgaaaatcgacagcgcccgtcgctgcggactgtaccatggtcgtctggaaaaacagaccaccttcgatgccgacgccttctgggacgagtaccagcttgacggcctgaccattaaaaccctgccgggcgtgttcagtcgtgatgcgctcgatacgggcagcaagctgctgctgtccaccctgacgcctcacaccaagggcaaggtgctggacgtcggctgtggcgcgggcgtgctgtcaacggttctcgccagccactcaccaaaagtgcgtttaaccctgtgtgacgtgagcgccccggcagtagaagccagccgcgccacgcttgctgcgaatggcatagaaggtgacgtgtttgccagcaacgttttctccgacgtgaccggtcgctttgacatgatcatctctaacccgccgttccacgacggaatggagaccagccttgaagcggcgcaaacgctgatccgtggcgcaacccgtcacctcaacagcggcggtgagctgcgtatcgtagcgaacgccttcctcgcgtacccgaaagtgctggatgaaacctttggcttccacgaagtgatcgcccagacgggccgctttaaggtctatcgcaccgtgatgacgcgccaggcgaaaaagtaa

SEQ ID NO: 114005 - DNA, 231 bp, Enterobacter cloacae
atgttgagcaaagcgctgggaagtgggtggggaatattactgcctggttccattatcggtgggctaatgtttgccgatctccccattgatgtctggaaagcaatgattgtttcaggcttgctggtgacatccgcgatgatctggcacaaacagttacggcattacgtgctgctgccatcatgcgttgcgctaatcagtggactgctggtgattctgatgagtttgaaataa

SEQ ID NO: 114006 - DNA, 1065 bp, Enterobacter cloacae
atgacatcacaatcctggctgtctttagtcaacaagaaatatcagctatctttacgtttgtttttatttctgaacgccgcatcagcattgttctcggtaacaaaccctctctattccgtgcgtgtgttatcagtcccgctctttgccgtaatgactatcagcacaggcttacttatctggcactggaaaaacagcacgcgaaaaataaatatccctgttgtttcagctatttttggtcttttatgggcctggcagatcgtctctaaatttctgttaatcacgcacgatcacgcgacctatttaatgatggcgctattaacagtgctttttatagggtctctggcgttcgcgagtaatattaaagcctttacgttacattcatttcccgcttttatatcctgcctgtggcttagtccgtccgaaaactggctgagaatggcctattttttcgcgctgccggtggtcgctattggtatccatcatgttcttcagcggcgcaatgaccgtttcgcccaggagctgctttccgaactgctggaggagcgcgaaaccctgaccgatctcagcatgatggacccgctcaccggcctatataaccgtcgcgggctgcaaagccggctggagaatcttcccaagcctgacgctggcgagcacttcgtgctgctaatggatatcgaccacttcaaagcctacaacgaccattatggccatatgatgggcgatcaggccttgatcagggtctcggctgcgatacgcgacgccgtgcgctcacgcgatgttgtcgcccggtttggcggggaagaatttatggtgctgttgagtaacatcccgctggagcaagcgcgacagacggctgaacgcatacgtcagaaggtttacgatcttaaaatcccccatatgtttaacgaaagcgtcgccactaacgtgaccatcagcatcggcatcgccatgttcgaaggtgacgacgttgagggcgcgctggcgaaagccgataaagccctctatgaagccaagcatatgggacgtaacagcattctgctgagcgaagagcttcataccgcctga

SEQ ID NO: 114007 - DNA, 789 bp, Enterobacter cloacae
atggcgactcgtaccgcacacatcgttgagcccctgctctggcgagctccactctccgccggggaaacgacgcttgcggatgccattcgggaaaaaattgccgtaacgcgcgcccatctgctggatttcatcaaactggatgaagcaccgccgcatcatgctctgacgctgactgagtggcaacgccctgcggagctgcggtcactgctggcaacctattccgaccatatttatcgtaaccaacctaccctgacgcgggaaaacaaaccgctgttatccctctgggcacagtggtatatcgggctgatggtgccgcctgtcatgctggccctgttgacccaggaaacgatgctcgatctctcgtcggaacatttccatgttgagtttcatgaaaccgggcgcgctgcctgtttctggattgatgtacacgaagatccgagcgcgagacacctgtcagcgcaggcgcgtatggaacggctgattacaagagcgctggttccggtcattgatgcgctggaagcgacgggagagattaacggcaaactgatctggagtaataccgggtatcttatccactggtatttaacggagatgaagccgctgctcggcgacgagaaagtggatgcactgcgtcagagctgtttctttgccagacagctgtcggatggacgggacaaccctctttaccgcaccgtggttccgcgtgagggacttctggtacgtcgtacctgctgtcagcgctaccgtctgccggacgtgcagcagtgtggcgattgcacgcttaagtag

SEQ ID NO: 114008 - DNA, 1347 bp, Enterobacter cloacae
atgtctgccaaccacgctgcatttaatctgattttccgcttcgttgaaaattatgtcagccctattgccgggcgcatctcttcccagcgtcacgttatggctattcgtgacgggtttatctcagcgatgccgtttatgattgtaggctcgtttttattagtgttcgcttacccgcctttttcgcctgataccacctggggttttgctcgcgcctggctggatatggcgaagcagtttgaaggtcaaattctgacgccgtttgatatgacaatgggggtgatgtccctttatatctgtgcggctattgcctacaacctgggcaaacattacgttaaaacccatcagctggatccgttcatgtgcgcgatgctgtcgctgatggcgttcctgctggtcgccgcccctaaaaccaaaggcgctttaccggtggatagcctgggagggaccggtattttcaccgcgattctggtggcgatctattgcgttgagatgatgcgtttcctgaaagcacacaatatcgggatccgcctgccagaccaggttccaccgatgatcaaaaactcgtttgacctgctgatcccggtgctggtggtggtgctcacgctatacccgctgagcctgctgatccagtcgcagttcggtatgctaatcccacaggccatcatgtcgatattcaaaccgctggtctctgcggctgactcgctgcctgcgatcctgctggcggtgctgattggccacctgctgtggtttgccgggatccacggcgcggcgattgtctccgggatgctgcaaatgttctggctgacaaacctgggggcgaaccagaccgcgctggcggcgagccagcctttgccacacatctttatggaagccttctggacgttctttatcgttatcggcggatcgggggcgacgatggggctggtgttctgctatctgcgtagccgctccgcgcacctgcgctccattggacgtctgagcgtggtaccaagcattttcaatatcaatgaaccggtgattttcggtacgccgattgtgatgaacccggtgttctttattcctttcctgctggcgccgatggttaatgccgtgctggcatgggcagcgatgaagtttgatctgattggccgcgtgatttccgttgtgccgtggacggcaccggctccggttggtgccgcctgggcgctgggctgggatttccgtgcagccattctggtgctggttttggcctgcgtttccgccattatctatttcccgttcttcaaggtgtacgagaaacagttgcttcagcaggaagcggaagaagcacagcgtaatggagaagaggaaaatcagcaggtcgcttag

SEQ ID NO: 114009 - DNA, 459 bp, Enterobacter cloacae
atgagtttgcagtctgtacaacagttttttgccgaacacgctccggatatagagatcattgagcttaaccaaagcacagcgactgttgcccttgctgctgccgcgcacaacgttgaacccggccaaattgccaaaacgctgtcactgaaaattaaaaatgacgtgattctggtggttgcaaaaggcgatgcgcgtctggataacaaaaagcttaaagagacattcggcgcaaaagcccgcatgctcagcagcgatgaggtagtcaccctgacgggtcatcctgttggcggcgtctgccctttcggactggaaaatccgctctctgtttactgtgacatcacattaaaacagtacgcggaagtgttacccgcagcgggtgccatccacagtgcggtgcgtatatcgcccgacagaatggcggagctgaccgcagcaaaatgggtcgatgtctgcatttaa

SEQ ID NO: 114010 - DNA, 693 bp, Enterobacter cloacae
atggaaaagaccactgcaacaagacatatcgccgtcatcgaaagctgctcaatgagcgctgtagggctgaagcatctctttgcgatgcccgccctgagccattaccaggtgcacctgtttagcagattcgccagctttaaagcggcgctctcggatatctcattctatgcggttatctattcactgtctgatgagcgtgaagagcggagaaactgtctggcctgtttacgggatctcaccttcacccacagcgacgtccagcgtatcgtgctggcctctgacgaaatggaggcgaggctggtcagccatctttcgccttctcgcttgcatgggataatcagtaaatcggttccgctaaaacagctaatggaggggctggagacattactcagcgaaacgcatcaggtgaatgacaacatgtacaatcactggtgtgtgagccagaatcgtatgttaagcccaaccgaaagggcaatactgcgttatatgtcatcgggtttttcaatccctgaaattgcggcgcagcttgaacgcaatattaaaaccatccgggcgcataagtttaacgcaatggtaaagctgggcgtcaattctgacgtgggattactggatgcggcggatatcctggcgcatctccctgcccgggaagtgcgtcgttcagctctcaccgttccttcattctctcagcgttaa

SEQ ID NO: 114011 - DNA, 738 bp, Enterobacter cloacae
atgttgccattgaatggtaaacacggagtggtgattagtagagtgccggttatgcaaaatgggctaggtggcgtcatgacgcgtcattttcctgattttgaaataacgtactgccgttcgatgcaggagttgacgctactacaattgcgtcgcgctggggtcgttattgccgatatttcaggtgagtatcgtaatcctcgcggcacgcttgagcagtattatggattaatgaatcagtatcgggacattcactggatattccttgtctcgcgtcccctttatccacttgcagtagagcttcttatgcgtccggaaagcacgctgctttcggatatggaaccgatcgaaggcgttattaacgctattcgcgcgggcagtgaacgtgccgagcgaataagccagacgttattaataccggaaacgtccgatattgaagaagagagtgagcaaatgattgcgctcacccactctgaacgcaaggtgttgcgtttattaggtaaaggttggggaatcaaccaaatagccacgctgctgaataaaagtaataaaacgatcagtgcacagaaaaacagtgcaatgcgccgcttatcacttcgcagtaatgccgatatgtacgcgtggataagcagtacccagggaatgcgagaactcagtttaatgtcggcttatggagagtttgaggaatggaaaagaccactgcaacaagacatatcgccgtcatcgaaagctgctcaatga

SEQ ID NO: 114012 - DNA, 777 bp, Enterobacter cloacae
atgcaggcagatcggtctacgcaacgtgctaccacgcggctatgtattcagtgcgggctttttctcttacaacacggggcagaaagcgccctcgtggaagaactttccacacgccttgggctggcgctggggatggacagcgttgagagctccatctcgtcaaatgccattgtgctgaccaccattaaagacggacagtgcctgacctccacccgtaaaaatcatgaccgcggcattaacatgcacgtcgtgacggaagtgcagcacatcgtgatccttgctgaacacaagctgctcgatctgagggagatagagaaacgcttcaaccagatcaaacctctccggtatccacgctggctggttgtgctgatggtgggaccctcctgcgcctgcttctgcaaactcaacgcgggcggctgggacggcgctgtcgtgaccttctttgccagcagcatcgcgatgtatgtccgccagctgttgacgcacaggcaactgcatccgcaaattaacttctgcatcacggcgttcgtggcgacaaccgtatccggccttcttttgcgccagccttacttcgccagcacgcctactgttgcgatggccgccagcgtattgctgctggtgccgggttttcccttaatcaatgccgtcgctgatatgttcaaaggccacatcaacaccggtctggcgcgctgggcgatagccagcctgctgacgctggcgacctgtatcggagtggtaatggccatgacactctgggggttacgcggatgggcgtga

SEQ ID NO: 114013 - DNA, 465 bp, Enterobacter cloacae
atggattttcttctcgcactggcgcaggacatgctcctggcagcccttcccgccgttggctttgcaatggtgtttaacgtcccacagcgtgcattaccctggtgtgcgctgctgggtgccattggccacggctcacgtatgatcatgatgaccgcaggctttaatatcgaatggtcgacgtttatcgcctccatgctggtcggcagcatcggtattcagtggtcccgctggtatctggcgcacccgaaagtgttcaccgtggcggcagtcattcctatgttcccgggcatttcagcctatacggcgatgatctccgccgtcaaaatcagccactttggctacagcgaaccgcagatgatcctgcttctgagcaacttccttaaagcctcgtcgattgtaggcgcgctctccatcggcctgtcgatccccggattatggctttaccgcaaacgtccacgcgtataa

SEQ ID NO: 114014 - DNA, 453 bp, Enterobacter cloacae
atggacgcaaaaacgaacgacaccaccaacgcgcttctgctggataaccagctctgttttgccctctattcggcaaatctggcgcttaacaagctgtaccggcaactgctggcgccgcttaacctgacctacccgcaatacctggtgatgctggtgctgtgggagcaggatgatattacggtgtcagacattggcgagcggctgttcctggattccgccacgctgactcccctgctgaaacgcctggaaagcgcaggattaatcttccgccagcgttcccgtcaggatgagcgtcaggtcgccgtcaccctgagcgacgcgggccgggcgctgcaacagcaggccgtgacgataccccacgccgtgggctgtgcagcgcagtgtgataccgacaccatgctggcgctcaagcaccagctcgaacttttgcgccaacagcttcatcgcgcgtaa

SEQ ID NO: 114015 - DNA, 429 bp, Enterobacter cloacae
atgtctttagaaaaagttgtctacactgccaaagccaaagcaaccggaggccgtgatggccgcgcaacgtcttccgatggcgttctggatgtcaaactgggtgtgccaaaagagatgggcggcatggggggtgaagtaaccaaccctgaacagctgttcgctgcgggctactccgcctgcttcctgggcgcaatgaagttcgttgcggcacgcgacaaattcgctctgccaaaagacgcctttattgaaggcgaagtggggattggcccgctgccaaccggttttggtatcgaagcgaagctgaacatccacgttgaagggatggacgcagcggaagccaaaaaactggtggatgcagcgcatatcgtctgtccgtactctaacgcgacgcgcggcaatatcgacgtgacgctgaacatcatcgcgtaa

SEQ ID NO: 114016 - DNA, 546 bp, Enterobacter cloacae
atgtcctccagaatcctgactaccagcattgctggcattgatgcctttatgcgcgatcctcgcggtgtgttgacgcacgccgaaggcggcacgctcgcggtatttgccgacaacgccccggcgttttatgcggtcacgccggaacgtctggcgcagcttctggaaattgaagcgaagctgtcgcgtccggcgagcgatgtcatgctggataatcagttttttgacgaacccgccagcgccccggtggccgttccaatggggaaatttcccatgtacgccggttggcagccggacgccgattttcagcggcaggcggccttatggggaatagccctcgcgcagcccgcgacgccagaagagctggcggcctttaccgcttactggcaggctgaaggaaaagtcttccaccatgttcagtggcagcaaaagttcgcgcgcagtctgcaaatcaaccgcgccagcaacaatggccagccaaaacgtgatatcaatgccttttcagaaccggacaaaaaaatccctgatggattccgaggtgcgaaatga

SEQ ID NO: 114017 - DNA, 738 bp, Enterobacter cloacae
atgaaaaacgtcggcgacctgatgaaacgtttgcagaagatgatgcccgccaacgtgaagcccgccttcaccaccggtgaagagctgctggcatggcaaaaagagcagggtaaaattcgcgcggctgccctcgcccgcgaaaaccgcgcgatgaaaatgcagcgcacctttaaccgctcgggcattcgccctctgcaccagaactgctccttcgagaattataaggtcgagtcacaggggcagatgaacgccctcaaccaggcgcgccagtacgtggatgaatttgacggcaacattgccagcttcatctttagcggaaaacccggcacggggaaaaatcaccttgcggccgcaatctgcaacgagctgctgctgcgcgggaagtcagtgctgattatcaccgtggccgatattatgtccgccatgaaggacaccttcagtaaccgcgaaaccagcgaagaacagctgctgaatgatttgagtaacgtggatttgctggtcatcgacgagatcggcgtccagacggagtcccgctacgaaaaagtgatcatcaatcagattgtcgatcgccgttcgtcgtcaaaacgcccaaccggtatgctgacgaaccacaatatcgacgagatgacccgacttcttggcgagcgggtgatggatcgcatgaagctgggtaacagcctgtacgtcatcttcgactgggacagctatcgcagccgcgtcaccggcaaagagtattaa

SEQ ID NO: 114018 - DNA, 483 bp, Enterobacter cloacae
atgaaaaaacagtttcttatcagcatccttactggcgccctgctggtgactggcgcagcgcaggccgcatcatggcaggagtcgctctccagcgcagcaagtgagttaaccaaagagagcggcacttcccagggcgggctgtcagcctcgtccctcaccggcctgctgagtaacagctcccaaagcctgagcgccggaacgatgaacaacgcggcgggcattctggaatactgcgcgaagcagaaactggcttccgttaccgataccgaaaacatcaaaaaccaggtactgggtaaactgggtctggacacccaggagcagaaagcggacaccaactatatggacggtattcagggtctgctgaacgcgcaaaatggccagcagctgaacctcagcacccttggaaattcatctctggcgaaacaggtaaaaacgaaagcctgcgatctggtgctgaaacaaggcgttaatttcctctcctga

SEQ ID NO: 114019 - DNA, 2292 bp, Enterobacter cloacae
ttgtcagagttaatgtcccttgtccttttcctggcttccatcggcgtttatgcctggaaagccggtcgtcacacctggtggtttgtggccaccctggtggtgctcggcatttttattattttaaacattacgttatatgccagcgattactttaccggcgacggtattaacgacgcggtgctctacacgttgaccaacagcctgaccggcgctggtgtgggtaagtacatccttccgggtctggggctggtggtcgccctggtgggcatcttcgccgcgctggcctgggttctgcgccgtcgccgtcaccgtccgcatcatcatggctacagcctgctggcgctgtgcctggcgctggcctccgtggatgccagcccggcattccatcaaattaccgagctggtaaaatcccagtcgcgcgatggcgatccggactttgcggcctattacaaagaaccctcgaagaagatcgacaatcccagactcaacctggtctatatctacggcgaaagtctggaacgcacctattttgataacgatgctttcccgaacctgacgccagagcttggcgcgctgaaagaccaaggcctcgactttagccacaccatgcagctgcccggtacggattacaccatcgccgggatggtggcctcccagtgcggcattccgctgttcgctccgtttgaaggcaacgcctccgcctcgatgtcgagcttcttcccgcagaatatttgcctcggcgatatcctgaaaaactcgggctatgaaaactactttatgcagggcgctaacctgcgctttgccgggaaagatgtgttcctgaaatcccacggtttcgatcacctgtatggttccgaagagctgaaaaccacggtggccgatccggcctaccgcaacgactggggcttttacgacgataccgttcttgatgaaacctggaagaaattcgaggagctttcccgcgccggtaaacgcttctcgctgtttgcgttgaccgttgacacgcatcatccggatggtttcgtctcacgcacctgtaaacgtcagggctatgacattgacggtaaaaacaacaagtcgttcagcgccgtgacctgtagccaggagcatatcgcggcgttaatcgagaaaatcaaagcgtcgccgtatttcaaaaatacggtcatcgtcgtctcatctgaccatctggcgatgaaaaacagcgcctgggatgagctgaataagctggatcgcagcaacctgttctttgtgctgcgcggcgataaaccgcagcaggagatcattgccgctaaacgtaactcgatggataacggcgctaccgtgctggatattctgggtggcgataacttcattggcctgggtcgcagtacgctgtcgggccagtccctgtcggaaatcttcctcaacatgaaggaaaaaatcctcgcctggaagccggatatcattcgtctgtggaacttcccgaaagagataaaagacttcaccatcgatcaggataaaaaaatgatcgcgttctccggcagccatttccgcctgccgctgctgctgcgcgtgtcggataaccgcgtcgagccgctgccggaaagcgaatactccgcgccactgcgcttccagctggcggaatttgccccgcgcgataatttcgtctgggtcgacaaatgctacaaaatgggccagctctggtcgcaacagctctcgctgtccaccgactggtgcgtctctcaggggcaactcggcggcgagcagaccgtgcaacacgttgacaaaccgcagtggcagggaaaaaccgcgtttaaagatacgattattgataccgcacgctatcagcgcaacgtagacctgctgaaaatcgtcgacaacgacattcgttataaagcagacagcttcatctttaatgttgccggcgcgccggaagaggtgaagcagttcagcggtatttcacggccggaatcctgggggcgctggtctaacgcgcagttgggcgatgaggtgaaaattgaatatacccatccgctgccggagaaattcgatctggtgatcaccgccagggcatttggtcccaacgcaaaccgtcctataccggtgcgcgtcggtgataaagaacagacgctgacgctgagcaacgatgtcaccaccagcacgctgcatttcgataacccaacgcgcagcaatacgctggtcattgtgccacccgatccgcagtccactaacgaagggaatattctcggtcacgctccgcgcaagctggggatcggcatggtggagattaaaattgtgagcagcgctggctga

SEQ ID NO: 114020 - DNA, 510 bp, Enterobacter cloacae
atgacggcgttcactcttcgcccgacgcgcatcgacgacgtcgctgccctgcccgccattgaacgcgcggcggggcagcggtttcgcgacgttcctgagctggcctggctggcagacaatgaggttatttctgttgaagatcacctcggttacgccggacgcggattaagctggctggcgctggctgacgacaggcccgtgggctttattctcgccgaagctcatccatcgacgctgtttattgtggaactgtcggttcacctggactggcagggacgaggtcttggacgccagttaatcgcccgtgccgccgcgcatgcccgcagtctggggctgaactcgctgacgttaacgacgtttcgtgatgtcccgtggaatgcgcccttctacaggcgattagggtttgaaatgatgacgacgctgacgccagaactgcgccagaaacgcgaggaagagacggcgcacggtttagcgtatggttcccgctgcgccatgcgcctgcctctgtaa

SEQ ID NO: 114021 - DNA, 1665 bp, Enterobacter cloacae
atgttaaaccgaatcaagattgtcaccagcttactgctggttttagcgatatttggccttttacaactcacgtctggtggtcttttcttcaatgccctgaagcatgacaaagagaatttcaccatcctgcaaaccattcgccagcaacaatccaccctgaacggtagctgggtggcgctgctgcaaacccgtaacaccctgaaccgcgcgggtatccgctatatgatggatcagaacaatatcggcagcggctcaaccgtcgccgagctgatgcagattgcctctgcgtctctgaaacaggcggaaaaaaactgggcggattacgaagcgctgccgcgcgacccgcgtcagagcgacgctgcggcactggaaatcaaacgtaattacgatatttaccatggcgcgctggctgagctgatccagctgctgggggcgggcaaaatcaatgagttcttcgaccagccgacccagagctatcaggatggctttgagaagcagtacgtcaactacctgcaacagaacgacgcgctgtatcagaccgcggttgaagacagcaacagctcttaccgccaggctatctgggtgctgattagcgtgctggctgcggtgctggtggtgattgttgccgtctggctgggtattcgtcaggcgctgatttcgccgctgaaccgtctgattgacagcattcgtcatatcgccagcggcgacctggtgaagcgcatcgacgtggaaggctccaacgagatgggtgtactggctgactccctgcgccatatgcagggcgagctggtgcgtaccgtgggtgacgtgcgtaacggcgccaacgccatttacagtggtgcgagcgaaatctcgatgggcaataacgatctctcatcccgtaccgaacagcaggctgcctctctggaagagaccgccgccagcatggaacagctgactgccaccgtgaagcagaacgccgagaacgcccgtcaggcgagcaacctggcgctgagcgcgtctgaaaccgcgcagaaaggcggcaaggtggtggataacgtggtgcagaccatgcgtgacatcgccggcagttcgcagaaaatcgccgatatcatcaacgtgatcgacgggattgccttccagaccaatattctggcgctgaacgcggcggtagaagcggcgcgtgcgggcgagcaggggcgtggttttgcggtggttgcaggtgaagtccgaaacctggcgcagcgcagcgcgcaggcggctcgcgagatcaagagcctgattgaagactccgtggggcgcgtggaaattggttcaacgcttgttgaaagcgcgggtgaaaccatgggtgagatcgtgaatgcggtaacgcgcgtgacggatatcatgggcgaaatcgcgtctgcgtctgacgagcagagccgcggtatcgaccaggttgggctggcggtggctgagatggatcgcgtgacgcagcagaacgcctcgctggtggaagagtctgcggccgcggccgcggcactggaagagcaggcgagccgtctgacgcaggccgttgcggtgttccgtattcagcaggaacagatgaaggcgcgcgagttcgcctcggcgaaaagcgttgccgcaccggtagtggcgcgtaaaccggcgaccgcagacgcgggcgataactgggaaacgttctga

SEQ ID NO: 114022 - DNA, 444 bp, Enterobacter cloacae
atgatgcatgactcattaaccatcgcgctgttgcaggcgcgtgaagcggctatgggctacttccgcccgatagtgaagcggcataatctgaccgagcagcagtggcgtatcgtccgcgtgctggccgagcatccctccatggattttcacgatctggcgttccgcacctgtattttgcgcccaagcctgaccggcattctgacgcggatggagcgcgacggtctggtgctgcgcttaaaaccggtgactgaccagcgcaagctgtacgtgtcgctgacgaaagaaggcaacgcgctgtaccagcgtgctcaggctcaggtggaagaggcgtaccagcagatagaggcggaatatacgcctgagaagatgaagcagctcacggcgctgctggaagagtttattgaacttggaaaccgacatatcgccgcgagggacgaagcgtaa

SEQ ID NO: 114023 - DNA, 1278 bp, Enterobacter cloacae
atgaaaggtactgtttttgccgtagcgctaaaccaccaaagccagcgtgtggcctgggctgaggcgtttgaaaaagccccctataacgcgccgccaaaaacggcggtgtggtttatcaagccacataacactgttatccgcgcaggcgaaccgattcccttcccgcagggagaaaccgtgttaagcggcgcgacggtggcgctggtggtgggcaaaaccgccagcaaagtacgcgttgaagaggcggcggcgtacatcgccggctacgcgctggctaacgaaatcagcctgccggaagagagcttctaccgtccggcgatcaaggccaaatgccgggatggattttgcccgctcggcgaacctgtcgccgttaataacgttgataatctgaccatcatcaccgagatcaacggccgcgaagcggaccactggaacacggccgatctgcaccgcaacgccgccgaactgctgagcgccctgagcgaatttgccaccctgaaccccggcgatgcgatattgctcggcactccgcaaagccgcgtcgaagttcgcccgggcgatcgggtacgtattctggcagaaggatttccgccgctggaaaacccggtggtggaggaacgcgacgttgccatcgcttcgcgcacgccgccgcacgccacgctgtttgccctcggtctgaactatgccgaccacgccagcgagctggacttcaagccacccaccgagccgctggtgtttatcaaagcgccgaataccttcaacggcgacaaccagacgtcggtgcgcccgaacaatatcgagtacatgcattacgaagcggagctggtggtggtcatcggcaaaaccgcgcgcaaggtcagcgaagccgaggcgatggactacgtggcgggctatacggtgtgcaacgattacgccatccgcgattatctcgaaaactactatcgcccgaacctgcgggtgaaaagccgcgacgggctgaccccaatcagcccgaacgtagtgccaaaagaagccattcctgacccgcacaaccttcgtcttcgcacctacgtcaacggtgaactgcgtcaagaaggcaccacagcagacctgatcttcagcatcccctacttgattgcgtatctgagtgatttcatgaccctgcaaccgggcgacatgattgccaccggcacgccgaaggggctgtccgacgtggtgccgggcgatgaggtggtggtggaagtggaaggcgtaggccgtctggtaaaccgaattgtcagtgaggagactgcaaaatga

SEQ ID NO: 114024 - DNA, 1467 bp, Enterobacter cloacae
atgaaaaagattaaccactggatcaacggtaaaaacgtcgccggaagtgagtacttccaaaccactaacccggcctccggcgaggtgctggcagaagtggcctcaggcggcgaagccgaaatccatcaggccgttgccgccgccaaagaggcgtttccgaaatgggccaacctgccgatgaaggagcgcgcgcgcctgatgcgtcgcctgggggatctgattgaccagaacgtgccggacattgccgcgatggaaaccgccgacaccggcctgccgatccaccagaccaaaaacgtgctcattccgcgcgcctcgcacaacttcgagttcttcgccgaggtgtgccagcagatgaacggcaaaacctacccggtcgacgacaagatgctcaactacaccctggtgcagccggtgggggtttgcgcgctggtgtcgccgtggaacgtgccgtttatgaccgccacctggaaggtcgcgccgtgcctggccttagggaataccgcggtgctgaagatgtctgaactctccccgctgaccgccgaccgtctgggcgagctggccctcgaagcgggcattccggcgggcgtgctcaacgtggtgcagggctatggcgccacggcgggcgacgcgctggtgcgtcatcatgacgtgcgcgccgtctccttcaccggcggtaccgccaccgggcgcaacatcatgaaaaacgccgggctgaagaagtattccatggaacttggcggcaaatctccggtgctgatttttgaagacgcagacatcgagcgcgcgctggacgccgccctgttcaccattttctccatcaacggcgaacgctgcaccgccggctcgcgcatcttcatccagcagagcatctacccggagttcgtcaaacgctttgccgagcgcgccaaccgcctgcgcgtgggcgacccgaccgatccgaacacccagattggcgcgctcatcagccagcagcactgggaaaaagtctccggctatatccgcctcggcattgaagagggggcaaccctgctggcgggcggcccggacaaaccgaccgatctgcctgcgcacctgaaaggcggcaacttcctgcgcccgaccgtgctggcggatgtcgataaccgcatgcgcgtggcgcaggaagagatcttcgggccggtggcctgcctgctgccgtttaaggacgaagcggaaggcctgcgcctggccaacgacgtggagtacggcctggcatcttacatctggacccaggacgtcagcaaagtgctgcgtctggcgcgcagcatcgaagcgggcatggtgttcgtcaacacccagaacgtgcgcgacctgcgccagccgtttggcggcgtgaaggcctccggcaccgggcgtgagggcggcgagtacagcttcgaggtcttcgcggagatgaagaacgtctgtatctccatgggtgaccatccgattccaaagtgggggatctga

SEQ ID NO: 114025 - DNA, 852 bp, Enterobacter cloacae
atgggtaaattagcgttagcggcaaaaatcacacacgttccgtcaatgtatctctccgaactgccgggcaaaaaccacggctgccgccagtcggccatcgacgggcataaagagatcagcaagcgctgccgcgagctgggcgtggacaccatcatcgtgttcgacacccactggctggtgaacagcgcctaccacatcaactgtgcggaccattttgcgggcgtctacaccagcaacgagctaccgcactttatccgcgacatgacctacgactacgacggcaacccggaactcggccagctgattgccgacgaagcggtgaagcttggcgttcgcgccaaggcgcacaacatcccgagcctgaagctggagtacggcacgctggtgccgatgcgctacatgaacgcggataagcacttcaaagtggtctccatctcggcgttctgcacggttcacgacttcgccgacagccgcaggctgggcgaggccatcgtcagcgccatcgaaaaatatgacggcaccgtggcagtgcttgccagcggctcgctctcgcaccgctttatcgacgaccagcgcgcggaggaagggatgaacagctacacccgcgagtttgaccgccagatggacgagcgcgtggtgaagctgtggcgcgagggtcagttcaaggagttttgcagcatgctgccggagtacgccgactactgctacggcgagggcaatatgcacgacacggtgatgctgctggggatgctcggctgggacaaatacaacggtaaggtggagtttctcaccgagctgttcgccagctccggcaccggccaggtcaacgccgttttcccgctgcccgcgtaa

SEQ ID NO: 114026 - DNA, 381 bp, Enterobacter cloacae
atgccgcactttattgctgaatgtaccgacaacatccgcgagcaagccgacctgccagggctgttcgccaaagtgaacgaggcgctcgctgccacgggcatcttccccatcggcggcatccgcagccgcgcccactggctggacacctggcagatggcagacggtaagcacgattacgcctttgtgcatatgacgctgaagattggcgcggggcgcagcctggaaagccgggaagccgtgggggagatgctgtttgcgctgatcaaaacgcattttgcagagctgatggccgcccgctatctggcgctgtcgttcgagctcgacgagctgcacccgacgcttaattacaagcagaacaacgtgcacgcgttgtttaagtag

SEQ ID NO: 114027 - DNA, 804 bp, Enterobacter cloacae
atgctcgacaaacacacccataccctgatcgcccaccgcctgcatcaggcggaacaatcccgggagcagatccgcgcgatctcgctggagtacccggagatcaccattgaagacgcctacgccgtccagcgcgaatgggtgagcctgaaaattgccgaaggccgcgtgctgaaaggccacaagatcggcctcacctccaaagcgatgcaggccagctcgcagatcagcgagccggactacggcgcgctgctggacgatatgttcttccacgacggcagcgacatccccgtggatcgctttatcgtcccgcgcatcgaagtggagctggccttcgtgctggcaaaaccgctgcgcggtccgaactgtacgatcttcgacgtctacaacgccacggattacgtcatccccgccctggagctgatcgacgcccgctgccataacgttgacccggaaacccagcgcccgcgcaaggtgttcgacaccatctccgataacgccgccaacgcgggcgtgatcctcggcggccgcccgattaaacccgacgagctggatctgcgctggatctccgccctgctctaccgcaacggtgtgatcgaagagaccggggtcgccgcaggcgtgcttaaccacccggcaaacggcgtggcgtggctggcgaacaaactcgcgccatacgacgtgcagcttgagccaggccagatcatcctcggcggctcgtttacccgcccggttgccgccagcagaggcgacaccttccacgtcgactacggcaacatgggctccatcagttgccgctttgtgtag

SEQ ID NO: 114028 - DNA, 795 bp, Enterobacter cloacae
atggaaaatgcatttaagaccgcgctgaaagccggaaagccgcaaatcggcctgtggctggggctgaccagcagctacagcgctgagctactggccggggccggttttgactggctgctgatcgacggggagcacgcgccgaacagcgtgcagaccgtcctgactcagctccaggccatcgccccttatcccagccagccggtggtgcgcccatcgtggaacgatccggtgcagatcaagcagctgctggacgtgggggcgcaaaccctgctggtgccgatggtgcaaaacgccgacgaagcccgtctggcggtcagcgccacccgctatccgcctgccggcattcgcggcgtcggcagcgcgctggcgcgggcgtcgcgctggaaccgcatcccggagtatctgcatcaggctaacgacgccatgtgcgtgctggtgcaaatcgaaactcgcgaggcgctgaaaaacctgccgcagatcctggacgtggaaggggtggacggcgtgtttatcggcccggcggatctgagcgccgacatgggcttcgccggtaatccgcagcacccggaggtgcaggccgccattgaacaggcgatcgcgcagatcctcagcgcgggcaaagcgcccggcatcctgatggcgaatgaacagctggcaaaacgctatctcagcctcggcgcgttgtttgtcgcggtcggcgtggataccaccctgctcgcccgcagcgccgaagcgctggcggcccgctttaccgacgtcaccacagcagttgataacaataaatccgtctactaa

SEQ ID NO: 114029 - DNA, 1344 bp, Enterobacter cloacae
atgacgacctcaaccctgcataataaagctgttgaacatcgcgttattaataagctgttccgtcgtttgatcgtgtttctttttatcctgtttgttttctcgtttctcgatcgcatcaacatcggctttgccgggctgacgatgggcaaagatctgggcctcacgtcaaccatgtttggcctggccgcgacgctgttttacgtgacctacgtgctgtgcggtatccccagcaacatcatgctggcgaaggtcggcgcccgccgctggatcgccgggatcatggtggtgtggggcatcgcctctacctgcaccatgttcgccaccagccccgaaacgctttatgtcctgcgcatgctggtgggcattgccgaagccggtttcctgccaggcattctggtctatctcacctggtggttcccggcgtatcaccgcgcccgcgccaacgcgctgtttatgatcgccatgccggtgaccatgatgctcggctcgatcctctccgggtacattctggcgatggacgggctgtggaacctgaagggctggcagtggctgttcctgctggaggggctgccatcggtggtgctcggcgtggtgacctggttctaccttaacgacaccccggatcaggccacctggctggatgatgacgaaaagcaggcactcaaaacgatgatcgcccgcgaacaggagctggccattgcgcacgccgccacgccgcgctcgacgctgcgcgaggtgctgacgcccgccgtgctgctctacacgctggcctacttctgcctgacgaatacgctgagcgcgatcaacatctggacgccgcagatcctgcaaagcttcaacaccggcagcagcaatatcgtgattggcctgctggcggcgattccgcagttttgcaccatcctcgggatgatctggtggagccgccgctccgacaggctgaaagagcgaaaaaagcacaccatcctgccgtatctgtttgcagcggcgggatggatgctggcctcggcgaccgatcacagcctgatccagctgcttggcatcatcatggcctcaaccggatcgtttaccgccatggcgatattctggaccacgccggatcaggttattagcctgcaatcccgcgcggtggcgctggcggtgatcaacgccatcggcaacgtcgggtctgccgtcagcccattgctgataggtattctgcgcgacgcgaccggcagcttcagctcgggactgtggttcgtggcgggtctgctggtggtgggcgcgctggtgctgacgcgcattccgatgacgcagcgggatcaacagaggaacgatcatgtgccagagccccatcgccaacattga

SEQ ID NO: 114030 - DNA, 891 bp, Enterobacter cloacae
atgtgccagagccccatcgccaacattgatatcagcaaggattacgacgaaagtctgggcaccgacgatgtgcactaccagtcgtttgcccgcatggcggccttttttggccgcgacatgcaggcgcaccgccacgaccagtattttcagatgcattttctcgacaccgggcagattgagctccagctcgacgaccaccgttactcggtgcaggcgccgctgttcgtgctaacaccaccgtcggtgccgcacgcgtttattaccgaatccgacagcgacggccacgtgctgacggtgcgcgaggatctcatctggccactgttagaagtgctctaccccggtacgcgggaagcgttcggcctgccggggatctgcctgtcgcttgccgacaggcctgacgagctggcggcgctgaagcactactggcagctgattgcccgggaatccacggaacaactgcccggtcgcgagcatacgctggtcctgctggcccaggccgtttttaccctgctgctgcgcaacgcgaagctcgacgaccacgcgtcaggcggcatgcgcggtgagctgaagctttttcagcgctttaaccagctgacagatgctcattaccacgagcactggacggtgccggagtatgcaagcgaattgcatctcaccgaatctcgcctgaccgatatctgtcgccgcttcgccaaccgctcgccgaaacggctgatcttcgaccgccagctgcgggaagccaggcgtttgctgctgttttccgacagcacagtgagcgaaattgcctggcagctggggtttaaagatccggcctatttcgcccgtttttttaaccgactgacggggtgctcacccagcgcataccgggcgcagaaagtaccggtttcctga

SEQ ID NO: 114031 - DNA, 1563 bp, Enterobacter cloacae
atgaagcctgaagatttccgcgctgatgccaaacgtccgttaaccggtgaagagtatttaaaaagcctgcaagatggccgtgagatttatatctacggcgagcgcgttaaggacgttactacccacccggcatttcgcaatgcggcggcgtccatcgcccagatgtacgatgccctgcacaagccagacatgcaggataccctctgctggggtaccgataccggcagcggcggctacacccataaattcttccgcgtggcgaaaagtgccgacgatctgcgccagcagcgtgacgccatcgccgagtggtcgcgcctgagctacggctggatggggcgtacgccggactacaaagccgcgttcggctgcgcgctcggcgctaaccctgccttctacggtcagttcgagcagaatgcccgcaactggtacacccgtattcaggaaaccggcctgtactttaaccacgccatcgtcaacccgccgatcgatcgccataaaccggcggacgaggtgaaagacgtttacatcaagctggagaaagagaccgacgccgggatcatcgtcagcggcgcgaaagtggtggccaccaactcggcattgacccactacaacatgatcggcttcggctctgcgcaggtgatgggcgaaaacccggacttcgcgctgatgttcgtcgcgccgatggatgccgaaggggtgaagctgatctcccgcgcctcttacgagatggtggcaggggcgacaggctctccgtacgactacccgctctccagccgctttgatgagaacgacgccattctggtaatggatcatgtgctgatcccgtgggaaaacgtgctgatctaccgcgatttcgaccgctgccgtcgctggacgatggaaggtggcttcgcccgcatgtacccgcttcaggcctgcgtgcgtctggcagtgaagctcgacttcatcaccgctctgctgaagaagtcgctggagtgtaccggcaccctcgagttccgcggcgtgcaggcggatctcggcgaagtggtggcgtggcgcaacatgttctgggcgctgagcgactccatgtgctccgaagccacgccgtgggtaaacggcgcgtatctgcctgaccacgcggcgttacagacttaccgcgtgatggcaccaatggcctatgcgaagatcaagaacatcatcgaacgtaacgtgacctcggggctgatctacctgccgtccagcgcgcgggacctgaacaacccgcagatcgaccagtacctggcgaagtacgtgcgcggctccaacgggatggatcatgtcgaacgcatcaagattctgaaactgatgtgggatgccatcggcagcgagtttggcggacgtcacgagctgtacgaaatcaactactccggtagccaggatgaggtccgcctgcaatgcctgcgtcaggcgcaaagctccggcaacatggacaagatgatggcgatggttgaccgctgcatgtccgagtacgaccagcacggctggaccgtaccgcacctgcacaacaacactgatatcaacatgctggataagctgctgaaataa

SEQ ID NO: 114032 - DNA, 510 bp, Enterobacter cloacae
atgcaatctgaagaacgcctgcgttttcgcgacgcgatggccagcctgtcggcggcggtgaatgtgatcactaccgagggcgatgcgggtcgctgcggcattaccgccaccgccgtctgctcggtcacggacaccccgccttcggtcatggtctgcattaacgccagcagcgccatgaacccggtcttccagggcaacggcaaactgtgcgtcaacgtgctgaaccacgagcaggagatcatggcccgccactttgccgggatgaccggcatggcaatggaggagcgctttgctctctcctgctggcagaaaggaccgctggcgcagccggtgctgaaaggcgctctggcaagcctggaaggtgagataacccaggtgcaaaccatcggcacccatctggtctaccttgtggagattaagaacatcatcctcagcagcgaggggcacggcctgatctacttcaaacgccgtttccacccggtgatgatggagatggaagccgcgatttga

SEQ ID NO: 114033 - DNA, 258 bp, Enterobacter cloacae
atggccccttcaccccgaagccgctcggctgaacgtctggttgaaatcattattgccctgcaccgcaacggaagcgttaatcgccgcgatctgatgcaaaaatttggcattaccgaacgcacggtgtaccgcgatttacaggcgctttccccgattattgaacacgacggcaaagggcgctatcagctgctgccgacgtatcagccctgccgctgcgtgcactgccctgaagcgaacgacaaaagctcacagggctag

SEQ ID NO: 114034 - DNA, 2154 bp, Enterobacter cloacae
atggatactaaaaaactacttaagcacgtgccctgggccatcctcgggatcatcggtgctttctgtctggcggttgtcgcattacgccggggcgagcacgtcagcgccctgtggatcgtggtcgcgtcggtttccgtctaccttgtggcttatcgctactacagcttgtacatcgcgcagaaggttatgaagctcgacccgacgcgcgccaccccggcggttattaacaacgacggcctgaactacgtgccaaccaaccgttacgtgctgtttggtcaccactttgccgctatcgccggtgcaggcccgctggtcggcccggtgctggccgcgcagatgggctacctgccgggtacgctctggctgctggcgggcgtggtgctggcaggggcggtgcaggactttatggtgctgtttatctcctcgcgccgtaacggttcgtcgctgggcgagatgatcaaagaggagatgggccgcgtgccaggcacgatcgccctgttcggctgcttcctgatcatgatcatcatcctggcggtgctggccctgatcgtggtgaaagcgctggccgaaagtccgtggggcgtcttcaccgtctgctctaccgtaccgattgcgctgttcatgggcatctacatgcgcttcctgcgccctggccgcgttggcgaggtgtcggtcatcggtatcgtgctgctggtcgcctccatctacttcggcggcgtgattgcgcacgacccgtactggggtccggcgctgacctttaaagacaccaccatcaccttcgcgctgatcggctacgcattcatctcagcgctgctgccggtgtggctgattctggctccgcgtgactacctggcaaccttcctgaaaatcggcgttatcgtcgggctggccattggtattgtgatcatcaacccggagctgaaaatgccggcggtgacgcagtacattgacggtaccggtccgctgtggaaaggcgccctgttcccgttcctgtttatcaccattgcctgcggtgccgtgtctggcttccacgcgctgatcgcctccggcaccacgccgaagctgatggccaacgaaaccgacgcgcgcttcatcggttacggcgcgatgctgatggaatccttcgtggcgatcatggcgctggttgcggcgtcgattatcgagcctggcctgtactttgcgatgaacaccccgccggcgggtctcggcattaccatgccaaacctgcatgagatgggcggcgaaaataccgcgctgatcctggcacagctgaaagacgccagcgcacacgcggcggcgaccgtcagctcctggggcttcgtgatttcgcctgagcagatcatgcagaccgcgaaagacatcggcgaaccgtccgtgctgaaccgcgcaggtggcgcgccaacgctggcggtgggtatcgcacacgtgttccacaaagtgctgccgtgggcggacatgggcttctggtaccacttcggtattctgtttgaagcgctgttcatcctcaccgcgctggatgccggtacgcgtgcaggccgcttcatgttgcaggatctgctgggtaacttcgtgccattcctgaagaaaaccgactcgctggtggccggcgttctgggcactgcgggctgcgtaggcctgtggggttatctgctgtatcagggcgttgttgacccgctgggcggcgtgaagagcctgtggccgctgttcggtatctctaaccagatgctggcggctgtggccctggtgctgggtaccgttgtcctcgtgaagatgaaacgcaccaaatacatctgggtcaccgtggtgcctgcgctgtggctgctgctctgcactacctgggcgctgggtctgaaactgttcagcaccaacccgcagctggaaggcttcttcttcatggctaaccagttcaaagagaagattgccgcaggcggcgcggatctgaccgcgcagcagattgccaacatgaaccatatcgtggtgaacaactacaccaacgcgggtctgagcattctgttcctggtggtggtgtacagcattatcttctacggcatcaaaacctggatgaaagtgcgtaacgttgagggccgtacggacaaagagaccccgtacgtaccggtgccggaaggcggcgtgaagacctcctcacaccattaa

SEQ ID NO: 114035 - DNA, 204 bp, Enterobacter cloacae
atgtttggtaacttaggcgaagcaaaaaaatacctcggtcaggcggcgaaaatgctgattggcattccggactatgacaactacgttgagcatatgaagaccaaccatccggataagccgtacatgacctacactgaattcttccgcgagcgccaggaagcgcgctacggcggaagtggagaaggcggcgtccgctgctgctaa

SEQ ID NO: 114036 - DNA, 954 bp, Enterobacter cloacae
atgaccccgattgccgttaccctgctgaccggtttcctcggcgccggtaaaaccaccctgctgcgccacattctgaacgagcagcacggcttcaaaatcgccgtcatcgaaaacgaatttggcgaagtctccgttgacgatcagctgattggcgaccgcgccacccagatcaaaaccctgaccaacggctgcatctgctgcacccgctctaacgaattagaagacgccctgctggacctgctcgacagccgcgatcgcggtgacatcgacttcgaccgtctggtgatcgagtgcaccggcatggccgaccccggcccgattattcagacttttttctctcatgagatcatttgccagcgctacctgctggacggcgtcatcgctctggtggatgcggtacacgccgacgagcagatgaaccagttcaccatcgcccagtcccaggttggctacgccgaccgcatcctgctgaccaaaaccgacgtggcgggtgaaagtgaaaaactgcgcgagcgcctgacgcgcatcaactcgcgtgcgcccatttacacggtgacgcatggcgatatcgatctcgctcagctgttcaacaccaacggctttatgctggaagagaacgtcaccgcgaaaccgcgcttccactttatgtccgacaagcaaaacgacgtgacgtcgattgtggttgagctggactacccggttgacatcagcgaggtctcccgcgtgatggagaacctgctgctgtcatttgccgacaagctgctgcgctataaagggatgctgtggatcgacggcgagccgaaccgcctgctgttccagggcgtgcagcgcctgtacagcgccgactgggatcgcccgtggggcgatgaagcgccgcacagcgtgatggtgtttattggaatacagctgccggaagaggaaattcgggcagcgtttgcggggctgaaaaaataa

SEQ ID NO: 114037 - DNA, 1269 bp, Enterobacter cloacae
atgttaagtcgtgaatacattaaaaggttaaatgttaacattattttcattcttgttgtgtttacagttggaagcgatctttttatagaggcttatccaagaaagctattttacatgggttgttatctttctatttttggccttctttttttggaaagttggaagggttttcgtcaatggctattgagtaataaaatcgcaatagcatttttgttgagcattgtgcttctcggtgccagtaagctaatttggtcgatgatatttccatcgacacatttacaggatattaaagataattattatgccggtggaaagttgctcatcctgtcaggagtaatggcattttatttgcttaaatccgtaaatgtaatttcaatccaaagctggaaattcgctgcttgcactagcgttgttctaggtttactcaccgtttggtttggttaccaggagcaagcgactggtataaccagaattaaattactagccgatgctgctacgactactgcttatataatggttgttcagtcagttctgtgtttttctcttattaaaaaagcagtttcaaatcagctttaccgtactgtatttaacattgctacatttttcatattctcttatttattactgatgacagaaaccagaggcgctataggcacttttttcattgtctgcttcgtcctggcatgttttgaattgagaaatgtaaagcctcgttattggtttttagcattactggcaatatccatcattggcggagggatagcttataagatgcaaaagagaattgttgaggcttatgataacatccaacaattacaaaaaaataatgctaacacatctttaggagcacgttttgttatgcttgacgcaggacagcacgtagcgagtttatcactttttggtcaggatgcagaaaagcgttataataatgcaagagaatatattgaacaaaactataaaagcgcggaagcagtcagggctataaaatatcatttccataatgatataattgaaagctttagcttacagggccttttaggcgtcattgctattatattgttttatgtcactggttttttagcttcctgcgaaaaaaagaataagtttaatgttgggttgctgctttatatgtcagcgctatttcttatgggattgacagatgtcctctttatccaacgaaatacagcaatggtaattggtgcttgtgctgtaatcttacttctctgccagagagatgagaataaaaaaatcgaaaatgtgagacagtaa

SEQ ID NO: 114038 - DNA, 1023 bp, Enterobacter cloacae
atgatgaacccaaccattcttaatttaaacgaaaatatattgggcgtgcaagtaacgaattttaatctcgatgttgaagttcaatattcagcagttgtttatggtgtcgatgaaaattttctaaagcattgtgggatctcgatgttatcaattgtggaaaaaacttcggaagttccattgcattttttcattattacagataaaagcaatgaagttgacttttccagattgcagtctattatcaagaatactcaacatgcactgacaattattattgtatctgctgacgctctggatgtttttcctaagaattcaattttcccggtctcaatatatttccgtctcctggctccgtatgtaattaaaggatatcgttattttttatatgttgacgccgatattatagcgctggatagtatttatgatctattagaaaaccataagccgataaataatatttgttgtgctgtcagggagccggagcatcagactgctctttcagaatctattaatatgtctggttgcgattattttaattctggcgttctttatgttgatgccagaacgtggaatgaaaataaaatatcgcaaaaagtttttgaatgcttactggagcgtggggctgactttaagtattttgatcaagatgctctgaatgttgtcctgaacgaaaaaataatgtttatagatggcaagtataattgccaaataaaggcaggacacaaaaagggagatttcatgcgtgaaccacccaatgaaacagttttgttacattatgttggtagcgataaaccatggcagttatggaatcaacagcaaataagcacctactatcgtaaatataaaaaaatgtcaccctggtgtgatgttgaagatgttagtccacgttgtgcgaaagaactaaagaaatgctataaaacgcttaataataagaaacagtttattgaagctttctgtatgtttgttcgttatcatttggctcgtttcttggaaaaaaggcaaactaaacatgttaagtcgtga

SEQ ID NO: 114039 - DNA, 1359 bp, Enterobacter cloacae
atgaaaagaaaaattattcctgtgctaatcggttgtgcgctctctttctctggcctggcggcacagccaaccgcggagcgctacgtcgtcagctttcccgaaggcgcgcatgtcaaatacagcggtgcgtttgccagcgcattcccgaacgggctcccggtggggattggttcgggtttgttattcacgggcaagcagggcgatgcgctgacgtttgcgaccgtgaccgatcgcggtcctaacgcggattcgccaaaaatggggaaaagcgatgccaaaatctttgctaccccggatttcgccccgctgctgatgacgatccgtgtgctaaacggcaaagcggaggccgtggacgcgcgaccgctgcatgatgataaaggcgagatcaacggcctgccgctgcaaagcggcgtgattggatctaccaatgaagtcgcgctaagcgacaccttaaaagtgctgaaaggcgataaccgcgggctggatacggaaggcatcacgccggacgggaagggcggttactggctgtgcgatgagtatggcccgttcctgattaacgtcgacagtaaagggaaaatcctcgcgatccacggtccgcaggcgacggaaggggagaaatccatcgcgggcggtctgccaaacgttatcaaatggcgtcaggcaaaccggggctttgaagggctgacccgcatgccggacggacgcattatcgccgccgtgcaaagcacgctggatatcgacgggaagagcaaaaaacaggcgctgtttacgcgtctggtgagcttcgatccggcgaccgggaaaaccgcgatgtacggctaccctgtcgacagcgcggcctacagcaaaaacagcgacgccaaaatcggcgacatagtggcgctggataaccacaccatcctgctgattgaacagggcgaggataaaaatgacgcaatgcgtaacctcatctacagggttgatctgagcaaggcgagcgatctggcggccttcgacaagccgggcgaatacccggagtttgatgatgagaaaacgctggcgcagcgcggcatcacgcttgcggaaaaaacgcaggtggtcgatctgcgtgcgctgggctggcagcaggaaaaggccgaagggctggcgctgattgacagcaaaacgctggcggtagcgaacgataatgactttggcgtgaaggtggcgatgcagaagccagtcgagggcaagaagctcaaggattatcgggtgaacgcgcagggggcgctgatgctggatgacaaaccggttgaaaccaccctcagcgtgaagccgttgaagaaaccggagtccgacagcgagctgtggattgtgacgctgccggaggcgttgaaatga

SEQ ID NO: 114040 - DNA, 483 bp, Enterobacter cloacae
atgggtggcagcattgagcagggtaaaaactttactaacctcaatctggaaatggggaaatcctcatccggcctgtatgcggagagcaactggctgaaaaacaccgatgacggcacccagaccggcggcgttggggcaggctacaacctggaagtgggtccggtgatgctgaatgctggcgcgaaagccatctacatcggcccgaaaaaaggcgataacggcgtggcattcccgattggcggcggcgttaacgttgcgcttacggacagcattcacgtgtttggtgaaggttatgtggcgccagacggcctgaacaacagcgtgaagaactatgttgaagctaacggcggcgtaagctggacgccagtcaaacctgtcacgctgaaagtgggctatcgccacgtgagcgtagacggtaaagacggtcgtccaaaccacacgctgatcgatggtgcatatgtaggcggtggagtgtccttctaa

SEQ ID NO: 114041 - DNA, 1371 bp, Enterobacter cloacae
atggcttaccagacagtaaatcctgccacgaaccagctcatcaaagaatatccctctcacactgacgcagacgttgaagcggcgctgaaggcagccgatgcgctctatcactccgactgggcgaaaggcgacataagccagcgcctgccggtgctgcataagctggcggacctgatcgacgaacgcgtggaggatctggcgaaaatcgccagtcaggagatgggtaagctcaacgaacaaagccgcggcgaagtgaagctgtgcgcgcaaatcgcccgctactatgcggacaacgcgaagcagttcctggccccggtgaagtatgactctgaactcggggaagcatgggttgaacatcaccccatcggcgtgctgatggccgtcgagccatggaacttcccgtactatcagctgatgcgcgttctggcgccaaacctggcagcgggcaacccggtgatcgccaagcacgccagcatcgtgccgcactgtgcagagacctttgcacagctggtacgtgaagcgggcgcgccggaaggggcgtggaccaacctgtttatctcgtccgaacaggtggcgaacattatcgccgacaatcgcgtacagggggcggcgctgaccggttcagaaaaagcgggtagcgtggttgcggcacaggctgcgaagcacatcaaaaaatcgaccctggaactgggcgggaacgatgtgttcgtggtgctggacgatgccgacctggataaagccgtgaagatcggcgttaacgcgcggctgaacaatgccgggcaggtctgtaccgcggcgaagcgctttatcctgcatgaaaagattgcagacgccttcctgagcaaattcaccgaggcgtttaagcaggtgaaaattggcgatccgctggacgaaagcaccacgctggggcctttgtcatccaaagacgcgctggagacgctaactaaacaggttaacgaggcggtgaaaaatggcgcgaagctgcaccatggcggcaagccggttcagcgtgacggaagcttctttgagccgacgatcctgacacatatctcgcgcgataacccggcgtacttcgaggagttcttcggtccggtagcgcaggtttacgtggtgaaaagcgacgacgaagcggtcgcactggctaacgattcccactacggtctgggcggcgcggtgttcagccagaacatcgagcgcgcgaagaaaatggcgtcgcgcattgagaccgggatggtatacatcaactggctcaccgacactgcggcagagctgccgttcggcggcgtaaaacgttcgggttacggacgcgagctgtcggacctggggatcaaagagtttgtgaaccagaagctggtggtcgttcgcaagtaa

SEQ ID NO: 114042 - DNA, 753 bp, Enterobacter cloacae
atgaccgatacccgccacatccgccagacctttaaccgcgcagcaggccttgagctgcgcagtacgtggcaaagcacccgggcatataaacgtcattgccatccacagctctccatcggcgcgattgtggaaggccagacctgctgcgtaagtcatggcaatgcgtacgttcttgatcccggtgatcttatcatgatcccggcttatgccccgcacagctgcaaccccgttgtcgggaagccgcgcagttaccatatgctctatatcgacaccgatcttcccctggcgctacaggttattcgcgatcccacgctctttaagcactttcttgccgttgtcgggacgatgtcctccgcatccgtggagaccctgctttctgcccttccccgttgcgcgggtgagatgaatgcacctcgctcaaccagccagcaggttcagcaggcgttactctccgaccttgccgcaccgccttcccttgacgaactcgcccaacgattctcactgcgcaaggagacgctgatccgcactttcaggcaggataccggcctgacgccgggcagtttcctcaacatttcgcgcgtggagtacgccaaagcgcggctgcgcgcgggggatgatatcgccgacgtgggctaccagagcgggtttgccgaccagagtcattttcataagaccttcgtgaattataccgctgccacgccgcgccaatacgccacgggccgatcaatatcagacaataatcaggatacgtaa

SEQ ID NO: 114043 - DNA, 654 bp, Enterobacter cloacae
atggaactgttatttccctccgcctttcttgccctggcgctggcgcattttgttgccctgttaagcccgggcccggatttcttcctgctggtaggctacgccgcccgctaccggctgcgcggcagcgccggattgtgtctcggcatcgcagcaggtaacgggttgtatatcttactggtgattatcggctggagcgcgctgcgccagtttgggtggctgtttacgcttatcgaactgtccggcgcgctgtacctgctgtggattggctcgcatcttgtgcgcagccgcccgcagccgctggcgctggaagaaacccgccagcgctgcccttctctgcggaagcaaatcctgctggggctgggttcggcgctgttaaatcccaaaaacgcgttattctacctggcgctaatgacagcgttactcgggccggacgtcacgctgcttcagcaggcgacctgcggcgtctggatggtgatggtggtgctggtatgggatctggcgctggtatcgctgatggggttaccggcggttcagcgaaagctcagccgttcgctctggctgatagagcgcacggcgggggtggtgttgatggggtttggtgggtgggtgctgtggcggtttttgcacttttcccccgtatccctctatccttaa

SEQ ID NO: 114044 - DNA, 1272 bp, Enterobacter cloacae
atggaaaaacataccgaactcaaacgcgccaagcttctcgcgctgtcgctgctgctgattgccgtcgcagcgtttatcaccaccctgttcctgccgcaaaccttctgggtgcgcggcgtaaaggccattgccgaagcggcgatggtcggcgcgctggcggactggtttgccgttgtcgcgctgttccgccgggtgccaattccctttatctcgcgccatacggcgattatcccgcgcaataaagaccgcatcggcgacaatctcggccagttcgtgcaggaaaagtttctcgatacgcaatcccttgtcgatcttatccgtcgctacgagcccgcacagatgattgggacctggttcagccagcccgataacgcccggcgcgtggggcagcatctggtgcaggtgatgagcggttttctggaacttaccgacgatggacgcattcagcgcctgctcaaacgcgccgtccacaaggctatcgacaaagtcgatctaaccgagaccagcgccgtcatgctggaaagcatgaccaaaaacaaccgtcaccaggtgctgctggacgccatcatcaaccgcctgattaccctgattcagcgggaaagcacgcgggaatttattgccgaccagatcgtccactggcttaagaccgagcatccgcgcaaggcgatggtgctgcccaccgagtggctgggcgatcaaagcgcggagatggtgtcgaacgcggtgaacacgctgctggacgatatcagccacgaccgcacgcaccagatccgtcaggcgtttgaccgcgccacgatcaagttcatcgacaatctgaaaaacgatccggagatgacggcgaaagccgagaatatcaaacactacctgaagaatgacgaagcctttaaccgctatctgggggaaatgtgggctgacctgcgccagtggctgaaaaatgacatgcagagcgatgattcccgcgtgaagcagcgtatcgccaacgccgggctgtggtttggcgaaacgctgaccaacgacgccagcctgcgggcgtcgctgaatgagcatctggagcaggccgcgcaccgcgtggcgccggatttcgccgcgttcctgacgcgccatatcagcgacacggtgaaaagctgggatgccaaagacatgtcacgccagatagaactcaatatcggtaaagatcttcagttcattcgcgttaacggtaccctggtgggcggaacaattggcctgatcctgtttctgctctcgcagttgcccgccgtgctggggcattaa

SEQ ID NO: 114045 - DNA, 1077 bp, Enterobacter cloacae
atgtctattagcaccctggcgcgggtatttaccccgcacggcaacatcgtctatacggcaaacgactttcgccagaccctgcgtatcgtctttgccgggatgattgcgctcagtatttcgagtttctacaacaccagctacggcgtgttttttgtggtctatccgatcatgctgctctcgctggtgccggtgtttaaccgccacgtggcgaagcagtttatcttcagcgcctcgctgaactgcatcgaaatggtgtttatcatcggctatctgtcccagtggccggtcattatgacgctggtggtgtttgccctgtacgtgatgcgttttcgctttatgagtaaggggccgctgttcctgttcggctcgatgggcgtggtttgccagagcgtgatgctcaactttatgagctaccccaccaccaactggcacacgcttttattctctaacatcgaagcgagcgtaatggcggtgtgcctgagcgcgctgatgaactacctgctgccggacgtggagccgcgtaagccgccgccgctgatcgagaaagatgacgcccgcgtgcgccacgagtctctgctctcgggcaccgtggcgacgctgattttcgtggtgttccagatgagcgacttaagcgattcgctttcggcgctgatggcgggcattctgatcctgttcccgatgcactatcgcggctcggttatcagctccatctggcgcgtagtcggcgtggtgctggggtgtctctatatccttgtcgtccagcttatcctctacgatcacagcagccatatgctgctgatgatgccgctgattggccttggactggcgtttggcgcgcgtctgcacgtaatggagaaggtcggcgccggggtaggcttcgccagtatcaccaccatcggcattatgttcgggcagaacatgcatccggacagcgacctggtgttcagcgatctgtaccgcatcacctccgtcaccttcgcgctggtggtcacgctgacgatggtctttctggtgcacctgatcctgaaccgcttcgaggcgacgcgctacgttatcgcgccgccaaaagcagattaa

SEQ ID NO: 114046 - DNA, 1065 bp, Enterobacter cloacae
atgactcctgaacaaaagtttgcccgctgggtaagggtgagtattgcctctttcctgctgatgtttgtctactttatcgtcgcggatatctggatcccgctgacgccggactccaccgtgatgcgcgtggtgaccccggtgtctgcccgcgtctccgggtatgtggcggcggtacatgtccacaacaatagccaggttaagagaggcgatctgctgtttgagctcgacgccacgccgtttcgcaataaggtcgaagcggcgcagattgcgctggaacaggcgcgtctgtctaacgatcagctggacgcgcagattgccgcggcgcaggccagcctgaaaaccgcggtgctgacggcgcgtaatgacaaagttaccttcgaccgctaccagaaactgagtaccttgcagagcgtgtcgcaggcggatctggataaggtccgtaccacctggcagagcagcgagcagtccgtcagctcgattcaggcgaatattcataacctgcgcattcagcgcggcgagcgggatgagcaccgcaacgtgacgctgcaaaaataccgtaacgcgctggatgaagcggagctgaatcttggctggacgaaggtctacgccgaggcggacggcacggtcagtaacctgcaattaagccccggtttttacgcctcgtccggttcggctgcgctggcgctggtgaacacccggatcgatatcgtggcggatttccgcgagaagagcctgcggcatacccaccaggggaccgacgccgccgtggtgttcgacgccttcccggggcaagttttccgtgcccacgtcaccagcagcgacgcggggatcctcgccggacaggaggccgtaaacggtcaactttctgaaccggaaacctccaaccgctgggtgcgtgatgcccagcgtatgcgcattcacgtggcgctggacgaagccttaccgaagtcgctgccgaccggcgcgcgcgccaccgtgcagctctacaatagcgaagggccgtttgcgcgattcttctccgggatgcaaatccatctggttagcctgcttcactatgtctattag

SEQ ID NO: 114047 - DNA, 471 bp, Enterobacter cloacae
atgagtgaagaagatctgtttagccgcaggccgatgggcatgcggatggcgatgatcgtgcgtcagtggcgcgcagtcatcgacgacgccattctcgacaccgggttaacccagtcgagctggacggtgatgatgcagcttcatcaactcggggataacgtctcggtcagcgagctggcggaagtgcaggggattgaactgcctccgctaatgcgtacgctgacacagctggaaaagcagggctacctgctgcgcaccgtctcgccgtatgacaagcgtatccggctgctgacgctgacgcctgagggaaaagccattcttgaaaggctctctcaggtgattgagacgtatcaggcgcgcgtatcgcaaaacatcgcgccggaacatatcaatattttcagcgccacactcaatcaaatcgcctgcaatttgcggacaatccgcgaagaagataataagaccgaaaaataa

SEQ ID NO: 114048 - DNA, 720 bp, Enterobacter cloacae
atgtatgacgttcatgtgattttcgacaacaggcccggcgagcagggtgaaattgcggcggcgctggaacaggccattgccgctgtagcggctacaatggccgatccgtcgcgcgtgaagatgctctgtgctctgatggacgggcgggcgtggacggctacagagctgagcgtggcggcagacgttgcgccgtcgaccgccagtgggcatctcgcgcggctggtggagggaaagctgattacctgcctgtctcaggggcggcatcgctactatcgcctggcgggacacgacgtggcggcgcttgtcgagcagatgatggggctctcctggagccgcatcacgtcgccggaaacctccgcgccaaaagccctgcgcgaagcacgaacctgctacgaccatcttgccggaacggtggcggtgcatatctatgaattcatgcaggcggaaggctggcttgaggcagacggttcagcgctcacgctacatggccgcgagcagtttctgaagcttggtattccgttaaatcccaatacccgtcgcaaggcgtgctgcgcctgcctggactggagcgagaggcggtttcatctggggggagaggccggcgcggcgctgctcatccacatggaaagcaaaggttggatccagcgggtggcggggtacagggaggtggtggtgacggcttcggggaaaagtgccgtcaggaagcattttagccgctaa

SEQ ID NO: 114049 - DNA, 324 bp, Enterobacter cloacae
atgattgcagtccttttcgaagctaaagctgcaccggcgcatcaggcgcgctatcttcaacttgccgcagagcttaagcctttgctggccgatatcgacggctttattgatatcgaacggttccagagcctgacgaccgacggcaaaatcctgtccctttcctggtggcggtatgaagaggccgtccgccgctggaagcagaatgtcttccatcaggccgcgcaggccgaaggccgggcgtcgattttttctttctaccgtattcgcgtggcgcagctgatgcgggagtacagctccgaaacgggagggcacgcgcatgtatga

SEQ ID NO: 114050 - DNA, 480 bp, Enterobacter cloacae
atgagcacccgcgtaaaccaccacaaagccacacctgcactcgccaacgcgctttccgccctgagcatggaagtggcgaaaacctccattgatccggcgctgaagcacctgatcgacattcgcgtctcgcagctgaacggctgtaccttctgcctggatatgcattcgaaagaggccaaaattgccggcgagcgcgagctgcgcctgtaccatctggcggcatggcgcgagtcgccgctgttcagcgcccgcgagaaagccgcgctggccttcaccgaagcgctgacccagattggcgttcacggcgtgagcgacgcgctgtaccgcagcgtggcggagcacttctcggacgtggagatttcagagctgaacttcgccatcgtagcgatcaacgcctggaaccgcctgggcattacctcccgcatggagccgggctcgctggatgcggcatatgggctgaacaaggctaacctggagtaa

SEQ ID NO: 114051 - DNA, 1389 bp, Enterobacter cloacae
atgaagccaggctatcacgacatttatacccgctatcgcgataacatcacgcgcggcgtactgaagcccggcgacaaagtgcctgccatccgcgtgctggctgaagagcttaaggtcgcgcgaaaaaccgttgaaacagcctatgccattctgacgggggaaggatatctggtaagccagggcgcgcgcggcacgcgggtgaatccggatcttctgctgcccgcgcaaaacgctccggcagaacaagcgaccggcacgctgccggcgtcgttgattagccagcgcgaacgggccggttttctgcgccccggcattcccgcgctcgacagcttcccctataaaaaatggctgctgctggcaggccaggcgacgcgcgccatgcgtcaggatgaaatgctcaacccgccggtgctgggctggtatccgctgcgcgaggcaattgcccgctatctcaatatctcgcgcgggttgtcctgcaccgcagaacaggtgctgatcaccagcggctacagcggcagcctgcgcctgatcctcgacacgctcgccagccgcagcgataaggtggtatttgaggatccgggctactttatgggccagcagttgctcaagcgcattgtgccccgcctgcacaccgtgccggtcgatcgcgcagggatggatacggactacctgctgcgtaatcaccacgatgcccgcttcgccatcgttaccccgtcgcaccagagtccgctggcggtgacgctctccctgccgcgcaagcagcagctgctcgactgggcgtcacaaaacgaggcatggattatcgaagatgactatgacggcgaatttcactacacccgcaaagtgctgccgtcgctgaaaagcctcgaccagcatgacagggtgatctttatgggcacctttagcaaaaccatcatgccttcactgcgcatgggctacgtggtgatgcccgccagcaccgtcggcgcgtttaccgacagcgcggacatcctcaccagcggccagccggtgctgacgcaaaagatcctcacagcctttctcaacgaggggcattttttccgtcatctgaaaaagatgcgcgcgctctatcaaacccgcagcgactggatgattgccgccctgcgtgaggtctatggtgatctgttcttcaccgagcaaaacgacggtggaatgcatattgtcgcgttcctcgcaaagggaagcgctgaccgggagatcgcccgctgctggcaggaacagcaattgcaggtcaatgcgctttcggcgtggtatcgcgggtcgggcaaacgctacgggctggtgatgggctataacaacgtgcggtcatatcaggaggcggttgagctgctggaaaggccgaaacggcagacgcttacgctgttgagctga

SEQ ID NO: 114052 - DNA, 162 bp, Enterobacter cloacae
atggaattctacgagaatcgttcaaaacgtccgtttatcgcgtttgtctggatagcgaaaacgctgcgtaactggtatcgcatcaaccgtacccgccgtattctgagccagatgagcgacgagcagctcaaggacgtcgggttatcgcgatatgatgtgtga

SEQ ID NO: 114053 - DNA, 1557 bp, Enterobacter cloacae
atggaaaacggccagtacaatacagattcaaaaaccgcttttgtttaccatacagatccgctaaaacggtatctgcatggtggtttacccatcaatctgtactggtttaatgctctgtatggtgaaaaaaaaggatacagcatgacgcgctatcaacatctggccaacctcctggcggaacgtatcgaacaagggctgtatcgcagcggtgaacgtctgccgtcggtacgcacgctgagccaggagcacggcgtgagcatcagcaccatacagcaggcctaccagatcctcgaaaaccgccagctgattacgcctcagccgcgctccggctattttgtctcgaaacgcaaagcccagccgcccgtcccggcgatgacgcgcccggtacagcgccccgtggacgtcacccagtgggacgaagtgatgatgctgctggacgcccgcgccgacaaagagatgatctcctttggcggcggctcaccggacattaaccaaccgagcctgaagccgctgtggcgtgagatgagccgcattgcgcagcataatccgggcgaaatgctgagctatgacgtgctcgacgggcgcctggagctacgcgagcaaatcgcccgtctgatgctggatggcggctccaccgtggcggcaaacgagattgtcatcaccaacggctgccacggcgcgctgtcgatcgctctgctctcggtgtgcaagccgggtgacatcgtggcagtcgagtcaccatcgtttcacggcaccatgcagatgctgcgcggctttaacatcaaggccattgaaattcccaccgatcccgagaccgggatcagcatcgaggcgttagagctggcgctggagcaatggccgatcaaggcggtgatcctggtgccgaactgcaataacccgctcgggtttatcatgccggagtctcgcaagaagcaggtcttagccctggcacagcggcacgatatcgtgattgttgaggatgacatttacggcgagctggcggcggagtacccgcgtccgcgcaccattcattctatggacatagatggccgcgtgctcttatgcagctcgtttaccaaaaccgtggcgccgggcctgcgcgtcggctggatcgtgccggggcgctattacgaccgggtgatgcacatgaagtacgccgcgggcgggtttaacgtgccgggcacgcagatggcggtggcggcgtttattcgcgacggccattaccatcgccacgtgcgccgtatgcgtcagatttatcagcagaatatggaaacctatacctgctgggtgcggcagtattttccggcagagatatgcgtcacccgcccgcaaggaagcttcctgctgtgggttgagctgccggagacggtcgatatggtgtgcgtcagcaagcagctgtgccgtctgaagatccaggctgcggccgggtcgctgttttctgcctccgggaagtaccgcaactgcatgcggatcaacgtggcgttgccgccgacggagaagaaccgcgaagcgctgaggaagatgggcgaggcaattgtgattgcgatggaggagtag

SEQ ID NO: 114054 - DNA, 2091 bp, Enterobacter cloacae
atgtttgttaaatcgcgtctggcactgctggtgggatgggttaccggtagcgttgcttttcctttactggcgcaggatgcccaaaaaactgacaccgtggtggtgacctcgcagatgcagtctgcggccaccaagcttgaaacaccggatattgaaaccccgcagtcggtctctatcgtcactcgcgagcagttcgaagagcagggcgcaaccagcgtgcgtcaggccgtgagctacacgccgggggtctacagcaaccagatcggggcgtcaaaccgctttgactacatggtgctgcgcggcttctcggacggcagcctggataacgtctaccttgacggcctgaagatgatgggcgacaccaactcccacagctcgctggtggttgacccgtggttcctggacagtatcgaagtcgtgcgcggtccggcctccgtgctctatggtcgctcatcgccgggcgggattgtggcgctcacctcccgtaagccatcgttcgatcctggcggggagatcaagctcttcgccggtaacaataaccagcgtggggcgatgttcgacgtcactggcccggttgatgataacgaccgcgtggcggtgcgcctcagcgggatgacccgctatgccgattcccagttcgatccgctgaaggaagagcgttacgccctgatgccgagcctgacctggcgtatcaccgacaacacccgtctggatctgatggcctacctgcaccgcgatccggaaggcggcagccactccggcctgccatatgagggcaccgttgtaccgcacagcggtaagaaaatctccaacaccttcttcgagggcgaggacgattacgacaagtacgatcgtcgggaaaacatggtcggctataacatcgagcacctgtttgacagcggctggtccgtgcgccagaagctgcgctacctgcacaccaaagtcgagctgaaccaggtgtatgccgcaggctggctgaatgacaccgagctgaaccgcggctattccggctccgacgagaagatgaacgccatcaccctggataaccaggtcgacggcagcttcgataccggggcggtaaaccaccgcgtgctgatcggcatggactaccaggaccgcaccaacaacgtcactggctactacggcggcttcccgccgattgacgctttccatcctgtttacggcgcgaagccggactacatcacccagtacagcagggaaaaacacaagctgcgccagaccggctactacctacaggatcagatgtccattgaccgctggcgcctcacgctgggcgggcgttacgaccaggtgagcgtgtcgaacgtcgacaacttcaaccacacccgcagcgatctggataaaaataacttcagcagccgcgcggcgctgctgtatctgtttgataacggcgtcgcgccgtacgtcagctactctaccgcctttacgccgaccagctttgccgacgagcagggcaacattttggatccgatgaagggcaagcagtgggaagcgggtgtgaagtatgagccggaggggatgaacagccagttcagcgcctcggtgttccgcattaaccagaagaacattgccactaaagaggagccgaccgatccgtaccgttccatcggtgaaatcgaatccgaaggcgttgaactggaggcgattggtcagctgaccgacagcctgcgtatgcaggccgcgtacacctacacggatattcgctacaagaagagcagcccggaagaggagggcaagcgcgccgtttatgccccgcgtaacatggccagcgcctggctgagttacgacgtcaaaaccggccctctggatggcctgaccgtcggctccggcgtgcgctatgtcaacgggatcgccagcgatcgccagaacacccatacgcttccgtcgtacacgctggtggatatgaccgtggggtatgacctgtcgaaagtggggctcacgggcgtgagcgcgcagttgaacgtcaataacctgacggacagaagctacgtcgcggcgtgtaactcgctctcttactgctacttcggtgcagaacgcagcattgtgggcagcgtttcgtggaagttctga

SEQ ID NO: 114055 - DNA, 954 bp, Enterobacter cloacae
atgctccagagtgaaaatagatcagcgaaacgcatattttttgttgaagattttcaggtattcggcgagcgctacggcatcgactaccgtttcccccagttaaaagaggcgcaggtcagcggtagccccgtgttgcaggggaatgttgaagagatgatgctctcgtccggcatttcgctgacccactccgacgtacgtgtattacagccctatgaaaccacctctcgccacagcagcccgctctatatgctggtggtgctggaagggtgcgtcacgctcacgctcaatggtatcaattatcccgtccgcccgggcatggcgttcagctcacgtctgagtgaagatcaggtgatgagcgcgcgtcacgatgccgacagcacgctgaaaacgctctcgtttggcgtctacccgcacgatgccggacgtgaagccctgcttgagtcattgcttctggaatggcaaagcctgaatgcacccgcgtttgtctggcaggttcccgagtttgtgatgtcaggtattctgcatgcgcagcggcaggggggaagcgtgctctcacgcaagctgttgctggaggggctgatgtatcagctgctcggccatggcctcaaccagcgccagcagccttgcccgcgccggcctgagcatgcgcgtcttgaacgcgtgcggagcctgctggaacagtctcctgaacgggatcatactctcgcgcagctggcagcccttgccgcaatgagcccaagcagcctgcgcagcaagttccgtcagcgctacggctgcacgctcttcgattaccttcgcgactgtcgccttgcgctggcgcgccgctatctgctggaaggccacagcgtgcagcaggcggcttggatgtgcgggtatcagcatgccaccaactttgccaccgcgtttcgtcgtcattacgggatttcaccgggggacgtgcgcaaactccgctaa

SEQ ID NO: 114056 - DNA, 234 bp, Enterobacter cloacae
atggtagataaaagcgcaattaaggatcacactcaggttgtcgccagctgcggaacgcacgtcggggttgtggaccatcttgatggtgagcgtatcaagcttgcgaagagcgatccggaatcgggcggcaagcaccactttattcctctcggctgggttgataaggtcgaagataataaagttgtcctgaccaaaaaccataaagaggtttttgctgagtggcaggaagcataa

SEQ ID NO: 114057 - DNA, 186 bp, Enterobacter cloacae
atgacgattcgcaataatcgggcagaaatttcactggctcttggtgaagcggttttagacatcgtgcaaaaaggccatgaagtatcgcgagaaaatcttgcccgggcgatgaaaatcaaagcggagaaagagcgcgacgatgagcggcttcttaactactggaaggcctgtaatatgctggtctga

SEQ ID NO: 114058 - DNA, 1122 bp, Enterobacter cloacae
atggcgtatcaactgaacctgaactggccggaatttcttgaaaaatactggcaaaaacaacccgttgtgctgaaaaatgccttcccgaattttgtcgaccccattacccctgatgaactggcgggtctggcgatggagccggaagttgatagccgcctggtaagccatgctaacggcaagtggcaggcgagcaatggcccgtttgagcatttcgataacctcggtgaaaccggctggtccctgctggcgcaggcggtgaaccactggcatatgcccgcagcagagctggtgcgtccgttccgcgtcctgccggactggcgtcttgatgacctgatgatctccttctccgtcccgggtggcggcgttgggccgcatatcgatcagtacgatgtgtttattatccaggggatgggcagccgccgctggcgcgtgggggacaagctgccgatgcgtcagttctgtccgcatccggccctgctgcatgtcgatccgtttgagccgatcatcgacgaagatctggccccgggcgatatcctctacattccgcctggattcccgcatgacggcttcacccatgaaaccgcgctcaactactctgtcggtttccgcgggccgaacggtcgcgatctgatcagcagctttgccgactacgcgctggagaacgatctgggcggcgaacattacagcgatccggatctgacctgccgcgaacaccctggccgcgtggagcagtacgagctcgatcgcattcgccagatgatgatcgacatgattagcaagccagatgattttacgaaatggtttggcagcttcgtctccacgccgcgtcacgagctggatattgccgccgccgagccgccgtattccgtagaagaggtgctcgacgcgctgcaagggggcgaaacgctctcccgcctgagcgggctgcgcgtgctgaacatcaacggcagcgtctttatcaacagcgaacagctggaaacggcggatgtgaacggtgcggatgcgctgtgccgcttcaccgagctcggccaggctgagctgggcgatgcgctgaataatccggcgtttgtggaagagctgaccggtttgattaaccagggctactggttcttcgacgagtaa

SEQ ID NO: 114059 - DNA, 603 bp, Enterobacter cloacae
atgcactacacactgaaagaaagcgacaaggaaaaagcggaaggaacaaacggcgcgggcgctctacagcaaaaactgctggaatcccgttcgattgtcatctccggagagattaaccaggagctggcccagaaggtcatcactcagatgatcctgctgcaaagcgtcagcaacgatccgatcaagctgtacatcaacagtcagggcggccatgtagaagcgggcgacaccatccacgacttcattaagtttatccgtccggaagtgcatgtgatcggcaccggctgggtggcgagcgccgggattaccatcttcctggcggcgaaaaaagagcaccgctacgctctgccgaatacccgctttatgatccaccagccgctgggcggcgtgcgcggtcaggcaacggatatcgaaatcgaagcgcgcgagatcatccgcatgctggagcgcgtgaacaagctgattgctgacgccaccggccagccgctggagaaagtgaagaaagacaccgaccgtaacttctggatgtcaccggcggaagcgctggactacggcatcgtgggtaaactgattacccattatgacgagctgaacctggattaa

SEQ ID NO: 114060 - DNA, 387 bp, Enterobacter cloacae
atgaatattgcacatgtcgcactctggacccgcagcctggacgcgcaggttcagttctgggaaacggtgtttggcggccgcagtaatgaccgctacgtcagcaaaaatcgtccggggtttaaatctcactttattaccctggatgacgggccgaccatcgagctgatgacgctgccgggcctgcccagtgcaccttcgcacccggaatttgtcggctgggcgcatatcgccatcaacgtcggcagcaaagcgcaggtggacagtatggcagcgcaggcgcaggcaagcggctccctgctcagcgccccgcgtatgaccggggacggtttctatgaagcggtgattgcggacccggacggcaaccgtattgagcttgtcggtgcataa

SEQ ID NO: 114061 - DNA, 618 bp, Enterobacter cloacae
atggaacacattgtttatgtggttgatgacgatgacacagtcaggcagtccgttgtcaggctgttggaatctgcggatatacatgcccttggcttttcctcagcagaggcctttctcagccatccctttgaggatctgccctcctgcgtgatcctcgatatgcaaatgcccacgataaccgggtttgatgtcgcagatgcgctgaaagacagcgggcgggaaataccgatcatctttctcaccggccacggcaccatccctatgtccgtccgggcgatcaaaggcggggcctacgaatttctcactaagcccgttgaatccagcgcgctcatcggctccatcgaatccgcgctcaggctggcacagcacaacgccgcccgcgtcaaagagcactacgccctgaaacagcgccatctgtccctcacgccgcgcgagcatgaggtgcttgagctggccgtcagcggcaagctcaacaagcagatcgccgccgagctggccgtcagtgagattacggtgaaagtgcaccgccgccgggtgatggagaaaatgcaggtccgctccgtggctgaactggtcagggccgtcgagcgcctgaccaaacatcagccagcggaataa

SEQ ID NO: 114062 - DNA, 5586 bp, Enterobacter cloacae
atgaacgaacatacgtcgcctgcattttggcccgcccggggaagtctccatgaagggcgggcttttgttctgaaagaggatgtcatttttaccgtgctggcgcaggagggcggcatctcctggatgaacgggcggcatccccagtccggcggttcgtttattattgccaccgcggtcagcgatgaagaagaggagcgggcaacgcggctgctgaaaaacgagtttgccctgcgcgaccggcttcatgacggctgggctatccggcccgtcgcttcaacccagtaccgcggacgttttgcgctggtctacgcgccgttctgctttgaactgctggcgtgccgggcaggtaaggcgatttccgggatcgcccgctttatcgaaatggcgatccgcatctgcggtcccctgcgccagatgcatctgcacaacctgatccacggcgatatcaaacccggggcgttcttcgttcatcacgacgccacctgccgtctttgcagcttcggtctttcctgcggcacctccgacgcgttctcccagtcccggcttgctgcgtctggcggcacgcccgcctacatgtcaccggaacacaccacgcgtacccggcgcgccgtcgacagccggagcgatctctacagtctgggtatcgtgctttatgaacttctgaccgggcgattgccgtttgaactgagcgctgatgaccagaccaactgggcgcattaccacattgcctctgagccgcttgcgccggggcgggtgcgcccggacgtacccggcatgctgtcgaccattatccttaagctgctggagaagaatccggagaatcgctatcagaccgtcgacgggctgattgccgacctcaggcgctgccaggcgacgctgaccgccgaaggtgagatcgtcgactttattcccggccagcaggatcgctctccggcgatccatcttgccgattcgcttttctctgcgcatccgcaggccagcgacgtcatcgccgcgtttgagcgggtcagccagagcggtgcgccggaactggtgacgattggggggccttcggggatcggcaaatcttccgtgatcgccaccacgctgaaatcgctgcaacagcgcaaggtgctgctggcggtgggcaaggtcgatcaatattctcccacgctgccctacggcgtgctgagttcggcgtttcggacgctcacgctgcacctgctcgggctgccagccggggaggtagcgacgtggaaaatccgtctgtcgcgcgcgctggaaggcttcgaggagctggccgtcagcctggtgccggagctgaatttactcctagagaacaaaccgcgtttctctgcggataccttttccatcgacgcgcgggcgcgcttcagccatatggtgctggcgctggtgaaaaccttcgccacccagggcgcgccgctggtgctgctgctggataatgtgcagtggatcgacgccgccagcctgcaaacgctcgatcacctgctgcgcgcctgcggcgccatcccgctgctggtggtggtggcgcaccgcgatctcagttcgctttctgagcccaccttgcagaccgcgctggcgagcctgccagaggcggcgcaacacgccacgacgatcgtgccgcagccgctgtcggtgaaggccgtggcgcgctggctcggggggatttttcatgcccgcagtaccggtaccaccgatcttgccacgctgatccatgaaaaaaccggcggcaacccgctgttcgtgcaggaatttttacgccgcatcgtcgatgacggactggtggtgcacaacaaatatcaggggaaatggcattacgatctccaggccatccgcgcccggcactacaccgagaacgtggtgacgctggtgcttgaacagctcaaggagatgcccgacgagacgcgccgcctgctgggcagcatcgcctgcctcggctgcacgggcgagctggagatgctgtgccgcgtggtggggcggtcggcggcggaaatccgctacgcgcttcatccggcggtgaccgctcagctgattgtgctgacggagaaagagtacgcttttacccacgatcgggtgcaggaagccgcctttgccctgctggatgagggcgagaaaagccatctgcacctgaccaccgccagcctgctggcggatgccgcgcggcagacggcgggcaacgaactgctgttccgcgcggttcaccacgtcagcgccgcgctggactgcatccagcctgcaccccagcggcagcgattccgggagctgagccttcaggccgcgcggcgtgcgaagcgtaccggcgattacctttccgccttaagctatatccagaccgccagagcgctggggaatgcgggcccggtctcggactttatgctggatatcgaagaggcgggctgtgagtttgcgctcggacacctggagcgcacgcgtgcgctgtgcgatgcgatcctcggttcaccgggcgggctgacggagaaagcgctggccgccaacctgctggcggaagtttatatgcgccagtcggagatccgcctggcgctggaggcgtcgttatgctggctgggcgtgtttgggatccagatcagccgctacccggaaaatgccgaatgtgacgaggcctggcagcagttctgtcaacgcaccgccgacgcgccgcagaacccgttttctcagcttaagctgatggagaacgcagagaccgaagcggtgatgaacctgctttacagcgccagtattttcgccagctttacctgcccgcgcctgcactttttactcctgtgccggatgatgcacctcacgctcgatcacggcataaccggtgcttccaccacggcgatggcctggtttggcgtgctgattggccaccgctacgccgaataccgtctcgggtttgagtacggcacgctggctcgtgagctggtgaaccgccacggctatgatgcctatgaagccaaaactctgctgccgctcgaccagctcagcgtctggacccagccgctgtcgtacactatcgagtgcgccaaggcctgctttacctcagcggtgacccacggcgacatgacgatggcctgcttcgcggcctgtcatcagatcattaacttcctctcccggggcgatcatctggatggcgtgctgaccagcatcgatcgcggtctggcctttgtgcgcaaaacggattaccaggacattgaaaccgttctgcacattcagcgccgctacgtggagtttttacgcacgccggtgacgggcccatggagcgccgcccaggcgctgcctgacgatctgctgcccgcgccgccggagcaggcgcccgagcagacctcgaccatgctcttctggtactggctctatcgcgggatggcgcacttttcctgcggcgaatacgccgacgcacaggcggatttagaaatggcgggctggtatgcgtggtccgcgccgggtcatattcatctgctggattaccatttttacagcgcgctggcgctctcccgccagctcacgccggaaaccttttcggcggattatcgccgcagtattcatcaccattacgacaaaattgccctctgggcgcggatcaatccgggcacatttgccgataaagaggcgctgatttatgccgaaatcgtccgtctggacggcatgaacagcatcgcgctggagcagtatgaaaaagcggtgcgactctcgcgggagggcgggtttaacccgatcaatgccctggcgcacgagctggccgggcgtttctcgctggcctgcggctacccgaccgcctccgacgcccatttccgcggcgcgattgccgcctgggggcgcgtcggggcgcaggccaaggtgcgccagctggagcaggatttcccccatctgctggcctccgggcagagccgcgcgtatgacacggcggcgtttgcccagaacgaggtgatccgcgatttacagagcgtcatcaaagcctcacgcgccttatccgaagagatcaaccttgaacgtttaatcgaaaacctgatgacgctgctgcttgaacgggccggggcgcagcgtggcctgctgctgcgtgtcagcgataatcacatcccggagattgaagccagcgcctggaccagtaccgacggcgtgcgggtgcgcatcctgaaagcgtcaccgatggcgacggacatgccgctgtcggtgctggccgcggtgatccgcaccgggcaggagatccgcaccggcaaaccggaggagttccacccgttcagccaggatccgtatctggtgacgtccggcgccgccgtgatgtgcgtgccgatgttcaaacaggcgcggctggtggggatgctgtatctggaaaaccgcctgatgccggaggtgtttaccgccgaacattcgcgcgtggtcagcctgctgggtgcgcaggcggcggtttcgctggagacggcgcggctctacgccgagctgctggcggaaaacatccagcgccgacgggtggagaaagagctgcgcgccagccagacctcgctgatgctgggcgagcagatcagccataccggcagctggcgctgggagctggtgcaggatctgatgtttatgtccgaagagtacgcccgtatccttggcctgccggagcagcaaaagatgatctcaatggcggagtttttgaccttcgtgcatgaggatgattatggccggatcagcaccctcgttaatcagagcgtgcgtgacgggctgtcgatgcgcgcggagtttcgcatcatccgcaccgacggctccgttcgttacatcctcgggattggcgatccggtgggggtgggcagtgaggtgaatgagtattacggcatcattaccgacatcaccagccagcgggcggcggaggatgcgatgcgggtggcgcaggcggatctggcgcgggtctcacgagccactaccgtcgggcaactgacctcctcgatcgcgcacgagatcaaccagccgctgatgtcgattgtctcgaacgccggcgcgagcctgcgctggctcaaccgcgatccggcgcggctggaaaaagtgcgcgaggggctggaggagatcgccgccgagggcgagcgggcaggggagatcatccgcagcattcagtctctgacgcgcaaacaggaccccacgtttacgcgaatcgatctgcacttcctgatccaccacatcattatgctttcccgcagcgaacttgagctgcgacacataagcgttgattatcttctgaacgctgacgacagctttatcatcggcgacagcgtgcagatccagcaggtgttgcttaacctggtgatgaatgcgatggaagcgatggcggaagtgacggatcgcccgtgcagcatcacgatcgccaccgcgaactgcgctgaggggaaggtgatcttcgagatcgccgataccggcagcggcattgagccggagctcaccgagcggatctttgactcgttctattcgaccaaagcgcagggaatgggcatggggctgaccatcagcgccagcatcattgaacggcaccgggggaaactgagcgcgcgccgcagagagccgtacggcacggtgtttaccttcgcgttgccgcttgccggacaggagatgtaa

SEQ ID NO: 114063 - DNA, 381 bp, Enterobacter cloacae
atgacgctgccgtggcgcattgccatcattgatgacgaacgctctgttcgcagcgggctcagtaacctgctgcaatcggaagggtatgctaccgataccttcgattcggcagaggtgtttttgagccaccctctcgccctgtccggcgcgtcgctggtgatcaccgacatcaagctacgcggcatgaacggcatcgagctgtttgagaagctgcggttgctggccatgccgccaccgccaatactgtttatctccggccatgctgatgaaaatatgcagcggtatgcactcagtctgggcgccgctgcatttttgcgtaagccgattaacatcgatattctgctggatcatattcagcgggagctgacccgccgacaataa

SEQ ID NO: 114064 - DNA, 261 bp, Enterobacter cloacae
atgaaggcctggattatttcgctggtgtgcggggtcgcggctggggtactttacgccctgctcgacgtgcattccccggcgccgccggtcgtcgcgctgcttggcctgttcggcatgctggtgggtgaacagctgatccccatcggacggcgtctggtgagccgcgaaccgttgaccctggcctggtttcgtcatgaatgcgtaccgaagatcagcggtaccgcgcccccagcgcccgcgaaggaaagccgcgacgcgtaa

SEQ ID NO: 114065 - DNA, 222 bp, Enterobacter cloacae
atgagtacagggttgatatccctcgcggcaggcgtgttgattggcctgatgtatgccgtgctgaaggtgcgttcccccgcgccgcccgcgctggcgctgattggcctgctggggatgctggcgggggaacaggcgatgcgtcatcttttatcccgcgacaatcccgcgggcgtgcaggtgacggttccccacgttcagcacctgtccggagcgtcatcatga

SEQ ID NO: 114066 - DNA, 687 bp, Enterobacter cloacae
atgaccacttctaagctcgaagtcttaacccctgccaactgtcagatcatcttcatcgatcaccagccacagatggcgttcggcgtgcagtctattgaccgccaggtgctgaaaaacaacaccgtggcgctggcgaaagcggctaaggtgttcaacatcccaaccatcatcaccaccgttgagaccgaaagcttctccggcaatacctatccggagctgctggacgtgttcccgggccaggacattctggagcgtacctccatgaactcctgggacgaccagaaggtgcgcgacgcgctgaagaccaacggcaagaagaaggtggttgtcgcgggcctgtggaccgaagtgtgcaataacagctttgccctgtgcgcgatgctggaaggcgactacgaaatttatatggtggcagacgcctccggcggcacctccaaagaagcccacgacttcgcgatgcagcgcatgatccaggcgggcgtgatcccggtgacctggcagcaggtgatgctggagtggcagcgtgactgggcgcgcaaagagacctacaccgcggtgatggatatcgtgcgcgagcactccggcgcctacggaatgggtgtggattacgcctacaccatggtgcacaaagcgccgtctcgtcagaagagcgagcaccgcaccttagcgccggttccggcacgctaa

SEQ ID NO: 114067 - DNA, 1872 bp, Enterobacter cloacae
atggttaccctcggtaaagccgatctcattctggttaacggccagtttcacaccgtcgatcgcgagaatcctgtcgcggaagccgttgccgtgcgcgacggaaaatttctggaagtgggtaccgtcgccgaggtgatgcaacaccactgcgacggcactaaggtggtcgacttaaaaggccacaccgccatccccggcctgaacgactcgcacctgcacctgatccgcggcggcctgaactacaacctcgagctgcgctgggaaggcgtgccgtccctggccgacgccctgcggatgctaaaagggcaggccctgcgcacgccgtcgccccagtgggtgcgcgtggtgggcggctggagcgagttccagttcgccgagcgccgcatgccgaccctcgacgaaattaacgacgccgcgcctgacaccccggtgtttatcctccacctgtacgaccgcgccctgctcaaccgcgccgcgctgaaggtggtcggctacaccaaagacacgccaaacccgccgggcggggagatccagcgcgacgccaacggcaacccgaccggaatgcttattgcccgtccgaacgccatgattttgtacgccacgctggcgaaagggccgaagctgccgctggagcagcaggtcaactccacgcgccagttcatgcgcgagctgaaccgtctggggctgaccagcgccatcgacgcgggcggcggcttccagaactacccggaagattacgaggtgattgccgagctgcacgagaaaaagcagatgaccatccgcatcgcctacaacctgtttacccagcgtccgggccacgagctggaagactttgaaaaatggaccgatatgcttacgccgggccagggcagcgatttcttccgccacaacggcgcgggcgagatgctggtcttctccgccgccgattttgaagacttcctcgagccgcgcccggatctcgcgccgggcatggaggacgagctggagcgcgtagtgcgccatctggtggagcaccgctggccgttccgcctgcacgccacttacaacgaatccatcagccgcatgctggacgtgttcgagaaggtgaaccgtgacattccgttcaacgggctgcactggttcttcgaccacgccgaaaccgtgtcgcaggccaacattgaccgcatcaaagcactcggcggcggtattgccgtgcagcaccgcatggccttccagggggaatactttgccgagcgctacggcatcgaagccacccgccacacgccgccggtggcaaaaatgctcgagaccggcgtgccggtgggcctgggaacggacgccacccgcgtggcgagctataacccatggaccgcgctctactggctggtctccggccgcaccgttggcgggatgcagatgtacgatcacagcgcccgtctggatcgcgataccgccctgatgctctggacccagggcagcgcgtggttctccagcgagcagaaccagaaggggcagatcaaagcgggccagctcgcggatctggcggtgctcagcaaagattacttccgcgtgccggaggaggagatcaagggcatcgagtccgtcctcaccgtggtgaacggcgatatcgtctatgccgcaggcgcttttggcccactcgcgccgcccgccattccggtcctgcccgagtggtccccggtggtgaaggtgccgggccactaccgcagcgcgccgccgcaggccgcacgcgtgggtatgagtatggctcaccactgtagcggcccgtgcggggttcacaaccaccagcatgactttgcccgcacgtcagagatgccggtatccgacgataacgctttctggggtgcgctgggttgcagctgctttgcattctga

SEQ ID NO: 114068 - DNA, 408 bp, Enterobacter cloacae
atgaaacaaaatgacgcttcgccccggatcgatccggggctgttctttctgcgcctgaccggcagtctgctgctgctttacgtgcacggtctgccgaaggtgctgcacttcagcgaagagctgacgcgcatcgaagatccgtttggttttgggccgtatgccagtctgatcccggcgatcgtcgccgaggtgatctgcccgctgtttatcattgcggggatttacacccgcctggcgtgcctgccgattatcgccgtgctgctggtggcgatgctggcggtccacccgaactggtcgattgccgaggggcagtttggctggctgctgctgattatcttcaccaccctcgcccttaccgggccgggccagtggcgagtgcagcgtaaaacaacggagaggttcgcatga

SEQ ID NO: 114069 - DNA, 1620 bp, Enterobacter cloacae
atgacccaggtaaacgacgttcgcgacgcacacgtcgagacgacgcccgcccccgcggtttcaccctggcagccgctgagccagccggtgttccgcatgctgtggatcgccacggtggtctctaacgtcggctcatggatgagcgacgtcggtatcaactggagcatgctgacgctcagcgccgatcctttagatatcgcgctggtgcaggcggcgagcagcctgccgatgttccttttcgccctgccgtccggggtgatggcggacatcgttgatcgacgtaaatacctgctcttctcccagctgtgggtgttcattgccgccgccgggctgacgctgctctcttttaccggacacgtcacccccaccgttctgctggcggcgacatttctgctgagcgtgggtgcggccatgagttcgccgccgtttcaggcgattgtccctgacctggtgagcaagcccgagctgggttccgccgtggcgcttaactcgctcggggtcaatatcagccgggcaattggccctgcgctgggcggttttctgctgtcgcttgccgggccgtggatggtgtttgccctgaacgcgctgtccgtgatgggcgtggcgtgggtgctgtggcgctggcgtccggcaccgtccgtgcagcgtttgccaccggagcacttcttctctgcggtgcgctccgggattcgctacgtgcacgccgcgccggtgctgcgcaacgtgctggtgcgcaccgtggccttttttgttttcggcagcgcgggctgggcattgctgccgctggtggcgcgccgcgagctgggcttaggcccggcgggctacggcgtgatgctggcgtgtatcggccttggcgccattgccggggccatcctgctgccgcgtctgcaccagcggctgaacgccgatcggctgatggtggccgccagcctgacgtttgcgatcaccatgctggcgctggcatttgtacgtcacttttggctgctaaacttgtttgagttctttaccggcttcgcgtggattgcggtgctctccaccctcaaccttggcgcgcagcgcagcgccgcacgctgggtaaaagcccgggcgctggcggtgtatctgacggtctttttcggttcgatgaccgcaggcagccccgtctggggccagatcgcctcgcagttcggcactccggcttcgctggttgtcgccacgctggggatggtgctggcgagcatgacggtgttccgctggaagctggagaaagatccggatttaaatctcgacctgagcgggcagccgctggacggggtggagattgaactcccgaacgagcgtggcccggtgctggtctcgcatgagtacatcatcgacccgcagaacgcgaaagcgtttttgcaggccgtgcacgagctacgccgggtgcgccgccgcgccggggcgatgagctgggcggtgtacgaagatattgaacgtccgggtctgtttatcgaaaccttcctgatgggttcctggatcgagcatctgcgccagcaggagcgccacaccatgaatgacctcctgttgcagagccgcgttctggcttttcatcagggcacaacatcaccggcaattcgttatctggtcgcgccggtctga

SEQ ID NO: 114070 - DNA, 822 bp, Enterobacter cloacae
atggcaacgtttaaggcaaaagatggtacgcagatttattacaaagactgcggcgcgggcaaaccggttcttttcagccacggctggccgctggatggggatatgtgggacagccagctgaaccacctggccgagcgcggctaccgcaccatcgcctttgaccgtcgcgggtttggacgttcagatcagccgtggaacggctatgactacgatacctttgcatccgacattaacgacctgatcaccacgctggatctgcgcgacgtgacgctggtgggcttctccatgggcggcggcgacgtaacgcgttacatcaacaactacggcagcgaacgcgtggccggtcttgccctgctgggcgcggtaacgcccattttcggcaaatccgaaagctacccggaaggggtcgatcagagcgtgttcagcgggattcgcgacggactgcgtaaagatcgcgctcagttcatcagcgatttcgccaccccattctacggcaccaacgccgggcagaccgtttctgccggtgccctgacgcagacgctgaacatcgccctgctggcgtccctgaagggcaccatcgactgcgtaaccgccttcgccgaaaccgacttccgcccggatatggcgaaaatcgacgtgccgacgctggtgatccacggcagcaacgaccagatcgtgccgtttgaaacgaccggcaagctggcggcagagatgatcaaaaacgccacgctgaaagtgtacgacaacgcgccgcacggcttcgcgctgacccaccaggaccagctcaacgaagatctgctggcgtttgtgaagtcgctgtaa

SEQ ID NO: 114071 - DNA, 1395 bp, Enterobacter cloacae
atggcaatgacaatgaaaataccgtctcgcgagttgtggtcttactttggctatggtttaggtcagtgttttagctttggtttagtgggttcgtttattaactatttttacaccgacgtgctggggatctcggcgctggcggcaagcaccatcttcctgattgcccgtgcgtgggatgcggttcacgatccgctgtttgccagcattatggacaccattaacagccggttcggcaagtttcgccactttttactgatcgccccgctgctgatcaccggggtcaccctgctggcgttctataaaatcgaagcggacatgaccaccaaaatcctctacgccggggtgacgtatatcctgtgggggacgctgtacgccatctccgatatcccgttttggtcgatgtcatcggtgatgaccaacgactccggccagcgcacccgcgcggtgacggcggcgatgcttggagtgaacgccgggatcgcctgcgccaacatcttcttcccgaagctggcggcgttctttgcccagtacagcaacgataaaggctactttatggcggcgctggtgatgatgctggtgggcctgccgctgatgctcaacggctttatgcagatcaaagagcgcgtgccgccgagcccggaaaaggtgacgatgcgcgacaccttccacaacctgcgccagaacaagccgctgtttatcgtcctgctgtcgttttttttctgcgtgttccataacgtggcgggcggtctctatatctacttctttatcaacaatatgggcgacggcagcctgcaaatggcaattggcgtgatggggatagtggcggcggtgctgtgcctggtcgccccgctgctgacgcgccggatgcagaagcggaatctgtttatgatcctctgcgggctggacgtggcggtgcgcgtggtgatgtggttcacgggctatcagcacacggcgttgctgtttatcctgctcggcctgagcacgctgttcgtgatgatgaccaacatcctcacctcgtcgatgattgccgacaccatcgagtatgcggagtatcacacccacaagcgctgcgcggcgatcaccttctccgggcagacctttaccggcaagatgtcggtggcggtgggcggcgggctcatcggcgtgtttctgacgatgatcgactatgtgccgcaggcgcagtcacagagcgacagcgtgctggcggggctgttcttcggcatttgtttgttaccggcgataggctcgctgatccgaatgggctttatgtcgcgctttaactttaccgaggagaagcatgcggagatttgtcggctgctggcggagcggaatgcgtctgcgaaagcgccgggtggcggctgcgccttacccggcctacaggaccagcccttgtag

SEQ ID NO: 114072 - DNA, 1089 bp, Enterobacter cloacae
atgaaagagcaatggagcagggagcaggcacaggcgtggtatcagcagaaaggctggctgtgcgggtttaactatctgccgtcgacggcggtgaactggaccgatatctggcaggaagagaccttcgatgccgaaaccatcgaccgcgagctgggctgggcggcggacgcgggctataacaccctgcgcatcaacctgccgttcatcgtctgggagcacgaccgcgacgggctgatggcgcgcatcgaccgctttttgacgattgccgacggtcacgggttcagcaccatgctgaccctgatggatgactgcggcttctccggcgacgagccgtacctcggcccgcaaaagccgcccgtaccgggcaagcacaacagccaggcggcagcgagcccgggacgcgataaggtgtgcgatcgcgactgctggccacagattgagcgctatatccgcgacgttgtgcgccagtttcgcgaggataagcgcgtattgctctgggatctgtataacgagccgggcaaccgcggcattttcgcgaccggcacggaggaggtgttgtacgacgagaagctggaaacctgcgcgcacgagttgatgaagcaggcgttccgctgggtgcgtgaggaagacccgacccagccgctcaccatctgcgcgtggcgtctgccggcggaagaagagggcgagacgttttaccagcacccgctggaccagaccgcgctggcgctgtcagatgtggtgagctaccacgcctataccaataccgggcgcatgacggcgattatccagcagcttcaggcgctgggccgcccaatcttctgcaccgaatggctggcgcgtcacgtgggcggcaccatcgaagagcagctcccgctgatgtacatggcgaaggtcgcgccgtatcagtgggggctggtgcgcggtaaaacccagacctggctgccgtggccggtagtgatgaaggagtccacggactactgccgcctgtggttccacgacgtgtttgaggagaacggtatcccgttctcacgcgctgaaatcgcgctgatgaagaagctgcgcaaaatcgccccgaatccgcagggctaa

SEQ ID NO: 114073 - DNA, 1008 bp, Enterobacter cloacae
atgaagcgaaaaacaaaagtgacgatgaacgatattgcgcgggcggcaggggtgtcgcaggcgacggtatcgctggtgcttaaccagtcccgcaacatcaagctcagcgacgatacccgccagcgggtgattaatgtggctaccgagctcggctacgaccgcctccccgccgttcacgccccgcgcaaccaggaggagatcgccctgctggtcagctccatgcagagcttcgacccgtttatcgacgccatcagccaggcgcgggaagcggcgtggcgcaacgagaccctgctcaccgtctacgactacggcgacgacgtggagctggccctgaacatcatccgccagctggacaagcgcaactgcatcgggattatccttgcctctccggtcacgaacgtcgtcgatatgacggcattccaggactgcacccgcatcccgctggtgctgctcaaccagcgcgaccccggctcgccgctgctgccgtcgtttattccggacgactacgccaacgctttccaggttaccagacacctcatcgcctgcggcgccacgcgcatcgcccacatcaccggcgagagctggatggaggcctcgcgccagcgtctggcgggctaccaggcggcattacagcaggccggactggcgtgcgacgacggtctggtgcgccagaccaactggcagttcagcgagtcctttaccgcgacagcttcgctgctggaactggccgagcgcccggacgccatcttctgcgccagcgactggctggcgatcggctgctaccaggcgctggcggtgaacagcgtgcgcattccgcaggatatgctgctggcgggctacgacgaccagaagatttccgagcagctcaccccgccgctgaccagcatccagttgccttacagcgagctgggacggctggcggtggagtacctgtgcaatcaggaagatgccgccacgcacgtgacgctggcgggcaggctgaaggtgcgcgcctcaagcctcgtctga

SEQ ID NO: 114074 - DNA, 426 bp, Enterobacter cloacae
atgctgcaatcactcaaccacctgaccctcgcggtcagcgacctgcaaaaaagcgtcaccttttggcacgagctgctggggctggcgctgcacgcccgctggaataccggggcctatcttacctgcggcgatctgtgggtctgcctgtcgtacgacgaggcgcgccagtatgtgccgccgcaggagagcgactacacccactacgcgtttaccgtggcggaagaggattttgaaccgttctcgcaaaggcttgagcaggcgggcgtcaccgtctggaagcagaacaaaagcgagggggcgtcgttctattttctcgacccggacgggcacaagctggagctgcacgtgggcagcctcgccgcgcggctggcggcgtgtcgcgagaagccctacgcgggcatggtgtttacctcagacgaggcttga

SEQ ID NO: 114075 - DNA, 552 bp, Enterobacter cloacae
atgaaaaaaatcataaaataccgtttaagtaatcttcagacattcataatttcttttttcttaataattatcggttgtagtataacgcggtataccagccttgaaaccgcatggctttttttgttgggtgggctttttttagcatttatatcacttctggaaagcaagcgtctttcgcgcgttgaaaaaggggtttctcttattttctttgggatattcatgggattaggaattccagaactgttccaaaaaaactataaagacttaatgacccctgatttcaacgagaaccttgctatatttactcaaatggctttttttgtttgtgccggagccggaggaggtgtactcgccaaccatgctgagaatattaagacggtcgacgtcacaccaaatacgcaaaatggaaatgttgatacagcattgaactatataaaaacattgcaagtagaagccatatcacagcgtaaaaagatagagcagttaaggttagttataatcgtagctgtaggcttgggtttggcaaaccttatcgtaaccattttaaagtag

SEQ ID NO: 114076 - DNA, 996 bp, Enterobacter cloacae
atgaacgcaccaaccattctcaccggcgatcgcccaaccggcccgctgcacctcggtcatttcgtcggatcgctgcgccagcgcgtggcgcttcagcagacgcacaaccagtttgtgctgattgctgaccttcaggggctaaccgacaacggcagcaacccgcaaaaaattcgcgacaacatccccgaagtgctggccgactacctcgccgcgggcattgacccgaaccagaccacgatctgcctgcaatccgccctgcccgcccttgcagagctgacgatgctgtatatgaacatcgtcaccgtcgcccgcgtggagcgtaacccgacggtgaaaaacgagattgtgcagaaaggctttgcccgctcgctgccggtcgggtttatggcctaccccatcagccaggcggcggacatcaccgcgtttaaggccgagtgcgtgcccgtcggcgacgaccagctgccgatgattgagcagaccaacgagattgtgcacaagatgaacagcctgctgcccgccccggtgctgcgccactgcaaggcgatgctgagcgacaccagccgcctgcccggcatcgacggcggtgccaagatgtcgaaatcgctgggcaacacgctgcacctttcggccagcgaagagaccattcaccgtgcggtcagcgccatgtacaccgacccgaaccatctgaaggtgagcgacccggggcagattgaggggaatgtggtgtttacgtacctcgacgcgtttcatccggacaaggagaaagtggcggcgatgaaggcgcattatcaggcgggcgggctgggcgacagggtgtgtaagatggaggcgtgtttgcaggaactgattgcgccaatgcgggagcggagggcgatgtacatgcaggataaaggggagctgatggcgatgctgaagcgcgggaccgaatgggcgcagggggtgacgcaggagacgttgagggaggtgaaggttgggctgggggtgccggtgttttga

SEQ ID NO: 114077 - DNA, 684 bp, Enterobacter cloacae
atggctgatgtagaagatatagcccggagattatgcaacataatcgcttctcctgatacagttactgggcttataaatggagggctatctgtaccgttagattatggatatctggtttacggaatctttgacacagataccaggtatgctcgtgaaactcaacgtataagaatgatgactgccataaaaaacgacattttgaattacgagaacatagttaacgcagttaacgttatatttaaagcattcaatagatatttaaccgaggaggagcaggataaaatatacagatctgtaacgacttcaatggcaggtagaatatcaaccaatattatcacatcaacaatcgcaaagcatgttattgaaaggacgtccttcacgtttgttgttttcaaagggaaaagtaacccaatcacggcactgagcacactccttttgtttgggggaatggctgagcgatcaattagaacatctgacagactcgaagcagaagccccagaagtatatcaacttctgagaccaagagactatgacttactttattttctgttcgctgatgccgtccagcctttcgtagatgctatccatgcaggttattcagaaggaaaacctgtatttaatcaaatcataaagaaagttaatgaaaaactaactgcacacactacggcaggcgcgtatgagtaa

SEQ ID NO: 114078 - DNA, 348 bp, Enterobacter cloacae
atgagtaagtttatcaccccaattataaacctgcttctttgctcatatttagttttagcctatatccttagctgggttgaattcgaaacatggcatgataaaacaatcgccttttgcatcattaccctaagtgcctaccttatttcattagtaatgaataaattcctgccaggaaagatacatatttttggcgggctcctggatgtgttatcaggtcccttacttatcatcggtgcatttgcttgtatagctgtccttgaaccatggcctctgaaagttattgccttattcatatgggtcgttgcgatgttgcgcctaccttcttttgtaaatatagatgaggaataa

SEQ ID NO: 114079 - DNA, 480 bp, Enterobacter cloacae
atgtcaaatccagcatatctttggttaaccgatgctaatggctcaccaatcgtaggaggttccatggtatccggtcggctaggcgctaatgaaataaaagcagttgctcatcacctcaccattcctgtgagtggaaatacaggccgattaacaggtactcgtgtacataccccaattgccgttcagaaggagtttgataaaacaacacccgttctcttcagggcactgtgtgaaaatcaaacactaaaatcggctacgataaaaatgtatcaaattgatgatgcaggaatcgagagagaatatttcaacattatcctggagaatgtaaaaatcacgggtatcacgccaaatctgttcccgggttctggaacaggaacgcatacagagacgatcgagctaagatatgaggcaatcacctggaaacactgtgacgggaatatcgtttacagagatgcctggaatcatatggcgatcgcctga

SEQ ID NO: 114080 - DNA, 375 bp, Enterobacter cloacae
atgatggaacccactctctcacaagttattgaggttgttcgaaactcctcaggggagcagcgtaaacctatcgatagcaatacgttgattgaggccgatttgcatatttgcggtatggacggcgaagacctactggaagactgcgaagaagcgtttggcgttcagcttgccacggaagaagatggctatatgaaaacgttctctctcgcagaaaatgagtatctgtttacgggtgaaggtatagacttttttggcatctgtcggtttatccgctgggtacgtggcatacccgaacctgttatacgtgatttaaccgtcggcgaacttcatgctgtgctggttaaagctgtaaaagagcaggtaaagcacgagtga

SEQ ID NO: 114081 - DNA, 483 bp, Enterobacter cloacae
atgcagctttacaccaatgaattcaccgctgagttgaaagcggaaatagatcgttccccttttacctatgaagaactggccgccatgcccgaggacgcacgcgccatcattgccgaacaggaagcctttcatcgacaacatcccgtcaccgccatctggcggatcgccacggctggcagccagacccgactgggcggcgttgttcttcccgtcgatcgtgaagccacaatgctcatggacgatgggagttacaccagcgtgattgtcgaaggggattgtgtggcctatccggatggaacgctcgccacgattatgacctcagcaggagaagcgttttcctggaggcatcagggcgttgcgctggtcggcagcctgcttgataacgatgacgagattatcagcacaccgctcggcagtacttatctggtcacccgcgaagggattccacctcaagaggatttcttaacctggcccggagaatag

SEQ ID NO: 114082 - DNA, 1281 bp, Enterobacter cloacae
atgaaaatgaacgtaacagagacggtaaaacaggcgtgcggccactggccgcacattctcccggcgctgggtgtgaaggtcataaaaaaccggcatcaggcctgtccggtgtgcggcggctctgaccgttttcgctttgacgatagagaggggcgcgggacgtggtactgcaaccagtgcggtgcgggtgacggacttaaactggtagagaaagtgttcggcatgaacgcatcagaggctgccgggaaggtgaacgccgtgaccggcaacctgccgccggttgccccggaagtgattgcggccgcagaggctgaaaccgataccgaccgcaaagcggcggccgcactggccgtcaggctcatggagaaaacccgaccggccagcggcaacgcctacctgacccgcaagggcttccccgaccgggaatgtccggtactgtcggccacacacaaaaccggcggagtgacgtttcgcgccggtgatgtggttgtcccgctgtatgacgataccggcgcactggttaaccttcagcttatcagttctgacggtctcaaacgcaccctgaaaggcggggcggtaaaaggagcgtgccacaccatcgaaggaaaaaaacaggccggaaaacgcctgtggatagcggagggctatgcgaccgcgctcaccgtgcatcacctgacaggtgaaaccgttatggtggcgttgtcgtccgtgaacctcctttctctggcgagccttgtccgccagaaacacccggcctgtcagattgtcctcgccgccgaccgtgaccttaacggtgacggccagaacaaagccgctgtggccgcaggagcctgcgagggcattgtcgccctgtcgccggtattcggtgactggaatgatgcgtttatgcagcacggcgaagaggcaacgcggaaagcgatttatgacgccatccggccaccggctgacagtcctttcactaccatgagcgaagcggaatttaccgccatgagcaccagtgaaaaggcaatgcgagtaggggcttcccgcatctgttcggcgcgcatcctgtcgatgaaatcctgttcgccgtcgttcagcttgccgggatacatccctatcagcagccctgcgacaggtgcaccaaggcctcccgtagctatctcgccaagtgcagcgccgcgcacggcccatgtgccggaagtgatggtgcgcccgccaacgagtgcgagttcgctggcatcggcgatcgcggtccgcgcggtccaggccctttcttcggccgcaacggcagcctggtag

SEQ ID NO: 114083 - DNA, 321 bp, Enterobacter cloacae
atgaaaaagccactaccgcccatattacgcgccgcgctgtatcgccgcgctgtcgcctgtgcgtggctgacagtatgcgaacgtcagcaccgctacccgcacctcactctcgacgcgctggaaagtgccattgccgacgagctggagggcttctacctgcgccagcatggcgaggagaaaggtcgccagattgcctgtgcactactggaagacttaatggaagccggaccactcaaagccgcgccgtcgctgtcctttctcgggctcgcagtgatggatgaactctgtgcccgtcacatgcaatcgcctgttatgcactga

SEQ ID NO: 114084 - DNA, 261 bp, Enterobacter cloacae
atgcctgttaacagtgcagaacggccgcaaaatataaatcagcccaccatcagccgggcagaccttgaatgccttgaacaccttcgcaacgtcggccagctcgtcggcgatctgatgcaggtgcaggactgcacggccattcgtcgtgaccctgcgcagcagttacagctcacctccgtgatttacctcatgaccgcccagctcgacggcgtggtcgaacactgcaatcagcgctggctgaccggggagggtaacgtatga

SEQ ID NO: 114085 - DNA, 450 bp, Enterobacter cloacae
atgtttgatttccctcagccgggtgaaacataccgttgttcaggctttcctgacgtggtggtgtcaggcattctggccgacggtattccatgggatatgccgtaccgctgcccggggcaagtctggaatccctaccggcgcacctacaccatcctcattcgtattatcgctactggtgatatggcagaaattccactcggtcgttttttgcgtgaatttacctgcgagtctcccgacgtatttaaacgcagtcctgaaaaccgccatgctgttctgagtgagcttgccgcagacccggaattacagaaataccggatgcggaatatcgataaatatcctgacgatattcccccggttaaacgcccggcaccggtggcgtataaatggcgaaataatttcaggccggaaacggaaataaaaccggataacagctaccgccattatctgtaa

SEQ ID NO: 114086 - DNA, 300 bp, Enterobacter cloacae
atgcctaataaaaacacacttcagaccgtctcagcgcgtcgtgatgaccttaaccccatgcaggaacacctcagcatagaggcgtatcataaactcaatcgcgcaagcgccgtctcacagttcattggtggagatttgctgcaccgtgaactgaacggtctacaccagctatacctgccgcagatttttagttatatccatgaggacgttagctacgtactggaagagctgaaagccaaaggcctgtgccgtgactttctcgccacgacatcggggaacggaggggagcaccatgtttga

SEQ ID NO: 114087 - DNA, 555 bp, Enterobacter cloacae
atgaatcagaaccgttttcacaaagcccctttttctggcttgcatctgttgtgtgtttcctggtacagttttgtcgctgtcgcaaaatcgacagccgggcgtaggaacccgtgttacttcaaggcgacaccagacgcgccatgcgtctttttttacgtcgttgctcaggtacaccttatttttgggctatggtggtttcacaccagcctgtatcagataatggtggtccgggcggggcagccctcgggctggccggtttccttgaaggccggtattcctacccccgtccgggctaccacccatgagtgtaggaactctggtggtagcaataaccgctacttcaaggaggttgcccctatggctacgaccctcaacccgtcacacccgcagtttgtctttgtgtttgccgccgtccgtcgcgcagaccgtaagccccgtatctgtatgctccgcaccattgccggtgacgagctggccgcccgtcgcacccttgtccgcgaatacgtgctttcccttgccgcccgtctgccggttgtggaggtgtcacatgcctaa

SEQ ID NO: 114088 - DNA, 267 bp, Enterobacter cloacae
atgcatacagtttcatcagcactatcgacccacactggcacgcacccgatgccggtttcatccccggctcaggaacgttttttacgtcttccggaagtaattcatcagtgcggcctgtcccgctccacgctctacgatttaattgcccgtgatgctttcccggctcaggtttccctcgggggtaagaatgtcgcttggctacaatctgaaatcacggcgtggatggaagaacgtatcgcccaccgtaaccggaaatacaacgcatga

SEQ ID NO: 114089 - DNA, 744 bp, Enterobacter cloacae
atgaaacccgaaacactcatcaccgccctgcaagatgtagccgctcagcagtacgcagagaacagtccgcacatcaccgacaagctgagcgcattcactgctgccagagacacccacgcggccagcatgcaggcgctgaaagagattgatacgtccattgaacgctgtaagcaggagcggcagacagccctcgatgagagcgctgaggcggagcaggactggcgcagccgctttcgcaccctgcgcggcagtctcacgcctgaaatgaaagctgagcacagcaggcgtatcgccagtcgcgagctggccgacgagtttaccggcctgattgcggagctggagactgaccggacacgcgccatgctgaatgcctgctccaccggcaataaatacctttcagcgcatgaagatgcctttaccgcttacgccggtgcggaatgggctcaggctgtcaatgcggttcctgtcaccctcatccgcgctttcctgctgcgcattcgtgccctcgaaatgaagggagaaagcgccccgcagtccgtggccactggcgagctgcgcgatgcgctgagccgtcagggcagcctgtatcacttcgatatgacgcaggagccggtgttgtccgtgacgggcatgcaccggccgcagattactgacgttgatacggagctgttacgcagccctgcgaagagaatgatgcttgccagaaagctggctgaaaatggcgagacagaagcggaggggtaa

SEQ ID NO: 114090 - DNA, 219 bp, Enterobacter cloacae; identical to SEQ ID NO: 109068

SEQ ID NO: 114091 - DNA, 564 bp, Enterobacter cloacae
gtgaccacactgacgctacagaaagcctttgaggcctgtcaggcaaataaatccgcctggctgcaacgcagggaagaactgacgcaggccgaacaggcataccgcgaacagcttgccggcagcggccacagcggccggagcctgcaaaccctgcgcgagattatcgacgtgaaaaaatgggaaattaatcaggctgccggtcgctatatccgctcgcatgaggaggtgcagcgcatcagtatccgcgaccgtttaaatgattttatgcaggtgcacggcgcggagctggccgccgcccttgcccctgaactgatgaattatcccgggcaacaccccgccgttcagcgctgcgccatgcagcactcactcgactatctgcgcgaggcgctacagctctggctggtcgccggtgaaaaaattaattattcggcgcaggataatgacattttaacggccatcggattcagacctgacgcggcttcgtgcgatgatagtcgtgaaaaattcacgcctgcacagaacctgaattacacccgccgccgtgcagaactggccgtgcagtag

SEQ ID NO: 114092 - DNA, 1140 bp, Enterobacter cloacae
atgtcaaaaatatcaaaaattgacacttacaacattattaacaagggaactgtaagtgaacttgatttaaacaaacgcataactatattaaccgggtataatgggtctgggaaaactacacttttaaaagctattcacgaaaccatagccatttataacgacaccatatacccacacaaaagaaaaggccttgctgtcgatatatattttgaaaactcttacaaaattagaaactttactcttccggaagatgcaaggcagcttgacctaaatgatcaatcatttgttgctaaacatgtaaaaattactgataaacttgatttggcttataaaaaactattaaattccttaaccagaaataattctgccgaaaaaatcaaatcaaaagacaacattaaaataggcgaggatagtaaaaaaaacagcagttacaatggattggtaatttttccaaaagataacagcaaaaaattatcatccatattatattgcgatgaactatttttcttcagcgacgatgaggactctacaagtaaagaaaaacttgaagaactcgatgtctattcaagaagtaataacctagctaaaacattgtatattttgcttcaggaattctctaaagaatcaattttaaacgagaaggaaagagaaaaaattgatgcaatgaatgaaattaaatccatgttggattatgttccagaggatagaaaactctccttggagaaaactattcgggagcttgaagagaaatccgattataaaagagagttgaatgattttattgcaatcgttaattctttttttgagttaacaaatagaaaaatatttattgataatgaaggactcatatctcttgagtacaaagaaaattattacaaatggtttgatttttcaaaaggagaaatgacattattatccttactcttagtcgtatacttacacagaaatgaaaatgttatatttttatttgatgagcctgatttatcattgcacataaaatggcaaaagaatctaatttctaagctcgctgctatagcaccttcttcacaatttatcatcagcactcattccccagccttgattggaaattataacgatcaaagtattatcaacataagtagcttatctaggggggaatga

SEQ ID NO: 114093 - DNA, 1059 bp, Enterobacter cloacae
atgagtaatttaggttttggatttgacaatgactactatcaaaatatgaaatattttgatgaggacgaaatagaaactgttttagtttttttagaagacatggcagacttgcttgtttggggagtttgcttcccaaacaataaacctattaacttcgaattcagaagcactgaacaattcgtatttacagataaaatagtgtccagtggatgtgatcgaatactcagccttgtaaaaaaaggagatattgtacttggtcataatgttattgcctgccttgacagtgatcatcacgaaatgactaatttccgcaatactccttatggggagtactataaaaaccctaatatttatttaacaagactgcattcattagaaaacatacaatatcacttcaataatattgatgaacttcttgctgattcggtttgcaaacatgtttcagcactaacactgaaaccttcagatatagctaaagaactgtccaatcaaatataccctgccttttcaaaatacctttttttattatcttttgaaaacaataaaaaagcattagcaatatctgggtacggaaaactaaaaaaaacaattaagtacatgtcatccgttgaaaaaacatcatgtactaataactcatcacttttgaattctagtcactggcgacaaggagtatcaaggttatctgatattaacactagcttgacacaagcgatatctgatttaaataaaagcaatgaatatactgcatattgtagtaattggaatcataaaggctttacaatggataacgcctacctcttcatgagaggacataatattaatgatttctttgtttctattcttgataagacatatgatttatatacgcaacaagaatgtcaaaggttagtacaaatatgcactcaaaacaataaatcgcctgaagttattcagcaaaaagtagagcattataagcaaactacacaactttttagttcattaaaaaagaaattacttgtcccagttaattctatacatttattctcccaaacagcacaaagaatcgcacaagtatattaa

SEQ ID NO: 114094 - DNA, 1263 bp, Enterobacter cloacae
atgaagctcaacgccagacaggtcgagaccgcaaagccaaaagacaaaacctacaaaatggccgatggcggcggtttgtatctcgaggtttcggccaagggttctaaatactggcgcatgaaatacagacgcccctctgacaaaaaagaggatcgcctcgcttttggtgtgtggcctactgtgacgcttgctcaggcaagagcaaagcgcgacgaagctaaaaagctgttagtacagggcatcgatccaaaagctgaacagaaagaagctcaggccgagaattcgggggcatatactttcgaaaccattgctcgtgaatggcatgccagtaacaagcgatggagtgaagaccatcgatcgcgcgttcttcgctatcttgagctttatatttttcctcatatcggttcgtccgacattcgcctgctcaaaaccagtcacctgttagccccgattaaaaaagttgatgccagtggtaagcatgacgttgctcagcgcctgcaacagcgcgttactgccattatgcgttatgccgtacagaacgattacatcgactcaaatccagccagtgatatggccggtgcgctatcgacaactaaagcgcgacattaccccgctttgccctcaaaccggttccctgagtttcttgctcgtcttgctgcttatcgtggccgtgtaatgacacggatcgcggtcgagctttccttactaacttttgtgcgttcaagtgagttacgtttcgcgcgttgggatgagttcgacttcgataaatctctctggcgagtacctgcaaaacgagaagaaattaaaggcgtgcgttactcgtaccgtggcatgaagatgaaagaggagcatatcgttccgcttagtcgacaggcgatgattttgttagaccagttaaagcagattagtggtgataaagagctgctttttccgggtgatcatgacgcaactaaggttatgagtgaaaacacggtaaacagcgcattgcgtgcgatgggatatgacacgaaaactgaggtctgcgggcatggatttagaacaatggcgcgcggtgctttgggtgagtcagggttgtggagtgatgacgctatagagcggcagttgagccattcagaacgtaatagtgtccgggctgcttatgttcatacatcagagtatttagaggaaaggaagaaaatggttcaatggtgggctgattatattgatgaaagtcgtgtgcaatatttatcaccatatgaatttgcaaaaaatagatgttcttga

SEQ ID NO: 114095 - DNA, 723 bp, Enterobacter cloacae
atgaataaaacgtggacccgtattatgattgtcgtcattgcggctgccgccgtggcgttctgggtgtttttcgacaggcagcgcgccccggaacggcagatggataacgccctcaacgcgatgcccgcctggcaggtgattaaggagcaggagcccgcgctgcatcagcgcatcctctaccagatggccgccctgcaaaaagcgggcgagccggagcagcagattatcgacaccatccagccgcagatcctgcatctgcagatgtcgcgcctgcaaaacgccccggacgccaacgtggtgaactacatgaccattaatatggagcagaccgccgccatccagaaggtgagcgacgacgcctgcttccgcttcctctacccgatggtgaagggcggcgtgaacccgatgcgcatgctggataaagacctgatggcgcggcgcatgcaggccgatgcggacatgatgcgcgcggcctacggcaaaaaccgccacaccgtgaccccggccgaacgcgaggcggctgtcgaggatgtccggccgattatgaaacaactagccgataagtacggcgaggacatccagttgttgcagatgccggagaaggcggcgggcaaagagaagctctcctgcgatatggtgcaggagatgtgggcgaaggtgctggcgttgccggagcagaaggcggcgggggtgattcggctggcggtgtctgagctggagtaa

SEQ ID NO: 114096 - DNA, 759 bp, Enterobacter cloacae
atggattacccgcagatactcgcccccgtactcaacttcctccagtgcccgaccccgcaagcatggattgataaagcccgcgacccggcgaacctgccgctgctgctcaccgaccacatggtgtgcgagctcaaggccgcccagaccgcgctgctgctggtgcgtaaatacgtcgccgacgaaagcggtgccgacgcgctgctcgactggctcaagccctacgaacagttcaccttccgcgacggcccggagccggactttatcgccctgcacaggcagattggcaaaagcgtgatgcccaaaaccgacgacccgtggggccaggcgctcatcgacagcatggtgctgctgattaaagaggagctgcaccatttctggcaggtgcgtgaggcgatgctggcccgcgacattccgtacgtcaaaatcaccgccagccgctacgccaaagggatgctgaaggacgtgcgcacccacgagccgctgacgctgctcgacaagctcatctgcggcgcctacatcgaagcccgctcctgcgaacgcttcgccacgctggccccgttcctcgacgatgacttacagaagttctatctctcgctgctgcgctcggaagcgcgccattatcaggactacctgacgctggcccggcgggtgagcgacgacgatatctcaccgcgcataaagctttttggcgaaattgaagccacacttatctcgacaccggacaacgagtttcgcttccacagcggcgtgccggtgtaa

SEQ ID NO: 114097 - DNA, 426 bp, Enterobacter cloacae
atggcaaacccggaattactggaagagcaacgcgaagagacgcgtctgattattgaagaactgctggaagacggtagcgatccggacgcgctgtacaccatcgagcaccatttctctgcggacgactttgaagcgctggaaaaaatggccgtggaagccttcaagctgggttacgaagtgaccgagccggaagagctggaagtggaagagggcgacaccgtcatctgctgcgacatcctgagcgaaggcgcgctgaaggcggagctgatcgacgcgcaggtagaacagctgatgaacctggccgagaagtttgaggtggaatacgacggctggggaacctacttcgaagatccgaacggtgaagacggcgaagaaggcgacgacgaagattacgtcgacgaagacgacgacggcgtgcgtcactaa

SEQ ID NO: 114098 - DNA, 1005 bp, Enterobacter cloacae
atgtctgatctgtacaagaaacactttctgaaattgctcgattttacccctgcacagttcacctctctgctgacccttgccgcacagctcaaagccgataaaaaaaatggcaaggaagtacagaagcttaccggtaaaaacatcgcgctcatcttcgaaaaagactcgacccgtacccgttgctctttcgaagttgccgcatttgaccagggcgctcgcgttacctatttagggccgagcggcagccagattgggcataaagagtcaattaaggacaccgcgcgcgtgctcgggcggatgtacgacggcattcagtatcgcgggcacggccaggaagtcgtcgaaacgctggcgcagtatgcgggcgtgccggtatggaacgggctgaccaacgagttccacccgacgcagctgctggcggacctgctgaccatgcaggagcacctgccgggcaaggcgtttaacgagatgacgctggtctacgcgggcgacgcgcgcaacaacatgggcaactcgatgctggaagcggcggcgctgacggggctggatctgcgcctggtggccccgaaagcctgttggccggaagagagcctggtggcagagtgcagcgcgctggcggagaagcacggcgggaaaatcaccctgacggaagacgtggcggcgggcgtgaagggcgcggactttatctataccgacgtgtgggtgtcgatgggcgaagccaaagagaagtgggcggagcgtatcgcgctgctgcgcgggtatcaggtgaacgcgcagatgatggcgctcaccggcaacccggacgtgaagttcctgcactgtctgccggcgttccataacgaccagaccacgctcggcaagcagatggcgaaagagttcgatctgcacggcgggatggaagtgacggacgaggtgtttgagtcgccggcgagcatcgtgttcgaccaggcggaaaaccggatgcatacgattaaggcggtgatggtggcgacgcttggggagtga

SEQ ID NO: 114099 - DNA, 363 bp, Enterobacter cloacae
atgtcatggaataaacatgaagctgtgtcatacgcccgtagccacgcactaacccatactggacactattgcgctcgagcaatcgccgccgccattcgagccggagggcttaaaatcgaaggggcaaacgctaaggatttctggcgttctcttgaaaaagcaggattctcaaaagtctatggcactcccatagagggggatatcgcggtgattgatgccttgcccggcccgaatcagtacgggcatgtctgtatttacgatggcgctggaacctggtattcagattttaaacagagaacactgtacccggggccaacctatcgccaacttcagccagcaataaccttatacaggcattattaa

SEQ ID NO: 114100 - DNA, 435 bp, Enterobacter cloacae
atgaataagctcatcttaattgtgttattcagcacagcagcattgggggccgaagattttcagataccgatgcagcgcgctcttgaattcaatcgctggtacattaaacaagtgaacaacgatcgttatcccatccaacagggaaatgaaatcgataagttcgttacggccagcaccatgaaaaaattacgtcatgcagacgatccccgttatgccgacgctgaattttacgaggctgatttttttatgaaatcgcaatatatcggcgaggactgggctgagaatgtggctattgattcgtatgattcagacccggtctgtgtaaacgtgaatatcacgtttggcaaaaagacccagcacacagtcattgattgcatggttaaagaagatgggatctggaaaattcagtctgtcgccgctcgggataataattga

SEQ ID NO: 114101 - DNA, 759 bp, Enterobacter cloacae
atgccgattattcagtctgttgaacgtgcgttgcagatcctcgacctgttcaacgagcaggccaccgagcttaagatcaccgacatcagcaaactgatggggctgagcaagagtaccctccactcgctgctgaaaaccctgcaacttcacggctatatcgatcagaaccccgagaacggcaagtatcgcctcggcatgaagctggtcgagcgcggtcattttgtcgtgggctccatcgatattcggcagaaggcgaaaggctggctgacggagctgtcccagcggaccgggcagaccacccatctggggatcctggacgggcgtgaaggggtttatatcgagaagattgaaggcaagctggccgccatcgcctattcgcgcattggccgccgcctgccggttcacgccaccgccatcggcaaagtgttgattgcctggctgggcgaggccgagctgaatgccctgctggagggctatcagtacaccacctttacgcccgctaccctcgcctcccgcgaagcgttaatggcagccctgacgcggacccgcgaacaaggctacgccctggacagcgaagagaacgagcagggcgtgcgctgcgtggcggtgccggtgtggaaccacgagtcccgcgtcatcgccgccctgagcctgtcgacgctgacctcccgcgtggacgacgcagagctggctgatttccgcgagcagcttcagcaggccgggctccagctctcacgcgcgctgggctacccggcctga

SEQ ID NO: 114102 - DNA, 1611 bp, Enterobacter cloacae
atggaaatcactaacccgatactcaccggcttcaacccggacccgtccctgtgccgccagggcgaggactactacatcgccacctcgaccttcgagtggttcccgggcgtgcgcatctatcactcccgcgacctgaaaaactggtcgctggtcagcaccccgctggaccgtgtgtcgatgctggacatgaagggcaacccggactccggcggtatctgggcaccgtgcctgagctacgccgacggcaaattctggctgctctacaccgacgtgaagattgtcgattcgccgtggaaaaatggccgcaacttcctcgtcaccgcgccgtccattgaggggccatggagcgagccggtcccgatgggcaacggcgggttcgatccgtccctgttccacgacgacgatggccgcaaatactacctctaccgcccgtgggggccgcgccatcacagcaacccgcacaacaccatcgtgatgcaggagtttgacccgcagaccggcaccctctcgcccgagcgcaaaacgctgtttaccggcacgccgctctgctacaccgaaggggcgcatctttatcgccacgcgggatggtactacctgatggttgccgaaggcggcaccagctacgagcacgccgtcgtggtgctgcgtgcaaaaaccatcgacgggccgtacgagcttcacccggacgtgacgatgatgaccagctggcacctgccggagaacccgctgcaaaagagcggccacggctcgctgctgcaaacccacaccggggagtggtatatggcctaccttaccagccgcccgctgcgcctgcccggcgtgccgctgctggcctccggcggacgcggctactgtccgctggggcgcgagaccggcattgcccgcattgaatggcgcgatggctggccgtacgtggaaggcggcaagcacgcgcagctgaccgtgaaaggcccgcaggtggcggagcagcctggcgccgctcagggtagctggcgggatgatttcgacggcagcacgcttgaccctgaattgcagactctgcgcattccgttcgacgacaccctcggctcgctcaccgcgcgccccggctatttacggttgtacggcaacgactcgctcaactcgacctttacccagtcgaccgtggcgcgccgctggcagcacttcaccttccgggccgagacgcggatgcagttctcgccggtgcacttccagcagagcgcggggctgacctgctactacaacagcaaaaactggagctactgctttgtggactacgagggggggcagggcagaacgattaaggtgatccagcttgaccacaacgtgccgtcatggccgctgcacgagcagccgattccggtgccggaacaggctgagagcgtctggctccgggtggatgtggataggctggtctaccgctacagctactcgttcgacggcgagacgtggcatgccgtgccggtgacgtatgaggcgtggaagctgtcggatgactatattggcgggcgcggcttcttcaccggcgcgtttgtgggactgcactgcgaggacatcagcggcgacggctgccacgctgacttcgactacttcacctacgagccggtctga

SEQ ID NO: 114103 - DNA, 1383 bp, Enterobacter cloacae
atgacgcaattaaccatgaaagacaaaattggctacgggctgggtgataccgcctgcggcttcgtctggcaggccacgatgttcctgctggcctatttctacaccgacgtgttcggtctctccgcgggcataatggggacgctgtttttagtttcccgcgtgctcgacgccgtgaccgatccgctgatggggctgctggtagaccgcacccgcacccgttacggccagttccgcccgttcctgctgtggggcgccatcccgtttggcatcgtctgcatgctgaccttctacacgccggacttctccgcgcagggcaaaatcatctacgcctgcgtgacctacattctgctgactctggtctacaccttcgttaacgtcccgtactgtgccatgccgggggtgatcaccgccgacccgaaagagcgtcatgcccttcagtcctggcgtttcttcctcgccgccgctgggtcgctcgccatcagcggcatcgcgctgccgctggtcagcatcatcggcaaagggaacgagcaggtgggctatttcggcgccatgtgcgtgctgggtctgagcggcgtggtcctgctttatgtctgcttcttcaccaccaaagagcgctacacctttgaagtgcagcctggctcgtcggtggcgaaagatcttaagctgctgctgggcaacggccagtggcggatcatgtgcgccttcaagatgatggcgacctgctccaacgtggtgcgcggcggggcgacgctctacttcgtgaaatacgtgatggatcacccggagatggcgacccagtttttactctacggcagcctcgccaccatgttcggctcgctctgctcgtctcgtctgctgggccgcttcgaccgcgtcaccgcctttaagtggatcatcgtcgcttactctctgattagcctgctgatcttcttcacgccggcggagcatattgccctgattttcgccctcaacatcctgttcctgttcgtctttaacaccaccacgccgctacagtggctgatggcctctgacgtggtggattacgaagaaagccgcagcgggcgacgcctggacgggctggtgttctccacctacctgttcagcctgaagattggcctggcaattggcggggcagtagtgggctggatcctggcgtacgtgaactactccgccagcagcagcgtgcagccggtcgaggtgctgaccaccatcaaaattctgttctgcgtggtgcccgtggtgctctatgcgggcatgttcatcatgctgtcgttttataagctcaccgacgcccgcgtggaggccatcagccagcagctgatcaagcaccgcgcggcgcagggcgaggccattcccgacgccgcgacagccgcatcccattaa

SEQ ID NO: 114104 - DNA, 1968 bp, Enterobacter cloacae
atgaccattgagaaaattttcaccccacaggacgatgcgttttatgcggtgatcacccacgcggcggggccgcagggcacgctgccgctgaccccgcagatgctgatggaatcccccagcggcaacctgttcggtatgacgcagaacgccgggatgggctgggatgccaacaagctcaccggcaaagaggtgctgatcatcggcacccagggcggcatccgcgccggagacggacgcccggtcgcgctgggctaccacaccggacactgggagatcggcatgcagatgcaggcggcggcgaaggagatcacccgcaacggcgggatcccgttcgccgccttcgtcagcgatccgtgcgacggtcgctcgcagggcacgcacggcatgttcgactccctgccgtaccgcaacgacgcggcgatcgtgtttcgccgcctgatccgctccctgccgacgcgccgggcggtgatcggcgtggcaacctgcgataaagggctgcccgccaccatgattgcgctggcttccatgcacgatctgccgaccattctggtgccgggcggggcgacgctgccgcccaccgtgggggaagatgcgggcaaagtgcagaccatcggcgcgcgcttcgccaaccatgagctctccttgcaggaggccgccgagctgggctgtcgcgcctgcgcgtcgccgggcggcgggtgtcagttcctcggtacggcgggcacctcgcaggtagtggcggaggcgctgggtctggcgctgccgcactctgcactggcgccgtccgggcaggcggtgtggctggagatcgcccgccagtcggcacgcgcggtcagtgaactggataaccgtggcatcaccacgcgcgatatcctcaccgacaaagccatcgaaaacgcgatggtgatccacgcggcgttcggcggctccaccaatttactgctgcatattccggccatcgcccacgcagcgggctgcactattccggacgttgagcactggacgcgcgtcaaccgcagggtgcctcgcctggtaagcgtgctgcccaacggcccggactatcacccgaccgtgcgcgccttcctcgcgggcggcgtgccggaggtgatgctccacctgcgcgatctcggcctgttgaatctggacgccatgaccgtcactggccagacagtgggcgagaacctcgactggtggcagagctcggagcgccgtaagcgcttccgccagtgcctgcgcgagcaggacggcgtggagccggatgacgtgatcctgccgccggagaaggcaaaagcgaaagggctgacctcgacggtctgcttcccgacgggcaacatcgcgccggaaggatcggtgatcaaggccacggcgatcgacccgtcggtggtgggtgaagatggcgtttaccgccacactggccgggtgcgggtgtttgtctcggaggcgcaggcgatcagggccatcaagcgggaagagattaagcagggcgatatcatggtggtgatcggcggtggcccgtccggcaccggcatggaggagacctaccagcttacctccgcgctgaagcatatctcgtggggcaagacggtgtcgttaatcaccgatgcgcgcttctcgggcgtgtcgacgggggcctgcttcggccacgtatcgccggaggcgctggcgggagggccgattggtaagctgcgcgataacgacatcattgagattgccgtggaccgcctgactctgaccggtagcgtgaacttcatcggtaccgcggacaacccgctgacgccggaagagggcgcgcgcgagctggcgcggcggcagacgcacccggacctgcacgctcacgactttttgccggacgatacccggctgtgggcggcattacagtccgtgagtggcggcacctggaaaggctgtatttatgacaccgataaaatcattgaggtaattaacgccggtaaaaaagcactcggcatttaa

SEQ ID NO: 114105 - DNA, 909 bp, Enterobacter cloacae
atgccgcagtccgcgttgttcacgggtatcattccccctgtctccaccatttttaccgccgatggccagctcgataaaccgggtaccgccgcgctgatcgacgatctgattgctgcgggcgtcgacggcctgttcttcctgggcagcggcggcgagttctcccagctcagcgccgaagagcgtaaaaccattgctcggtttgcgatcgatcatgtcgatcgtcgcgtgccggttctgatcggcaccggcggcaccaacgcccgggaaaccattgagctgagccagcacgcgcagcaggcgggcgcggacggcatcgtggtgatcaacccttactactggaaagtgtcggaagcgaacctgatccgctatttcgagcaggtggccgacagcgtcacgctgccggtgatgctctataacttcccggcgctgaccgggcaggatctgaccccggcgctggtgaaaaccctggccgactcgcgcagtaacatcgtcggcatcaaagacaccatcgattccgtcgcccacctgcgcagcatgatccacaccgttaaaggcgcccatcctcatttcacggtgctgtgcggctacgacgatcatctgtttaataccctgctgctaggcggcgacggggcgatctcggccagcggcaactttgccccacaggtgtcggtaaatcttctgaaagcctggcgggataacgacgtggcgaaagcggctgagtatcatcagaccctgctgcaaatcccgcagatgtatcagctggatacgccgtttgtgaacgtcattaaagaggcgatcgtgctctgcggtcgtccgatttctacgcacgtcctgccgccagcctcgccgctggacgagccgcgcaaggcgcagctgaaaaccctgttacaacagctcaaactctgctga

SEQ ID NO: 114106 - DNA, 453 bp, Enterobacter cloacae
atgattattggcaatattcatcatctccagtcctggttgccagaagagctgcgccaggccattgagcacgttaaggcccacgtcaccgacgcaacgccgaccggtaagcacgacatcaatggcaacagcctgttttatctggtttcggaggacatgacccagccgttcgccgagcgtcgcgctgaataccatgcacgctatctggatattcagattgtgctaagaggtcaggaagggatgaccttcagtaccctgccgcacggtacgccggacaccgactggctggcggacaaagacatcgcgttcctgccggaaggcgagcaggagaaaaccgtggtgctgagcgaaggggattttgtagtgttctggccgggcgaagtgcataagccgctgtgcgcggcgggagcgccggcgcaggtgcgtaaggttgtggtgaagatgctggtagagtaa

SEQ ID NO: 114107 - DNA, 1221 bp, Enterobacter cloacae
atggaaaagcattacgtcggttctgaaattggtcaattgcgtagcgttatgctgcaccgtcctaatttaagtctgaaacggttaaccccctcaaactgtcaggagctgctatttgatgacgtgctctcggttgaacgggcgggtgaagagcatgacatcttcgcaaacacgctgcgcaagcagggtgtggaagtcctgctgttgaccgaccttcttacgcaaacgcttgatattgcggaagcaaaagactggcttcttgaaacacaaatctccgactatcgcctggggccaacctttgccgccgacgtgcgcggctggctggcggatatgccgcatcgcgaactggcgcgcagattgagcggtggattaacctacggtgaaattcctgcggctattaaaaatatggtggtcgatacccacacggcgaatgattttattatgaagccgctgccgaaccacttatttacccgcgatacctcctgctggatatataacggcgtttccattaatccgatggcgaaacccgcccgccagcgtgaaaccaataacctgcgggcaatatatcgctggcaccccgcatttgccgacggcgagtttattaagtatttcggcgacgagaatattaattacgaccacgccacattagaaggcggcgacgtattagtgattggccgcggagcggtattgatcggcatgtccgagcgcacgacgccgcagggcgtggagttcctcgccaacagcctgtttaaacaccgccaggccgagcgcgtgattgccgttgagctgccaaaacaccgctcctgcatgcacctcgacacagtcatgacccacatcgacgttgacaccttctccgtttacccggaagtggtgcgcaaggacgcccagtgctggacgctcaccccggacggacgcggcggcctgctgcgcacccaggaaaccgacctgctgcacgccatcgagaaagccctcggcattaaccacgtccgcctgatcaccaccggcggcgacgcctttgaagccgaacgcgagcagtggaacgacgctaacaacgtcctgaccctccgcccgggcgtggtgatcggctacgagcgcaacgtctggaccaacgagaagtacgacaaagcgggcatcaccgtgctgccgatcccgggcgacgagctgggacgcggtcgcggcggcgcgcgctgcatgagctgcccactggaacgcgacggaatttaa

SEQ ID NO: 114108 - DNA, 912 bp, Enterobacter cloacae
atggaacgaaaacccactctggttgtggcccttggcggcaacgcgctgctcaagcgcggcgagccgcttgaagcggacatccagcgccagaacattgagcaggccgcccgcaccatcgccggcttaacggaacagtggcgcgtggtgctggtgcacggcaacggcccgcaggtcggactgctggcgctgcaaaacagcgcctacgacaaagtcactccctacccgctggacgttcttggcgccgaaagccagggaatgatcggctacatgctccagcaggcgctgaaaaacaatctgccccagcgcgaggtcagcgtcctgctcacgcaggtggaagtggacgccgccgacccggcgttcagcaacccgaccaagtacatcggcccggtctacagcgaagcccaggctaaagcgctggccgcggaaaaaggctgggtgtttaaggccgacggcagctacttccgccgcgtggtgccgtcgccgcagccgaagcgcatcgtcgagagcgacgccatcacggcgctgattcagcgcgaccacctggtgatctgcaacggcggcggtggcgtgccggtagtggaaaacgccaacggctatcgcgggatcgaggcggtgatcgacaaagacctctccgccgccctgctggcgcgccagatcgaggccgatgccctgctgatcctcaccgatgccgacgcggtgtacctcgactggggcaagccaacccaacgtccgctggcgcaggtgacgccggagctgctcagaggcatgcagttcgactccggatcgatggggccgaaagtggccgcctgccgcgagtttgttgaggcctgcaacggcattgccgggatcggcgcgctggccgacggcgcggagatcctggcgggcgagaaaggcacattgattcgtaactga

SEQ ID NO: 114109 - DNA, 1005 bp, Enterobacter cloacae
atgaccattaacctgaaaaaccgcaacttcctgaaactgctggactacaccccggcggagatccagtacctgatcgatctcgccatcgagctgaaggccgccaaaaaagccggacgcgaaaaacaaaccctggtcgggaaaaacatcgccctgatctttgaaaaaacctccacccgcacccgctgcgccttcgaagtgggtgcgttcgaccagggcgcgcaggtcacctacctcggcccaagcggttcgcagattggccacaaagagtcgatgaaggacaccgcgcgcgtgctgggccgcatgtatgacggcatcgagtatcgcggctacggccaggccatcgttgaagagctgggcgagtacgcgggcgtgccggtgtggaacggcctgaccgacgagttccaccccacccaaattctcgccgacctgatgaccatgctggagcactctccgggcaaaaccctgccggagctgagctttgcttacctgggcgatgcgcggaacaacatgggtaattcgctaatggtcggcgcggccaaaatggggatggatatccgcctggttgcaccgaaatccttctggccggaggcgggcctggttgagcagtgccgcgccatcgccaaagagaccggcgcgcgcatcaccctcaccgacgacgtggaggaaggcgtgcagggcaccgatttcctctacaccgacgtgtgggtttccatgggtgagccgaaggaggcctgggccgagcgcgtcagcctgatgaagccatatcagattaacgcggacgtgatgaaggccaccggtaacccgaacgtcaagttcatgcactgcctgccggcgttccacaacgagcacaccaaagtgggccgcgaaatcgaaatggcgtacggcctgaaggggctggaagtgacggaagaggtcttcgaatcaccgaactccatcgtcttcgacgaagcagagaaccgcatgcacaccattaaagcggtcatggtggcgacactcggcgactaa

SEQ ID NO: 114110 - DNA, 1404 bp, Enterobacter cloacae
atgggcaagttcaagtttccctccgcttacaccattctcttttttctgattgccgtggttgccgtgctgacgtggattgttccggccgggcagtaccatatggcaatgaacgaggcgctcggtaaagaagtgccggttgctggcacctacgcgcacgtggcagcgcacccgcaggggctggtttcggtgctgatggcgccgattgccgggctgtacgatccggagtccggccaggccggggccatcgacgtggcgctgtttattctgatcatcgggggattcctcgggatcgtcactaaaaccggggcgatagacgccgggatcgagcgcgtcaccacccggctgcgcggacgcgaagagtggatgatcccgatcctgatggcgctgtttgccgcaggcggcacgatttacggcatggcagaagagtcgctgcccttctataccttactggtgccggtgatgctggcggcgcggttcgatccggtggttgctgcgtccaccgtgctgctcggcgcggggatcggcaccctcggctccaccatcaacccgttcgccacggtgatcgccgccaacgccgccgggatccccttcaccaacggcatcatgttgcgcatcgcgctgctggtgatcggctggatcatctgcgtggcgtgggtaatgcgctatgcccgcaaggtgcgcaaggatccgtcgctgtcgatcgtggcggataagcaggaagagaaccgcgcccacttcctcggcaacaagggcgagcagtcgctggagtttaccccggtgcgcaaactcatcctggtgatcttcgccctcgccttcgcggtgatgatctacggcgtggcggtgctgggctggtggatggcggagatctcggcggtgttcctcgccagcgcgattatcgtcgggctgatcgcccgcatgagcgaagaggagctgacctcaacctttatcaacggcgcgcgagatttgctgggcgtcgcgctgattatcggcatcgcgcgcggtatcgtagtgatcatggataagggcatgattacccacaccattttgcacagcgccgagggaatggtcaccggattgtcgacggtggcgttcatcaacgtgatgtactggctggaagtggtgctgtcgtttcttgtgccttcttcgtccggcctggccgttctgacgatgccgatcatggcgccccttgccgatttcgctaacgtcaaccgcgacctggtggttacggcttaccagtcggcgtccggcatcgttaacctgatcactcccacctctgccgtcgtgatgggcgggctggctatcgcccgcgtgccctacgtgcgctatctgaaatgggtcgcgccgctgctggggattttaacggtggtgattatggtggcgttaagcctgggcgccctgttgtaa

SEQ ID NO: 114111 - DNA, 489 bp, Enterobacter cloacae
atgggaactatgatggattacgaagagtactctcccaaagagcaactacagctaacggtctgccagcgtctgatcgcggaaaagagctatctctcccaggaggagatccgccgcgacttacaggagcggggttttgagaccatcagccagtccaccgtttcacgtctgctcaagttgctcggtgtcataaaaattcgcaatgccaaagggctaaagatttattcgctgaatccccagctgcgcccggcccccgacgcggcgcgtaccgtctctgaaatggtggtgagcgtggagcacaacagcgaatttatccttatccataccgtcgccggatatggccgcgcggtggcgcgtattctggattatcaccagttaccggaaattttaggcgtggtggccggaagcagtatcgtctgggtcgccccccgcgtggtgaagcgcaccgcactggtgcataagcaaattaattatttactcagaacgcattaa

SEQ ID NO: 114112 - DNA, 933 bp, Enterobacter cloacae
atgaatccgctttatcaaaaacacatcatttccataaacgacctcagccgcgaagagctggaactggttctggaaaccgcggcaaaactgaaggccaatccgcaaccggagctgctgaagcacaaggtgattgcgagctgcttcttcgaggcctccacccgcacccgcctctccttcgaaacctccatgcaccgcctgggcgcgagcgtggtgggcttctcggacagcagcaacacgtcgctgggcaaaaaaggcgagaccctggcggataccatttcagtcatcagcacctacgtggacgcgattgtgatgcgccacccgcaggagggcgcggcgcgtctggcgaccgagttttccggcgggattccggtgctgaacgccggtgacggtgccaaccagcacccgacgcagaccctgctggatctgttcaccattcaggagacgcagggcacgcttgagaacctgaacatcgccatggtcggcgacctgaaatatggccgcaccgtccattccctgacccaggcgctggcgaaatttaacggcaaccgcttcttcttcatcgcgccggacgcgctggcgatgccgcagtacattctcgatatgctggacgaaaaaggcatcgcgtggagcctgcacgccagcatagaagaagtgatgggcaacgtggatattctctacatgacccgcgtgcagaaagagcgtcttgacccatccgagtacgccaacgtgaaggcgcagttcgtcctgcgcgccagcgacctcgagggcgcgcgcgacaacatgaaggtgctgcacccgctgccgcgcatcgatgagatcaccacagacgtggataaaacgccgcacgcctggtacttccagcaggccggaaacggcatcttcgcccgccaggcgttactggcactggttctgaatcgcgaattagctctgtaa

SEQ ID NO: 114113 - DNA, 462 bp, Enterobacter cloacae
atgacacacgataacaaactccaggttgaagccatcaagcgtggcaccgtgattgaccacatccctgcgcaggtgggctttaagctgctgacgctgttcaaactgactgaaaccgaccagcgcatcaccatcggcctgaacctgccgtcgggcgaaatgggccgtaaagacctgatcaaaatcgagaataccttcctgaccgacgagcaggtcaaccagctgtctctgtacgcgccggacgccacggttaaccgcatcgacgattacgacgtggtgggcaaatcccgcccaagcctgccggatcgcatcgaaagcgtgctggtctgcccgaacagcaactgcatcagtcatgctgagccggtttcctccagtttcgcagtgaaaaaacgcgccaatgacattgcactcaaatgcaaatactgcgaaaaagagttttctcattatgtggtgctggccaactaa

SEQ ID NO: 114114 - DNA, 387 bp, Enterobacter cloacae
atgagcaaagtactcgcgacggaaaatgcaccagcggctatcggcccatacgttcagggcgttgatctgggcagcatgatcatcacttctggtcagatcccagtgaacccaaaaaccggtgaagtgccagccgacgtagcggcgcaggcgcgtcagtcgctggaaaacgtgcaggcgatcgtcgaatctgccggcctgaaagtgggcgatatcgtcaaaaccaccgtgttcgtgaaagatctgaacgatttcgccaccgtcaacgccacttatgaagcgttcttcaccgagcacaacgccaccttcccggcgcgctcctgtgtggaagtggcgcgtctgccaaaagacgtaaaaattgaaattgaagcgattgccgtacgtcgctaa

SEQ ID NO: 114115 - DNA, 1449 bp, Enterobacter cloacae
atgaaactatctaagatcgcgctggccgttgccacattagcggttgcgtcttccgcacttgcacacggatatatagaatcccccgccagccgcgcttatatgtgtaagctcggccagaatattgactgtggctctgtacaatatgaaccgcagagcgtagaaaagacctccggcttcccgacgggcgcaatgccgcctgacggccagcttgccagcgccggtattgccagctactcccagcttgataagcagagcctgaacgcctggactaaaagccccatgacggcaggcccgcatgaatttgtctggcaccataccgcgccgcataaaaccaccaactggcgttattacattaccaaacaaaactgggaccccaataaaccgctgacccgtgaccagttcgaattaacgccgttctgtactattaacgggaatggtcaggcaccgtccatgacaaaatccaagacctgtaatgtcccggaacgtacgggctaccaggttatttatggcgtgtgggaaattgcggataccacaaacagtttctatcaggccattgacgttgatttcggtaacggcggcaacgtcacgccggacgataccccagcggtaatatcccagtggagtaaaaccctgagcggacagattgccgggaataacctgaacgtgggcgataaagtgattgcacgcttcttcgacgccaacggggaagttgccgccctgcgtactgaaatgaccatcggctcttcagaacaaggcgacgctaaccagtggtcctacgatctggcgcagaagatcaacaccgctcatagcgatgtccgcgtcggtgtgaaagatgaagccggtgaaattagtccggttcacggcgccaacagcgtattcgtgaaagacggcagcacgctgaaatccgttgccatctcttatgaagagcaaaaagcgcaggtgagcgagaccatcgccgtttccgatctgcaatacagcaaaatcgaacatggcaatgtgattgtaaccttccatgtgaacacgcagggtgacgttaattttgaagcgcacgtgatgaaccaccacggtgccgaaaaaggttacctgaagcaggatatgaataacgtcaatcaaaacgtgaccatgacgctgactgacgtcacggcgggccaccatatgctgaaatactacgccaccaacaaagacggcaccctgttcgcgcaggacgtgctaaacctgatgctggaaagcgacgcggcggacagcagcggcccgcatgactttatcttcccggacagcattgcctcttacaaagcgggcaccgtggtgttacagcctaaaaacggtaagacctacgagtgtaaaccgttcccgtatagcggctactgcgtgcagtacagcccaaccgcaaaccagtttgagccaggcgtgggcgcgcactggagagaggcgtgggtgctgaagaaatga

SEQ ID NO: 114116 - DNA, 2385 bp, Enterobacter cloacae
atgttacggtacagcctcttaaccgccgggctcatgctcggcgcctccgcctttgccgccccggcaggcgaccttcccttaatgccctggcctgcgaaggttgaacgcccgaccactcagggcgcgctggtgcttaacaatcaactctctgtgagcgtcagcggcgacgatctgggggatgcggtcaaccgcctgcgccagcgcattgcgctgcaaaccggctggacgctacagccgcaggccgaaaaacctgacaagccgaccatccgcatcgccatcgccaaaaaggtgaagccgcagccgctgcctgacagcgatgagagctataaactcacggtggacgccaacggcgtaaatatctctgccaacacccgcttcggcgcgctgcgcgccatggaaaccttgcttcagctgatgcagaacggcgccgaaaacacctcgatcccgtgggtgaccattgaagattcgccgcgcttcccgtggcgcgggctgctgctcgattcggcgcgccacttcctcccgattccggatattaaacgccagatcgacggcatggccgcggccaaactcaacgtcctgcactggcatttgacggacgatcagggctggcgcttcagctcaaagcgctaccctaagctgacccagcttgccagcgatgggctgttctacaccccggagcagatgcgcgagattgtgcgttacgctgccgagcggggcatacgcgtggtgccggaaattgatatgccgggccacgcctcggcgattgccgtcgcctacccggagctgatgagcgcgccggggccgtacgccatggagcgccactggggcgtgctaaagccggtgctggatccaaccaaagaggcaacttatacctttgccgacgcgatggtcagcgaactggcggcgatcttcccggatccgtatctgcatattggcggcgatgaggttgacgacagccagtggaaagcgaacgctgcgatccagacgtttatgcgcgacaacaaactggcggacagccacgcgttgcaggcgtatttcaaccgcaagctggagacgatccttgagaagcaccaccggcagatggttggctgggatgagatctaccatcccgatctgccgaaaagcattctgatccagtcctggcagggacaggacgcgctggggcaggtggcgcagaacggctataagggcattctctcaaccggtttctacctcgatcagccgcaatccaccgcctaccactaccgcaatgaaattgtgccgcaggggctgaacggcgtggatgtgatagcggacaccgacagcgtccagagctgggctttctccatgccgcgtctgaaaggcaagccggtggaaggcagctttacgctggtgaaaggcgatgccgggtggcgcggatttattgattttgccgggaaatcgcgtcgggcggtggagaacattcagtggcgggacgacaaccaggtaacgtttaccgttgatacctggatgggtgaaacgcgtccggtcgtttccgttgagaacgataagctcagcggctatttcctggtgggtaacgcccgctacccgatcgacggcacgcgtctggacgcggtgccaaaaggcataccgccggtggtgccggacccggcgaacgaggccaatctgctcggcggcgaagccgcgctgtgggcggaaaacgtggtcgcgccggtgcttgatatccgtctgtggccgcgcgcctttgcggtggcggagcggctatggtcggcgaaggacgtcaacgacatcgacaacatgtatacccggctccaggcgatggacagctggtcgacggtgtcggctggactacagcagcatacccagcagcaggtgcagttcacgcgcctcgccaacaatgcggataccctgccgctgcaaattctcgcccaggcgcttgaaccggcgcagtattacacccgccagcatcttaagttccaggccggaaactatcatcagtttgagccgctcaaccggctcgctgacgcgctaaacgcggaaagtgcgatcgtgcttcagatgaataaatgggcggaccgtctggtgagcgacgcggaagacacggaaagcgccgacgcgctgcgccacgtctttaaccgctggcagaacaacaccagcgatgcgctggccttgagcgaaaacagctatcagctgaaggcgatcaagccggtgattcaggaggtggacaagctttcgtcgattggcctgaggctgacggatctggtggcgcgccagggcacgctggacgacaacgagatcgcgtcgatccagagcgaactggataatgcggcgaagatccaggacgaggtggtgattgcggcggtttacccgctggaaacgctgctgcgtgcgacgcggaatcagtaa

SEQ ID NO: 114117 - DNA, 2709 bp, Enterobacter cloacae
atgctgaaaaatatcacccggcagctgcaagcgctgctgagccgtcacctgccacatcgcctgattgcgcgcgatccgctgccaaatgccaacaccatggcgggagcggcaatccccgcttccctgaccgagcgctgcctgaacgtggcggcgatggatgaaaacgaagtctggcgcgcctttggcggccacccggaagggctgaacgcgcaagaagtgttaaaaatccgcgcggaacatggcgataaccagatcccggcgcagaaaccctctccctggtgggtccacctgtggctctgctaccgcaatccgttcaacctgctgctgacggtgctcgggattatctcttacgccactgaagatctgtttgccgcaggcgtgattgccctgatggtggggatctccacgctgctgaactttattcaggaagcgcgctccaccaaagcggcggacgccctgaaagcaatggtcagcaacaccgccaccgtgtcgcgcgtgattaacgacctcggcgagaacgcctggattgagcttcccattgaccagctggtgccgggcgatctggtgaagctggcggcgggggacatgatcccagcggatttacgcgtcatccaggcgcgggatctgttcgtcgcgcaggcgtcactcaccggtgaatccctgcccgtagagaaggtagcgcggacccgcgatccgcagcagatgaacccgctggagtgcgacaccctgtgctttatgggcaccacggtggtcagcggcaccgcgcaggcgattgtcaccgccaccggcggcaatacctggtttggacagcttgccggacgcgtcagcgagcaggagagcgagccgaatgcgttccagaaaggcattggccgcgtcagcatgctgctgatccgctttatgatggtcatgacgccgattgtcctgctgatcaacggctacaccaaaggcgactggtgggaggcggcgctgttcgcgctctccgtggccgttggcttaacgccggaaatgctgccgatgattgtcacctccacgctggcgcgcggggcggtcaaactctctaaacaaaaggtgattgttaaacacctcgacgccatccagaactttggcgcgatggacatcctttgcaccgataaaaccggcaccctgacgcaggacaaaatcgtgctggagaaccacaccgatatcgccggaaagaccagcgaacgggtgctgtacagcgcgtggctgaacagccactatcagaccgggctgaaaaacctgctcgacgtggcggtgctggaaggggtggacgaggagtctgcccgcacgctctccggtcgctggcagaaggtggatgaaatcccgttcgacttcgagcgccgccgcatgtcggtggtggtcagcgagcaggcggacgtacatcagctgatctgcaaaggggcattgcaggagatcctgaatgtttccacgcaggtgcgccataacggcgagatcgtgccgctggatgagaccatgctgcgccgcatcaaacgcgtcaccgataacctgaaccgtcaggggctgcgcgtggtggcagtagccagcaagttcctgcctgcgcgggaaggtgactaccagcgtatcgatgaatccgatttgatcctcgaaggttacatcgcattcctcgatccgccgaaagagaccaccgcgccggcgctaaaagcgctgaaagcgagcggtatcaccgtcaaaatcctcaccggcgacagcgagctggtggcggccaaagtgtgccacgaagtcggcctggacgcgggcgacgtcgtcgtggggagcgacattgagcacctgtccgacgatgagctggccgagcttgcccaacgcaccacgctgtttgcccgcctgacgccgatgcataaagagcgcatcgtcactctgctgcgtcgcgaagggcacgtagtgggctttatgggcgacggcatcaacgatgcgccagccctgcgtgcggcggatatcggtatctccgtggacggcgcggtggatattgcccgcgaagcggcggatatcattctgctggaaaagagcctgatggtgctggaagagggcgtcatcgaagggcgtcgcaccttcgccaatatgctcaaatacatcaaaatgaccgccagctccaacttcggcaacgtcttcagcgtgctggtagcgagcgcgtttctgccgtttctgccgatgctgccgctgcacctgctgatccagaacctgatgtacgatgtctctcaggtggcgatcccgtttgataacgtggacgacgagcagatccagaagccgcagcgctggaaccccgccgatctggggcgctttatgctgttctttgggccgatcagctctatcttcgacattctgaccttctgcctgatgtggtttgtgttccatgcgaatacgccagaacaccagacgctgttccagtccggctggttcgtggtgggactgctgtctcagacgctgattgtgcacatgatccgcacccgtcgcattccgtttatccagagccgtgccgcgtggccgctgattgtgatgacgggcattgtaatggcgctcgggatcgcgctgccgttctcgccgctggcaagctacctgcaacttcaggcgctgccgctgagctacttcccgtggctggtggcgatcctcgcgggctacatggtgctgacgcagatggtgaaagggttctatagccgtcggtatgggtggcagtaa

SEQ ID NO: 114118 - DNA, 948 bp, Enterobacter cloacae
atgcagaaccgccttacgattaaagatatcgcgcgtttaagcggcgtggggaaatcgactgtctcacgcgtgctgaacaacgaaagcggtgtcagcgagcgcacacgcgagcgcgtcgaggcggtgatgaatcagcacggtttttccccttcccgctccgcgcgcgccatgcgcgggcagagcgataaagtggtcgccattattgtctcgcgtctggattccctctccgaaaacctcgccgtacagacgatgctgcccgcgttctacgagcagggctacgatccgatcatgatggagagcaagttctccgcgcaaatggtggaggagcatctcggcatgcttcagcgccgtaatattgatggggtggtgctgttcggatttaccagcctaaaagaggacgtgcttaaaccctggcagccgtcactggtgctgctggcgcgcgacgccagcgggtttgcctctgtctgttacgatgacgaaggggcgatcgtgatcctgatgcagcgcctgtatgaacagggccatcggcatattagctatctcggcgtgccgcatgccgacatcaccaccggcaagcgtcgccacgaagcgtacctggcgttttgtaaaaaacacaatcttcccgccgtggccgcgctgcccggtctgggtatgaaacagggatatgaacaggtcgccagcgtgctgacgtcacaaaccaccgccctggtatgcgccacggatacccttgcattgggtgcgagcaaatatttgcaggagcagcgcatcggggaactgcaattagcgagcgtgggaagcacgccgctgatgaagttcttacacccggagattatcagcgttgatccgggttacgccgagtctggccggcaggctgccgcgcagctgatcgagcagattaccgggcgtaccgagccccgtcagatcgttattccagcccatctctcataa

SEQ ID NO: 114119 - DNA, 1419 bp, Enterobacter cloacae
atgagtaaagtcaaacaaacagatatcgatcagctgatcgtcctggtcggcggacgcgataacatcgccaccgtcagccattgcattacccgcctgcgcttcgtgctgaacgatccggccaaagccaacccgaaggccattgaagagctttctatggttaaaggctgcttcaccaacgccgggcagtttcaggtggtgattggtaccgaagtgggcgattactatcaggctctgctggcgactaccgggcactcttccgccgataaagagcaggcgaagaaggccgcgcgccagaatatgaaatggcatgagcagctgatttcccattttgcggagatcttcttcccgctgctgccagcgctgatcagcgggggcttaattctgggcttccgtaacgtcatcggcgatgtgccaatgagcgacggcaaaaccctggcgcagatgtacccggcgctgcaaagcatctatgacttcctgtggctgattggcgaagcgatcttcttctatctgccagtcgggatctgctggtccgcggtgcgcaagatgggcggaacgccaattctcggtatcgtgctcggcgtgacgctggtctctccgcagttaatgaacgcttacttacttggtcagcaaacgccagaggtgtggaacttcggcctgtttaccatcgccaaagtcggctatcaggcgcaggtgatcccggcattgctggcgggcctggcgctgggctttattgagacgcgcctgaagcgcatcgtgccggattacctctatctagtggtggtcccggtctgctcgctgatcctggcggtgttcctggcgcacgcctttatcggtccgtttggccgcatgattggcgacggcgtggccttcgcggtccgtcacctgatgaccggcagcttcgcgccaatcggtgccgcgctgtttggcttcctctacgctccgctggtgatcaccggcgtgcaccagaccacgctggcgattgatatgcagatgatccagagcctcggcggtacgcctgtctggccgatcatcgccctgtctaacattgcgcaggcctcggcggtaaccggcatcatcatcgtcagccgtaagcacaacgagcgagagatctccgttccggctgccatctccgcttacctcggcgtcactgaaccggcgatgtacggtatcaacctgaaataccgcttcccgatgctctgcgcgatgatcggctccggtctggcgggcttgctgtgcggcctgaacagcgtgatggcgaacgggattggcgtcggcggcctgccgggtatcctctccattcagcccgcgttctggcaggtatttgcgctggcgatggcggtggcgattatcatcccaatggcgctgactactgtggtttaccagcgtaagttccgtcagggcacgttgcagattgtttaa

SEQ ID NO: 114120 - DNA, 1656 bp, Enterobacter cloacae
atgaatacccttcctcactggtggcagaacggcgtcatctatcagatttacccaaagagtttccaggacaccaccggcagcggcacgggcgatctgcgcggcgtgacgcagcgcctggactacctgaaaaccctcggcattgacgccatctggctgacgccgttttatatctccccgcaggtggataacggttacgacgtggcgaactacactgccatcgatccgacctacggcacgctggacgactttgacgagctggttgcccgggcgcatgaacgcggcatccgcatcgtgctggatatggtctttaaccacacgtccacgcagcacgcctggttccgtgagtcgctggataaagcgagtccgtaccgccagttctatatctggcgcgacggtacgccggatacgcttcccaacaactggcgctccaaatttggcggcaacgcctggcgctggcacgccgaaagcgagcagtattatctgcacctgttcgcaccggagcaggcggatctcaactgggaaaacccggcggtgcgcgccgagctgaaaaaagtgtgcgagttctgggccgatcgcggcgtggacggcttgcgtctggacgtgattaacctgatttcaaaagatcaggatttcccggacgataccctcggcgacggtcgccgcttctacactgacgggccgcgcatccacgaatatcttcaggagatgagccgcgacgtctttacgccgcgtaatctgatgacggtgggcgagatgtcctccacctcgctggagaactgccaacagtacgcgtctcttgacggccgcgagctgtcgatgacctttaacttccaccacctcaaggtagactaccccggcggcgaaaaatggacgaaggcgaagccggacttcgtggcgctaaaaacccttttccgccactggcagcaggggatgcacaacaaagcctggaacgcgctgttctggtgtaaccatgaccagccgcgcatcgtgtcgcgctttggtgacgaaggggaacaccgcgtggcggcggcgaaaatgctcggcatggtgctgcacgggatgcagggcacgccgtatatctaccagggtgaagaactgggtatgaccaacccgcatttcagccgtatcaccgactaccgcgacgtggaaagcctgaacatgttcgccgaacagcgggctaacggtcgcgatacggatgaactactggcgattctggcgagtaagtcacgcgataatggccgcacgccgatgcagtgggacgcctcgcataatgcgggctttaccgaggccgagccgtggattggcgtctgcgacaactacgaaaccgtgaacgcccgcgcggcgctggacgaccccaattcggtgttttacacctatcagtcgctgattcgcctgcgcaaaaccttgtcggtactgacgtggggggattatgaggatctcctgcctgaccacccttccctgtggtgctaccgccgccagtggcagggacaaacgctgatggtggtggcgaacctgagccacgcgcgccagcagtggcagcccgtccccgtagagggagcatggcgggtggcactcagcaactatgaagaggttcccttccgacccgatacgttgctattgcgtccgtttgaagctatctggtgggtgcaggaataa

SEQ ID NO: 114121 - DNA, 747 bp, Enterobacter cloacae
atgaaaaagataattattaaagcaacgtgtattagcgcattattattgagcacgcagggatggtgcggaaatacgtccgtcgatcttcgctttggtcataatacacgctcagacgtaaatgattcacgcattaaggtcatgcatcaggcgaataacggtttttacttctccgttgaagccgctcaaaaccataacgatacgttttttggtgataccgacagatataacccagacgacaaagggttaacggaagcggcacaggaaatcgaaacgcgctggcgtttcgatctgggaaatggtttcgccgttgcgcctggcatggtgacggttttcaccgccagcaatacgcattaccgccccttcattcagggctggaaagccttcgataacggtctgaatctctccgcccgttaccgctataacaccgtcaatgacgcgcacagcgataaagaactcgacggcagcggttatactcgccgccagtcacaccagttcgacatttggttcgcgtataacatcggcaaattcggtatgtcctataacccgcgcttccgctggcaggataacgtcgatcagggaaccggggatgacacctactgggagcataccgtcgcgttcaactacaagctcgacgatggctggacgccatacgtcgaactggtttcactggataaaacgtacatcaataatgacggcaaccatgaaaatgattatgccgtacgtctgggaatagtgaagcagctctga

SEQ ID NO: 114122 - DNA, 660 bp, Enterobacter cloacae
atgaattcattccagggaagtgaacgtttgatatttgaatacattcagcatcatgcgtgtaatatttctaatatatcggcaaaagagattgcccgtgatacctttaccacgacaacatccgttaatcgtgtatgtaaaaaaatgggctataaaagctataccgagcttcggtaccgttttttacgcgaccattttacacctgcacctgctacacccgacgtggggccgcagccggatgatattgtgacagacgtgtccaggttgcttacgcattccagccatatctatctttacgcacggggagcctcgctcaccagcctcaactacctgtcgcgctttttgtcgctggcgagcctgccgcaccttattttgaatgacatgcaccagttgacacgcgtatcgaaggggacgctggtgttgatcagtaaatccggggagacgcagtcgctgattgaaatggcgcgtaacgcgctgcgcaaagggttgaagattattgcgattacccgtcaggggtcgacactggcgtcgatctcaacgctatgctggccgttaccaatcgacattaacgcggtttcgctgtatcagcgggaagggcagcttgaactgttgagcgccgtggaccgtatcggctgtaggctgctacagcacgatacggtgtag

SEQ ID NO: 114123 - DNA, 1404 bp, Enterobacter cloacae
atgacaatgacgaaacaaaaagttgtcgcggtaacggcctgcccgacaggtatcgcacacacctttatggcggcgaataaaattattgcatgggctaacgagcacaatatcgaggtaaaggtcgaaacgcagggcagcgacggcgttaaaaaccgcttaacaaaacaggatatcgcctccgccacggccattattctggcaaccgacgttcccattcaggatgccgagcgttttgaaaacattcctcaccttcaaacccgcacacaagagctgatcaaacataccgatcgctatctgcgtcaggcgctggcaaaggaaaaaaacgtcaccactgtcgcacaagaagacgatcttcagcgttcggcttaccagatttttattggccatattatggcggccatcagctatatgctgccggtggtggtgatgggtgggctgatgatggcgacggccaaaataaccgggcagtttattaacatcgaacattcgccgttcagcgtgctggataaagtgggctttatgaccattaagttcatgtatcccgtttttgcaatgtatctggcgttttccattgccggtaaaccggcactcatccccggtcttattggcggcatcatgtcagacgaagtctataagcgcttctttgatatcgaaggctttatgccatccggctttttcggcgccattggtatcggcttttttgtgggctatctggtgcgctggctcaatgattcgattcacgtccgccagcagctcaccaccattaaaaccatgctgctcgtcccgctgatcaccggcattacgctggtgatggtcatggaatatttgattaacccgatttttggctcgcttaaccagctgatggtggtcttttttacctcggcaggtgacaccgggcgcgggttctattccgcgatgatcgccgcgggcaccgcgttcgacctgggcggtccggtcaacaaggcggcaggctcggtcgcgctcggcctgaacggcatgagcgagacgtttgatttaaccgcccgcgaactctccatcgtgatcccctccattggcgtcggctttgctgcgttcctcaacggccgctttggattaccggatgtctttagccaggaagagaaaaccgtcggtagcacctcgttgttgctgggcgtgattgggatctccgaaggcgcgatcccgttcatcctgaaaaacccacgtctgatcccggtgttcatgaccggtgccgtcgccggcgcgctggtcgccattacccttggcgtgaagcagacgctgcctctgccagccgtctggggctggccgctggcaaccaacgtggcgggctacctggcgagcgtctttattggcgcactgatttgcgccctgggcgtgctctatgtcagcccaaagaacgccagataa

SEQ ID NO: 114124 - DNA, 2598 bp, Enterobacter cloacae
atgaatcagatccacgtcattgcccatacgcactgggatcaggagtggtatttcacccgtcaggacagcatggtgctggcgtcatataattttgcggacgtcatcaacacgctggagcaggactccgcttacacctgctatcaccttgacggacagatggcggtagtggaggactttctcgccatcaatcctgattatcgcgccaggctggaaaagctggtcagagaaaaaaggatcttcgtagggccatggtatacccagacggacacctataacgtgcatggcgaatcgattatccgcaacctgaagtacggcattttttctgcccggacgctggggcatgcgatgcaggttgggtatcttccggatacctttggccacaatgcgcaaatgcccacgatcttgcagggctgcaatatcgacaatatcgtcttctggcgcggtatcgatcacgacaggcacgccaaaagcagccagttcctctggcgcgcaccctcaggtgcgaccgtcatcgcctgtgcgatggcgctcggttatggcgcggctaaaaacatgcgttcggaagcctcccatctccggggaaaaatctacccgatgaccacacttttgcgttcacgggccggtctaaacgacctgctcctgccctgcggcggcgatcaggtcagcatcgacccggcgctgccgaaaattctggaggtcgccagcgcacagtccccggatcaggaccgttacttcatcagctctctggagcgttatgtagaaacccttcgcgcgcagcgtgaacagtttgagctcctggaaggagagctgaaatcgccgcgctacacccgcatccataaaacgatcggctccgtgcgctacgacatcaaaaagaaaaacgatgaggttgaacaattcatcctgcgacagctggagccgacaatcgcaatggcgcgtcaccaggggattccggtcaacctcgcggtagtcgacaccctctggaaaaagctgttgcgaaaccatgcccacgattccattggcggctgtaatagcgatgccaccaaccgcgacattctgcatcgtatggaacaaaccgaacagctgtgccatagcctgtggaatctggtggtgaaaaccctggccgccgcctgcgttcaggatggcgacctgctgatttttaactcgctggctaccccaacgcagcgcgtggtgatagccacactgtatagccgggcggataatatcgccctgacgcatcaggggcagcccatccctttcgacgtcctggaaagagacattctgcccggcggaacggcgatctcccttaccgccgagggcgagtgcgagacgccccttctcccttattaccgctggcacgttgcggtaaagacaccggttctgccgccgatcggctatctcaccgttaacgttgaagaagaccctgcgcctttcctggcgtctgaaaagataaagggcagcgagattgagaatgcgcattatcgactgtcgctggatgccggaacgcttaccctgcatgacaaacgcagcggcagacgtatcccctctttctttacctttgaagactgcgcggacgcgggcgacagctacgatttctcaccgcttgcgggcgacgcgccgacgcgctgttcgcattttacgctcgtcgacggcgtaaaaacgccgcttgtcgaaaagctgaccgtcgaggccacaatgcgtcttccgcaggatctcgccagccgtcaggatacggcccgaacgccgttatccattcgtctggtctgcgaattacgccacgacgatccgaatctgtatgtcgaggcttcgctggaaaacagccactgcgatcaccggctacgtttactgatcggcagcgatgttcacacccgtcacgctatcgcctcacagcccttcgcaatcatccagcgcgaaacgggatatgacggtgaacactggcaagaacgctatcgcgagaagcccgtggatatcgaaaccagcgagggcattatcgctgtcacggaaccgggtaaagcgctggttgtgactagccgtggcatgaaagaatttcagattatcggcagcgaacccgctgctattgccctgacgatgtttaaatcgacgggcgtgctcggacgcagcgatctcgaatggcgaccgggtcgggcctccggcatcaataatacggtggttgagactcctgatgcccagttgctgaaaccgttgcgcttttcattcaccgtcgcgctggccgacaacgccgaccacctcacgctgcgccagctggaaaatcaggcggctggacagcccttcacctaccaacggcaaacgctacacacgctcgatcaccgtcttgagcgcttttcgttgcgtctgcccgagcgcaggcttccggcagagttctcgctactgaccgtgccggagccgctcatcctttccgctctgccccatgcgcagctgctgcatggcaccgtcttacgcgtatttaacgccgggacacaaccggctcccgtcccggaaagtctggcagtgttacggcagatcaactatctggaagagccgatgcaaccggtaacggcgatcctcccctccgcaacctgcgattttttgattgaggcttaa

SEQ ID NO: 114125 - DNA, 573 bp, Enterobacter cloacae
atgaacttgctggcattgacgcatcccgatctggtgtttatcaacccgccccaacgtacgccggaagcagtgatccgttggctcaccgagccgctcgccaggcggaaggtcatcaacgatcgagaggcatttatcgaaagcgttttacaacgtgaaagtgaaggccctaccgcgctgggtgaagcgctcgccgtcccgcacggtaaaaccgaggcggtgcaacaggcggcattttgtctggcgctctttgacgatccgatatgctggccggggctggagggtgatgaagaggtgaggatggttttcctgctcgccattccgccagcggaagcaggcagtacgcatatgcacctgctgacgacgctgaccagcagactcacggatgagcgggtgcgtgagctattgctggcggcgcgtacgcgggaagaggcgatgtctgcgctgagtaatgaaggttctcaaaaacaggacgatgcccccgaaagctctcttctcatcccgttggtactgggctgcatcgttaccgtagcctttttgcaggcagggttgagctgggcctgcggggtgagttaa

SEQ ID NO: 114126 - DNA, 2139 bp, Enterobacter cloacae
atgacaccgcatgtgatgaaacgtgatggctgtaaagtgccgtttaaatcagagcgcatcaaagaagccattctgcgtgcagctaaagcagcgggagtcgatgacgcagattactgcgccaccgtcgcagaagtcgttagcagccagatgcatgaacgcagccaggtggatatcaacgagatccagaccgcggttgaaaaccagctgatgtctggtccgtacaagcagctggcgcgcgcctacattgagtatcgtcacgaccgtgacgtccagcgtgagaaacgcggtcgcctgaaccaggagatccgcggcctggtagagcaaaccaactcgtcgctgctcaatgaaaatgccaacaaagacagcaaagtgatcccaacccagcgcgacctgctggccggtatcgtcgccaagcactatgcccgccagcacctgctgccgcgcgacgtggtgtctgcgcacgagcgcggtgagatccactatcacgatctcgactactcgccgttcttcccgatgtttaactgcatgctgatcgacctgaaaggcatgctgacccacggttttaaaatgggtaacgccgagattgagccgccgaaatccatctccaccgcgacggcggtcacggcgcagatcatcgcccaggtggcaagccacatctatggcggcaccaccattaaccgcatcgatgaagtgctggccccgttcgtggccgagagcttcaacaaacaccgtaaaacggcggaagagtggcagatcccggatgccgacggttacgcccgttcccgcaccgagaaagagtgctacgacgcgttccagtcgctggaatatgaggtaaacacgctgcacaccgccaacggccagacgccgtttgtgaccttcgggtttggcctcggcaccagctgggaatcacgcctgatccagcagtctattctgcgcaaccgcatctccggcctcggtaaaaaccgtaaaacggcggtgttcccgaaactggtgttcgccattcgtgacggcctgaaccacaagtttggcgatccgaactatgacatcaagcagctggcgctggagtgcgcgagcaagcgtatgtacccggacatcctcaactacgaccaggtggtgaaagtcaccggttcgtttaaaacgccaatgggctgccgcagcttcctcggcgtgtacgaagatgagaacggcgagcagatccacgacgggcgcaacaacctgggcgtcatcagcctgaacctgccgcgcatcgcgctggaagctaaagggaatgaagcggccttctggacgctgctggatgaacgtttacagctggcacgtaaggcgcttatgacccgcatcgcccgtcttgaaggggtgaaagcccgcgtcgcgccaattctctatatggaaggagcctgcggcgtgcgcctgaaggcggacgatgatgtgtcggagatcttcaaaaacggtcgcgcatcgatctctcttggctatatcggcattcacgaaacgattaacgcgctgtttggcgacaagcacatctatgacaacgacgccctgcgtgagaaaggtatcgcgattgtgcagcgcctgcgcgatgcggtagaccagtggaaagaggaaactggctacggtttcagcctgtacagcacgccgagcgaaaacctctgcgatcgcttctgccgtctggacaccgccgagttcggcatcgtggaaggcgtgaccgacaaaggttactacaccaacagcttccacctcgatgtggagaagaaggtgaacccgtacgacaagatcgactttgaagcggcctatccgcccattgcgaacggcggttttatctgctacggcgagtacccgaacattcagcacaacctgaaggcgctggaagacgtgtgggattacagctatcagcacgtgccgtactacggaaccaacacgccaattgacgagtgctacgagtgcggctttaccggtgagttcgaatgcaccagcaaaggcttcacctgcccgaaatgcggtaaccacgacgcagcccgcgtctccgtgacccgccgcgtgtgcggctacctcggcagcccggatgcccgtccgtttaacgccggtaagcaggaagaggtgaagcgcagggtgaaacatctggggaatgggcagatcgggtaa

SEQ ID NO: 114127 - DNA, 465 bp, Enterobacter cloacae
atgaactatcaccagtactaccccgtcgacatcgtcaacggccccggcacccgctgtaccctgtttgtatcaggctgcgttcacgagtgccccggctgctacaacaaaagcacctggcgcctgaactcgggtatgccgtttaccgctgagatggaagaccgcatcatcaacgacctgaacgacacgcgcatcaaacgccaggggatctcgctctccggcggcgacccgctccatccgcaaaacgtgccggcgatcctgaagctggtaaaacgcatccgccgcgagtgcgcaggaaaagacatctgggtctggacgggctataagctggatgaactgaatgcgcagcagatggaagtggtggatctgattaacgtcctggtcgacggcaagttcgtgcaggatctaaaagatcctatgcttatctggcgcggcagcagcaaccaggttgtgcatcatctgcgttga

SEQ ID NO: 114128 - DNA, 1911 bp, Enterobacter cloacae
gtgcgatttccgaaccaacgtttagcgcaacttttcgatctgttgcaaaacgagacgctgccacaggacgagctggcgcagcggctgtcggtctccacgcgaaccgtccgggcggatatcaccgccctgaacgcgctgctggccagccacggcgcgcagttcattttgagccggggcaacggctatcagctcaaaattaatgatgtggtgcgctatcaacaattgcaggcgtcccacccgcgcgcgctgcgtattccgcgaaccggaccggagcgcgtgcactatctggtggtgcgttttctgacgtcagccttttccctcaagctggaggatctggccgatgagtggttcgtcagccgggctacgttgcagagcgacatggtggaagtgcgcgagtggtttcaccgttataacctgacgctggaaacccgcccgcgccacgggatgaagctgtttggcagcgagatggcgatccgcgcctgcctgaccgacctcctgtgggagctggcgcagcaggacagcctgaacccgctggtgaccgacgtggcgctgaatgcgggggtggcggaaaagatggtgccggtgctgcacgatgcgctgacgcgccatcacattcgcctgaccgatgaaggcgagctgttcctgcgcctgtactgcgcggtgtcggtgcggcgcatcagcgaggggtatccgctgccggaattccacgcggaggacgtggaagagaacgtgcgtgaggcggcgaaagatatcgcggtggctatccaggagctggcgggcaaagcgctttcgccgtcagaagagagctggctgtgtgtgcacattgcggcgcggcagatccaggagatcgcccccagcgcgattaacgccgacgacgacgaagccctggtcaactacattctgcgctacatcaacacccactataactacaacctgctgagcgatgagcaactgcatgcagatctgctcacgcacatcaaaaccatgattacccgcgtgcggtatcaaatcatgatccccaatccgctgctggataacatcaagcagcactacccgatggcgtgggatatgaccctcgcggcggtgtcgagctggggcaaatacaccccgtatgtgatcagcgaaaacgaaattggttttctggtgctgcatatcggcgtcgggctggagcgccattacaatatcggctaccagcgccagccgcgggtgctgctggtgtgcgacgccggtaacgcgatggtgcgcatgatcgaggcggtacttcagcgtaaatatccgcagattgaggtgacgcgcacgctcacccttcgtgagtacgagcttgccgatgccattggcgaagacttcgtgatctccaccgcccgcgtgagcgaaaaatccaaaccggtggtgatgatcgccccgttcccgaccgattatcagttagagcagatcggcaagctggtgctggtggatcgcacccgcccgtggatgctggaaaaatacttcgacgcggcccatttccgcattctcgacaagcctgtcgaccagcaaacgctgttccgcgaactgtgcgggcagcttgaaggggaaggttttgtcggcgcggagtttctggaatcggttatcgagcgtgaagccatcgtcagcaccatgctcggcgacggcatcgcgctgccgcactccctcgggctgctggcgcaaaaaacggtggtctacaccgtgctggcgccgcagggcattcagtggggagatgaaaccgctcatgtcatcttcctgctcgccatcagcaaaagcgagtacgaagaggcaatggcgatttacgacatctttgtcaccttcctgcgtgaacgcgcgatggcgcgcctgtgccagtgcgagaattttgcggcgtttaaggctgaggcgatggagagtttgagtcggttttga

SEQ ID NO: 114129 - DNA, 1137 bp, Enterobacter cloacae
atgcacacccgtaccctgcttgtcgcttcactctctttacttgctacctctgcaatcgctcaaacccagtacgcctgggtgggtacctataatccgaacggtgaagggctgtaccgctttaccgtcgatccgcaaaccggtgcgctgaacgataaaacactggtgagcaaactgccgaacgccgcgcagttaaccgtctcacacgacggcaaaacgctgtatctggcaagcgaagtggagcagggcgtggtgcaggcgctgcgcatcggtgataacggcgcgctgagcgagctgaatcaggtgtcctccggcggcgcggggccggtgtatctttccctgacgccgaacggcaaacatctgctggtggcaaactacgtcagcggaactgtcgcggtgctgcccgttaacgcagacggcagcctgggcgatgctacggacacccatcaggacaaaggcgaaccgggcgcggcgaagccggaagctgccgtcgagggcagtttcgccatcagcgatcataacggcccacatgcgcacatgatcgccgccgatccggacgggaaatacgttttttccaccgatctggggctggatcgcatctatcagtaccgttttgacgatcaaaccgggaagctgactcctaacgatccgccatttatcagcgcctcctcaaaagggggcgggccgcgccacttcgtctttacgccgaaaggcgatgccctgtggctgattaacgaagaggcgtctacgctcacccattatgcgctggacagtaatggcaggctgaaagagggtaaaacggtttcagccctgccggacggttataaaggcaccagttttgctgccgggctggcgctaagcgccgacgggaaacagctgtatgtcgctaaccgtttgcataacagcatcgggcactttaccgtaacggcggagggtacgctgacgcatcaggatgatgtctggacgcgcggcgactatccgcgcaccctgacgctcgataagcagggtcgctggctgtacgtcatgaaccagcgcagcgacaacattacccgtttccgcgtggcgccggacggcaagctgagcgccgagccagactataccccggtcggcagcccatcccagatggtcatttcaccctga

SEQ ID NO: 114130 - DNA, 741 bp, Enterobacter cloacae
atgaaactgacccccaacttttaccgtgaccgcgtctgcctgaacgtgctggcaggctcaaaggccaacgccagcgccatttacgaggcggcggaaggtcatgtgctggtgggcgtgctctccaaaaattacccggacgtggcgagcgcggttgcggacatgcgcgaatacgcagccctgattgataatgcgctctccgtggggctgggcgcgggcgacccgaaccagtcagcgatggtgagtgaaatctcccgccaggtgcagccgcagcacgttaaccaggtctttaccggcgtggccaccagccgcgcgctgctggggcagaatgagtccgtggtcaacggtctggtctccccgaccggcaccgtcggcatggtgaaaatctccaccggcccgctgagcagcaaagcgccggacggcatagtgccggttgaaaccgctatcgccctgctgaaagatttcggcggcagctccatcaagtacttcccgatgggcggcctgaaatgccgtgacgaataccaggcggtggcggaagcctgcgcccgtcacgacttctggctggagccgaccgggggaatcgatctggagaacttcgaggcgatcttgcagatcgccctggatgcgggcgtgagcaaaatcatcccgcatatctacagctcgattatcgataaagccagcggtgatacgcgtccggaagatgtgcgtacgctgctggcgatgacgaagaagctggttaagtag

SEQ ID NO: 114131 - DNA, 1119 bp, Enterobacter cloacae
atgccttcgatttatgagaagtacaacttaaagcaggttatcaacacctctggccgcatgacggcgctgggtgtctccacgccgcgcccggaagtggtgcaggcggcgatggacggcatgaatcactatttcgagatgaaggatctggtcaataaaaccggggaatacatcgcgaagctgctggaggtggaaggggcgacggtggtctcctgcgcgtcggcgggcattgcccagtccgtggcggcggtgctggtgaaagacagcgactggctgctggaaaacctgcacgtcacaccgattgaaaacaacgaaatcgtcctgccgaaaggccacaacgtgaactttggcgcgccggtgggcaccatggtggcgctgggcggcggcaagctggtggaggcgggctacgccaacgaatgctctgccgatcagctggcggcggcgatcactccgcgcacggcggcgatcctctacatcaaatcgcaccactgcgtgcagaaaagcatgctcagcgtcgagcaggcggcggtcgtggcgcgcaagcacgatctcccgctgatcgtcgatgcggcggcggaagaagatctgcacgcctactaccgctccggtgccgatctggtgatctacagcggcgcgaaggcgatcgaagggccaaccagcgggctggtgatcggcaaaacccagtacgttgagtgggtgaagcgccagacggcgggcattggtcgcgcgatgaaagtgggcaaagagggtatcctgggcctgacctgcgccatcgaacactacctgacggcgaccaaagagagcggggccgagatggtggcgaagatgacgccgtttatcgacgcgttgaacaccctgaacggcgtgaccgcgcgcgtggtctgggacagcgccgggcgtgacatcgcccgcaccgagattaagtttgacgaagccaccaccggcgtcggcaccggtgaactggtgaacgcgctgaaacagggcgaatacgccatttacttccgtggctataaggccaacgaagggattatcgaggcggacgtgcgcagcgtgaatgctgaccagctgaacatcgtgtaccgccgcattagcgaagtattaggacaggagaaaaaagcatga

SEQ ID NO: 114132 - DNA, 1134 bp, Enterobacter cloacae
atgtttgatttactcctgcgccgtgcgcgcctcgccgacgataccctgaccgatatcgccatccaggacgggaagattgccgcgacaggcgacattgacgctcccgcccgcaaaacggttgagctgaacggcgacgtgttcgtcagcgcgggctggattgactcccacgtccactgctacccgaactccccgatttaccacgacgagccggacagcgtgggcattgccaccggcgtcaccaccgtggtggacgcgggcagtaccggagccgacgacgtggacgatttttacgccatcacccgcaaagcctccaccgaggtgtttgccctgctgaacatctcccgcgtggggctgatcgcccagaacgagctggccaacatggcgaatattgacgccgatgcggtgaagcaggcggtgacgcgccacccggattttatcgttggcctgaaggcgcgcatgagcagcagcgtggtcggtgaaaacggcatcaccccgctggagcgcgcgaaagcgattcagaaagagaacggcgacctgccgctgatggtgcacatcggcaacaacccgccgaacctcgatgagattgccgaactgctgagctccggcgacatcatcacccactgctacaacggcaagcctaaccgcattctgacgccctccggcgagctgcgcgcctccattacgtctgcgctgaagcgcggcgtgcgcctggacgtcggccacggcacggcgagcttcagctttgaagtggcgaagcgcgccattgcgatgggcattctgccgcataccatcagctcggatatttactgccgcaaccgcatcaacggcccggtcggctcgctggcgagcgtgatgtcgaaattcctcgccatcggcatgtcattgccgcaggtgattgactgtgtcacggccaacgccgccgacggcctgcgcctgacgcgcaaaggccgcattcagcctggcctcgacgccgatctgacgctgtttacgctcaagcgccagccgacggtgctgacggatgccgaaaacgacagcctacaggctgaacacattctgatgccgcttgccgcgatccgcgcgggcaagggctacatgaccgaacaagggagcacggaacatgccttcgatttatga

SEQ ID NO: 114133 - DNA, 642 bp, Enterobacter cloacae
atggaacagaataaaggtttttggtatgccgactggtcgttcccgatcttcgttggcctgctctcctccggcgtcttcgccgggacgcacatgtactacctctacggcatcggcgcgtttaacgaagtggccttcgtggcgatgctgaaagcgggaatcgataccggcgtctacggcgcggtggcggcgttcggtgctagcttcctgttcgcccgtattatcgaaggctcgctggtgggtattctcgatatcggcggtgcgatccagaccggcgtgggcctcggcgttccggcgctgctgctgggcgcggggatcatgttcccggtgaccaacttcattgccgcgctgattaccggcctggtgattggcctggcgattggctacgtcatcatcctggcgcgtaagttcaccatcaatcagagcaactccacctacggcgcagacgtgatgatgggcgcgggtaacgcctccggccgcttcctcgggccgttgattatcctcagcgccatgaccgcctccattccaatcggcgtcggttccctggtaggcgcgctgctgttctacatctggcagaagccgattaccggtggcgccatcctcggcgcaatgattttgggctggctgttcccggtcgccctttaa

SEQ ID NO: 114134 - DNA, 777 bp, Enterobacter cloacae
atgttcttaattatattaataaaatcgctcatcattggcggcctggttggcgtcggtgttggcgccggggctgcacgcatgtttcatgcgcctaccactcagggtatgggcgcgtttcgtacgttgggggaactgaactcctgcgaaggggatccggcgtcccacttctcctttgggttaggtttcttctttaacgcctgggcctcttccgtggccgcaggtgccttcacacaggacgttgaccaccgcatcatcccgaactggggtgctgctgcactgatgattaaaaaccgtaacgtcggtgaaacgctgcatgacccgcgcaaaatggcgattgcctgcggcatcatcggcatgattgttgtgaccttccttaacctgaccgcctcctccgttccggcagcgcttcaggtgaccgccgtgaaggtgctggtaccggcggcgaacctgctggtcaacaccgtgatgccggtgatcttctggctggcggccatcgacgcgggtaaaaaatcgggcttctgggccaccatctttggcggcgcggcacagctgatcatgggtaacgccgtaccgggtctggtactgggtattctgattggtaaaggtgttgaagagagtggctggaaccacgtcaccaaagtgatgatggcggcgatcgttctgctcttcgtgctgagcggcttcttccgcggcttcgacatgaagatgatcgaatccttccatctgaccgtgccgaactggctcgacatgatccacaactcgctcagcggtaaataa

SEQ ID NO: 114135 - DNA, 300 bp, Enterobacter cloacae
atgaaagaacagttcacaaccacggtgagagtgaaggggaagggcgacgccaaagcgcgcgcctttgccgacgccctcaaccacgttcaggctgcggtgatgaaagcctcaccgcatatcttactgcgtattgagccacaggatgtgcaggttgttcaggcgcaagaagcggtgcgaaaagaagcgtttctgttcttctttttgcgccgggaaagacgcacctacagcgtggagctggatgtgaccgtcaacgtgaccgccatcaatctcgaccaggtggagttcgtcacgcaacgctga

SEQ ID NO: 114136 - DNA, 363 bp, Enterobacter cloacae
atggaacagattacagtcgtgattggcgatcgcctgggtaaaggtcagaaagtggctgcgggtgtggaaaaagccggcggacgcgcggttgtcgtaccgggcatggcagcggatatgaagctcggtgacgtgatgaaagcagaaaacgccaccttcgggatctccttctgcggcagcggcggcgcgggcgccatcaccgcgcagaccaaatatggctacaaggccaaatacggcatgcgctccgtggatgagggggtgaccgccatcaacgaaggctgcaacgtgctgggctttggctttatggataaagaagagctgggcgagcgtctggtacaggcgtggcagaagaaatacggcgcgtaa

SEQ ID NO: 114137 - DNA, 321 bp, Enterobacter cloacae
atgaacgacgttggggaacaggcggtgcaaacagaacagctcgcgaacaccatgcttcagcaggtctacgccctgctggcccggcacaacatcattcccaacgcggtacaggagcagatgctgacctcccacgttcgcgcaatggcgcaccggtccgtgaccggcgagccgctgccggaggttgaagcagagctgttcgacgaaatttcaccagattcaatgcaactcgcccgtgaagtggtagcgcagttcggcaaccttcctgatgaagaggcctggctgctctccgttcacttcgaagtcgcgaaagacaacctttaa

SEQ ID NO: 114138 - DNA, 198 bp, Enterobacter cloacae
atgcgcccccgcatcgttgctccctacttgccggagcgacaatccatccgcgctgtcacttcaagcgagccgttacgaaaacggatctcgcacagtgttttcctcgtcaccagcgttaagatgattattgtcaaagaaataatcatcaaaaccccgatacttgggtttctgcgtttcatggatgcctccttgctttaa

SEQ ID NO: 114139 - DNA, 387 bp, Enterobacter cloacae
atgcgtaaacacctgttagcgatcgtcgcggcttcaacgctggttcttggctcgtctgcgtttgctgccgatctcgaagacaacatggacatcctcagtgaaaacctgaaggtggtgcagaaaacgggcaatgcggcggacatgaaagacgcattgactaaaatgcgtgaagccgcgctggatgcgcaaaaagcgacgccgccgaagctggaaagcaaagcggcagacagcgccgagatgaaagactaccgccacggttttgacgtgctggtcggccagattgacggcgcgctgaagctggcgaacgaaggcaaagtgaaagaagcccaggcggcagccgatcagtttgtcgcgacccgcaacacgtaccacaaaaagtatcgttaa

SEQ ID NO: 114140 - DNA, 1353 bp, Enterobacter cloacae
atggcatttgcgatgaaagtaacctcacaagttgaagcgcagcgtaagatcctggaagaagccgtctccaccgcgctgacgctcgcttcaggtaaatcagatggcgccgaagtggcggtcagcaaaaccaccggcattagcgtgagcacccgctatggcgaagtggagaatgtagaatttaacagcgatggcgcgctggggatcacggtgtatcaccagaatcgtaaaggcagcgcgtcgtctaccgatctgagcccggatgccatcgcccgtacggtgcaggcggcgctggatatcgcgcgttacacctccccggacccttacgctggcgtggccgataaagagctgctggcgtttgacgcgccggatctcgatctgttccatcccgcggaagtgacgccggatgaagccattgagctggccgcgcgagccgagcaggcctctttgcaggctgacaaacgcatcaccaataccgaaggcggcagctttaacagccactacggcattaaagtgtttggtaactcccatggcatgttgcaggggtactgctcaacccgccactcgctttccagctgcgtcatcgccgaagaaaacggcgatatggagcgtgattacgcgtataccattggccgcgcgctgggagatttgcagtctccggagtgggtgggaaaagcgtgcgccgaacgcacgctgtcacgcctttcgccgcgtaaactctccaccatgaaagcgccggtcatttttgccaacgaagtggcaaccggcctgtttggtcatctggtgggagcgattgcgggcggttcggtgtaccgtaaatcgaccttcctgctcgactcgctgggcaagcagatcctgccggaatggctgaccatcgaagagcacccacacctgctgaaagggctggcctctacgccgttcgacagcgaaggcgtgcgcacggaacgtcgtgatatcgtgaaagacggcattctgacccagtggctgctgaccaactactccgcgcgtaagctggggctgaaaagcaccgggcacgcgggcggcattcataactggcgcattgccggacagggcctgaattttgaacagatgctgaaagagatgggcaccggcctggtggtcaccgagctgatggggcagggcgtgagcggtattaccggcgactactctcgcggtgcagcgggcttctgggtcgaaaacggtgaaattcagtatccggtgagcgaaatcaccatcgccggcaacctgaaggacatgtggcgcaatattgttacggtcggtaacgatattgaaacacgcagcaatattcagtgtggttctgtattactgccggagatgaaaatcgccgggcaataa

SEQ ID NO: 114141 - DNA, 552 bp, Enterobacter cloacae
atgactaagcagcccgaagactggctcgacgacgttcccggtgatgacatcgaagacgaagatgatgagatcatctgggtcagtaaaagtgaaattaaacgtgacgccgaagagttaaaacagcttggcgcagaaatggtagaactgggtaaaaacgcgctggataagatcccgctcgaccaggatctgcgtgatgccattgaactggcacagaaaatcaagaaagaagggcgtcgccgccagcttcagcttatcggtaaactgctgcgtcagcgcgacgtggagccgatccgtcaggcgctggacaaactgaaaaaccgccacaaccagcaggttgcgctgttccataagctggagcagatccgcgatcgtttgatcgagcagggtgatgacgcggtacctgaagtgctgaacctgtggccgaatgccgaccgccagcagctgcgatcgctgatccgcaacgcgaagaaagagaaagaagggaataagccgccgaagtctgcgcgcctgattttccagtatctgcgcgagctgtctgagaacgaagagtaa

SEQ ID NO: 114142 - DNA, 1398 bp, Enterobacter cloacae
atgcgcattcatatattggggatttgtggcactttcatgggcggactggcaatgctggcgcgctcgctgggccatgaagtgacaggttcggacgccaatgtgtatccgccgatgagcacgctgctcgagaagcagggaatttctctgattcagggatatgacgccagccagctggagccgcagccggatctggtgatcgtgggtaacgccatgacccgtgggaatccatgcgttgaagcggtgctggaacgcaatatcccgtacatgtctggcccgcagtggctgcatgattttgtcctgcgcgaccgctgggttgtcgccgttgccgggacgcacggcaaaaccaccaccgccggtatggcgacctggatcctcgaagcctgcggctacaagccgggcttcgtgatcggcggcgtaccggggaatttcgacgtctccgcgcgtctgggcgacagcccgttctttgtgattgaagcggatgaatacgactgcgcgttcttcgacaagcgctccaagttcgtgcattactgcccacgcacgctgatcctcaacaaccttgagttcgatcacgcggatatctttgacgacctgaaagcgattcagaaacagttccaccatctggtgcgcattgttccgggtcagggccgcattatcctgccggagaacgacatcaacctgaagcagactatggcgatggggtgctggagcgagcaggagctggttggcgagcaggggcactggcaggcgaaaaagctcaacgcggatgcctccgaatgggaagtgctgctcgacggtgagaaagtgggcgaggtgaagtggggcctggtgggcgagcacaacatgcacaacggcctgatggcgatcgccgcggcgcgtcacgtgggcgtactgcctgcggatgccgccaatgcgctgggctcgtttatcaacgcccgtcgccgtctggagctgcgcggtgaagcccacggcgttaccgtgtatgacgatttcgcgcaccacccaacggccattctggcgacgcttgccgcattgcgtggcaaagttggcggcaccgcgcgcattctggccgtgctggaaccgcgttcgaacaccatgaaaatgggtatttgcaaagacgatctcgcaccgtccttagggcgtgccgacgaggtcttcctgctgcaaccgcagcatattccgtggcaggtggccgaagtggcagacgcctgcattcagccggcgcactggagtgcggacgtggatgtcttagcggatatggtggtgaaagaaagccgcacagcctggcgatcacattctggtgatgagcaacggtgggtttggtgggatccatcagaagctgctggacggtctggcgaagaaagccgcggccgcagagtaaaaaaagcccggtggcgctag

SEQ ID NO: 114143 - DNA, 999 bp, Enterobacter cloacae
atgaaaacgttaggtgaatttattgtcgagaagcagcacgagttctctcatgctacgggtgagctcactgctttgctgtcggcaataaagctgggcgctaagatcatccaccgcgatatcaacaaggccggtctggtcgatatcctgggtgccagcggtgccgagaacgttcagggtgaggttcagcagaaactcgacctgttcgccaatgaaaaactgaaagctgcactgcgcgcgcgcgacatcgttgcgggtatcgcctctgaagaagaagatgagatcgtcgtattcgaagggtgtgaacacgcgaaatacgttgttctgatggatccgctggacggctcctccaacatcgacgttaacgtttctgtcggtaccattttctccatctaccgtcgcgtcacgccggttggcacaccggtgacggaagaagacttcctgcaaccgggcagtaaacaggttgctgccggttatgtggtgtatggctcgtccaccatgctggtgtacaccaccggctgcggcgtacacgcctttacctacgatccgtccctgggcgtgttctgcctgtgccaggagcgtatgcgcttcccggagaagggcaacacctactccatcaacgaaggcaactacatcaaattcccgaacggcgtgaagaagtacatcaaattctgccaggaagaggataaagccacccagcgcccatacacctcgcgttacatcggctcgctggtggcggatttccaccgtaacctgctgaagggcggtatttacctctacccaagcaccgccagccacccggacggaaaactgcgtctgctgtacgagtgcaacccgatggcgttcctggccgaacaggcaggcggcaaggcgagcgacggtaaagagcgtattctggatatcgtgccggaaagcctgcaccagcgccgttcattcttcgtcggcaaccgccatatggtggatgacgttgaacgcatgatccgcgaattcccggactcgtaa

SEQ ID NO: 114144 - DNA, 1569 bp, Enterobacter cloacae
atgcttaaaacgctatcgattcgtaccggcttgctctctttactggccgttatgacccttctgctgctgattgtcagcggcatcggcatttatgcccttacacaaagttccgcttctctccagcgcatcaatcatcttcagggtgaacagatggtgcagctgaatgccggctatacgctgatcctgcgcgcgcgtaacgaagcggggcaggccgtccgcatgatggaggtcggcctgctggacgatgcggtcagggcggtcaaaaccattaaccaggaagtggcgctggcacagaaaacgctgaaggacgtgatcggcagcggcgtggcggatgagcaggggcaaatgcttctggataacgtcgccgcgagcctggcggtgtacaaccagcagggcatcagcccgatgctgaaagccctgaacgagcaaagcgcggacagctattacgatctgctggaaaacaagctggtcccggtggcgaagcagtttgataacgatatgcaggcgttccaggcatggagcgaggcgcgcggtaaagcggaggtgagcgccgtgcaggcgagtaaaacccgcgtgctgatcctgattatcgtcgcggcgctgctgacggctggcattatcgtgctggcctggctggtgctgcgccatatgctgctcaagccgctttcagcctcgattgcccagctggaacatgtggcggccggggatttaacccataccctgaacgcgccggcgagccaggaatttaatcgccttaacgcggcgatcgaagggatgcgccagtcgctgatggactcggttctgcgggtgcgtgacgccagctcgcagattgataccggcagccgcgagctgacggccgggaatatgaacctggcccagcgcacggaatccaccgccacctcgctggagcagacggccgccagcatggaagagatcaccgccacggtgaaacttaacgccgataacgccgagcaggcgcaccagctggcgaagtcggtctccgataccgccgatcacggcagtgaaatggtctgttatgtcattgagaagatgcgcgacatctccggcagctcggcgcgcatcgccgatatcctgagcgtcatcgacggcattgccttccagaccaatattctggcgctgaacgcctccgttgaagcggcgcgtgcgggtgagcaggggcgaggttttgcggtcgtggcgggtgaggtgcgtaatctcgccagccgcagtgctgatgcggcgaaagagatccgctcgcttatcagcgattcgcaaacccacgtgaacgagggcagcgagctggcgcagcaggccggtgagacgatggacgagatcgctaccgaagtgctgcgtatgaccaaactgatgcgtgaaattgcgacggcgtcccaggagcagagccgcggtattgagcaggtgaatatcgccgtcaatcagatggatgaaacggcgcagcaaaatgcggcgctggtccagcaatcatctgcggcaactcgttccctggaggaacagtcgcgcgagctgatggaagcgatggcctccttcaagctgacgatgcaaacggcctga

SEQ ID NO: 114145 - DNA, 1002 bp, Enterobacter cloacae
atgataaaacgtaatttgccgttaatgatcacgctgggtgtgttcgtgctgggatacctttactgcctgacccagttcccgggcttcgcctccacgcgggtgatttgcaacattctgaccgacaacgcctttttaggcattatcgccgtcggtatgacgtttgtgatcctctccggcgggatcgatctctccgttgggtcggtgatcgcctttaccggcgtgttccttgccaaggcgattggcttttgggggatttcgccgctgctggcttttccgctggtgctggttatgggctgcgcgttcggcgcctttatggggcttttgatcgatgcgctgaaaatcccggcgtttatcatcaccctcgccgggatgttcttcctgcgcggcgtgagctatctggtgtcggaggagtcaattccaattaaccacccgatctacgacacgctctccagcctggcgtggaaaatccccggcgggggacgcctgagcgcaatggggctgctgatgctgggcgtggtggtgatcgggatcttcctcgcccaccgtacccggtttggtaaccaggtttatgccattggcggcagcgccacgtccgcgaacctgatgggaatttccacgcgcagcaccactatccgcatctacatgctttcgaccgggctggccacgctcgcggggattgtcttctcggtttatacccaggcaggctatgccctggcgggggtgggcgttgagctggatgccattgcctcggtggtgattggcggtacgctgctcagtggcggagtggggacggtgctcggcacgctatttggcgtggcgatccaggggctgattcagacctatatcaacttcgacggcacgctcagctcctggtggaccaaaatcgccatcggcattctgctgtttattttcatcgcgcttcagcgcggcctgacggtgctgtgggagaaccgccagagctcgcctgttacccgggtgaatacctctgtaacagggcgataa

SEQ ID NO: 114146 - DNA, 1023 bp, Enterobacter cloacae
atgtcccgttctctttcgcaaactggcgaagcgaagcgccgcttcacctggccgaccggcacgccgcaaatcgtggcgctgctgctggtgctgctggtggatagcctggtggctccgcattttttccagatcgtcgtgcaggatggccgcctgtttggtagcccgatcgacatcttaaaccgtgccgcgccagtggcgctgctggcgattggtatgacgctggtcattgccaccggcgggatcgacctctccgtcggtgcggtaatggcgattgcgggcgccaccgccgcctcgatgaccgtcgccgggcacagcctgccggtggttctgctggccgcgctgggctccggtgtattagccgggctatggaacggcattctggtcgcagtgctcaagatccagccgtttgtcgcgacgttgattttgatggtggccgggcgcggtgtggcgcagcttatcacctccggtcaaatcgtcacctttaactccccgagcctggcgtggatcggcagcggtaattttctgttcttcccgacgccggtgatcgtcgcgctggtgacgctggtggtgttctggcttttcacccgcaaaacggcgctcgggatgttcatcgaagcggtggggattaacattcgggccgcgaaaaacgccggggtaaatacgcggctgatggtgatgctgacttacgtgctgagcggcgtctgtgctgcgattgccggggtgatcgtggccgccgatattcgcggagcggatgccaataacgccggactctggctcgagctggatgcgatcctcgcggtggttatcggcggtggatcgctgatgggcggacgttttaatctgctgctctcggtggtgggggcgttgattattcagggtatgaataccggtattttgctctccgggttccagccggagctgaatcaggtcgtcaaagcggtcgtggtgcttatcgtacttatcgtgcagtcgccgcgctttatcactctcattaaggggaaccgcggtcatgataaaacgtaa

SEQ ID NO: 114147 - DNA, 1503 bp, Enterobacter cloacae
atgaccaccgaacaacaccaggaaatcctccgcacagagggcctgagtaaatttttccctggcgttaaggcgctggataacgttgatttcagcctgcggcgtggggagatcatggcgttgctcggcgaaaacggggcggggaagtcgacgctgattaaaaccctgaccggggtctatcacgccgatcgcggcgctatctggctggaaggtaacgccatttcgcccaaaaacaccgcgcatgcccagcaactggggatcggcacggtctaccaggaagtgaacctgctgccaaacatgtcggtagcggataacctgtttattggccgcgaacccagacgttttggcctgctgcgccgcaaagagatggaagcgcgcgccgcgaagctgatggaatcgtatggcttctctctcgacgtgcgcgaaccgctgaaccgtttttccgtagcgatgcagcaaatcgtcgcgatctgtcgcgctatcgatctctcggcgaaagtgctgatcctcgatgaacccaccgccagcctcgatacccaggaagtggagatgctttttaccctgatgcgccagctgcgtaatcagggcgtcagcctgattttcgtgacgcatttcctcgatcaggtttacgaggtgagcgaccgtataacggtgctgcgcaacggcagctttgtcggctgccgggaaacccgcgagctgccgcagatagagctggtcaaaatgatgctgggccgcgagctcgagaccaacgcgcttcagcgcgcgggccgtacgctgctgagcgaaaaaccgatcgccgcgtttcacgattacggcagaaaagggaccatcgcgccgtttaacctcgaggtacgccccggtgaaattgtgggtctggcggggctgttaggctccgggcgcaccgaaaccgccgaagtcatcttcgggatcaaacctgccgacagcggaacggcgctgatcaaaggcaaaccacaaacgctacgttcaccgcatcaggcgtcgtgcctcggcgtgggcttctgcccggaggacaggaaaacggacgggattattgccgccgcctcggtgcgggaaaacatcattctggcgctacaggcccagcgcggctggctgcgtccgatccctaagcgcgagcagaacgcgattgccgagcgcttcatccgccagctcggtatacgtaccccgagcgcggaacagcccatcgagttcctctcgggcggtaaccagcagaaggttctcctctcgcgctggctgctcaccaaaccgcaattcctgatcctcgacgagcccacgcgcggtatcgacgtgggcgcgcacgccgaaatcatccggcttatcgaaacgctctgcgccgacggtctggcgctgctggtgatctcgtccgagctggaggagctggtcggctatgccgatcgcgtcatcatcatgcgcgatcgcaggcaggtggcagagatcccgctggataaactgtcggtaccggcgatcatgaatgccatcgcggcgtaa

SEQ ID NO: 114148 - DNA, 957 bp, Enterobacter cloacae
atgtggaagcgcttacttcttgttacagcagtttcggcagccatgtcgtctatggcgatggccgcacccttaaccgttggattttcgcaggtcggatctgaatctggctggcgcgccgctgaaacgaatgtggcgaaaagtgaggccgaaaagcgcggtattacgctgaaaatcgccgatggtcagcaaaagcaagagaaccagattaaagcggtgcgctcgtttatcgctcagggcgtggatgccatctttattgccccggttgtcgccacgggctgggagccggtactgaaggaagccaaagatgctgaaattccggtcttcctgctcgaccgttccatcgacgtaaaagacaaatctctctatatgaccaccgtcaccgccgataacgtgctggaaggcaaactgattggtgactggctggtgaagcaggtggatggcaagccgtgtaacgtggttgagttgcagggcaccgtcggggcgagcgtggctatcgaccgtaagaaaggtttcgcggaggccatcgctaaagcatcaaacatcaaaatcatccgttctcagtccggcgacttcacccgcagcaagggtaaagaggtcatggaaagcttcatcaaggcagaaaataacggcaaaaatatctgcatggtttacgcccacaacgacgacatggtgatcggcgccatccaggccatcaaagaagcgggcctgaagccgggcaaagatatcctcaccggctcgatcgacggcgtaccggacatctacaaagcgatgattgacggcgaagcgaacgccagcgtggagctgacgccaaatatggcgggcccggcattcgatgcgctggagaaattcaagaaagacggcacccagcctgagaagttgaccatcaccaaatccacgctctacctgccggacacggcgaaagaagagttagagaagaagaaaaatatgggctactga

SEQ ID NO: 114149 - DNA, 531 bp, Enterobacter cloacae
atgagcttactcaacgtccctgcgggtaaagaactgccagaagacatctacgttgtgatcgaaatcccggccaacgcagatccaatcaaatacgaaatcgacaaagacaccggtgcgctgttcgttgaccgtttcatgtctaccgccatgttctatccgtgcaactacggctacatcaaccacactctgtctctggacggtgacccggttgacgtactggtcccaacgccatatccattgcagccaggctccgtcattcgctgccgtcctgttggcgtgctgaaaatgactgacgaagcgggtgaagatgcgaaactggttgccgtaccgcacaccaagctgagcaaagagtacgatcacattaaagatgtgaacgacctgccagagctgctgaaagcgcagatcgcccacttcttcgagcactacaaagatctcgaaaaaggcaaatgggttaaagttgaaggctgggataacgcagaagcggcgaaagcagaaatcatcgcctctttcgaacgtgctgctaagaagtaa

SEQ ID NO: 114150 - DNA, 345 bp, Enterobacter cloacae
atgcgaatatttgtttacggcagtttacgaaccaggcaaggcaacagccactggatgaccaacgcccagttgctgggaaattacacaatcgaaaactaccagttgtacagtctgggccactatccaggcgcggttccggggaacggaacggtacagggtgaggtttatcgtattgataatgccacgctggccgaacttgatgccttgcgcaccaggggcggtgaatacgctcgccagttgatccagacgccttacggcagtgcatggatgtacgtgtaccaacgttcggtcgacgggttaacgttgattgaaagcggtaactggttagacagagaccagttctga

SEQ ID NO: 114151 - DNA, 3777 bp, Enterobacter cloacae
atgagtttatggaagaagataagcctcggggtgctgatttttatcgtattactgctcggtacggtggcgtttctggtgggcaccaccacgggcctgcatttgctgtttaacgccgcgaaccgctgggtgccagggctggaaatcggccaggtaacgggcggctggcgcgatctgcgcctgaaaaatatccgttatgaacagcccggcgtggcggtgaacgcgggcgagtttcatctggcggtcaagctcggctgcctgcgggacagccagctgtgcgtaaacgatctgtcgctaaaagacgttaacgtggcgatagattccaaaaaaatgccgaagtccgagcctgtcgaagaagaggacagcggcccgctgaacctctccacgccgtacccgattgcgctttaccgggtcgcactggataacgtgaatatcaaaatcgacgacacgacggtatccgtgatggatttcacctccggtctgcgctggcaggagaaaaacctcaccctgaccccaacctccctgcaagggctgctgattgcgctaccgaaggtggccgacgtggcgcaggaagagatcgtcgagccgaagatccagaacccgcagccggaagaaaaaccgctgggcgaaacgctgaaagatctcttctcgaaaccggttctgccggagatgaccgacgtgcatctgccgctgaacctcaatatcgaagagtttaagggcgagcagttgcgtctgaccggcgataccgatctgacggtcttcaacatgctgcttaaagtcagcagtatcgacggcaacatgaagctcgacgcgctggatattgatactaaccaggggtcggtcaacgcctcaggcaatgcgctgctgcgcgacaactggccggtagatattacgttgaatagcgccctgaacatcgatccgctgaaaggcgaaaaggtgaaggtgaaagtcggcggcgcgctgcgcgagaagctggagttcggcgtgaacctctccggaccggtggatatggtgctgcgcgggcaaacccagctggcagaggccggtttaccgctcaaccttgaggttgtcagcaagcagctttactggccgttcaccggcgaaaaacagttccaggctgacgatctgaagctgaagctgagtggcaaaatgaccgactacacgctgtcgttccgcacggcagtgaaggggcagggggtaccgcccgccgatatcaccctggatgcgaagggtaacgagttgcaggttaacctcgacaagctgaccgtggcggcgctggaaggaaaaaccgagctgaccgcgctgctcgactggcagcaggcgatcagctggcgcggcgagctgaagctgaccgggatcaacaccgctaaagaggtcccggactggccgtcaaaactggatggcctgatcaaaacccgcggtagcctgtacggtggcacctggcagatggacgtgccggaactcaagctcaccggcaacgtgaagcagaacaaagtcaacgtagagggctcgcttaagggcaacagctatctccagtgggtgatcccgggcctgcacgtggcgctgggtcgcaacacggcggatatcaaaggcgagctgggcgtgaaagacctcaatctggatgccaccatcgacgcgccaaatctcgataacgccctgccgggtcttggcggcacggcgaaggggttagtgaaggttcgcggtacggtggaggcgccgcagctgctggcggacatcaccgccaataacctgcgctggcaggaactttctattgcccgcgtacgtgtcgagggagacgtgaaatccaccgatcagatcggcggaaacctgaatctgcgcgtggagcgtatctctcagccggacgtgaacatcagtctggtcacgctggcggcaaaaggtaacgaaaagcagcacgatctccagctacgcgtgcagggcgagccggtctccgggcagctgcacctgacgggcagttttgaccgccaggcgacgcgctggaaaggcgtgctggataacacccgcttcagcacgccggtcggcccgctggtgctgtcgcggtctgtcgcgctggattaccgcaacgcggagcaaaagatcagcattgggccacactgctggaccaacccgaatgctgagctgtgcgtgccgcagaccattgatgcaggcgcggaaggacgcgcgcagatcaacctcaaccgtttcgacctggcgatgctgaaaccgtttatgccggaaaccacccaggccagcggggtcttcagcggtaaagcggacgtcgcgtgggacaccaccaaagagggactgccgcagggcagcgttaccctctccgggcgtaacgtgaaggtgacgcaggaggtcaatgacgcgccactgccggtggcgttcgacaccctgaatgtgaacgctgacctgcgtaacaatcgtgcggaactgggatggctgatccgcctgaccaacaacggtcagtgtgacggacaggtgcaaattaccgatccgcaagggcggcgcaatctcggcggcaacgtcaatattcgtaacttcaacctggcgatggtgaatccgatcttctcgcggggagaaaaggcggcggggatgctcagcgccaacctgcgtctggcgggggatgcgcaaagcccacagctgtttggccagatgcggttaaacggtgtggacattgacggtaactttatgccgttcgatatgcagccaagccagctgacgatgaactttaacggccaaagctcaaccctcagtggctcagtgttgacgcagcagggacaaatcaacctgagcggtgacgcagactggagccagctcgacaactggcgcgcccgtattgcggccaagggcagcagggtgcgtatcacggtaccgccgatggtgcgcctggacgtgtcgccagacgtggtctttgaggcaacgccgagtctcttcaccctggacggccgtgttgacgtaccgtgggcgcgcatcgtggttcacgaggtgccggaaagcgcggttggcgtctccagtgacgaagttatgctcaatgaaaatctgaaacctgttgaacagaagagcgctggcataccgatcaatagtaatcttatcgtgcacgtggggaataacgtgcgtttggacgcgtttgggctgaaggcgagactcacgggtgacctgaaagtggcgcaggatcaacagggacttggcctcaatggacaaatcaatattcctgaagggcgcttccatgcctacgggcaggatttgattgtgcgtaaaggcgagctgctgttctccggtccaccggatcagccggtactcaatatcgaagcgatccgtaacccggaagccaccgaagatgatgtgattgcaggcgtgcgcgtgacgggctccgccgatgaacctaaggcagagatcttctctgacccggccatgtcgcaacaggaagcgctctcttacctgctgcgcggccagggtctggatagccaacagggcgatggtgcggcaatgacatcaatgttagttggtctgggggttgcacaaagtggtcaggttgtgggtaaaatcggcgagacgtttggcgtaagcaatctggcgctggacactcagggcgtgggtgactcttcgcaggtagtggtcagcggctatgtactgccgggtctacaggtaaaatatggcgtggggatctttgactcactggctacactcacgttacgttatcgcctgatgcctaagctatatctggaagcagtgtccggcgtagaccaggcacttgatctgctctatcagtttgagttttag

SEQ ID NO: 114152 - DNA, 1734 bp, Enterobacter cloacae
gtgacaaagatccgccagttatgtttagtcagtttaatgctgaccagcgggattgccagcgcggcgaatgtccgtttgcaggttgaggggttatccggggcgctggaaaaaaacgtgcgtgcgcagctttctaccatccagagcgatgaggtcacgccggatcggcgttttcgcgcgcgcgtggatgacgccatccgcgaaggcttaaaggcgttggggtactacgaacccaccatcgatttcgatttacgcccgccgccggcgaaaggacgccaggtgttgattgcccgcgtctcgccgggcgaacccgtcctgattggcggcacgaacgtggtgctgcgcggcggtgcgcgcaccgatcgggactacctggatctgctcagcacccgtccgaaagtgggcaccgtgctcaatcacggggattacgatcgttttaaaaaatccttaaccagcgtttcgctgcgcaaaggctacttcgacagccggttcaacaaaagccagctgggcgttgcgcttgagcgacgtcaggcattctgggatatcgattacgacagcggcgagcgctaccggtttggcgatgtgaccttcgaaggatcgcaaatccgtgacgagtatctgcaaaatctggtgccgtttaaaaagggcgactactaccagtccagcgacctgggcgagctgaaccgtcgtttgtccgcgacgggctggtttaactccgtggtggtagcgccggaatttgataaatcccgtaaaacgaaagtgttaccgctgcatggcgtggtctctccgcgcaccgagaacaccattgagaccggtgtcggctactccacggacgtcggcccgcgcgtgaaagcctcgtggaaaaaaccgtggatgaactcctacggccacagcctgaccaccagcgtcagcctgtctgcgcctgaacagcagctggacttcagctataaaatgccgctgctgaaaaatccgcttgagcaatactacctcgtgcagggcggctttaagcgtaccgatttgaacgataccgagcaggactcgacgacgcttgcggtatcacgcttctgggatctctccagcggctggcagcgcgccattaacctgcgctggagcctcgaccactttacccaggcaaacgtcaccaacaccaccatgctgctttatccgggcgtgatgatcagccgtacccgctcgcgcggtggcctgatgccgacctggggcgattctcagcgctactccatcgattactccaacaccgcctggggctccgacgtagacttctccgtctttcaggcgcaaaacgtctggatccgcacgctgtacgacaaacaccgctttgtgatgcgcggtaatctcggctggatcgaaaccggtgacttcgaacgcgtcccgccggatctgcgcttcttcgccgggggcgaccgcagcattcgcgggtataagtataaatcgatctcacctgaaaacgacaaaggccagttgaccggggcgtcaaaactggcgactggctcgctggagtaccagtacaacgtcagcggcaagtggtggggagcgatgttcgttgacggcggtgaagcggtgaacgatatccgccgcagcgatttcaaaaccggcgcgggcgtaggcgtgcgctggcagtcaccggtcgggcccatcaagctcgatttcgccgttccggtgggcgacaaagacgaacacggtttacagttttacatcggtctggggcctgaattatga

SEQ ID NO: 114153 - DNA, 642 bp, Enterobacter cloacae
gtgagtttattcgataaaaagcatctggtatcacaagccgatgcgttaccgggacgcaacacccctatgccagtggcaacattacacgccgtaaacaaccattcaatgacaaacgttcctgatggaatggagatcgccctgtttgccatgggctgcttctggggcgtagaacgcctgttctggcaactgccgggcgtgtacagcaccgctgcgggctacaccggaggatatacgcctaacccaacctaccgcgaagtctgttccggtgagaccggtcatgctgaagcggtgcgtgtggtgtatgacccgagcgtcattagctatgaacagctgctccaggtgttctgggaaaaccatgacccggcacagggcatgcgtcagggtaacgatcacggcacccaataccgttcggccatctacccgctcaccccagagcaggaggccgccgcccacgccagcctgacgcgtttccaggaagcgatgcaggcggccggtgataaacgtcaggtcacgacggaaatcgctaccgcgaaaccgttctactatgccgaagacgaccaccagcagtacctgcataaaaatccgtacggctactgcggtatcggcggcattggcgtttgcctgcctccccagcaggcctga

SEQ ID NO: 114154 - DNA, 1059 bp, Enterobacter cloacae
atgccgggcaagttaaaaatggaggagatcgcatccctgacgggatattccgtgagcacggtttccagggtcttgagcggcaagtcttataccagcgataaggcccgggaagccattgtccgcatcgcacgggagcttggcgtgctggagtcgatggcgagcggacggcttttaattaacggaatcgctgtatttgcgcctgaaagaacgtttcaggggcgtggggatattttttatctggaagtgaccaaaggcattgcggaagccagcgcgccacataatgtctggatcagttattgcggattagaggaacaaaatgcggacgtgaaattatttatggaaaaggcaagccataaaaatattaacgcaataattatcattggtacggatgattccaccatatttaagctggccagcacgctgaataaaccctgtgtattaattaattccgttgaccgggaccgggtgctggattcggtttcccccgatcatcgcgcaatcggctttaccacgatgcaatatcttttcgagcaggggcatcgccgggtgctgaccatcacctgtttacgccgggacacgctctatgcccggctggatggaattaaagaagcgtaccggcattttcatgtggcgtttgagccgcagcgggatttactggtcacggagtggtttaccgctgaagaggctgagcgcgagctggatgcgtggctgttacgtcacgacagagcgcagtggcctgaggtcatttttcccaacagcaccagcatgaccgagggtgtgctgaaggcgttacagcggcatgggctgcgcgtgccggaagacatctccatcatcaccaccgattttgcgtggaatttagcaaaccggcttgaaaagcccattacggggatcacggtgccctgtcgggatttgggtatagaagcggtgcatttgctgcaaacgcggctcaaccgaccacaggcgccagtgtttaacctgttgttgcaggggaaagtcattgattacggttcggtgagtaatgccacgcgccacgcggctcgcgtggcgctgatgcagtaa

SEQ ID NO: 114155 - DNA, 1152 bp, Enterobacter cloacae
atggagaaggtacgttttggcattattggtataggtaatatcggtacggtccacgcacgctatttactggccggaaccgtcagcgacgcctgccttacggcggtgtgcgataacgcgccggaaaagcatccggccattcggcagctggttggtggcattccgctgttcagtgatgcgcaggaaatgctccagagcgggcttatcgatgcggtcattgtcgccacgccgcattacgatcacccgcacctgtcgatgctggcgatgcgccacggcattcataccctgtgtgagaagccagcaggcgtctacaccgcgcaggtccaggagatgaacgcctgcgcccgggagtgcgacgtggtgttcggcatcatgtataaccagcggcccaacccgctgtatcagaaagtgaaagatctgatcgacagcggcgagctgggcgagatccgccgctccaactggatcatcaccaactggtatcgctcgcagagttactacaactccggcggctggcgcgccacctggaaaggggaaggcggcggcgtgctgctcaaccaggacccgcaccagctcgatctctggcagtggctggtgggcatgccggttcgtctgcgcgcgttttgccagttcggtaagcatcgcgatatcgaagtggaagacgaggtgacagcctacgccgaatatgccagtggcgcgaccggcgtgttcatcaccaccgtcgcggaaacaccgggtaccaaccgcctggagattgtcggcgatcgcggcaaagtggtcgtcgacgagggcaaactgcgctactggcggctgcgcgaatcggaaaccgagtttaacgctcgctggcagaatggcttcggtgagccggaatgctgggaggtttctgtccctgttgccccggaatacagcgagcaccacgtcatcaccgccaacttctgcgccgccgtgctgcgcggcgagccgttgattgcaccgggtctggacggcattcgcggtttaaccctctctaacgccatgcacctctccacctggacggaagactgggttgagctaccgctgaacgaaaagcaatacctgcgcctgcttcagcagcgcatcagcacctctgtagataaaggggccaccagcatcacgctggatgccgcgggtacctggtaa

SEQ ID NO: 114156 - DNA, 1179 bp, Enterobacter cloacae
atgttaaatgtcgccattgtgggaacaggaaatatctcccataaccatattcagggttatttgcagtttggacagcgctgccggatcgttgcgctggttgatatctatccggagaaagcggaagagaaaaaggcgcgttacggcctgacggacgcccgcgtgtacgccagccaccggcagctgctggaggatgcgcttcccatcgatatcgttgacgtctgcaccccgccctatgtccatgcggagatcagcattgatgcgcttcatgccggctgccatgtgctgtgtgaaaaaccgatggccgcctcgctggaggagtgtgatgcgatgatcgccgcccagcaggccagcggaaaaacgctctccattattgcccagaaccgctttaccgatgccttctggcgcttaaaagcggcgctggattccggcctcgccggaaaaatatgccatgcgcaggtggattccttctggtggcgcggacattgctactacgacctgtggtggcgcggcacgtgggaaaaggaagggggcggctgcacgctgaaccacgcggtgcaccatattgacgccattcagtggatgctcggcttcccgtctgaggtggtggcgatgatgactaacgtggcccatgacaacgccgaagtggaagaccttagcgccgcgatattcaaataccccagcggcgcactcacccagcttaccgcctcggtagtacaccacggggaagatcagaagatcattatccagggtgataaagcgcgcatctccgccccatggcaggcttatgccagcgtgagtgctgacaacggcttcccgcaggagaccaatgatattgagcgagaagccctgcttgatgccgttttccaggcgacgcccaggctcgaatggactctgcacaccgggcagattaacgacctgcttcagagcattgagcgcggtacggccccgctggtggacggcgtgcagggtaagcgctcgctggagctgattactgcgatgtataaatcagccattacccgcagtgtcgtttccctgcctgttagccgcgatgatccgttttaccgtaccggcgggacgaacgctctcgccccccgtttttatgaaaaatccgcaagcgtcgccaacttcagcgaagtgggcgctatccctctgggtaaagatctggatcgaggactgtaa

SEQ ID NO: 114157 - DNA, 1068 bp, Enterobacter cloacae
atgaacaagaatgacggaatgaactacgcgccggtgggcaaaccgcagccggtggtgcaggcgggtgaatttgtatttgccgccgccgcgctcgaccacggccatatctacggaatgtgtaatggcctgattgaagcaggtgccacgctgaagtgggtttacgatcccgatccggcgaaagtggacacgtttgttcagcagtacccgcaggtgaaggtggctgattccctggacgttattctcgccgatgacgacgtgcgcctggtggccggggcggccatcccctccgaacgctgtgcgctggggctgaaggcgatgacggctggcaaagactacttcacggacaaagcgccgctcaccacccttgaacagctggcagacgccaaagcgatggtggagaaaaccgggaaaaaatacgcggtctactacagcgagcgtctgcacgtggaaagcgcggtctttgccgggcagctggtacagcaaggcgccattggtcgcgtggtgcaaaccctgggcatggggccgcaccgggaagggactggccgcccggactggttctacgatcgtcgctatttcggcggcatcctgtgcgacatcggcagccaccagatcgagcagtttctgttttataccggcaaccgcgacgccaccgtggtcgccagccaggtgcgcaacgttaaccacccgcagtatcccgcattcgaagattttggcgacgccatgctcaaaggagaaaacggcgccagcggctatttccgttgtgactggttcactcctgacgggctctccacctggggcgatggtcgcctgacgctgctcggtaccgaagggtatatcgagatccgtaaatatgtcgatctcacccggggtgagcaggatgtcgtctacctcgtcaataacgagggcgagttccgctatcctgtggccgggcaggttgggttcccgtactttggcgaactgatcctcgactgcctgcaccgcaccgaaaatgccatgactcaggcgcatgctttcaaagctgccgaactgtgcgtgaaagcacaaatgctcgcaaacgcagctgactaa

SEQ ID NO: 114158 - DNA, 1023 bp, Enterobacter cloacae
atgaacatcctgaacacggcgattatcggtgccggggctattcacagttgccatgtgaatgccctgaggcaaatccccaatgtcgcgctgcgcgcgctggtcgatatcgacagcgtcaaaggactgaagctggcgatgaactatcagtgccgcttttatcaggattaccgggaaatgctgctggatgacagcatcaacgtggtgcatatctgcacgccccacttcgagcacaaaaacatgattctggcggcgctggccgccgggaaacatgtcttttgcgaaaaaccggtgggcatgaacagcagcgagcttgccgacattgcctctgccgccgcgcaggcacccggcaggctcggcgtctgctaccagaaccggctcaatccgaccagcctgcgcattcgcaaggagctggcggaaggcgtactgggaaagatgttaagtatcaaagctgtgctgacctggtcccgctcgggggcgtattacacggaaagcccgtggcgcgggcagctggcaacggaaggtggaagcctgctaatcaaccaggcgatccataccctcgatctgatgcagtggtttgcgggtggcgtcacgcggctgaagggggtagtcgacagcggggaactggctgacgtcacgcaaggggaagacagcgcgatggccacgcttcactttaccaacggtgcgcgcggtctgttttatgccagcaactgccacaccacggattcccccctctgtctggagatccactgcgagcgcggctcactgctgctcaacgacaacacgctctggcgcataacgcccggcgaacgatttcgcctggaaagcgatgcctctcccgatggcaccgcaaaaagttactggggattaggacaccagcaggcgatccgccgtttttatcacgctattcatcacccggagagtacggattttaccgatatttgtaccgccggaaaatcactcaagattgtggaggctttttatcggtcatctcagttaagacaatggatagatattaataattag

SEQ ID NO: 114159 - DNA, 1545 bp, Enterobacter cloacae
atggttaaaccaactgaacgcagagtgggttatggcgtggcgcttggctacggcataaccgacctctttggcggaggcgctttcgccattatcggcacctggctgttatttttttacaccacctattgcggattatccgtcgtggaagccggctctatatttgctattgcccgcgtcattgacgcggtattaagcccgataatgggttacatcaccgacaatttcggcgacacctggcttgggcgtaaatttggccgtcgccgtttcttcttattactcagctctcccttaatgttcctctatgctctgctgtggctgacggacatgggttactggtattacctgggcacctatctttccatcgaactgctttcagcgatggtgctggtgccgtgggaaaccctcgccgcggagatgaccaaccgctatgaagagcgcagccgcctgtcgggcgtacggatgatctgctcgcaattgggcggttttcttgcggtgtcggttccgggcgtgattatgcaatttaccggcaaagataattcctttacctacacgctaaccggactgatattttcctgcgtcttttgcatcgcggtatttattacctggtacagcacctgggaagcaaaagatgtgcatcaggagtatgacttcaaagttgatacccagcgcagcagcggagtaattaatcacctcaaatatctggtgctggatctcttctcttcatttcgtattcgcgcgttccgcctgcatattcttatttatattttctccttcaccgcgatggacgtatttggttcagtttttacctattacgtggtgtattgcctgagtcaggatgcggcagcagtgtccggctggctaagtattgcggcgtttgcctccgtgccgggcacgtacggatttatgctgttactcaacaggctgaacatgaccccttccgccgcactgcgcctttcgtatagctgcattttcctggtgctggcattcctgtttacggtttatctcaccaaaacagaggtgccaacgctgctgttctccgccgtcttcgtcctgctgggtgcagcccgttccggcctctattacattccgtggaatatttatagctttattccggatatcgacgagatcgtcacgcagcagcgccgggaaggcattttcgctggcgtaatggtgttgacccgcaaaagcaccgtcgccattgcgattatgattatcggcctggtgttgcaggagtccggttttgtgaaaggcagtggcgcacagcctgaaagcgcgctgggagcaataattggcctgatgatttttgccaccgccgcgctgctggcagtgagcttcttcgcgacctacaaatttaagctgacccgcgagacgcataaggtgctgctcaaggagatcgcgcgtcggaagctcggtggcgactatcgcgactgcgacgccagcacccgcgtggtcatcaaacagctgacaggctatgagtacgatcaggtctggggcggcgatgccacacgcctggctgtgggcgaaaacttatccaccgtgaaatag

SEQ ID NO: 114160 - DNA, 1338 bp, Enterobacter cloacae
atgttaaacagtattttagtaatactttgtcttattgccgtcagtgcatttttctcgatatcggagatctcgctggctgcctcccgtaaaatcaaactgaagctgcttgccgacgagggcaacatcaacgcatcacgcattctgaaaatgcaggaaaaccccggcatgttttttaccgtggtgcagattggcctgaacgcggtcgccatccttggcggtatcgtgggcgatgcagcgttttctccggcgttttatagcctctttgttaagtacatgtccgtagagctggccgagcagttgagcttcatcctctccttctccctggtcaccggcttgttcattttattcgcggacctgaccccgaaacgcatcggtatgattgcgccagaagctgtggctttgcgtatcatcaacccgatgcgcttctgcctgtatgtcttccgtccgctggtgtggttctttaacggcctggcgaacgtcattttccgcatcttcaagctgccgatggtgcgtaaagacgacatcacctccgacgatatttatgcggtggtggaagccggggcgctggcaggcgtgctgcgtaagcaggagcacgagctgattgagaacgttttcgaactggaatcccgtaccgtgccgtcctccatgaccggccgtgaaaacatcatctggttcgatctgcatgaagacgagcagagcctgaagaccaaagtggcgcagcatccgcactccaagttcctggtctgtaacgaagatatcgaccatatcatcggctatgtggactccaaagacctgctgaaccgcgtgctggcaaaccagagcctggcgctgaacagcggcgtgcagatccgcaacaccctgatagtgccggacaccctgacgctctccgaagcgctggaaagtttcaaaaccgccggggaagacttcgcggtgatcatgaacgaatacgcgctggtggtgggcattatcaccctcaacgacgttatgacgaccctgatgggcgacctggtcggccaggggctggaagagcagattgttcagcgtgacgaaaattcatggctcatcgatggcggtacgccgattgaagacgtcatgcgcgtactcgacattgacgagttcccgcagtccggcaactacgagaccatcggcggctttatgatgtttatgctgcgtaaaatcccgaaacgtaccgactcggtgaagttctccggcttcaagtttgaagtggtggatattgataactaccgcatcgaccagctgctggtaacgcgtattgatagcaaaccgaccgtgctggtgccaaaactgccggatgcggaagagaaggtgtcggcgtaa

SEQ ID NO: 114161 - DNA, 207 bp, Enterobacter cloacae
atgaaaattttccaacgctacaacccgcttcaggttgcgaagtacgtgaagatcctgttccgtggacggttgtacatcaaggatgttggcgcttttgagttcgataagggcaaaatccttatcccaaaagtgaaggacaaacagcacttgtctgtgatgtccgaagtcaaccgtcaggttatgcgtctgcaaactgagatggcttaa

SEQ ID NO: 114162 - DNA, 558 bp, Enterobacter cloacae
atgaccctacgtaacctcctggcagcagcttgcctgttgctgccgctgatggcttccgcacacaacattgaaaaaggacaacgtgtcccgccggtcgggattgctgaccggggagaattgattctcgacaatgataagtttagctataaagcctggaatagcgcgcagcttgcgggcaaagtgagagttgtacaacatattgccggacgtacatccgctaaagagaaaaatgccaccctcgtggaagcgatcaaagccgcaaaactcccgcacgatcgctaccagaccaccaccatcgtgaacaccgacgacgcgattcccggctccgggatgtttgtgcgctcaagccttgagagcaataagaagctctatccctggtcgcagtttattgtcgacagcaacggcgtgacgcgtaaggcgtggcagctggaagaagagagttcagcgattgtcgtgctggacaaaaacggtcgcgtacagtgggttaaagacggcgcgctgacgcaggatgaggtgcagcaggtggttgccctgctgcataagctactgactcagtaa

SEQ ID NO: 114163 - DNA, 741 bp, Enterobacter cloacae
atgttagataaaatttgtcagctcgcacgggatgcgggtgatgccattatgcaggtgtacgacggtgcgaaaccgatggatgttgtcagcaaagcggatgactccccggtgacggcggcggatatcgcggcgcatgcggtgatcctgaaaggtttgcaggccctgacgccggatattccggtcctttctgaagaagcgccccagagctgggatgaacgtcagcactggcagcgttactggcttgtcgacccgctggatggcacgaaagagtttatcaagcgtaacggtgaattcaccgtcaacatcgccctgattgaaaaaggaaaagcggtgcttggcgtggtttacgccccggtgatgaaagtaatgtacagcgcggcggaaggtaaagcctggaaggaagagtgcggcgtgcgtaagcagatccaggtgcgtgatgcccgtcctccgctggtggtgatcagccgctcgcacagtgacagcgagctggaggagtatctgcaacagctgggtgaacaccagacgacatcgattggctcgtcgctgaagttctgtctggtggcggaagggcaggcgcagctgtacccccgtttcgggccgacgaacgtctgggatacggcggcagggcatgcggtggcggcggccgctggcgcgcatgtgcatgactggcagggtaagccactggactacaccccgcgcgagtcattcctgaatccgggcttccgggtatcactttactga

SEQ ID NO: 114164 - DNA, 1944 bp, Enterobacter cloacae
atgattaagtttagcgcaacgctcctggcaacgctgattgcggcaagcgttcaggcagcgacggtggatctccgtattctggaaaccaccgatctgcacagcaatatgatggacttcgattactacaaagatacccctacggaaaaattcggactggtacgcacggcaagtttgatcaacgccgcccgcggtgaagtgaaaaacagcgtgctggtcgataacggggacttaattcagggcagcccgctcggagactacatggcggcgaaggggctgaaaaaaggcgagatccatcctgtttataaggcaatgaatacgctggactatgccgtcggcaacctgggcaaccacgaatttaactacggcctgaaatacctgcacgacgcgctggcaggagcgaaattcccgtacgttaacgccaatatcatcgacgttaagacgaagaagccgctcttcaccccttatctgattaaagagaccgaggttgtcgaccaggacggtaaaaaacagacgctgaaaatcggctatatcggttttgtgccgccgcagatcatgacgtgggataaagccaacctcgacgggaaagtgaccgtcaacgacattaccgaaaccgcgtgcaaatacgtgccggagatgcgggcgaaaggggcggatgtggtcgtcgtcgtggcgcactctggcctctcggccgacccgtatcaggtgatggctgagaactccgtgtactatctcagccaggtgccgggcgtggatgcgatcctgttcggccacgcccacgccgtcttcccgggcaaagatttcgctgatatcaaaggcgcggacatcgaaaaagggacgctcaacggtgtgccatcggtgatgccgggcatgtggggcgaccaccttggcgtggtggatctggtgctgaataacgacagcggaagctggaaagtcacgcagtcgaaagcggaagcgcgtccgatctacgacgcagcggccaaaaaatctctggcaggggaagataaaaagctggtcgacatcctgaagcatgaccacgacgcgacgcgtgaatttgtcagcaagccgatcggtaaatcggctgataacatgtacagcttcctcgcgctggtacaggatgacccgaccgtgcaggtagtcaacatggcgcagaaagcctatgcggagcactatattcagggcgatccggatcttgcaaatctgccggtactgtctgccgcggcgccattcaaagtgggcgggcggaagaacgatccggccagctacgttgaggtggaaaaaggccagctgaccttccgtaatgccgccgatctctacctctatcccaacaccctcgtggtggtgaaagccaccgggaaagaggtgaaggattggctggagtgctctgccgggcagttcaaccagatcgatccgcacagcagcaaaccgcagtcgctgattaactgggacggtttccgcacctacaacttcgacgtgatcgacggcgtggaatatcagattgacgttacccagcccgcgaaatatgacggcgaatgtcaggccattaatccgcaggcagaacgtatcaaaaacctgaccttcaacggcaaagcgattgatccgaataccactttcctggtggtgaccaacaactaccgcgcctatggcggcaagtttgccggtacgggtgacagccacatcgcctttgcctcgccggatgagaaccgttcggtgctggcggcgtggatcagcgcggagtcgaaaaagacgggtgaaattcatccggcggtggataacaactggcgacttgcgccgatccacagcgacactaagctggatattcgctttgagacatctccgtccgataaagcagccgcgtttatcaaggataaggcgcagtatccgatgcaaaaggtcgcgacggatgatattgggttcgcgatttatcaggtggatttgagcaggtag

SEQ ID NO: 114165 - DNA, 387 bp, Enterobacter cloacae
atgaaaacaacaataccaacgctcagcgagcaaatgcgcgatggcaacctctttgcggaacagtgcccgtcacgggaggtgctcaaacacgtaaccagccgctggggcgtgctgatcctggtggcgttacgtcaggggacgcatcgcttcagcgatctgcgccgcaagatgggcggcgtcagcgagaagatgctggctcagtctttacaggcgctggagcatgacgggtttgtcgatcgcgtgtcgtatccggtcgtgccgccgcatgtggagtatagcctgacgccgatggggcaggaggtaagcgagaaggtggccgcgctggccgactggattgaggtcaatacgccgcaggtgatggcgaatagggacgagcgtgcggcgtga

SEQ ID NO: 114166 - DNA, 849 bp, Enterobacter cloacae
atgatcgcgattaccggcgcaactggccagcttggccaacacgttattgaagaactgctgaaaaccgttccggccagccagatcgtggctattgcgcgtaacccggcgaaagccgaagcgttgcgtcagcaaggggtcgttgtgcgtcaggcggattacaccgatgaagccgcatttaccaccgcgctgaacggcgtggataaactgctgctcatctcctccagcgaagtgggccggcgtgccgtacagcaccagaacgtgataaacgccgccaaagccgccggggtgaaattcatcgcctataccagcctgctgcatgctgacaaatctccgctgggtctgcacgttgagcacgtcgaaaccgaaaatgccctggcggcctccggcgtgccttacgccctgctgcgcaacggctggtacaccgaaaactacctggcaagcgcgccgccagcgctggaacacggcgtatttatgggtgccgcaggcgaaggcaaaattgcctctgcgacccgtgcggattacgcggcggcggcagcgaaagtgatttctgaagagggtcatgccggcaaggtgtatgaactggcgggtgataatgcctggacgctgagcgaactggctgcggaactgagcaagcagagcggtaagccggtaacgtatcagaacctcagcgaagccgatttcgccgctgcgctgaagggcgttggtttgcctgccgggctggcggagatgctggcggactccgacaccggcgcgtccaaaggcggcctgttcgacgacagccgtaccctgagcaaactgatcggccgcccaaccacatcactggcggaaagcgtcaaagccatcctgtag

SEQ ID NO: 114167 - DNA, 825 bp, Enterobacter cloacae
gtgcaaggcgtaccggaacagttcactgatgagagagacagcgcgcgctttcgccatctggcgcagctgccgggcctggagctttatcacgcccatatctctgactacgcctttgagcctcacactcatgaagccttcggtatcggcaccatcgaaaccggtgccgaacgcttccgctatcgcggtacccagcatcttgccgcggaaaaatccgtcgtgaccatgaacccggacgagatccacacaggggaatccgccaccgaaggcggctggcgctaccggatggtctacatcgaaccagacctgctggaagaggtcaccggcctgcgtcactggtggtttaatgacgtcacgcgccacgaccctttgcgctcgcagcagattggccggttaatttacggcttgtggcacaccaacgatccgctggcgcagaaggggctgctactggatttgattcagacttttcagccgctggcccaccatgcgccggtggtgcaggaggccgcgcaccgcttcgaacgcgttcgcgactatctgcacgacaactatatgcgctcgctgaccctggacgagctggctaacgttgtctcgctcagcccgtaccattttcagcgccagttcaaagcccatttccacgttacgccccaccagatgctgatggccatccggctgtggcgcgcaaaagcattcctcacccacggcatgcctgccgccgaggtggccgccgcgaccgggctgaccgatcagtcgcatttaacccgcgccttcacccgtcgctacggcatcacgcccgtgcgctaccagaaacaggttatgccgcgctaa

SEQ ID NO: 114168 - DNA, 966 bp, Enterobacter cloacae
atgattagcggcgtgttgtatgccctgcttgcgggtttgatgtgggggctgatttttgtcggcccgctgattgtgccggagtacccggcaatattgcagtcgaccggacgttacctggcgctggggctgattgccgtgccgctggcatggctggggcgcgcgcgtctgcgtcagttgggccgccaggactggctcaccgcgctggcgctgaccatgatgggtaatctgatctactacgtctgtctggcgagcgccattcagcgcaccggtgcgccggtgtcgaccatgattatcggcacgctgccggtggtcatcccggttttcgcgaacctgctttacagccagcgtgacggcaaactggcgtggtcaaaaatggcgcccgctctggtctgcatcgccgtggggctggtgtgcgtgaatattgccgagcttcgccacggccttgaaaacttcagcttatggcgttacggctcagggatctttctggcgtttatttcggttgtctgttgggcctggtatgccctgcgcaatgcacgctggctgcgggaaaacccggataaacatccgatgatgtgggcgacggcgcaggcgctggtcaccctccctgtctcgttgctgggctatgtgggcgcgtgtgtctggctgggtagccagcaaccggcatttaccctgcccttcggaccgcgcccgtgggtattcgtcgggttaatggtcgccattgccgtgctctgttcgtgggtgggcgcgctgtgctggaacattgccagccagaagctgccgacggtgatactggggccgctgattgtctttgagacgctggcagggctgctctataccttcctgatgcgtcagagcgtgccgccgctgctaacggcctgcgggatcgcgctgctggtcgttggggtggtgattgcggtgagagcgaagccggaaaaaccgatggtcgttccggcgtcggaggggtga

SEQ ID NO: 114169 - DNA, 1650 bp, Enterobacter cloacae
atgtttaaacgtataaaagtcattactcttttgatttcggtgctgcttgtgctcggcatcatgcagctgatctccgctggcattttcattaacgcactcaataacgataaagagaacttcaccgtttctcagctttccagccagaacgtcgcggagtttaccgacgcctggatcagcctgaaccaggcgcgcgtcactctcaaccgcggcatgttgcgcctgcaaagcagcatggcgtcgcagattaacggcggacagctgaacgagctggtcaataccgcgaaaaacctgctggccgatgcccagatccattacgataaatactacgcgctgccggaaacgccgggtatggacgagcacctggccgatcgtctggaagagcaataccgcgtctactccgccacgctgacgcaaatgaacgttctgctggggcagggcaatctggaagatatgttcaaacaaaatgccgaacagaagcagaccgcgatgcaaaaggtttatcgcgagtggcgtgaggcgcaggccgcgctgaccgccaaagggatccgggacaatgaaagcgactacaaacgcattctgtggatcctttctgcggtgatgctgctggtgatcgcggtgattatttccagctggattgcgatgcgccgcgtgctgctgctgccgctggaagaggtgatcaaccatatccgcgccattgccgcaggggatttaacccagccgattcaggctgagggtaaaaatgaaatggcgatcctggcgcgcaacgttcaggagatgcagactgcgctggccaacacggtgggcgtggtgcgtgaaggcgcagataccatctacaccggcgcgggtgaaatctcggcgggcagcaacgatctctcctctcgtaccgagcaacaggccgcttctctggaagagacggcagccagcatggaacagttaaccgccaccgtgaagcaaaacgccgataacgcgcgtcaggcgtcgcgtctggcgctggacgcctcctccaccgcgaagaagggcggtaacgtggtcgagggcgttgtgcgcaccatggacgaaatcgccaccagttccagcaaaatcgcgcaaattactaacgtgatcgacggcattgctttccagaccaatattctggcgctgaacgcggcggtagaagcggcgcgcgcgggcgagcagggacgtggcttcgcggttgtcgcgggcgaggtgcgtacccttgcccagcgcagcgcacaggcggcggaagagatcaaagcgctgatcgatgattccggcgaacgcgtcaacgcgggttctcagctggtaaatgaagcgggcgcgacgatggcggagatcgtcaatgcggttacgcgcgtgacggacatcatgggtgagattgcgtcggcctccgacgaacagagccgcggtatcgaccaggtgggtcaggcggtggcggagatggatcgcgtcacccagcagaacgcctcgctggtggaagagtctgcggcggcagcggcggcgctggaagatcaggctgcacgcctgaacgacgcggtggcggtgtttaagatcacccgtaaccaggcggtgaaagccgcgccggtaaagacctatgcacctaaagcgcagcccgtcgcggcggcgtctgaagcgaactgggaaacgttctga

SEQ ID NO: 114170 - DNA, 663 bp, Enterobacter cloacae
atggccttccgcgaccaacccttaggcgagctggcgctctccatccctcgcgcttctgcgctgttccgtaaatacgatatggattactgctgcggtggtaagcaaacgctggcgcgcgcagcgtcgcgtaaagagctggatgtggaggctatcgaagcggagctggctcaactggctgaacagcctgtcgacaaagactggcgcaccgcgccgctggctgaaatcatcgaccacatcattgtgcgttaccacgaccgtcaccgcgagcagctgccggagctgattttacaggcgaccaaagttgaacgcgttcatgccgataaaccttccgtaccgcgcggcctggcgaaatacctgaccatgctgcacgaagaactttccagccacatgatgaaagaggagcagatcctcttcccgatgatcaaacagggcatgggcagccaggctatggggcccatcagcgtgatggaaagcgaacatgatgacgccggcgaactgctggaagtgatcaaacacaccaccaacaacgtcacaccgccgccagaagcgtgcaccacctggaaagccatgtacaacggcattaacgagatgatcgacgatctgatggaacacattagtcttgagaataacgttctgttcccgcgtgcattatcgggtaaataa

SEQ ID NO: 114171 - DNA, 1410 bp, Enterobacter cloacae
atggtagatcaggtcaaagtcgccgccgcagaagaggcgacgtctgaacagtcgctacggcgaaatctcacgaaccgtcacattcagcttattgccattggtggagccatcggcaccgggctgtttatgggctcgggcaaaaccatcagtcttgccggcccgtcgatcatcttcgtttatatgatcatcggttttatgctctttttcgtgatgcgtgcaatgggtgaattgctgctgtcgaatctcgaatacaaatctttcagcgacttcgcgtcagacctgctcggcccgtgggcgggctattttaccggctggacctactggttctgctgggtggttaccggcatggcggatgttgtcgctattacggcctacgcccaattctggttccccggcctgtcggactgggtggcttcgctggcggtgattgttctgctgctgagcctgaacctcgccaccgttaaaatgttcggtgagatggagttctggttcgcgatgatcaaaatcgtcgccatcatcgcgctgattgtcgtcgggctggtgatggtgctgacgcacttccagtcgccaaccggcgtacaggcctcgtttgcccatctgtggaatgacggcggctggttcccgaaaggtatcagcggcttctttgccggcttccagattgcggtgtttgcgtttgtcgggattgagctggtcggtaccacggcggcggaaaccaaagatccggagaaatccctgccgcgtgcgatcaactccattccgctgcgtatcatcatgttctacgtgttcgcgctgatcgtcattatgtccgtgacgccatggagctcggtggtgccaaccaagagcccgttcgtcgagctgttcgtgctggtggggctgcctgctgccgcgagcctgattaacttcgtggtgctgacttctgcggcctcttccgcgaacagcggcgtcttctccaccagccgtatgctgttcggcctggcgcaggagggcgttgctccgagcgcgtttgccaaactgtctaaacgcgcggtaccagcgaaagggctgaccttctcctgcatctgtctgctgggcggtgtggtgatgctctacgtcaacccgagcgtaatcggcgcgttcaccatgatcaccacggtgtcggcgatcctgtttatgttcgtctggaccatcatcctctgctcgtacctggtgtaccgcaagcagcgtccacacctgcacgagaagtcgatctacaagatgccgctgggcaagctgatgtgctgggtgtgcatggcgttcttcgtcttcgtgctggtgctgctgacgctggaagaagatacccgacaggcgctgatggtcacgccgctgtggtttatcgcgctggggctgggctggctgtttatcggtaagaaacgtatggcgggcatgcgctaa

SEQ ID NO: 114172 - DNA, 621 bp, Enterobacter cloacae
atgaccaccccgacttttgacactatcgaagcgcaggcaagctacggcatcggcttgcaggtaggacagcagctgagcgaatccggcctggaaggtctgttaccggaagcgctggtggcgggtatcgctgacgcgctggaaggcaagcagcccgctgtgccggttgacgttgtgcaccgtgcgctgcgtgaaatccacgaacgtgctgacgccgtacgtcgcgcgcgtttcgaagagatggcggcagaaggcgtgaaatatctggaagagaaccgtgagcgtgaaggcgtgaacagcaccgagtccggcttgcagttccgcgtaatcaatcagggtgatggcgcaatcccggcgcgtaccgaccacgttcgcgtacactacaccggtaagctgatagacggtaccgtgttcgacagctccgtcgcgcgtggcgaaccggctgaattcccggtcaacggcgttatcgcaggctggatcgaagccctgaccctgatgccagtaggttccaaatgggaactcactatcccgcacaacctggcttacggcgagcgtggcgctggcgcgtccattccgccattcagcaccctggtgtttgaagtcgagctgctggaaatcctgtaa

SEQ ID NO: 114173 - DNA, 639 bp, Enterobacter cloacae
atgcccgggcgatttgaactgaaacctaccctggcgaaaatctggcatgcgccggataactttcgcatcatggacccgctgccgcctttgcaccgcagaggcattattatcggcgcgttgctgatcgtcatcggcttcctgcttccttccggcagtgacaacgttgataccgcgccggtcagccggaatgctgtgctggatatccagtcgcaaagccagccgcagcctgattcacagccgatgcagacgcagctggtcacaccgtctaacgatccgggccaggttgcgccggttgaacctgaaccggttcaggaagatcaggagcaggccgccgccccttcagagccacaggcgcaacagcccaccggcattgagcagcagtggcgttcgtatcgcgtagagcctgggaaaactcttgcccagctgttccgcgaccacaatctgccagcaacggatgtgtatgccatggcgcaagtcgagggggcaggcaaaccgctcagcaacctgcaaaatggtcagatggtgcagatccgccagaatgccagcggggtggtgaccgggctaacgatcgataccggaaacgggcagcaggtactgtttacccgccagccggacggcagtttcatcagagcacgttaa

SEQ ID NO: 114174 - DNA, 930 bp, Enterobacter cloacae
atggatactgctctgcccacgcccgtctttgcccgtcgcaatgtggcctatgcctgcgccacgctctgctgtctgctttggggaagctcgtacccggccattaaaagtggctacgaactctttcagatcgcgaccgatgatatcccctccaaagtcgtctttgccggataccgttttctgtttgccggcgcgttgctgctgctttttgccctggcccagcgaaagccgattggcaggctcacgcccacgcagtttggccagctcacgatcctcggactgacgcagacctccctccagtacaccttcttttatatcggcctggcctacacgaccggggtgaacggctccatcatgaatgccaccgggaccttcttcagcgtgctgctggcgcactttatctaccacaacgacaaactcagctataacaaaacgctgggatgtgttctgggctttgccggggttatgctggtgaacttccacagcgggttaagtgagttccagtttgtctggaaaggtgacggatttgtggtgctggccgcctttattctctctgcggccacgctttacgggaagcgcatttcccagaccgttgacccgacggtgatgactggctggcagctggggataggcggggcggcactggttgcgggaggctatgccacgggcgggacgctggaggtgcacagcatgaaagccgtcgccgtgctggggtatctgacgctgctctcatccgtggcgttcgccctgtggagcgcgctgctgaaagtaaaccgcgtgagtatgattgccccgttcaactttgtcatacctgtagcagggacggtgctctcggccatcttcctcggcgaaaacattctggacatcaaatacgcgattgcgctggtgctggtctgctcggggatctggtgggtgaataaacggcgtgcctga

SEQ ID NO: 114175 - DNA, 549 bp, Enterobacter cloacae
atgacgcagggtcacgctaaaaagcaaaacgccggcacaaggccggcgcttcgacgcgagcagagtaaaaaattactcagctactacgttaacaaccagtttagcgaacacttcgctgtgaacctggaagtcaacttcgtgctcaccagtggtacgcagaacgccgttcggcatacgaacttcgctcttagccactttaacgcctgccgcagtaactgcatcagcgatatcgcgggtaccgatggaaccgaacagtttaccttcgtcgccagctttagacgcgatagtaacggtgcccagtgcgttgattgcttcagcgcgagcgttagcagccgccagaacgtcagccagtttggcttccagttcagcacgacgtgcttcgaaaaactctacgtttttcttagtagctggaacagctttaccctgtggaaccaggaagttacgagcgtaacccgctttaacgtttacctgatcacccaggctgcccaggtttgctactttatcaagcagaataacttgcattaccttatcctcttaaagtcgtattaa

SEQ ID NO: 114176 - DNA, 228 bp, Enterobacter cloacae
atggcacgttatttccgtcgtcgcaagttctgccgtttcaccgcggaaggcgttcaagagatcgactataaagatatcgcaacgctgaaaaactacatcaccgaaagcggtaagattgtcccaagccgtatcaccggtactcgtgcaaaatatcagcgtcagctggctcgcgctatcaaacgcgctcgctacctgtctctgctgccgtacactgatcgtcatcagtaa

SEQ ID NO: 114177 - DNA, 315 bp, Enterobacter cloacae
atgaccaaccgtctggtgttgtccggcaccgtgtgcaggaccccccttcgaaaggtcagcccatcaggaattccgcattgccagttcgtgcttgagcatcgttctgtgcaagaggaagccgggtttcaccggcaggcgtggtgccaaatgcccgtaattattagcggacacgaaaaccaggccattactcacagtttaacggtcggtagcgcagtaatcgttcaggggttcatttcttgccacaaggcaaagaacggcctgagcaaaatggttctgcatgccgagcagattgatttgatagattctggagactag

SEQ ID NO: 114178 - DNA, 396 bp, Enterobacter cloacae
atgcgtcattacgaaatcgtttttatggtccaccctgaccagagcgaacaggttccgggcatgatcgagcgttactctgctgccatcactggtgcagaaggcacgatccaccgtctggaagactggggccgccgtcagctggcttacccgatcaacaaactgcacaaagcacactacgttctgatgaacgttgaagctccgcaggaagtgatcgatgagctggaaactaccttccgcttcaacgatgccgttatccgcagcatggttatgcgtaccaaacacgcagtgaccgaagcatctccgatggttaaagcgaaagacgagcgccgtgagcgtcgcgatgatttcgcaaacgaaaccgcagatgattctgatgctggggattctgaagagtaa

SEQ ID NO: 114179 - DNA, 276 bp, Enterobacter cloacae
atgaaaagaatcgcaatcgccattttggctgcgcttttgctcagtgcaaacgcgatggcagccatcagaatagacagccaacaggccagaaacatggatgatgtgcagagcttaggcgttatttacatcaatcataacttcgccactgaaagtgaagcagatcaggcgcttaatgaagaaaccgatgcgcagggcgcaaaatactatcacgtcatgctgacacgtgagcccggcagcaacggtaatatgcacgccagtgcagatatttaccagtaa

SEQ ID NO: 114180 - DNA, 687 bp, Enterobacter cloacae
atgcttaagctgaaacagcaggtctatgaagccaatatggatctcccgcgctgtggactggtgacgtttacctggggcaacgtaagcgccatcgatcgcgagcaggggctggtggtgattaagccgagcggcgtggcctatgacgccatgaaagcggacgatatggtggtggttgacctggtaggacacgtcgttgaaggcaaatggcgcccttcttctgatacggcaacccacctggcgctgtatcagcgttacccgtctctggggggcgttgtgcatacccattccacgcacgccaccgcctgggcacaggccgggctggcgatccctgctttgggtacgacgcacgcagattacttcttcggcgatattccctgcacgcgagcgttaacgcaggctgaggtcgaaggcgagtacgaacttaacaccggcagggtcattatcgaaacgctgggtgagacggaaccactgcatacgccgggtattgtggtgtaccagcatggtccgttctcctggggtaaagatgcgcatgacgccgtgcataacgcggtggtgatggaagaggtggccagaatggcgtggattgcgcgcggcattaacccacagcttcagggcattgatgattacctgatgaacaagcatttcatgcgtaagcatggcccgaatgcttattacgggcagaagtga

SEQ ID NO: 114181 - DNA, 861 bp, Enterobacter cloacae
atgttgtcaaaacaggtcccgcttggcatctatgaaaaggcactccctgcgggggagtgctggctggagcggttgcagctggcgaagcagctgggtttcgattttgtcgaaatgtcggtggatgagacggacgagcgtctttctcgcctggactggcgtcgcgaccagcgtctggcgctggtgagcgccattgccgaaaccggcgtgcgcgtgccatccatgtgcctgagcgctcatcgtcgttttccgcttggcagcgaagatgatgctgtacgcgccgaagggctggagatcatgcgtaaagccattcgctttgcacaggatgtcggcatccgcgtgatccaactggcgggttacgatgtttactatcaggaagccaacgatgaaacgcgccgtcgtttccgggagggcctgaaagagagcgttgagatggcaagccgtgcgcaggtgacgctggcgatggagatcatggattatccgttgatgaactccatcagcaaggcgctgggctatgcgcactatctgaacaacccatggttccagctttatccggatatcggaaacctgtcggcatgggataacgacgtacagatggagcttcaggcgggcatcgggcatatcgtggcggtgcacgttaaagatacccgtcctggcgtgtttaaaaacgtaccgttcggcaccggggtggtggatttcgaacggtgcttccagacgctcaaacagacaggttattgcgggccttacctgattgagatgtggagcgaaaccgcggacgacccggcggcagaagtggcgaaagcccgggactgggtgcgcgagcgcatggcgcgggcagggctgatggaggcggaacatgcttaa

SEQ ID NO: 114182 - DNA, 651 bp, Enterobacter cloacae
atgtcattaccaatgttgcaggtcgcgctggataaccagactctgtctcacgcttacgaaaccacccgtctgattgcggaagaagtggacatcatcgaagtcggcaccattctgtgcgtgggcgaaggcgttcgtgcggttagtgacctgaaggcgctctatccgcataaaatcgtgctggcggatgccaaaatcgccgacgcgggcaaaatcctctctcgcatgtgctttgaagccaacgccgactgggtcaccgtgatctgctgtgcggatatcaacaccgcgaaaggcgcgctggacgtggcgaaagagttcaacggcgacgtgcagattgaactgactggtttctggacctgggagcaggcgcaggagtggcgcgaagcgggtatccagcaggtggtttatcaccgtagccgtgatgcgcaggccgcaggcgtggcgtggggcgaagccgatatcagcgcgatcaaacgtctggccgatatgggcttcaaagtgaccgtcaccggtggcctggcgctggaggatctgccgctgttccagggtatcccgattcacgtctttattgccggtcgtagcattcgtgatgctgcgtctccggtggaagcggcgcgtcagttcaaacgctcaatcgctcagctttggggttaa

SEQ ID NO: 114183 - DNA, 468 bp, Enterobacter cloacae
atgaaactacgtgattcgctggcagagaataactccatccttttacaggccgaagccagcacctggcaggaagcggtgaagctgggcgtggacctgctggttaaggcggacgttgtcgagccgcgttattaccaggccattctggatggcgtggcgcagtttggaccctattttgtgattgccccggggctggcaatgccgcatggccgtcccgaagagggcgtcaagaaaaccggttttgcgctggtgacgttgaaaaaaccactggtgttcaaccacgaagataacgacccggtcgacattctgatcaccatggcggctgtcaatgccaacacccaccaggaggtggggatcatgcagatcgtcaatctgtttgatgatgaagctaattttgaccgtttacgcgcctgtcgtaccgcgcaggacgtgctggatttaattgataacgccactgcggcggccgtttaa

SEQ ID NO: 114184 - DNA, 306 bp, Enterobacter cloacae
atgaccgtacgtatcctggctgtgtgtggcaatgggcaaggtagctccatgatcatgaagatgaaagtggaccagtttttaacccagtcaaacattgaccacacggtgaacagctgcgcagtgggtgaatacaaaagtgaactgaacggcgcggacatcatcatcgcctcaacgcacattgccggcgagattagcgtgtcgggcaacaaatacgtggtaggcgtacgcaacatgctgtcgcctgcggatttcgggccaaagctgctggaagtgatcaaagaacacttcccacaagacgtgaagtaa

SEQ ID NO: 114185 - DNA, 1401 bp, Enterobacter cloacae
atggagatcctctacaacgtctttaccgtgttctttaatcaggtaatgaccaacgccccgctgttgctgggtatcgtgacgtgcctggggtacatcctgctgcgcaaaagcgtcagcgtgattatcaaaggcaccatcaaaaccatcattggttttatgctgttgcaggcggggtctggcattctgaccagcacgtttaagccggttgttgccaaaatgtcagaggtgtacggcattaacggcgccatctctgacacttacgcgtccatgatggccaccatcgatcgtatgggggatgcgtacagctgggttgggtatgcggtactgctcgcgctggcgctgaacatcatttacgtgctcctgcgccgcatcaccggtattcgcaccatcatgctcaccgggcacatcatgttccagcaggcggggctgattgcggtttctctctatatcttcggctacccaatgtggaccaccgtcatctgcacggcaatactggtctcgctttactggggcatcacctccaacatgatgtataagccaacgcaggacgttacggacggctgcggcttctccatcggtcaccagcagcagttcgcctcctggattgcttacaaagttgcgccgtacctgggcaaaaaagaggagagtgttgaagacctcaaattgcctggctggctgaatatcttccacgacaacatcgtctccacggcaattgtgatgaccatcttcttcggtgccatcctgctctcctttggcattgacgtggtgcaggcgatggcgggtaaaacccactggacggtctatatcctgcaaaccggtttctccttcgcggtggccattttcatcatcacccagggcgtgcgtatgttcgtcgccgaactgtcggaagcgtttaacggcatctcccagcgcctgatccctggcgcggtgctggcgattgactgtgcggctatctatagctttgcgccaaacgccgtcgtctggggctttatgtggggcaccatcggccagctgattgcggtcggcatcctggtgggctgtggctcctcaatcctgattattcctggctttatcccgatgttcttctccaacgccactatcggcgtgtttgctaaccacttcggcggatggcgcgcagcgctcaagatctgcctggtgatgggcatggttgaaatcttcgggtgcgtgtgggcggtcaagctcactggcatgagcgcctggatgggcatggcggactggtcaattctggcgccgccgatgatgcagggctttgcgtccgtcgggctggtctttatggccgtcatcatcctgattgccctggcttatatgttcttcgctggccgttcgctgcgggctgaagaagatgcagaaaaacaaacagcagaagtgtctgctcattaa

SEQ ID NO: 114186 - DNA, 1065 bp, Enterobacter cloacae
atgagtaaagtgaaaaccatcacccgtgaatcatggattctgagtacctttccggagtggggtagctggctgaacgaagagatcgagcaggaacaggttgctcctggcacatttgcgatgtggtggctgggctgcaccgggatctggctgaaatcagaaggcggcgccaacatttgtgttgatttctggtgcggcaccggcaaacagagccacggcaatccactgatgaaaaaaggccaccagatgcagcgtatggccggcgttgaaaagctccagccgaacctgcgcaccacgcctttcgtgctggatccttttgccattcgtcagatcgacgccgtactctctacccacgatcacaacgatcatatcgacgtgaacgtggcggcagcggtaatgcaaaactgcgcggacgacgtaccgtttattgggccgcagacctgcgtggatttgtggattggctggggcgtgccaaaagagcgctgcatcgtgatgaagccgggcgacgtagtgaaaatcaaagacattgaaattcacgcgctggatgcctttgaccgtaccgcgctgatcaccctgcctgccgaccagaaagccgcaggcgtactgccagacgggatggatgagcgcgcggtgaactacctgttcaaaacgcccggcggttccctgtatcacagcggtgactcccactactccaactattacgcgaagcacggtaacgagcatcagattgacgtggcgcttggctcttacggtgaaaacccgcgcgggatcaccgacaaaatgaccagcgcagacatgctgcgtatggccgaagcgctgaacaccaaagtggtgatcccgttccaccacgatatctggtcaaacttccaggccgatccgcaagagatccgcgtcctgtgggagatgaaaaaagaccgcctcaagtatggcttcaagccgttcatctggcaggttggcggcaagttcacctggccgctggataaagacaatcttgagtaccactacccgcgtggtttcgatgattgctttacgattgaacccgatctgccgttcaaatccttcctctga

SEQ ID NO: 114187 - DNA, 756 bp, Enterobacter cloacae
atgacggaagcgcaacggcatcaaattttactggaactcctggcgcaaacagggtttatcaccgtcgagaaagtgatcgaacgtttagggatctcccccgctaccgcgcggcgggacattaacaagctggatgagagcggcaagctgaaaaaagtccgcaacggtgcagaggccatcagccagcagcgtccacgctggacgccgatgaacatccaccaggcgcagaatcacgatgaaaaggtgcggattgccagagcggcatcacagctggtaaatcctggagaaagcgtggtgatcaactgcggttcgacggcgtttctgctgggccgtgagatgtgcggcaagccggtgcaaatcatcaccaactatttgccgctggccaactatctcattgaccaggaacatgaaagcgtggtgatcatgggcggccagtataacaagagccagtccatcacccttagcccgcaggacagtgaaaacagcctctacgccgggcactggatgtttaccagcggcaaaggtctgacggcggatggcctgtataaaaccgatatgctcaccgcaatggcagaacagaacatgcttaacgtagtgggcaaactggtggtgctggtcgacagcagcaaggtcggtgaacgcgccggcatgcttttcagccgcgccgagcaaatcagcatggtgatcaccggcaaaaacgccaaccccgagatcctcagcaagctggaggatcagggtgtcacagtgctgcgcgtttaa

SEQ ID NO: 114188 - DNA, 723 bp, Enterobacter cloacae
atgattgaaattgaaactcgccagctgagtgggcatgaaatcatccatgctttttcggctggtaaaggtgaacagccgctgccgacggtagttttctatcatggctttctctcctcgaagctggtctacagctattttgccgtcgcgctggcgcaggccggtttccgggtggtcatgcctgatgcgccgaatcatggggcacgctttacgggcgatgagcaggcgcggctggggctgttctggcaaacgctgcacggcaatctgaccgagttcgccgggctgcgtgacgcgctcttgcaggccgggctggtggaggggaaacggctggcggtcgcaggcgcatcaatgggcggaatgacggcgctggggatcatggccaggcatccggaggtgacgtccgtggcttgcctgatgggatcgggctactttacgtcactggcaaagacgctgttcccgccgcaggcccctcaggagattgaggccctgttgtctgaatgggacgtcagccatgcgctttcgcagctggccgatcgtccgctgcttctgtggcatggggacgccgatgacgtcgtaccgcccggtgaaacgttccgcctgcaacaggcgctacagcgtgaagggctggacagcaatctgacctgcctgtggggagcaggtgtccggcaccgtattaccccggccgcgctggagtcaaccgtggaattcttccgtcagcacctttaa

SEQ ID NO: 114189 - DNA, 303 bp, Enterobacter cloacae
atgcgcaggcttacggctttattgctggtctcactgctcagcggatgttccatattgcagggtacgccagaaccggcgccgccggttaccgatcatcctcaggaaattcgtcgtaatcagacggaaggattacaacgcctggataccgtatccgcgatggttcgtggttccccggatgatgcagaagacgcaattgaagcacaggcagttgccgcaaaagcagattattacgtcatcacgatgattgatgaaaccattattacgggacagtggtacgcccagggaattttgtaccgtaagtaa

SEQ ID NO: 114190 - DNA, 276 bp, Enterobacter cloacae
atgaaacgaacccttgctttaacgacgctattgctttcagcgggcctgctgagcaccacggcgcagtcggccgaatttgccagcgcggattgcgtcacgggcctgaacgagattggtcagatctccgtcaataatatcacgggaagtccgcaagacgttgaacgtgtcgtcgccctgaaggccgatgaacagggcgcatcctggtatcgcatcgtccagatgcaggaagataaccatgttaatcactggcgcgtgcaggccattctttatgcataa

SEQ ID NO: 114191 - DNA, 1932 bp, Enterobacter cloacae
atgatcacctttttccgccgggcaggtctgggcacgaagctatcgctgctaacaggtgcaagtgtcgccacgctttttttgctgttcacttttctgttgagccacaacgccagccagcagcttgaagatcttgcggttgaagacctgcataaccagtccaccggcatggtggatatggtagagatgttcaacaccagcctgagcgaagaggttgaaagctatacccgtctgttcaccacctttttgccacagccgctgaacagcgacagcagccagagccggaccataaacgggcttaccgttcctctgctgaaaggcggcgaaacggagttgcatgaaaacaatacgctttctgatgacttcctgagccgaacgggcgccatctcgacgctgtttgtccgcagcggtaacgattttatccgcgtggccacgtcgctgcgcaaagagaatggcgaccgcgccatcggaaccgttcttgataccaccagcccggcatttgcggctgtcaccaaaggggaggtctatcgtggcctcgcgctgctgttcggcaagcgctatatcacgcagtaccagcctgttaaaaatgcggaaggccaggttatcgggattatctttgtcggcgtggacatcacccattcgtggaacgtcatgcgcgagaaaatccttaaccgtcgtctgggcgagagcggccacttctttgtactggatcgcagcagcggcaaaacgcgcggacagtatctgttccatgccagcgatgagggcaaactgcccaactgggacacggcgacacagcagcagcttctgagtgataaagccggcacgctggagcgcgtgagcgcagatggccgtacgctcaaagttgcctacacgccgctgccgggctggaactggaccatcgtgggtgaagtggataaagccgtactgctttcaagcgtcaccacgctgcgcgatcgcttcctgatcgcgggcgtggtgctatccgcgctcttcgcgggcctgttcgttatcctcattcgccggatgctaacccgcccactgcgcgcagtgatcgcgcttgcacggcagtatgccgcaggcgatctgcgcgccagcctgccggtaacccgccaggatgaggtcggccagctgattgatgccatcaacgggatcgggggcggcctgcaaaaaattgtgttgcaggtccgcgaggccgcaagcgaaatccatctggggactaacgcgctggcttcagataccggcgagatctctgaacagatcaacaagcaggccagcagcgttgaggagacctccgccagcatggagcaattagccgccaccgtgcagcaaaatgccgccaacatggagcaaacgcagcagctggtgggtgaaacctcgcgcgcggtgcatcagggtggagagacggtgacccacgcagtctccaccatggatgatattcgtgatgcatcgaaacgcattgaagacatcacccgcgtgattgagtccatcgctttccagaccaatatcctggcgctcaatgcggcggttgaagcggcgcgggcgggcgagcacgggaaaggtttcgcagtggtggcgcaagaggtgcgcgccctggccgcacgcagcgccaatgcggtaaaagagattgaacagttgattggcgacacgctgaacaaggtgagcgaaggccatgcgctgtctgagcagacgcgtctggcgatggatgccatcattgttcatatcgataacatcagccagcttgtcaccgagatcaaccacgcctcccgcgagcagtctgcggggattggtcaggtgaatctggcgatgacgcacatcggtgaggcatcgcacatcaatgccgatcgcatctcacgcagcgagcagacggcacagacgctgcgcgagaagggttcacatctcacccggctggtgagcctgttccagctgaaagcttaa

SEQ ID NO: 114192 - DNA, 1623 bp, Enterobacter cloacae
atgcactggcagacacataccgtttttaatcaacctgcaccgctatcgaacagcaacctttttctctctgattgcgccctgcgcgatgcggtagcgcgcgaaggggctgagtgggatgtggatcttcttgccagcatcggacagcagttgggtacggcggagtcgctggagctgggcaggctggcgaacgttaatccgccggaactgctgcgttatgacgccacgggagcgaggctggatgacgtccgctttcatccggcatggcatcttctgatgcaggggctttgcgccaaccgggtgcacaacctggcgtgggaggaggaggcgcggaaaggatcgttcgtcgcccgggccgcgcgttttgtgcttcatgcacaggtggaggcgggaacgctatgcccggtgaccatgaccttcgccgccacgccgctgttgctacagtcgctgcccaaaccgtttcacgactggttaacgccgctgatgagcgatcgctacgatccccatctcgcaccgggggcgcaaaagcgcggcctgctgatcggcatggggatgacggaaaagcagggcggttcggacgtactcagtaataccaccaaagcagagaaatgcagtgatggcagttaccggctggtggggcacaaatggtttttctccgtgccgcagagcgatgcgcatctggtgctggcgcaggcgaagggcgggctttcctgcttttttgttccgcgttttttacccgacgggcaacgtaatgccgtgcgccttgagcgtctgaaggacaagctcggtaaccgttcaaatgccagcagtgaggctgagttccttgatgcttacggctggctgctgggcgaagagggtgaaggtgtccggcaaattctgaagatgggcgggctgacgcgctttgactgtgcgcttggcagccacggattgatgcgccgtgcgctctcggtggcgctttatcatgcccatcagcggcagaccttcggcaaaaatctgatcgaccagccgttaatgcgcgacgtgctaagccgtatggcgctggtgctggagggacacacggcactgctgttccgactcgcccgggcgtgggacaaccgcaccgacccgcaggaggtcgcatgggcgcggcttttcactccggcggcaaaatacagcgtctgcaaagcgggcataccgtttgtggcagaggcaatggaggtgctgggcggcgcaggctattgcgaagagagtgaacttccgcggttgtaccgtgaaatgcccgtcaacagcatctgggaaggctctggcaatattatgtgcctggatgtactgcgcgtgctggcgaagcagtcgggtattctcgacctgctcgccgatgatttcgcgcaggtcaaaggccaggacaggcatttcgatcgcagctggcggcagctacagcagaagctgcgtaaaccgcaggaagcgcagggcagggagatcgcgcggcagctctttttactcggggccggaagtcagatgctgcggcacgcatcgccgcccgtggcgcaggcgtggtgccgcatgatgctggatacccgaggcggcacgctgatgagcgaacaagtgcaaaccgacctgctgctgcgtgccacgggccgggtcggttaa

SEQ ID NO: 114193 - DNA, 1275 bp, Enterobacter cloacae
atgcaacaggatgcgcacaagcgtgcattaattgcaggctccatcggtaatttcatcgagtggtatgaatttgcggtctacggttttctggcaacggtgattgccagaaacttcttccagcttgagggggaagcggagctcaccagcctgatcctcacctgggcctcgttcgccatcgctttcttcttccgtccgctgggtgcggtggtctttggccgcattggcgacaggattggccgcaaaccgacgctgattatagtgctggtattgatgacgctcgccaccgctgccatcggtattgtgccggtctacgccagtatcgggattgccgcgccgctgatcgttacgctcctgcgtattctgcaaggactgttcgcgggcggtgagtatggcggtgcggtctcattgatgacggagttcgccccgcgcggcaagcgcggtctttacggggcatggcagtcctttaccgtggcgctcgggctgttagcgggcgcaggcattgtcgcgttgctctctgccctgctctcccctgaagccttgcacgactggggctggcgcattccgttcttcctggcgctgccgatgggtgcggtcgcgctatggctgcgggtgagcatggaagagacgccgagctttgtgcagcaacgggaaaaaccggttgttactcaggccagcaccgccgccacgttcaaaaccatcctgatgggcattggccgcgtgatggtctggtctgcggcgggttatacctatctggtgattatgccgacctatctgcaatctgcgctgcacaccggttttaaccaggcgttactgattgcggtgatttctaacattgggtttgcgctcacgatcattccgtcgggcatgctgagcgacaggatcgggcggcgcacggtgatgattatcgccaccgtgctcctgctgatcctcgccctgccgctgctgaaaattttgcaggcggaatccagtacgctggcagtcaaagcgattgtggtgctgattgcggggggtctggttgggatgctggcagggccggggccggcaatgctgtctgagatgttcccgacgcgcgtgcgttataccgggctggggctggcctattctctgtcgaatgcgatcttctcgggctgtgcggggctgatcattaccgggctgattaaagagacgggcaatctggatattccggcgtactacgtgatggcaacggcggtggtgagtattttcgcgctgatgaagctgagaaaggatgaccatttacggtcgttagaggagtga

SEQ ID NO: 114194 - DNA, 732 bp, Enterobacter cloacae
atgagtgaaatgatttacggcatccacgcggtgcaggccctgctggagcgcgcgccggagcgttttcaggaagtttttattctgaaagggcgtgaagataaacgtctgatgccgctgatccacgcgctggaagcgcagggcgtagtgatccagctggcgaaccgccagtatctggatgaaaaaagcgaaggtgctgtacaccagggtattatcgcgcgcgtgaagccaggccgtcagtatcaggagaacgatctgccggatctgatcgccgggctggagaacccgttcttcctgatcctcgatggcgtaaccgacccacataacctgggcgcgtgcctgcgtagcgccgatgcagcaggcgtgcatgcggtgattgtgccaaaagatcgctccgcgcagcttaacgctaccgctaaaaaagtcgcctgcggcgcggcggaaaacgtcccgttaatccgcgtgactaacctggcgcgcaccatgcgtctgttgcaggaagaaaatatctggatcgtaggaacagccggtgaagcggatcacaccctgtaccagagcaaaatgaccggccgtatggcgctggtgatgggagcggaaggcgaaggtatgcgtcgtctgacgcgcgagcactgcgatgagctgatcagcatcccaatggcgggcagcgtatcgtccctgaacgtttccgttgcgacgggtatctgcctgtttgaagcggtgcgtcagcgcgggtag

SEQ ID NO: 114195 - DNA, 2442 bp, Enterobacter cloacae
atgtcacaagatcctttccaggaacgcgaagccgaaaaatacgcgaatcctatccccagccgcgagttcatcattgaacacttaacaaaacgcgaaaaacccgccaatcgtgaagaacttgccgttgaactgaacattgaaggtgaagagcaaattgaagcccttcgccgccgcctgcgcgccatggaacgtgacgggcaacttgtctttactcgtcgccagtgctacgcgctgccagaacgcctcgacctgctgaaaggcaccgttattggtcatcgcgatggcttcggcttcctgcgcgtggaaggccgtaaagacgacctgtacctctcatccgaacagatgaagatgtgtattcacggcgaccagatcctggcgcagccgctgggtgcagaccgtaaaggccgccgcgaagcgcgcgtggtccgcgtgctggtgccgaaaaccagccagattgtgggccgttactttaccgatgcgggcgtaggctttgtggtgccggatgacagccgtctgagcttcgacattctcatcccgcctgaagaggtgatgggcgcacgcatgggctttgtggtggtggtggaactcacccagcgcccaacccgtcgcaccaaagcggtgggtaaaatcgtcgaagtgctgggcgataacatgggcaccggcatggccgtcgatatggcgctgcgtacccatgaaattccgtatgtctggccgaaagcggttgaagatcagattgaaaacctgcgtgaagaagtgccggaagagtccaaagcaggccgcgtggatctgcgcgatctgccgctggtcaccattgatggtgaagacgcccgtgacttcgatgatgccgtatattgcgagaaaaaacgcggtggcggctggcgtctgtgggtggctatcgcggatgtgagctattacgtgcgtccgtacacgccgctggataacgaagcgcgcagccgcggtacgtcggtctacttcccgtcgcaggttgtaccgatgctgccagaagtgctctccaacggcctgtgttccctcaacccgcaggtggaccgcctgtgtatggtctgcgaaatgaccatctccagcaagggacgtctgacgggctataagttctacgaagcggtgatgagttctcatgcgcgcctgacctataccaaggtctggcatatgttgcagggcgatcaggatcttcgcgaacagtacgcgccgctggtcaaacacatcgaagagctgcacaacctctacaaaacgctggatcaggcgcgcgaagagcgcggtgggatctcgtttgagagtgaagaggcgaagtttatctttaacgctgagcgtcgtatcgagcgtatcgaacagactcagcgtaacgatgcgcacaagctgattgaagagtgtatgatcctggcgaacatctcggcggcacgtttcgttgagaaagccaaagagcctgcgctgttccgtattcacgacaagccaaccacggaggccgtaacctcgttccgctccgtgctggctgaactcggcctggagctgcctggcggtaataagcctgagccacgcgattacgccgagctgctggaatccatcagcgatcgtcctgacgcggaaatgctgcaaaccatgctgctgcgctccatgaagcaggcgatttacgatcctgaaaaccggggccactttggtctggcgttacagtcgtacgcgcactttacctcgccgatccgccgttatccggatctgtccctgcaccgtgcgatcaagtatctgctggcgcacgagcagggtcataaaggcaacacgaccgaaaccggagggtatcactactccatggacgagatgttgcaactgggccagcattgttccatgaccgagcgtcgtgcggatgaagcgacgcgcgacgtggcggactggctgaagtgtgactttatgctggatcaggtgggtaacgtctttaaaggcgtgattgccagcgtcaccggctttggcttcttcgtgcgtctggatgagctgtttatcgacggtctggtgcacgtttccagcctcgataacgattactaccgcttcgaccaggtcggacaacgtctgatcggcgaatccggcggccagacctaccgtctgggcgatcgggtggaagtgaaggttgaagccgtgaatatggacgaccgtaaaatcgacttcagcctcatctccagcgagcgtgctccgcgtaacgtcggcaaaaccgagcgtgagaaagcgaaaaaaggcggtaacggtaaagcgggcggtaagcgacgtcaggcaggtaaaagagtaaactttgagccagacagtgctttccgtggcgagaagaaacagaagcccaaggcggcgaaaaaagacgctcgtaaagcgaaaaaaccgtcgaccaagacccaaaaaatagcggccgcgaccaaagcgaagcgcgcggcgaagaaacagcaggcggagtaa

SEQ ID NO: 114196 - DNA, 426 bp, Enterobacter cloacae
gtgcagttaacaagtttcaccgattacggcttacgcgcgctgatttacatggcgtcgttacccgatgggaagatgaccagcatctctgaagtcacagaggtgtacggtgtgtcccgtaatcatatggtcaaaataatcaatcaacttagtcgtgccggatacgttgctgccgtccgcgggaagaatggagggatccgtctcggtaaaccggcgcagagtatccgtattggcgatgtggtacgtgaactggagccgctctctctggtgaactgtagcagcgcgttctgccacattacgcccgcttgccgcctgaaacaggcgctttcaaaggccgtgcaaagttttctcaaggaactggataactacacgctggccgatttggttgaagagaatcaaccgctttataaattattgctggtggaatga

SEQ ID NO: 114197 - DNA, 1299 bp, Enterobacter cloacae
atgggtaacaacgtcgtcgtactgggcacccaatggggtgacgaaggtaaagggaagattgttgatcttctgactgaacgggccaaatatgttgtacgctaccagggcggtcacaacgcgggccatactctcgtaatcaacggtgaaaaaaccgtcctccatcttattccatcaggcattcttcgcgaaaacgtcaccagcatcatcggtaacggcgttgtgctgtctcccgctgcgctgatgaaagagatgaaaggtctggaagaccgtggtatccctgttcgtgagcgtctgctgctctccgaagcctgcccgctgatcctggattatcatgtggcgctggacgtggcgcgtgaaaaagcgcgtggcgcgaaagcgatcggcaccaccggtcgtggtatcggccccgcttacgaagataaagtggctcgtcgcggtctgcgcgtgggtgacctcttcgacaaagcgaccttcgctgaaaaactgaaagaagtgatggaatatcacaacttccagctggtgaacttctacaaagccgaagccgttgactaccagaaagtgctggatgacgtcatggcgattgctgatattctgaccggtatggttgttgatgtgtccgatctgctggaccaggcgcgcaagcgtggcgatttcgtcatgtttgaaggtgcgcagggtacgctgctggacatcgaccacggtacctatccgtacgtaacgtcctctaacaccaccgcgggtggcgtggcaaccggctccggtctgggcccgcgttatgtggattacgttctgggtatcatcaaagcgtactccactcgcgtgggtgcgggtccgttcccgaccgaactgtttgatgaaactggcgagttcctgtgcaagcagggtaacgagtttggcgcgaccaccggtcgtcgtcgtcgtaccggctggctggatgcggtcgcagtgcgtcgtgcagtgcagatcaactccctgtctggcttctgcctgaccaagctggacgtactggacggcctgaaagaagtaaaaatctgcgtaggctaccgtatgcctgatggccgcgaggtgaccaccactccgctggctgctgacgactgggaaggcattgagccaatctacgaaactatgccgggctggtctgagaccacatttggtgtgaaagagcgtagtggcctgccaaaagccgcgctggactacatcaagcgcattgaagaactgaccgaagtgccgatcgatattatttctaccggcccggatcgtactgaaacgatgatcctgcgcgacccgttcgacgcataa

SEQ ID NO: 114198 - DNA, 198 bp, Enterobacter cloacae
atgaactccacgatctggctcgcactggcccttgttttggtgctggaaggcctcggcccgatgctctatccgcgcgcatggcgccggatgatcgcgacaatgagccaactcccggacaatattttgcgtcgttttggcggtggtcttgtggttgccggtatcgttatctactacatgttgaggaaaacgattggctga

SEQ ID NO: 114199 - DNA, 1005 bp, Enterobacter cloacae
atgcgtaagtcagttattgcgatcatcatcatcgtactggtcgtgctctacacctccatctttgtggtgaaagagggcgaacgtgggatcaagttccagttcagcagcgtcgtgcgtgacggcgacaagcgtccggtgatttatgagccgggtctgcactttaagatcccgttcattcagtcagtgaaaacgctcgatgcgcgtatccagaccatggataaccaggccgatcgtttcgtgaccaaagagaagaaagacctgatcgttgattcctatatcaaatggcgcatcagcgatttcagccgctacttcctggcaaccgggggtggcgacgtttctcaggcagaagtgctgctgaaacgtaagttctctgaccgtctgcgttccgaaattggtcgtctggatgtgaaagacatcgtgaccgactcccgtggtcgtctgacgctggaagtgcgtgatgcgctgaactccggctctgcgggcaccgaagatgaagttgaaaccccggcggcagacgatgcgattgccaaagcggctgaacgtgttcaggctgaaaccaacggtaaagtgccggtgatcaacccgaacagtatggcggcactgggcatcgaagtggttgacgtgcgcatcaagcagatcaacctgccagcggaagtgtccgaggcgatctacaaccgtatgcgcgccgagcgtgaagcggtagcccgtcgtcaccgttcacagggtcaggaggaagcggaaaaactgcgcgcggcagcggactatgaagtcaccaagacgctggcggaatctgagcgccagggtcgtatcctgcgcggtgaaggtgatgccgaagcggcgaaactgtttgctgatgcattcagccaggatccagacttctatgccttcatccgtagccttcgcgcttacgagaatagcttcaagagcaaccaggatgtgatggtgctcagcccggacagcgatttcttccgttatatgaagacgccgaccaacgcaacgcgataa

SEQ ID NO: 114200 - DNA, 1260 bp, Enterobacter cloacae
atggcgtggaatcagcccggtaataacggacaagaccgcgacccgtggggaagcagcaataatcaaggcggcaactctgggggaaatggcaacaaaggtggtcgcgagcaggggccgccggatctggatgatatcttccgcaaactgagcaaaaagcttggtggccttggcggaggaaaaggttctggctcgggtggcaattccactcagagtccgcgcccgccaatgggtggccgcgtggtgggcattgtcgccgctgcggtggtaatcatctgggcagccagcgggttctacaccattaaagaagcagaacgcggcgtggtcacccgtttcggtaagttcagccatctggttgaaccgggcctgaactggaagccgaccttcattgatgacgtgaccgcggttaacgtggagtccgtccgtgaactggccgcctctggcgtgatgttgacctctgacgagaacgtggtgcgcgttgagatgaacgtacagtaccgcgtgaccgatccggaacgttatctgtttagcgtgaccagcgccgatgacagcctgcgtcaggcgaccgacagcgccctgcgtggcgtgatcggtaaatacaccatggaccgtattctgaccgaaggtcgtaccgttattcgtagcgatacccagcgtgagctggaagagaccatccgtccgtacaacatgggtatcaccctgctggacgtcaacttccaggctgcacgtccgccggaagaggtgaaagccgcgtttgacgatgcgattgccgcgcgtgaaaacgaacagcagtacatccgtgaagcggaagcgtacaccaacgaagttcagccgcgtgcaaacggtcaggcgcagcgtattctggaagaagcgcgtgcgtataagacccagaccatcctggaagcacagggtgaagtggctcgcttcgcgaagatcctgccggaatataaagccgcgccggaaattacccgtgagcgtctctatatcgagaccatggaaaaagtgctgagccatacgcgtaaagtgctggttaacgacaacaaaggcggaaacctgatggtcctgccgctggatcagatgctgaaaggcggttctgcaccggcagcaaaagacaacagcggtgcgaacaacctgctgcgtctgccaccggcctcgtctggcagcgccagcgcgaacacaacgccttcttcgaacgatggtgacattatggaccaacgccgtgctaacgcgcagcgtaacgactaccagcgtcagggggaataa

SEQ ID NO: 114201 - DNA, 1281 bp, Enterobacter cloacae
ttgtttgaccgttatgacgccggtgagcaggcggtgctggtacacatctatttttcgcaagacaaagatatggaagacctccaggagtttgaatctctggtctcttccgccggtgtcgaagcaatgcaggtgattaccggtagccgtaaagcgccgcacccgaagtactttgttggtgaaggtaaagcagttgaaattgcggatgccgtaaaagcaaccggcgcatccgttgtgctgtttgatcatgcgctgtctccggctcaggaacgtaacctggaagctctctgcgaatgccgtgtaatcgatcgcacggggttgatcttagatatttttgctcagcgtgcgcgtacccacgagggtaagttgcaggttgagctggcgcagttgcgccatctggcgacgcgtctggtgcgtggctggacacaccttgaaagacaaaaaggcgggattggtttgcgcggcccgggtgaaacccagctcgaaaccgaccgccgtttgctgcgtgggcgtataacccagatcctttcacgtctggaacgtgtagagaaacagcgcgaacaggggcgtcgggcgcgaacgaaagccgatatcccaacggtgtcgctggtgggttataccaacgccggtaaatccaccctgtttaaccagataaccgaggcccaggtgtatgccgcagaccagctgtttgcgaccctggacccaaccctgcgccgtattgacgtcgcagacgtgggtgaaacggtgctggcggataccgtagggtttatccgccatctgccgcacgatctggtcgcggcgtttaaagcgacgttgcaggagacgcgtcaggcgaccctgctgctgcatgtgattgatgcggctgacgtacgcgtgcaggagaacatcgacgcggtgaacgtggtgctcgaagagatcgacgcccacgaaattcccaccctgttggtgatgaacaagatcgatatgctggacgatttcgaaccgcgtatcgaccgagacgaagagaacaaaccgattcgggtctggctgtctgctcaggccgggattggtgtgccactgcttttccaggctttgacagaacgtctttccggtgaggtagctcagcacacgctgcgactgccgccacaggaaggcaggctgcgcagccggttttatcagcttcaggcgatagaaaaagagtggatggaggatgacggcagcgtggggatgcaggtgcgtatgccgatcgttgactggcgtcgcctctgtaaacaagaacctgcgctggcggactatatcgtctga

SEQ ID NO: 114202 - DNA, 312 bp, Enterobacter cloacae
atggctaaggggcaatctttacaagatccgttcctgaacgcattgcgtcgggagcgtgttccagtttctatttatttggtgaatggtattaagctgcaaggtcagattgagtctttcgatcagttcgtgatcctgttgaaaaacacggtcagccagatggtctataagcacgcgatttctactgttgttccgtcccgtccggtatctcatcacagcaataacgctggcggcggcactggcagtaactaccatcacggcagcaacgcgcagggttcttcaacaccagcgcaggacagcgaagaaaccgaataa

SEQ ID NO: 114203 - DNA, 951 bp, Enterobacter cloacae
atgactgaagtaagtaaggcgagcctgccaaaggcgatttttttaatggggccaacggcctccggcaaaacggcgttagccattgagttacgtaaagttttgccagtagagttgattagcgttgattcagccctcatttaccgagggatggacatcggcacggcgaagcccaacgcagacgaactgcgtgcggcaccgcaccgtttactggatattctcgacccggcacaggcttactccgcggcagattttcgccgcgacgccttagccgagatggccgagattaccgccgcgggacgcataccgctgttagttggcggcacgatgctctactttaaggcgctgctggaggggttatcgcctctgccatcggccgatccggaagtgagagcgaagattgagcggcaggcggcagagcaggggtgggacgctttgcacaggcaactggaagagattgacccggttgccgcagcgcggatccacccaaacgatccgcaaaggctttcccgggcactggaagtttttttcatttcgggtaaaactttaacggaactgacgcaaacgtcaggagacgctctgccgtatcaggtgcatcagttcgccatcgccccggcgagccgtgaactgctccatcaacgaattgagcagcgttttcatcagatgttggcttcagattttgaagcagaagtgcgggcgctttttgcccgtggagatttgcatacggacatgccttccattcgttgtgtgggataccgccagatgtggtcgtatcttgaaggtgagatttcatacgatgaaatggtttatcgaggtgtttgcgccacgagacagttagcgaagcgccagatcacctggttacgcggttgggagggtgttcactggttagacagtgaaaaaccacaacaggcgttaaacgaagtgattgaggttattggtgatatcgctgactga

SEQ ID NO: 114204 - DNA, 1845 bp, Enterobacter cloacae
atgccgattcaggttctaccgccgcagctcgcgaaccaaatcgccgccggtgaggtggtggaacgccctgcgtcggtggtgaaggaactggtggaaaacagcctcgatgcaggggcgacccgcattgatattgatatcgaacgcgggggcgcaaagcttatccgcattcgtgataacggctgtggcatcaaaaaggacgagctggcgctggcgctggcgcgtcatgccaccagtaaaattgcctcacttgacgatctggaagcgattatcagcctgggttttcgcggcgaagcgctggccagtatcagctccgtttcccgcttaacgttgacctcccgcacggccgaccagcaggaagcctggcaggcctacgccgaagggcgtgatatggacgtcacggttaaacctgcggcgcacccggtaggcaccacgcttgaagtgctggatctcttctataacacgcccgcccggcgcaagtttatgcgaaccgagaagaccgaattcggacatatcgacgagatcatccgccgcatcgcgctggcgcgctttgatgtcaccctcaacctcagccataacggtaaggtgatgcgccagtaccgcgcagtggcggagggtggacaaaaggagcgtcggttgggcgccatctgcggcacaccgtttctggaaaaagcgctggccattgagtggcagcatggcgatctggccctgcgcggctgggttgccgatccgaacgccagcagcgccgcgttcgcagaaattcagtattgctacgtcaacggccgcatgatgcgcgaccgcctgattaaccacgctattcgacaggcctgcgaagataagctcggcgccgatcaacagcccgcctttgtgctttatctggagatcgacccgcaccaggttgacgttaacgtgcaccctgccaagcacgaggtgcgtttccaccagtcgcgcctggtgcatgatttcatctaccagggcgttgccgctgtattgcagcagcaggcagagccagagttgccgctggcaaaagaagagcccgcgccgcgcccactgccggaaaaccgcgtggcggccgggcgtaaccattttgccgaaccggcggtcgcgcgcgagccggctgctccacgtttatccccggcgggcaacgcgccgcgaccaaccggcgccaactatcccaacgctcagccgggctatcacaaacagcagggggcgctgtaccgcaaactgctggatacgccggcggtggagcataaagagcacatcacggtttcaaccccttctctggatgggcatagccagagttttggtcgggtattgaccattattgcccccgacatggcattgcttgaacgcgaaggtaaactcctgttgctggcgctttccgtggcggagcgctggctcaaacaggcgcagttaactccgggggtgaatgccgcctgcgcgcagccgctgttgatccccgttcgcctgaaaatatcccctgaagaaacaggggttttgcggcgcgtgcagacgcaactggccgaaatggggattgaaatcgtactggacgcgcagcatgtgacaattcgcgcagtgcctttacccttacgccaacaaaatttacaaaacttgattcctgaactgataggctacctggcgcagcaaacgacgtttgatgccgccgataccgcgcagtggatcgcccgccatctggccagcgagcatgcaccgtggagtatggcgcaggcgattaccgttctggcggaggtggagcgcctctgtccacagctggtgaaagcgcctccaggtggtttgttacaacctgttgatttacaaacggcgatgaccgccctgaaacatgactga

SEQ ID NO: 114205 - DNA, 1338 bp, Enterobacter cloacae
atgattaatcgcgttaaaggttgggtgctggctgccacggtcctgctgtgcgcgcaggccggggcggccagcctctcggatattcaggtgtcgaatggcgatagccaggcccgtattacgttcagctttatgggcgatcctgaatatgctttctcacaaatcgacagccgcagcgtggcgctcgatattaaacagaccggggtgatccaggggctgccgctccagttcagcggcaacaatctggtgaaaagcatccgttcggggacgccgaaggatgcgcagtctctgcgtctggtggtcgatctcaccgaaaagggcaagacgaaggcggttaagcagcaaaacggcgccaattatacggtggtctttaccattaatgctgatgttccgccgccaccgcctgcacctgttgtagcaaaacgcgtggaggcgccggtttataccccaaggccgtctgagccagcccgtaatccgtttaaatcacaaaatgaccgacttaccgccgtgaccagcagcaatacggtgacgcgtccggcggtcagcgcgcggcgaacgccggtcagtggcgacaaagtgattatcgccatcgacgccggacacggcgggcaagatcctggcgcgattggcccgggcggcacgcgggagaaaaacgtcactatcgccattgcccgtaagctgcgtgcgcttctgaatgacgatccgatgtttaaaggggtcatgacccgcgacggagattactttatttcagtgatgggacgctcggatgtggcgcgtaagcaaaacgccaacttcctggtgtcgattcacgcggatgctgcgccgaaccgtaacgccaccggcgcgtcggtatgggtgctgtcgaaccgtcgcgccaacagtgaaatggcgaactggcttgaagagcacgagaagcagtctgaactgttaggcggggcaggcgatgtgctggcaaacagccaggccgatccgtatctcagccaggcggtgctggatttacagttcggtcattctcagcgcgtcgggtatgatgtcgccactaacgtactgagccagctgcaaagcattggatcgctgcataagcgtcgccctgagcatgcaagcctcggtgtcctgcgttcgccggatattccgtcgattctggtagagacgggctttatcagtaacaacggcgaagagcgcctgttgggcagcgacagctatcagcagcaaattgccgaagcgatttataacggcctgcgtaaatactttgacgcgcatccgcttcagtctgcgccgcagggcggggccgcccagacggcaagcgccgcgctgccgggtgagatgaccgcgactaattaa

SEQ ID NO: 114206 - DNA, 462 bp, Enterobacter cloacae
atgactaatcgagcgattcctttacctgatgaacaagccactttagatctcggcaagcgcgtggcgcaggcctgtcagggggcgaccgtcatttatctgtatggtgatttaggcgcgggtaaaacaaccttcagccgtggctttttgcaggcgttaggccataacgggaacgtaaaaagcccgacctacacgctggtagaaccgtacacgcttgaaaatatcatggtgtaccactttgatttatatcgtcttgcggatcctgaggagctggaatttatggggatccgcgattactttgccaacgacgccatctgcctggtggagtggccgcaacaaggtgcgggtgtgctgcctgacccggatgtcgaaattcacttagattaccaggcacaagggcgtgaggcgcgcatcagtgcggtttcctcatcaggctgttccttactggcgcgtttagccggttga

SEQ ID NO: 114207 - DNA, 1509 bp, Enterobacter cloacae
gtgaagaaaaaccccgcaagtataccacattccatctggcatgcggatgacctccgtcgggccgagaaagaggccgcagatagcctgggcattaccctttacgaactgatgcagcgcgcgggcgaggcggcgtttaacgtggcgcgtacggcttatccggaggcttcgcactatctgatcctgtgcgggcacggcaataacggtggcgatggttttgtggtggctcgtcttgcggtggcggcggggctgcgcgtcaccctgctggcgctggagagcgacaagccgttaccggaagaagcgggcatggcgagagaggcctggctgaatgcggggggcattattcatgctcctgatatcgtctggcccgaggatgtcgacgtgattgttgacggtctgctggggacgggactgatgcgcgcgcctcgcgatgacgtcgccgcgctgattacgcgcgctaatgcgcaccccgccccggtggtagcgctggatattccctccggcctgatggcgcaaaccggcgtgacgccgggcgtgtcgattgaggcggcgcgcaccgtgacctttatcgccctgaagccgggtttactgaccggtaaagcgcgggatgtcgtgggcacgttacaccacaacgccctggggctggaaaactggctggccggacaggatacccacatcacccgctttgatgcctccctgcttgcacagtggctgccgccgcgccgtcccacgtcccataagggcgaccatggccgactgctgattatcggcggcgatcgcggcacggcaggtgcgattcgtatgaccggagaggccgcgttgcgcagcggcgccggattaatacgcgtgctgacccgtagcgaaaacatcccgcccattattaccgcgcggccggagctgatggtccatgagcttaccccgcaggcgattgaagagggtcttgagtgggcggacgtggtggtcattggtccgggcctgggtcagcaggagtggggtaaacaggccctgcaaaaggccgagaattttcgtaaaccgatgctctgggatgccgacgcgcttaaccttctggcaataaacccggataagcgtcacaatcgcattctgacgccgcaccccggcgaagccgcacggctgcttaactgtagcgtggcagaaattgaaagcgatcgcttactttcagcccaacgtctggtaaaacgttacggaggtgttgccgttttgaaaggggcggggaccgttatcgccagcgatggtgcgatgggcatcgttgatgccggtaatgcaggcatggcgagcggcggcatgggcgatgtgctctctggcatcattggcgcattgctcggacagaaacttcccctttatgatgcagcctgtgccggctgcgtggcccacggtgcggcggctgacaggctggctgcttgttacggaacgcgcggtatgctggccaccgatcttttttgcacgctgcggcgtgttgttaacccggatgtgattgacgtagaaaatgactaa

SEQ ID NO: 114208 - DNA, 1140 bp, Enterobacter cloacae
atgtcacagcccctcgatctcaatgaattagcgcaaaaaataaaacagtggggtgctgaactgggcttccagaaggtcggtattactgacaccgacctctctgccagcgagcctaagctccaggcatggctggataaacaataccacggcgagatggagtggatggcgcgtcacggtatgatgcgtgcccgcccccacgagctgttgccgggtacgctgcgcgttattagcgtacgcatgaactatctgcctgctaacgcggcctttgcgcgcacgctaaaaaatccttcgctgggttacgtcagccgatacgctctgggacgtgactaccataaacttctgcgcaaccgtctaaaaaagctcggggaaaccattcagcagcactgtgtttcgctgaattttagaccctttgtcgattctgcgcctattcttgagcgcccgatcgccgaaaaagccgggctcggctggacaggtaagcactcacttatcttaagccgcgacgcgggctcattctttttcctgggtgaactgctgattgatttacccctgccggtagacggtccggtggaagaaggctgtggtcgctgtgtggcctgtatgaccatctgcccaacgggcgctattgtcgaaccgtataccgttgatgcgcgccgctgtatctcttatctcactatcgagctggaaggcgccattccagaggaatttcgtccgcttatcggcaaccgcatctacggctgtgatgactgtcagctgatttgtccgtggaaccgttattcacagttgacggacgaagaagacttcagtccgcgcaaggcgttacatgccccgcagttgatcgaactgttcgcctggagcgaagcctggttcctgaaggtgacggaaggttccgccatacgtcgtatcggccacctgcgctggctgcgtaatgtggccgttgcgctggggaatgccccgtgggatgaagcaaatcttcaggcgctcgaaagccgtagaggtgagcacccacttcttgatgagcacatagaatgggcgattgcgcagcaaattgagaagcgaaatgccggcgtggttgaagtgcagttaccgaagaaacagcgcctggtcagggtgattgaaaaagggctgccgcgggatgtgtga

SEQ ID NO: 114209 - DNA, 1455 bp, Enterobacter cloacae
atgaataataagggctccagcctgaccccggctcaggcgctggaaaaactcgacgcgctgtatgaacagtccgtcaatgcactgcgcagcgccatcagtgactatatcgaaacagggaaacttcccgatgaaaaggccagaacccaaggcctttttgtttatccatcgctctctgtcacctgggacggcagcgccagcagcaatccgaaaacccgcgcctatgcgcgtttcacccactccggctgttacagcacgaccatcacgcgacctgcgctgttccgcccctacctggaagagcagcttaccctgctgtatcaggattacggcgcgcatatcagcgttgaaccgtccctgcacgagatcccttacccgtacgtgatagacggttcagcgctgacgctggatcgctccatgagcgcggggctgacccgccacttcccgaccactgagctgtcgcagattggcgatgagacggcggacgggatctatcacccggcagagttttcaccgctgtcgcactttgatgcccgccgtgtcgatttctcgctggcacgcctgcgccactacaccggcaccccagccgaacatttccagccgttcgtgttgtttaccaattacacccgctatgtggacgaatttgtccgctggggctgtagccagatcctcgatccggacagcccttacatcgccctatcctgcgcgggcgggatatggatcaccgccgaaaccgaagcaccggaagaggccatctccgacctggcgtggaaaaagcaccagatgccagcctggcacctgatcaccgccgacggtcagggcattacgctgattaacatcggcgttggcccgtcgaatgcgaaaaccatctgcgaccatctggcggtactgcgcccggacgtctggctgatgatcggccactgcggcggcctgcgtgaaagtcagctgattggcgattacgtcctcgcccacgcttatttgcgtgacgaccatgtccttgacgcggttctgccgccggatattcctatcccgagtatcgcggaagtgcagcgcgccctgtacgacgccaccaaagaggtgagcggcatgccgggtgaagaggtgaagcagcgcctgcgtaccggtacggtcgtcaccaccgacgatcgtaactgggagctgcgctattccgcctccgccctgcgtttcaatctcagccgtgcggtcgcaatcgatatggaaagcgccaccattgccgcgcagggctatcgcttccgcgtcccttacggcacgctgctgtgcgtgtccgataaaccgctgcacggcgagatcaaactgccgggccaggcgaaccgtttttacgaaggggcgatctcagagcatcttcagattggtattcgcgccatcgatttactgcgtgcagagggcgacaaactgcattcccgcaagctgcgcaccttcaatgagccaccgttccgctga

SEQ ID NO: 114210 - DNA, 1317 bp, Enterobacter cloacae
atggactccacccttatctccgctcgccgcaacgaggagacaccttcgcttaaccgcgcccgccgcgccgctttaggtagcttcgcaggtgccgtcgtcgactggtatgactttctgctctacggtattaccgctgcgctggtctttaaccgtgaattctttccccagatcagccccgccatgggcacgcttgctgcgtttgccaccttcggcgtcggttttctgtttcgtcctctgggcgggataattttcggccacttcggtgaccgccttggccggaaacgtatgctgatgctcaccgtctggatgatgggcattgccaccgcgctgatcggtattttgccctcctttgcctcgattggctggtgggctccggtgttgctggtgacgctgcgcgccattcagggctttgccgtcggcggcgaatggggcggcgcggcattgctgtccgtggaaagcgctccgaagaataagaaagcgttttacagcagcggcgtgcaggtgggttatggcgtgggtctgctgctctccacgggcctggtgtcgctaataagtcagctcacgacagacgagcagttcctgagctggggctggcgtattccgtttatcttcagcattgtgctggtcgtggtggccctgtggatccgtaacggcatggaagagtcggctgagtttgaacggcagcagcgcgaaaaaccggtcgcgaagaaacggctgccggtgatggaagcgctggtgcagctccctggcgcttttctgaaaattatcgccctgcgcctgtgcgaactgctgacgatgtatatcgtcaccgcctttgccctgaactactccacgcaaaacctcggcctgccgcgggaattgttcctgaatattggcctggtggtgggcgggatcagctgcctgaccatcccctgcttcgcctggctggcggatcgctttggccgtcgacgggtgtatatcaccggggcgctgatcggcacactcagcgcctggccgttctttatggcgctggaggcacagtcggtcttctggattgtcttcttcgcgatcatgcttgcgaacatcgctcacgatatggtggtctgcgtgcagcagccaatgttcaccgagctgtttggcgcaagctaccgctacagcggcgcgggcgtgggatatcaggtggcgagcgtggtcggcggcgggtttacaccgtttatcgccgccgcgctggtgacgttttccggcggtaactggcacagcgtggcgatttatctgctggcgggttgcctgctttctgccgccaccgttctgttgatgaaggaaaccgcgcacagctga

SEQ ID NO: 114211 - DNA, 576 bp, Enterobacter cloacae
atgcaacgcctctttcctgcactgtgggtagtcctgtttttagtcgtatctccgctgcatgcggagccgaaagtctatggcgaacagcgtattcaccgctggtgggatgcagtaacggacgatattgcgcaaacctgggaacagccggatcgttacgatctctaccttccgtttctgagctggcatgctcgattcatgtatgacaaagagaaaaccgacaactacaacgaaatgccgtggggcggggggctgggcgtgtcccgctacaacgacgagggcaactggagcgccctctttgccatgatgttcaaagattcacataacgaatggcagcctgctatgggctacggctgggagaagggctggtatctggataacgcaaaagatttccgtctggggctgggggccgctgcggggatcacggcacgcgacgactttgccaactatgtcccgctgccgtttatcttcccgcttttctctgccggatataagcgcgtcaccgtccagttcacctatattcccgggacctacaacaacggcaacgtgctgtttgcctggctgcgcctgggcttttag

SEQ ID NO: 114212 - DNA, 966 bp, Enterobacter cloacae
atgaatgcgacagggctgaatatcatcaagacgctggggtgtatgacggcggttacctttttcaccatctacaacacctgggatcattacgattatgactatcactggatcctcggttttttaaccttcatttcgaccatcgccacgccgttattttttgtggttgcagggtatctggacgggcaatcccgacacggcacgcgctggcagctggataagatcaaaagcctggtgatcgtctttctgttctgggtaacgatttactacctgtgggagccctatcagcgcggatatctgatccagccctggttcgtgttcgcgtttatcgtgatttacacgtttcacccggtggtggagtggctcagccagcgacgaacgctcttttgcggggtaattgccgccctgctgcttttctcatacgggtacgatttactgtcagccctctatcctgatgcccatgtcctttcattgtcgccgcagtatcgcctgtggacgtggctgctgttttatctgacggggcagctcttttgcgatccgcagatcgcggcgtggatcggccgcaaaaatgtggtcagggcagcggtgattgccataccgtttatttatctcttcacgtggttttacgagcggcacttcttttttgcgctatttaaagcagacagaaacgcctttatcctcaccggatcgcaaatctacattctgattattgccctggtgattgcggccaacggcgtgcggtttcgccgcaatgcggagtttaaagagtccgtgctggccgccattagcaaaaccatgaccggggtctatattatgcactactcggtgtttcacctgctgaccgcgctcattccggtgacgtccctgagcaccaaacttgctctgattgtgattacgtttgttacgtcggtcctgttttcgctgctgatcctgtccaacgcagtggccaaaaaagtgatcaccctctaa

SEQ ID NO: 114213 - DNA, 3063 bp, Enterobacter cloacae
atggatatctctcgtcagtttatcagcaacccggttcgcgtctggctgacgattttgctgctgggcgtaggcggcattattgccctgttgaacatcggcagactggaagatccggcgtttaccatcaaaacggcggtggtgatcacccattatccgggcgcgtcggcgcagcaggttgaggaagaggtcaccctgccgctggaaaacgcgcttcagcagttaccttacctggataacgtcagctccatctcctccaacggcctgtcgcagatcaccgtcaacatagcctcgcgctaccactcaaatgcactgccgcaaatctgggatgaactgcgtcgccgggtgggagatgccgcccgacagtttccacccggcgtagtgaatccgtttgtgaatgacgattttggcgatgtgttcggctttttctttgccatttccggagatgaattcagcaatccggaactggttcgctatgccgagcagctgcgccgggagttggtcctcgtaccaggcgtgggcaaagtggccatcggcggagccctcacccaacagattaacgtggacatttctctgagcaaaatggccgcacgcgggataacgctgaaccagctttctgcccagctcagcaggctgaacgtggtctccagcgcgggagagatcccctccggtactgagtcaattcgcctgcatcctaccggtgaattcgaaagtattgacgagctggccgatctcatcgtgaccccgccgggcgttggggcggctacccgtttacgggatattgccaccctgtcacgcgggctggatgcgtcccctgccagcatctaccatgccaacggcagaaaagccgtcaccatgggcgtctcctttatccccggcgttaacgtgatcgacgtgggacatgccctggaggcgaagctagagcagatgtcagccgagaaaccggcaggtatccatatcgacctgttttacgatcaggcggcggaggtcgggcattccgttaacggatttatcattaacttcctgatggcgctggcgattgtcatcggtgtgttgttgatctttatgggcttacgcagcgggatcattatcgccttttccctcgccctcaacgtgctgggcacgctgctgatcatgtatctctggggtattgaactacagcgcatttcactgggtgcgctgatcatcgccctcagcatgctggtcgacaatgccattgttattgtcgaaggggtactggtagcccggcagcagggctcgtccctgatgaacgccattagcgacattattcgccgttctgcgctgccgctgctgggagcgacggtcattgccatcctggcctttgcgcccgtcgggctgtcgcaggattccaccggcgaatactgtaagtcgctgtttcaggttctgctgatttcgctcatgctgagctggttctcagccctcaccattacgccagtgctgattaagtggtggctgtttaaacgagatgctgcaccgccaaaggccgacaaaacggatccctatgacaaacgcatctatgggatctatcagggtgtgctcaacgcgctgttacggcgtaaagcgccaacgctggtagtgatggccgcactgctggccgccgccatctggggctttggctcggtgcggcagaacttcttcccctcctccagtacgccaattttctttgtcgacctctggctcccttacggtaccgacattaactggaccgagaagatgaccggtgatatcgagaaaaccattaacggccagccaggcgtggaaactacggtctcgacgattggtcagggaagtatgcgatttattttgacctacagcggacagcggcagtacagcaactatgcgcaaattatggtgagaatggacgaccagcgtaacatccccgccctgacccgccacgtggatgagtacatcgcacggaactatccgcaggttaacgccagcacgaagcgggtgatgtttggcccctccggcgacagcgccattgaaatacgtattaaaggccccgatccggacaggctgcgtctgatcgccagccaggtagacaacatccttacgcgcgatccggcgacggacagcgtcaggaacgactggcaaaatcgtagcaaagtgatccgcccgcagtacgtcaccgcgctgggacgtgagcttggcgtggataagcaggacgtcgataacgcactggagatgaatttctccggcagtcgggcaggactgtacagagaaggcagcgacctgttgcccgtggtggtgcgcccgccggaaagcgagcggctggacgccaatcacctgaataacgttctggtctggagccagacccggcagcagtatattccgctgagcaacgtcatcagcggcttcgcgctggagtgggaagatccgctgatccttcgccgtgaccgctcccgcgtgctgaccgtgcagaccgaccctgacccgctaagccagcaaacctccggcgatattctcgcccgcgtgaagccgcaaattgatgccctgcccctgccccacggctacagcattgagtggggcggtgacgcggagaactccagcgaagcgcagcaggggctatttaccacgctgccgctcggctatctggtgatgtttgtgatcacggtgctgatgttcagttcggtgaaaaacgccgtcgccatctggctgaccgtgccgctggcgctgatcggcgtgacgccggggtttttaattaccggcatcccttttggctttatggcgttgattggcctgttgagcctgagcgggatgctgatccgcaacggcattgtgctggtggaagagatagaacagcagaaagcgcagcaggatcagcacagtgcgatcgtgtacgccgccacgtcgcgcctgcgtcccatcctgctcaccgcctttacgaccgtactcggcctcgcccctctgctgctggatgtgttcttccagagcatggccgttgtgattatgtttgggcttgggtttgctacaatcctgacgctgctggtactccccgtaatttacgcgtgtttccatcgtaaggacaaagctgaacaacaatga

SEQ ID NO: 114214 - DNA, 1086 bp, Enterobacter cloacae
gtgaagcgctacctctctcttctgcctgctgttttattgctgctgacggcgtgcgatccgaaacccgaccgcgccgcgcccctgccgaaaatggtaaaagtcgcagaggtggtcaaggccggcaacgcgcagcagcgcgtgtttcccgcccgtattgaatccggcgacgccacggatctcgcgttcaaacgagccgggcagattgagaccctggacattcgccagggtgccgttgtcaaacaggggcaacgactcgccagcctcaacgcccgtgaagcccggcagcgcctgaacgacaggcaaacggcgacgaccctggctcagcggcaattcgaccgcttccagaccctggcgggacgccaggccgtgtcgaaagccgagatggatgtccagcgcgccaaccgcgattcagcaaacgccgcgctacagattgcgcgcgaagaattaagccagatgacgctcatcgccccctttagcgggacagcggccagcgtccatgtgcgaaatcatcaggtcgtctccgccggcaagcccgtcgtcactttgacccgtaccgatctgcttgacgtggtgttcagccttccagagaacctgtttaataccttcgatattcgcaatgcgcagtacaaaccggtagtgaggatcaatgccctgcccggtcgcgagtttaccgctgtgtacaaagagcactcaggcagtagcgacagcaacacattgacctggcaggtgattttaaccatgccccgcccggatgattttcccgtcgtgggcggcgtcagcggaacggtcaccatcaatttaaccaaccttccggctggtgtgggcagtgaggcgctggtagtgccggttgaagcggtctttaacccggataaccgcccgcgcaatgagccagatgtctgggtggtgacgggcgaaggcgatacgttgcaccttgaagatcgtaaggtcagcgtggggcaagtcagcgctgagggggtcgtcatcgtcggtgggcttaaggccggtgaacgcgtggtggccgcaggcgttggggagctacatcccaaccagccggtacgtatctggacgcgtgaacggggactgtaa

SEQ ID NO: 114215 - DNA, 432 bp, Enterobacter cloacae
atgtataaaacgattctggtgccggtggacgtatacgaaacagcgttgtctgacaaagcgctacagcatgcccaattcctggcgcaaagcgcatcgggtgatgtccatctgctgtacgttatgccaaagttctcggcagaactgacccgcggttttattgcagacgcgagaaagatggatgaatatatgattaataatgctaaagaaaaactggctgcgctggtaaaaaaaatcaacctgccggaagcgaatgtccatcttcatgttcgcagcgggaatatacgtgatgaggtaatcaaactggcggatgaacttaacgtcggtgcgattattgtgggatcgcgtaatcccaatattcaaacccatttattagggtcagaggcggcgagtatcgttcgttatgcgcatgttcctgttttcgttattcgttaa

SEQ ID NO: 114216 - DNA, 2694 bp, Enterobacter cloacae
atgataacagaaaagcctcaccgcccgtattatcaacagaccgttgatgaaaccctgacaaatatccaatccagcctcgacggactcagcagtacagaagcgaccgccaggctggaaaaatacggcgaaaatgccttaccgcaaaaaccgggtaaacctggctggctgcgctttctggcccatttcaacgatgtccttatttacgtccttctggcggcggcgctgctgaagctgataatgggacactgggtggatatgtttgtcattcttggggtagccatcattaacgccctgattggccatattcaggagagcaatgcggagaaatcgctgcaaagcattcgcaatatgctctccagcgaggctgtggtcatccggcagggcaaccatgaaactatcccgacgacagcgctggtgcccggagatatcgtcgtgatacgcgccggggatcgcattcctgccgatcttcgcgtgacagaggcgcacaacctgcgggtggaagaggctattctcaccggcgaatccactgtagtggagaaaagcagcgatgcgctccacggggagttgccgttaggcgaccgttacaacctgctttattctggcaccaccgtcagctccggcgggggaaaagggctggtggtggcgaccggtggggagactgaactcggccatatcaaccagatgatgtcagacattgaaaaacaccgtaccccgttgatggtgcaaatggacaagctcggcaagaccatttttatcaccattctggtgatgatgctggcgctgttcgttttcagtcttatcttccgtgatatgcccgtatcagagctggtgctgtcgctgattagccttgcggtggcggcggtgccggaaggattaccggccattatctcgatcatcctctccctgggcgtgcaggcgatggcgcgtcgcaaggcgattattcgcaagctgcctaccgtagaaacgctgggtgcgatgacggttatctgctcggataaaaccggcaccctgaccatgaatgagatgacggtaaaagcggtgattaccgcggacaccacctaccgcgtggagggagacagctatgagccggtgggcgcgattcaccctgttgacgatccgacaccggtcaccgtgacccagggatctgtgctggagcgctatctgcgcaccgtcgatctctgtaatgacagccagctgatcaaagatgagcaggggctgtggaaaatcaccggtgggccaactgaaggcgcgctgaaggtgctggccgccaaaatcccgcttccggcaattgacgccgaactgcacagtaaaatcccattcgattcgcaatataaatacatgtccaccctctatcgcctgggtgacgaagaggtgatgttaatcaccggtgcgccggacgtccttttccgtctttgccagcaccagcagacccaaaacgggctggagccgttcaacctgcactactgggaagagaagattgaagagtatgcgcgcgagggattgcgcatggtggctgcggcctggaaaccggccgccagcgggcagcgcgagctgacgcatgcggatctgcaagagggggtcatactgctcggcattgcgggcatgatggatcccccgcgcccggaagccatttcggccattgccgactgcttgcaggcgggtattcgcgtgaaaatgattaccggggatcatccacaaacggcgatgagcattggacagatgctgggtattggcaacgcggcgagcgccattaccgggcgcgagctggaggcgatggacgaccaccagctgagcgaggcggcgcaaaaatacgatatctttgcccgcaccagcccggaagataaattccgcctggtgcaggcgctgcaaagtaagcaggaagtggtcggtatgaccggggacggggtgaacgatgcgcctgcgctgaagcgggcggatgtcggcatcgcgatggggatcaaaggtactgaagtcaccaaagaagccgccgatatggtgttaacggatgataactttgccaccattgcccgggcggtccatgaagggcgtcgggtctacgacaacctgaaaaagaccattttgttcgttatcccgagcaacatcgcccaggccttgctgatcataattgccctgctggcgggaaacctgatcccattaacgccggtactgatcctgtggatgaacatggcaacctcggcaacgctgtcgtttggcctggcgtttgaagcgggtgagaaggacatcatgaaccggccgccgcgtaagtctaacctgcatgtgatggacggttatgccatctggcgagtggtgtttgtcggcctgatgattgccatcagcgcctttgtgctggaggcctggctgcaaccacgcggctactcaccggagttcattcgcaccgtgttgctgcaaacgctggtcaccgcccagtggttttacatgctcaactgccgcgtcaccgacggcttctccctgagtaaaggtctgctggctaacaaggggatatggatcgtgagcggcgtacttctggcccttcagcttctgatcatctatgcgccgttcatgcaaatgctgttcggtaccgaagcgctaccgttccgctactggatcattaccttcctgattgggtttgcgatgttcatgattgttgaagcagaaaaagtccttacccggagatggcgcacgacgaaaagatga

SEQ ID NO: 114217 - DNA, 933 bp, Enterobacter cloacae
atgattcgatttgcctcgttcgtttttacgcttggtattctggttcccgctgcatctgctgtaacctaccccctccctcccgagggcagccgcctggtgggggcaccgatcaccatcaccgtgcctgagggcaatactctgccgctcgaagcgtttgcagcgcagcacggacaggggttgagcaatatgctggaagccaacccggggggggatccgtttttaccgcgagccggaacacagctggtggtaccccagcagcttattctgccgccaacggtgcgcgaggggattgtggtgaacgtcgcggaaatgcgactttactattatccacccggcagcaacacggttgaggtgctgcctattggcatcggtcaggccgggcgcgaaacgccgcgtaactgggtaaccgccgttgagcgcaaacaggaaggcccaacctggtcagccacgccaaatacgcgacgcgcttacgcgaaagaggggaaaacgttgcccgcgttcgttcccgccgggccggataacccgatggggctgtatgccctctatatcggcaggctgtacgcgatccacggtaccaactcaaatttcggcattggtctgcgcgtcagccagggctgcattcgcctgcgtaataacgatatcaaatacctgttcgataacgtttcggtggggacgcgggtacagcttatcgatcagcccgtaaaagtgaccaccgagccggacggtagccgttgggtagaggttcacgagccgctgtcgcgcaatcgcgcggaatttgaatcgacaaataaggtgccgctgcccatttcggccacgcaaaggacgcagctgataagtgaaggggcgggcgctgaactggaacggcggtcggggatgccggtgaagcttgctatgcccggtggcgctgcgcttaccgggcctacaggaccgtag

SEQ ID NO: 114218 - DNA, 546 bp, Enterobacter cloacae
atgtatcggctggagacttcagagcaaacagaccctgttgcagtgagttccgactacatctctgagtatctgaaacaaggaggcatgaaccctgctaacaagatgctgattgaaattgacttggaagaagccagcagtgatgatctcgcagaacatctgaaagtactgattgctctatggcaaaagcacctgaaaacgcctaaacccccgaaacgaaaatttaggtttggtcataagacctttgaaagaatacttgattacaaagtcatccctttgatggatttgatctcatgggaacagctctacaacgaaggtaagaacatacctttcaccattttagctgacatcctgcatggtaataatggggtcagaagtagtgagaacatcaaagatactgattatgattacgcgaaaagttatcttgataacgatgagtacttcaaggttttaaatgatttctatattaaaaacaatatgttgaaggattggggtatcgttgatgtgataacacttaacgataaatcctcggataaaaacaaaaagtaa

SEQ ID NO: 114219 - DNA, 216 bp, Enterobacter cloacae
atggttcaaaacaaaacagataaacatccgaaactgattcgtttaccagaagtaaaaagaagaacagggtttggtaaaacgtggatatataccttaataagagcgggtaaatttcctaagcaagtaaaaaccggattgcgctctatagcatttattgaaagtgagattgatgaatggatttacaaaatcatttctgattctcgcaatcatatctaa

SEQ ID NO: 114220 - DNA, 312 bp, Enterobacter cloacae
atgaaaagtaaaaacgtactgccttgtgtggtgactgttacgaatgatgagacagaagtatttatggaaatggcaataaataactttagaaaacatcttcaggtcatgattgattgtatgggaaatgattatgagcgtcattttaaagaccggctttatattgaagaagtgattggaaaagtgatcgaacgaacaaaacaagagtttgctgaatcaatgaaagataataaagggaaagaatatcatctgttcttggatgaggtgagaaggaatctgagagttatttactctgcgtatcgtactaactattaa

SEQ ID NO: 114221 - DNA, 387 bp, Enterobacter cloacae
atgaacgaaaaatgtttaggctggaatgaaatacccgttaaaatatccgcaagtaatgctgagacagcaaactttgctactgatgttgtaaacacctataacgagttaatacattacttatactttaatctaaaggatgatgcatttctgaaaaaaatgaaggatggattttacagggagatattcataatggatattattaatctcacgctacaggaatggtttgaaagtgctgaagagataaagattaaatacatatcagttccagaggttaaaactatactaagtagttatcatgagtttttgattaaatgctttaatggtgatgattatgttctttattacaaaagaatagaaatcagcgcaaataaacagtctgtaatataa

SEQ ID NO: 114222 - DNA, 288 bp, Enterobacter cloacae
atgagtgaaaaactgataaaagaatctcaaaaagtatttatgcatatggcaggtttgttttatgaaatgaaaatgaatacgcttaaggaagtccgacccgatgaagcagagatgttaatggaggatgatgcattcatggatagtatttataaggattgtatcaaaaatgcaagcgcatcttttaaaaaggtagtcagatgggagtactttgaacaagggcattcagtaaaaatagttgataaggaggtggtgttgataacattacgtgttaatcacaaacgaagataa

SEQ ID NO: 114223 - DNA, 294 bp, Enterobacter cloacae
atgagtaaaatttttgaaattaaaagtgtatctacagaaacgttttataatattgcagagcgttcgtttgaggctagttggaaggttatgcaggatatggcctctgataatgtctcatacttggtatatgatgcggattttatgtgtgttttcatcggcaatgttattgagcatatcagtaaaaatttttacatcattatccaatgtgaatgtctggaaggaaagcttgaagaagtaaactttgaagaggtagcggaacgtctggtccggcattcatgggagtattgtaaataa

SEQ ID NO: 114224 - DNA, 396 bp, Enterobacter cloacae
atgaatgatgtggtattatacgaaaaaaatgaatcaatgttttttgccatttgcacggtcttatcattatattgcgatttcatatacgaaatagcatatggatttcataatgaagcggtaatgatcattgaaaatgaaaagtgtgtgggacaggcacttaaaatacaaataaacaatctattcgatgatttcaattactacaaaaaagtgaatggaacaggaaaagaaaaacgggaagatatagatgaaaaagaactctttaacaaagtaatggcagcacataaccaaggagtaaaagcgctaatcatgaagaatcttgaggccaatcttcgagagaaagaggaaggttctgaatattggaagttaaaaatatttaataggtttaatgggatatag

SEQ ID NO: 114225 - DNA, 225 bp, Enterobacter cloacae
atgacagaccatataaaaaaagaaccagaagatgaaacaattattgatagtgctaaaatttacgatgcgcttagaaaaaattattttgatagatgcttcctttcttcttacttagatgaaaaaatagatgataacttacatcctttcagtgacgaagcatataataaaatgaagatatcacaaaaaaaagaagtcgaaaaaataatgaaaatcaaaataaaataa

SEQ ID NO: 114226 - DNA, 645 bp, Enterobacter cloacae
atgaataaaaaacttaatatgctatatgtcaacaacattaacgcattaaataattaccgtgagaaacattcagataataacttacatggccccctccttttaaagctaaaaaattattttcatcagcataataaattgatggttataggacaggaaacctatggatggtgcaactctcccgatattaatgaacagcttgaaacatatgaggagttcgattttggcgtatcatattatagcagtccattctggaatatcataaggaaagtagagcgagcgcttagtattgaaccatatgcaattgcatggtcaaatctgaatcggtttgatgttgattgcggatcaccagattataccgagctagctagagatatatcattgtttgattatatattaaaggaggaaattaatattcttactcctgatatatgtgttttcttcacaaatcataaatatgatcatcgactaacgtctttatatgaagatttaatgtttgaaaacataaatggattgccagaaaaacatttcgtaagattataccatccagacctcccagaacatacgattagagcgcctcaccctaaaacaatcagaataaaaggatgggaaaatgattttataaaatatatagaggctattaaatga

SEQ ID NO: 114227 - DNA, 1512 bp, Enterobacter cloacae
atggctatttttcatcttgattttaaaattgtgaaacgttcagaaggcagatcttccgttgcgaaagctgcctatcatgctcgtacacgtataacagatgaaagaacaggtgatacgtatgattatagccgccgtactgatttatatgggcatttcatcttagctcctgctaatgctccagaatatatcgtaaaagactctacagccttatggaatgaagttgaaagagtcgagcgtcaacaaaatggtcaaacagcccgttattttgacgttgccattcctgccgagttaaacaatgacgacaagaaaaaacttgtccttgagtattgccagaaaaatttcgttgataaaggcatgattgccgacatcgcttttcatgatctcgatagtgataatcctcatgctcacgttatgttgaccttaaaaacaataggcccggaaggttttggcaaaaaggaaagaagctggaacgacagaaaaatgtctattttttggcgtgaatcatgggcatctatggctaacagcttcctcgctgctgctggttcatcagaacgtatcgatcatcgttctctccaagtccagaacgaagaagcactatccaatgcggctattgctttggataatgaagaaaaagcattatggcttgctaaagcggctgaaacaaatcgcccttcaatgaagcgtattcattgtggtaaatggcgtactaaagctgctaaggagcaaagagccaaagaacaggctgttcgtgatgctgctaaacaagaagctgttgaagtctacaaaacattcagtgaacttgaccttgaaattgttgttgatgtcagaagcttcaccgtgtctgttcttgctgaaccagaagaaattgttttaccagaaacgcgatccagctcttctacaaatgaagaacaaagacctttactggtagcaccagctcctgatactcgtatgcgtggagtcaaatcttaccgtgataaaacaaaagtcagtaaggttgtggctggtattccgccatcaatcagtatttctgattctggtacaaatactattctgaaaacatccacctctcaaaacccaaacagggcatccagaagcgcccctgaccatgaaagaaaggataagactactccacgtcaggataatattttcaaacgtttcacaactcttttcatagatttcttcaaagaaaaatttgtatgggctagatcaagcagagttaagcatgatcctgtcagtacagaacatgataaacgtattactgaaaactttgtctttgatgaagtattaggtcatcatgtttctcgtgctgaatatgagaaacaagctaagtttaacagtgatacttacaaaccaacacctgatgagattcgacgtttcccaagccgtcctaagcacgaacgagtcaatgcagataataacatggattttataccgactgtttcaacaataaatgataaaaatcatactcctcgtttaaggccacctacacgccgtggcctagataaactatag

SEQ ID NO: 114228 - DNA, 522 bp, Enterobacter cloacae
atgaataaaactaaaaccaaaacaaaaaacttgaaggaaagtgagtttataagacatatagaaaacaatcctgttgtctcaacggctctatgcgagaaatatggaatctctactgaaacaattgcccatgccttatatgttcatagcaatagtttctttcttaaaaacgactacgttcaggatgacattcactatgatatagttaaaaacaatttaataataatgaaacccacgcttagacaatattatagaagaacaaggcaagtagattataacagatatacttttttgtcaggtattaaagaatatcaagactattgtattttgttgacgctttgctgctatcactggatagctgatgtatttactgtctacaatcatagtgaaaaaagtcaatttatcgttgatattgccaatgatcttctgaaaaggagtgtagatcatttttcagtagagcatgaaaatattatcaactgctttaacattttaaaagaaaagttcccatcgtataaaaataaataa

SEQ ID NO: 114229 - DNA, 324 bp, Enterobacter cloacae
atgagtgatatttcagataaagaacaaaccagaaagaaaccacgaataaaaaagacactggaacagcaattagcatctgctcagatgcgtttaaatcgtttacaacataagtctaagaaagagtctaaacagatagaaacacgccagaaaataattttaggtgcggaagttgccaaggctcttgattgtgatgtttttacagtggataaggatcttgttttaggtatgctactagagatacctcacctacatccagatgataaagaaagatttaaaagaagcggaatgttatttctggctagtatgaaaggccgaaaaacttaa

SEQ ID NO: 114230 - DNA, 459 bp, Enterobacter cloacae
atggggaacgaaaagagcttagcgcacacccgatggaactgtaaatatcacatagtttttgcgccaaaataccgaagacaggtgttctacagagagaagcgtagagcaataggcagtattttgagaaagctgtgtgagtggaaaagtgtacggattctggaagctgaatgctgtgcagatcatatccatatgcttgtggagatcccgcccaaaatgagcgtatccgggtttatgggatatctgaaagggaaaagcagtctgatgctttacgagcagtttggtgatttgaaattcaaatacaggaacagggagttctggtgcagagggtactacgtcgatacagtgggtaagaacacggcgaagatacaggcttacataaagcaccagcttgaagaggataaaatgggagagcagttatcgattccctatccgggcagcccgtttacgggccgtaagtaa

SEQ ID NO: 114231 - DNA, 570 bp, Enterobacter cloacae
atgaaaaatacagtgttaattaaaaaaagaaaaagtaaaaaaggtttctcacttttagaactattacttgttcttggtattatcgcagcgttagtggtagcagcatttatcgtttatccaaaagtacaagcgtctcaacgtgcacaggctgaaagtaataatatagcaacaatacaggctggtgtaaaagcactctatacatcagcatccagttttaccggattaacaaactctgtggctgttcaggcgaaaatattcccggataatatgttgagcggttcaggttcttctgcaacacctatcaatgcattcaaaggaaatgttgtcgtggcatcagccgatacagggccttccgcagcaacaggctcctcatttacaataacctattcaaatgtgccagcagcagaatgtaccaagattatcactgcagccgcagggaatttctatacagcaggtgtaggaactgcaggtaatgtcaaagccgcaggtgaagtattagatgttgctaaaactgcaacacaatgtgaaagcggtgggaatagcaacacattaattttcacgtccatataa

SEQ ID NO: 114232 - DNA, 552 bp, Enterobacter cloacae
atgaataagcataataaagaagggttctctctgttagagttattgctggttttaggtattgtaagtgcattgataatttcagcatttattatatatccgaaagttcaaacaatgtatcgtgtcgataagataagcaaaactattttaggagcaaaatcgtcgatccaagaactttatcaaggtaaagcatattatgataaaggaatcagtaatcttagaaacattgcttttcccgccaatacttatactagtaaaaataatggattgccacggaatgattatggaggaacatatagcatacaaggtcaattttcgatatcttcaggagtttacagtggttttagtatcgacgtaacatatgttccatctgctgactgtcagaaaattatatctaatgtgtatacttcatttcaagctgtttatgttagcggtactaccgtgtaccaagcacatataaagtttggcaataggcaaattggatttgatcgttctgtaattgccgaagcatgtaacaagacagaaaatgtaaccattcaattttatactttataa

SEQ ID NO: 114233 - DNA, 2961 bp, Enterobacter cloacae
atgaaactacattttgaatctgaccttacctatcagcaaaacgccataacttcggtctgtgatttgtttgaagggcaagagaaatgggaaagcgaaatgactgtgctggccccagctcagggcgttctctcatttgaaggttcaacgggttcaatgcctgttaacccacaaatacccgaagatgatgttctgctaaaaaacttaaacaatgttcagttgaaaaaccagcttccaccttcacctgtgctcgacagccatgattttactgtcgagatggaaacagggacaggtaagacgtatgtttatcttcgcaccatgcttgagttgaataaacgatatggcatgagcaaatttatcatcgtagttccttccgttgccatcaaggaaggcgtttataaaacactacaaataactgaagaacattttaaaagcctttatgcgggaactccgtacgaatactacctgtatgattcagcaaaacctgcggatgtgcgaaattttgcaaccagctctgttatgcagatcatggtaatgactgtgggtgcgattaacaaaaaagatgttaacaagctctatcagtccagtgaaaaaacaactgtggacgatctggataagcccattgatttaatccgtgctacacgtccaattatcattgtcgatgaaccgcaaagtgttgatggtggcttaaatggtgcaggtaaaaccgcacttgatgctatgcacccaatgtttaccttacgctattcagcgacacatgtgcataaacatcatatggtgtatcgcctcgatgccattgatgcttacaatcagaaactggtgaaacaaatcgaagttgccgggcttgaagtccagaatgcaagcaatagcccctatgtaaaactggtcagtattaacagtaagaagaatagcattagcgcgactgttattgttgatatagccgataaaaaagggaatgtaactcgttctgaaattaccgtgcatgacggtatgacacttgatgacgaaacggggcgtgatatttatcagggatacaggataagtgagatccgcacgggcaaagaaggctatctgacactggagacgccttctaatacctactatatgcaagtgggtgatgtcgtgggtgatattgacccgatgctcatccagcgtcatatgattaggcgtacaattcgtgaacatcttgataaagaacttcgcctgaattcccagcaaatcaaggttctcaccctgttcttcattgataaggttgatttctatcgccagactaatgaagaaggacttcgtgaaccgggtgaatatgctcgtatctttgaagaagaatatctaaaagcgatcaaaagccccgcatataaagatttgctcccttctcatccagaacatgctaaagacgttcatgatggttatttctccattgataaaaaaggtggatgggctgaaacaaccgaaagcaataatgcaggccgcgaaaatgcggaacgcggttataacctcatcatgaaaaataaagagaagcttttgagtttctcgaatccagtgaggtttattttttcacactctgctttgaaagaaggctgggataaccccaatgtattccagatctgtagccttcgagagatgggaagtgaacgagaacgtcgtcaaacattagggcgtggtcttcgcctgtgtgttaaccaagagggtgaacgtgttcgtgatgacagcattaacattctgactgtaattgccagtgaaaattatgaagcctatgctgaacgactacagagtgaaattgagaacgaaacaggcatccgttttggtatcatcgaaaaagatgcgtttgcacatctgatcgcctctgattacccgcaaggtgtaggtatcgcaggttcacatgagatttgggctgaactccagactgaaggttatctggaaaagtcgggaaaaataactaaagcactgaaagaagcccttttcaaaaacacttttgctgttggcgagaagtacgccttactacaggaacaaattgaaactatcctacgtaaatcagcagggcgactcaatataaacaatgctgatgagcgtaaaacaatcaaataccggaaagaagtcttaaacagcccggaattcgaagcgttatggcagcgcatttgtcaaaaaacgctgtaccgtctggcatttgatgaagatgaattgattaaatcctgtacgaaatcactttctgaaatgcagcctgtagcgaaagcaatggtcagtttcagcaaagcaacaatcaaacaaagtcagtcaggtcttgatgttaaggcgaagactaatggtacgacaagctctgttattgatgttgcagagcagccactaccagatattcttggtgttctacaggaaaaaaccggactgacaagacgcagtttatgcaccatcctgaaagagagtggaagactcgctgattttgctaaaaatccacagcagtttatcagtgaagctataggccgaatcaactactgcaaacgcctgtcaattgttgatggtattaaatattatccactaaaaggagaggtgtatgcgcaaagtctctttatggataaggagctaacaggatatgcccgcaatcttttcgaaacctcgtctaagtcagtttacgaatatgttcctaaagattctgaagtcgaaagtcgtttcgctcaagaactcgaagaacaggatgaagttaagctttatgtgaagcttcccggctggtttaaaatcccgacaccattagggacttacaatcctgactgggctttggttattgaagacaatggtgaagaacatatctactttgttgtcgagactaaaagtaaacacattggtcttggtaatgaagaagatgcgaaaattacttgtggtaatgctcactttatctcactcaaagatcagatgagtaatcctgcgagatatatgcgtgctacaaatataaatgaagttttaagtggcaaataa

SEQ ID NO: 114234 - DNA, 1917 bp, Enterobacter cloacae
atgaacaaactttcgcctgaaatgcccgaactgcaatcaatgaatatcactgctgataacatcaccaagcttaaatcattgtttcctgaagcttttaatgaaggcagtgttgattttgaggttttaaagcagcttttgggtgagaatgtagacgacaaagaagaacgctatggcctgaactggcatggtaagcgtcaggctcgtcagcttgcgcttaccccttctcgtggcaccttacgcccatgtaaagatgaaagtgttgattgggataacaccaaaaatctcatgatcgaaggtgataaccttgaagtgttaaaacttcttcaaaaaagttatgtaaatagagtaaagctaatatttattgaccctccgtataatacaggaaaagattttgtttatcctgataactttcaagataatataaaaaattatcttgaaataacaggccaaacagaagaaggaatatacgtaggttcgaatgtagaaactagtggacgttatcatactgattggttgaacatgatgtatccacgccttattttagcaaaaaacttattgactcaagatggagttatttttctatcgatagatggaacagaggtttcgaatctagaacacttgttaaataatgtattcggagaagaaaacaaaatcacttctatctgttggcaaaaaaaagtgtctcctgcaaatgatgctaaatggttcagttcggatcatgatttcatcttggtttatgcgaagaataaagatatttggagacccaaaaagcttaaacgtactggcgaacagctatcttattataagaaccctgatcatgatcctaaaggagaatggaattctgcaacatacacatgtaataaaagcatgcatgagaggccaaacctttattacccaatagtaaacccaaatactatggaagaggtatggcctaaagaaacagcagtatggaaatactcaaaagacataactgaaaaatatataaatgaaaaacgtttatattggggaattgatgggcttgcaaaattcccgcgtgtaaaattatatctttcagaaatggatgatgttgttccaagatccatctggaattatggcgatgtaggtcatactcaacaagcgacgaatgaaataaaggaactattttctggtgaacaagtatttgatacaccaaaaccactaaaattgttaagaagaatagttcaactatcatcaaataaaaacgatgatatcattttggatttttttgcgggttcaggaacaacagctcatgctatttttgaacaaaacaaggaagatggcatttctcgcaaaagtattatcgtgcaacttcctgaagttttattagaaagcaatcgtgaacagaaagccgcgtactctttttgtatgaaaaacaatctccagccaacaataagtgaacttactaaagaacgcctacgccgcgcgggtaaaaaggttcgtgaagacaatccagagtggaaaggtgacgttggttttcgtgttttcaaactcgatacatctaatatccgtccgtgggaagccacagcagaaaccctttcagaacagattgatgcctatgtaagcccaatccttgaaggccgtagtgaagaagatttgctcacagagttaatgctaaagcgtggcattgacttgagtgtaaacattgaaatccgtcagtttgatggattaaccgtttcttgcgttgacggtggcaaattgtttacctgctttgctaaacaaatccctgcatcttcagtagaagaactgaccaaggggatcatcgactggcataagagtttaaaagttgggaaagatacggtctgctatttccttgatgatgcgtttgaaaataacgtcgccaaaacaaatctttgcgccattctggaacaacacggcctgactaacctgcacagcctgtaa

SEQ ID NO: 114235 - DNA, 1389 bp, Enterobacter cloacae
atggctaaactgaacaagaaacaacttgctttactcaaagaaatacctgccgatcaactcatgcaaataatttgtgatattgcagaggataatggtcaggcaaaatcctttcttattaataaatatctgttaactccagaagaatcactgaaaaaggctgaggctgaatacaaaagggtaattaaaacaaaacgcttttatgattattatgaagcagcgattttttttgaggggctatacaggaatgtcatatttccacttgaaaagacggtatcaacgctgcctgaaaaaaccgaggcgttttgccatgatttactgctctcatttgataaagtcagcgaaattgctgatacatcagatggatcatggatggactattataatggtgctgtcgaaatatggttaaaatccctgtccctacaaaaagacaaaagcattgatgttatagcggataaaataatttccgtacttaaaggtgatgtgtattttaactttgatatttttgataagtataaaaaagaactgggatacaatgttattcgtgttttaagggaaagtcttcttaagacaggtgatgtcaatggtgctgttgagttaagtctgtatatcagggatgttgatttcatcaggcaatgctttgagaaaagaaaactgaatcagccagaatatatcattaagtttgctgagttgctggttgatgaactgtgtactgaggaggccattcaggttctcaataaaatcaaagaagataaatcagttgatcaggcagggcttcgtgataaatggactgaggtgttggctctggcgttgattgaagaaggcgagattcagcaggtaaaaacaatttgtatagacggatttaagaacaggtgtgatgttattttttataatatctataatcgggtagagaaaaataatgactcactggatttgttctctggcatagcaaagaaaaaaggctttccgtttgttattcttttcttgtccgggacagatagttatggaaaacttaattctgaagtcatgaatgcgagtgaaaatgaaatcgcagagatgatgtctttattacgcggttcttttgttcgtaccttatcgagtgagctttacaggcatggctatgcatgttctgcaactctgctccgtagagtgctggcagaggacagtatcagccgttctcagagtaaatactacagctatgcggcatctgatatgaaaaaaagcattgattacagtaaagatattacatggactgaaaaaatcccttcaacagaagagtatttaaaatccctgtttattgagcacaaaagaaaatacgcactctgggaaataatgctggaaaaaatcgctggtttagcgatagagaaagattcagtatcatattcagcatag

SEQ ID NO: 114236 - DNA, 1275 bp, Enterobacter cloacae
atgtcactgactgatattaaagcaaaaaatgcaaaaccccttgagaaggaatacaagcttactgatggctttggtatgttccttcgtgttacccctaaaggttcgaaatactggcaaatggcttaccgcttcgaagggaaacaaaaactcttctctattggtgtttaccctgcagtttctctttctgacgcaagacaacgccgtgacgaggccagaaggcttctggctcagggtattgaccctaatgcaaagaaacaggcagaggttaaagagcttaaagccaaacgtgataatacacgctacttcagaacagtagccaaagcgtggttctccacgaaaacaaaatggtctgatgattatggtgatgccgtatggaagcgccttgaaacttatgtcttcccggtaatcggtgacaaagatgttgccgaactggatacgggtgatctgctggttccggtgaaaaaagttgaggctcttggttatcttgaagttgccatgcgcattcaacaatacattacggcaatcctgcgtcatgccgtccagcaaaagctgatacgtcataacccagcctatgatatggaaggggcagttcagaaaccacaaactgaacaccgccctgcacttgagctggaagaaataccccagctactgaacaaaattgccgaatacaaaggccgcaggttaaccatactggcaatacagctcaatctgatgattttcattcgttccagtgagttgcgtttcgctcgctggtcagaaattgatttcaaaagtaagttatgggtgatacccgaacagcgtgaagcaattgaaaacgtcaaacattcgactcgtggggctaaaatgaagcgtaagcacttcgttcccctttgtaagcaggccatgaagatactcaaagagatccgacaactgacttatgaagaaggtcaagatgatgggttaatctttactggctgttatgactcgtttaagcccatgagtgaaaacaccatcaacaaagccctccgcaatatgggctatgacacgaagcaggacatctgtggacacggtttccgcactctggcctgtagtgccttaattgagtccgggctatggtcagaagacgctgtagagcttcaaatgagccataaggaaagcaacagcgtccgtgctgcttatacccacaaggcaaaacatcttgagcagcgtcgcctgatgcttcagtggtgggctgatttccttgatgctaacagcaacgatatggtcaggccgtttgagtttgcttcaaataaataa

SEQ ID NO: 114237 - DNA, 918 bp, Enterobacter cloacae
atgaacttaagacgactgaaatacttcgtaaaaatcgtcgatatcggcagcctgacccaggcggctgaagtgctgcatatcgcgcagcctgcgctgagccagcaggtcgcgactctggaaggcgaaatggaccagcaactgttgatccgcaccaagcgcggcgtaacgcctaccgaagcgggaaaaattttatatacccatgcccgcacgatcctgcgtcagtgtgaacaggcgcagctggccgtgcacaatgtgggtcagaccctgagcggccatgtctccatcgggctggcgccgggaacggccgcatcgtctgtcaccatgccgctgcttcaggcggtgcgcgcggagctaccggaagtgctggtttatctgcatgagaacagtggttccgtgctcaatgacaaactgctcaacggtcagctggatatggcggtgctgtacgatcgctccccggttgccgggatcaccagccagccgctgctgaaggaagatctttacctggtcggtacccgtgattgtcccggtcagagcattgatttaaccgctgtggcagagatgaacctgttcctgccgcgcgactacagtgccgtgcgcgtgcgcgttgacgaagcgttctcgctgcgccgtctgacggcgaagatcatcggcgagattgattccatctccacgctgactgccgccattgccagcggcatgggtgtaacggttctgcccgagtctgccgcacgttcactgtgcagcgcggcgaacggctggatggcccgcatcaccacgccatccatgagcttaccgctgtcgttgaatatgtccgcgcgcggctccctgtcaccgcaggcgcaggcggtgaaagagatcctgatgtctctggtcagtaagccgtcgctggaaaatcgcgagctgcaactcgtcagctga

SEQ ID NO: 114238 - DNA, 951 bp, Enterobacter cloacae
gtgaatttccagcaacttaaaattattcgtgaggcggccaggcgggattacaacctgaccgaagtcgccaatatgctttacacctctcagtcgggcgtcagccgacatatccgcgagctggaggaggagttaggcattgagatttttatccgtcgcggcaagcgcctgctgggtatgaccgagccaggcaaggcattgctgaccatcgctgagcgcattctcaacgaggccagcaacgttcgtcggctggcggatctctttaccaacgacgcttccggtgtgctgactatcgccaccacccatacacaggcgcgttacagccttccgacggttatcaaagcatttcgtgagatcttcccggacgtacgtctcgaactgatccagggcacgccgcaggaaattgaagtgctgctgcataacggtggggccgatatcggtatcgccagtgaacggctgagcaatgacccgctgctggtggcgttcccgtggttccgctggcaccacagcctgctattacccgccgaacacccgctgaaccaggtttcaccgttgacgctggaagagatcgtcaaatggccgcttatcacctaccggcagggcattaccgggcgttcgcgcatagatgaagcgttcaagcgtaaagggctcacgccggacgtggtgctgagcgcgcaggattccgacgtgatcaaaacctacgtcgagttagggctggggattggcctggtggccgagcagtctggcggagaatatgaggctggtaatctggtgcgtctggatacacgtcatctgttcgatgcgaacaccgtctggctcgggctaaagcgcggacagcttcagcgtaactatgtgtggcgttttatcgagctgtgcaatgcggggctctccgtagatgagatcaaacgccaggtgatggagccggaagaggtggcgattgattatcagatttaa

SEQ ID NO: 114239 - DNA, 354 bp, Enterobacter cloacae
gtgtgggcgattaaaactacggacaggtttgacgactggttcacctcattaaacgatagcgagagagccagcgtactggccgcgctacttgttttgcgggagaggggaccgggtctgtccagaccgtatgccgatacgctgaaaggctcccgccacagcaacatgaaagagttgcgtatccagagtaagggtgatccgctgagggcatttttcgctttcgatccgaaccgtacgggtattgtactgtgtgcgggcaataaggtcggtaatgaaaggcgattttacgatgagatgctcctcgttgcggatcgggaatacactcgctggctgaacacattaaaagagaggaattaa

SEQ ID NO: 114240 - DNA, 303 bp, Enterobacter cloacae
atgggcagaaccctggagcagcttattgcagatgaaaaacctgaggttgttgccagcgcacaggcaatggcaacggatattttgctcaatatccatctggccgagttacgtgaaaaagtgcaaaaaacgcaggtagatatggccagggcgttgggtattaaacaacctactgtcgccgtcatggaaaaggcaggacgcgatattaagctttcttctttgaaacgctacgttgaggccgccggagggaagctacggctggatgtagaactacccgatggttctcattacgagtttgtgttgtaa

SEQ ID NO: 114241 - DNA, 2190 bp, Enterobacter cloacae
atgaaacgttctcatctttgggttttaaatccgtgcttgcttgccatgctttctacctctgcgtgggcggaagaacaaaaggaagaagatattgtggtctccgccagccgggcacatcgcagcgtggcagagatggcgcaaaccacctgggttattgagcgggcggaaattgagcagcaggttcagggcgggaaagagattaaagacgtgctggcccagttgatccccggcatggacgtcagcagccagggacgtaccaactacggcatgaacctgcgcggtcgctccatgatggtgatggtggacggcgtacgtctgaactcttcccgcagcgacagccgccagctcgactctatcgatccgttcaacattgaccgtatcgaagtcatttccggcgccacctcgctgtacggcggcggcagtaccggcgggctggtgaacatcgtcaccaaaaaaggccagccggagaccgaggtggagttccagaccggggcaaaaagcgggtttaacagccataacgaccatgatgagaacgtctccgcagccgtgagcggcggcaatgacaacgcctctggccgtctgtcggtctcctatcagcgctacggcggctggtatgacggcaacggcgacgaggtgattatcgataacacccagaccggcttgcagtattccgaccgtatcgacgtgatggggacaggcaccatcaacatcgacgatcatcagcagctccagttaaccacgcagtactacaagagcgaatccgacggcaagcacggcctgttccttggggagaatttcgctgcggtcacgggcgatgccaaagcctataacaaagataacctgaactctgaccgtatcccgggcacagagcgtcacctgatcaacctgcaatactcgaacaccgatttctggggtcaggatctggttgcgcagatttactaccgtgacgagagcctgacctactacccgttcccgacgctgagcaaaggcgcggtgaccagcattggcgcatcccagcagaaaaccgatttttacggcggcaagctgacgctgaacagcaagccgatagacgacctgaccctcacctggggtgtggatgccgaccacgaaacgttcgatgccaaccagcagttctttgacttgagcaaagcggcggcgagcggcggcatggagctggacaatgcctacaacgtgggccgttatccgggttacagcattaccaacctcgcgccgttcctgcaagccagctatgacattgacgccatcaccctcagcggcggcgtgcgttaccagtacaccgaaaacaaggtggacgattttgtcggctacgcccagcagcaggcaatcgccacgggcaaagcgacctccgctgacgcggtgccgggcgggaaaaccgactacaacaacttcctgtttaacgccgggatccttggacgtcttaccgaacagcagcagctgtggtttaacttctcccagggcttcgagatcccggacctggcgaagtactacggctccggcacctatcagctggtcgatggtcactatcgcctgcaaaacagcgtcaacgtgaacgactcaacgctgaacggtattaaggtcaatgcctacgagctgggctggcgcttcaccggcgataacctgcgtacccaggtggcggcgtactactcgctctcggataaaaccatcaccatcaacaaaagcgacatgaccatcaacctggaggacgacaaacgtcgtatctatggggttgaaggccaggtggactatttcttcaccgacagcgactggagcaccggggcgaactttaacgccatcaagtccgaaacgcgtgaaaacgggaaatgggagaagctgacggtcgacagcgccagcccgtctaaagccagcgcatgggttaactgggcgccgggcgactgggccctgcgcgtgcagagcacacaaaccttcgacgtgtctgacgccgacggtaagaagattgatggctataacaccgttgatttcctgggcagctacgccctgccggtgggcaaagtcagcttcagcgtggaaaacctgctggacaaagactacaccaccgcctggggccagcgcgcaccggggctgtatagcccaacctatggctcaccgggtctttatacttataaaggccgtggacgtacgtttggcctgaactactccgttctgttctga

SEQ ID NO: 114242 - DNA, 1326 bp, Enterobacter cloacae
atgaaaacctatgatttcatcggcattggtatcggtccgttcaacctcagtattgccgcgctggcagaggggctggacggttttagctcgctgtttcttgaacgcaagccgcacttctcctggcacccggggatgatggtgccggactgccatatgcagaccagcttcctgaaggatctggtgagcgccgtggagcctaccaaccgccacagctttctgaactatctggtacagcgcaaaaagttctaccgtttcctcaccaccgagcagcgcaccgtgtcgcgcgaggagtttgccgactacctgtgctgggcggcggataacctcactaacctggccttcagccagcaggtacagcaggtcagctttgatgagcaaaacggcctgtttgaggtcgtgacccagcgggatcgcttcctggcgcgccacgtctgcgtggggattgggaagcagatcaatctcccagactgcgtcaccgcgcaggacgacacctgcttccacgccagcgaaatgatgctgcgcacgccggatttagcgggcaagcgcgtcaccgtcgtcggcggcggccagagcggtgcggatctgtttttaaatatcttccgtggggagtgggggcagccgctgagcctcaactgggtgtcgcgccgcaacaactacaacgcgctggatgaagccgcgtttgccaatgagtatttcacgccggagtacgtggacagcttctcgacccttggtgacgacgcccgacgtcagatgttgcaggagcagaagatgacctccgacgggatcaccacggagtcgctgctggccatctatcgcgccatgtatcaccgcttcgaagtgctgcgcgaaaaaccctgggcgcatctgatgccgtcccgctcggtgacggcgctgacgcgccaggaaaccggacatcgcctcagcatccagcatcacctggacggcgggcgcgaacagctggagagcgacgtggtgattttcgccaccggctaccgcgccgtgcagcccgcgtttctcgccccgctctcttcccgactgcgtctggatgaggatgaagccttctgcatcaacaacgatttcacccttgaatgggacggcccgcagagcaaccgcctgtttgccgtcaatgccgggatgcaccgtctcggtattgccgaaccccagctcagcctgatggcctggcgcgcggcgcgaattttgaatcgcgctcacgatgacgagccgtttgagctggcaaccacccccggcgtgatccactggcggagcaccaccagcccggagagcagccaggtttttaaatcattaatgaagaccaccgagtactga

SEQ ID NO: 114243 - DNA, 1743 bp, Enterobacter cloacae
gtgaacgcactctggcagaaagtgaaccgcgagatggtggcgaagatcctcgccgaactggaatatgaacgcaccctgcgcgccgagccggtttcggcggacaactggcgcatcagtatgggcaacgcgtgctggcagtttcgcgccacgcgtgggatatggggctggctgcatattgaccctgataccctgaccaccaccagcggcgcggcggtcgaagcggaaaacgcgctgctgcaactggccaccgtgctggagatgagcgacgcgcaaacggcggagcacatggaagatctctacgccacgctgcggggtgacatgcagctgttgcaggcgcgtgaaacgctggatgccgatgcgctgatccacctcgacccggacgaactacagtgcctgatgcgcggtcacccgaagtttattttcaacaagggacgccgcggctgggggctggatgccctgcgcctgtacgcgccggaatatcgcgggcgtttccgcctgcactgggtcgccgtgcagcgcgagcgtctggtctggagcagcgacgccgattgcgatattaacgccctgctctccagcgccatggacgatgccgagcgcgagcggttcgacgcccgctggcaggagctggatctggacgacagctggctgccggtgccgctgcacccgtggcagtggcagcaaaaaattgccattcatttcctggcgcagctcgcgcgcggtgagatggtagagctgggtgagttcggcgatgagtatctggcgcagcagtccctgcgcacgctgaccaacgccagccgtcgcgcgccgtatgacatcaagctgccgctgactatctacaacacctcctgctatcgcggtattccgggcaagtatatcgccgccggtccgctggcctcgcgctggctacagcagcagttcgccagcgatgccacgctgattcactccggggcgcaggtgcttggcgaacccgcagccggatatctgtcgcatccgggttataccgcattgcctgaggcgccgtaccgctatcaggagatgctgggggtgatctggcgcgagaacccatcctgctatttacaggatggcgaacaggcggtgctgatggcggctctgatggaaaccgataaccaggggcgcccgctgattgacgcgtggatcaaacgctcggggttaaccgctgacgcatggctggaaaagctgtttgaggcgacggtgatccccttctatcacctgctctgtcgctacggggtggcgctcatcgcccacggccagaacgtcacgctggtgatgaaagattacgttccgcagcgcattttcctgaaggattttcagggcgatatgcgcctggtggatgaagatttcccgcaggcgcagagcctgccggagcaggtaaaagcggtgacggcgcgcctcagcgcggattacatcatccacgacctgcaaaccggcaactttgtcacggtgctgcgctttatatcccgcctcaccctgcaatgcggcgtgagcgaaacccgcttctatcagatcctggcgctggtgttacgtcgctatatggccgcccatccggatcttgcggcgcgcttcgccaaattcgacctgtttaagccgcagattattcgcgtgatcctcaacccagtcaaacttaccttctctgaacacgacggcggcagccgcatgctgccgaactacgtctgcgatcttgataaccctctttttctggtctcccgggagtcagcgcaatga

SEQ ID NO: 114244 - DNA, 948 bp, Enterobacter cloacae
atggcaaacgcgaatatcgtccattccggctacggctttcgctgcacggtcacggaacaaaacctgccgctgacgctgggtctcgacggcagcgcggtgctggagcggctgaccgggctcccggacggctggctggtggacgccctcgaccagctgtttgttgccgcgcccgccctgaccggcattaccctgccgtgggcagcctggcaggatgaacctcaggcgcaggcgctgtttagcctcgttcacggggattatctggcgcgtgaaattttctggcagctgccgctgtggctgaaaggcgaacgtccgcaggcgagcggcggaatgcagtttgacgaaagccgtcagctgtacttcccgctgcgccctcaccgcccgcagggtgaggtgtatcgccgttacgatccgcaaattaaacgcaccctgagcttccgcgtggccgatgtggcccaggacggcgagcgctttacccgctggatgaataacccgcgcgtgaacgctttctgggagatggcgggaccgcaggccgagcaggagaactacctgcgccgccagcttgattcgacgtactgctacccggttatcggctgcttcgatgaccagccgttcggctattttgaactctactgggcggcagaagatcgcattggccgccactatcgctggcagccgtttgaccgcgggctgcacatgctggtgggtgaagaaaactggcgcggcgcgcaatacatccgcagctggctgcgcggcctcagccactatctgtatctcgatgaaccgcgcacggcgcgcattgtggcggaaccgcgcttcgacaaccagcgtctgttccgccatctggcgtccgccggtttcgacacggtgaaagagttcgacttcccgcacaaacgctcccgtctgatcatgagcgagcgtcatcacttcttccacgaggtggaactgtga

SEQ ID NO: 114245 - DNA, 1743 bp, Enterobacter cloacae
atgcgtactctgccccgctccgccggtacagatgttgcggcccagtgttttttgaacgcgctgctgcgcgaaacgaaggactggcattatcttcccgcaacccgtgcggatgagttatcacaggttcatatcccgctctccccaacccaggccattcgggttccggtacgctatttctcccccacgcagcatcaccagtatcgttttccggcaacgctgattcaggccgacagcgacggcggtgacacggtcacatttcatcaactgattgatttcattcttcaaaaagagacggtaaaaggcgagctggatgccgatacgctggctcgctttaagcagcgcgtcctggaaagccatacgcacacctggcaggccattgatttacgccacaactgggcaaacctgcgcgataagccgctgacgtttgccgaagcggaacaggcgctgctggtcggccatgcttttcatcctgccccaaagtcgcacgagccgttcaacgaggccgaggcgcgtcgctatctgccggatttcgcctcccgcttcccgctgcgctggtttgcggttgagcatgagctgattaccggcgacagcctgaatgtctccctgcgggaacgtctgctgcgctttgcagcgcagagcgcgccggcccttctcggtcacttcaccgacacctgctggatgctgccgatgcacccgtggcaggccgactatctgctggagcaggactggtgccagcgtctggtagaaaaaggcgccctgcgcgatctgggcgaagccggtgcgcaatggctgcccaccagctcttcccgctcgctgtacagtgaaaccaacagcgacatgattaagttttccctgagcgtgcggctgaccaactccgtgcgcacgctgtcggtgaaagaggttaagcgcggcatgcgcctggcgcgactggcgaaaacggcacgctggcaggaacttcaggcgcgctacccgaccatgcgcgtgatgcaggaggacggctgggcggggctgtgcgatgagcacggcgtcgtccaggaagagagcctgatggccctgcgcgtcaacctgctgttcgatacccctgaaacgcaaaccaacgtgctggtgagcctgacccaggccgcgccggacggcggcgacagcctgctcgccgcggcggtgcgtcgtctgagccagcgtctggatctcccgctcgcccaggccgcgcgctgctggctggacgcttactgcgaccgggtattgcttccgctgttcagcgccgaggcggactacggtctggtcctgctggcgcaccagcaaaatatcctcgttgagatgcagcaggatttccccgttgggctgatctaccgcgactgccagggcagcgcctggaccgaaggggccgacgcgtggctgaaagaggcaggtgaaaccgaggtggaaaaccgcttcggtgagagccagctgctgcgctacttcccttattacctgctgctgaactctacccttgccgtcaccgccgcgctcgccgccgccggcttcgacagcgaagagaacctgatgtcccgcgtgcgtgacgcgctggccgaactgcgcacgacggcgaagcagacccgctgcctcgattacgtgctcgacagcccgacctggaactgcaaaggcaacttcttctgctatctgcacgatcgcaacgaaaacaccatcgtcgatccggcggtgatctatttcgactttagcaacccgttttataaggagaaggcgtga

SEQ ID NO: 114246 - DNA, 1200 bp, Enterobacter cloacae
atgcgcacccgtactgagaatctcactgacgttgtgacccctaaagctaactggcccctggcactgggcgccggtttattaggtattgggcaaaacggtttgctggttatgctgccgcagctggtctccctgaccggactgtcgctctccgtctgggccgggctgctgatgttcggctcaatgctctttttacccgcatcgccctggtggggacgccagagcgagcggcacggctgtaagatcgttatgctggcctcgctgggcggctatctggcgagctttgtcgtgatggcgctggtggtctgggcgatggcgaacggcgcgctgaatgctctctggggaatggcaggcctggtgctgtcgcgcatgctgtacggcctgacggtatcagggctggtgcctgcggcccagacgtgggccattcaacgcgcggggctggataaaaggatggcggcgctggcgacgataagctctggccttagctgcgggcgtctgctgggaccgcccctggccgcgctgatgctcagcgtcagcccggtcgcaccgctctggctgatggcgctggcgccgtttatcgcgctgctgctggtgctgcgcgaagccgccgatcccccgctgccgccggtggtgcaccagtcgacgcggttacaggcctccatgctgcctttcctggtgctggcactgctgctggcggcgctggtcagcctgatgcagcttggtttatcgccgcatcttcacccgttatttaatggcgatgccgtgcaaatcagccatcctgtcgcgctgctgctgagcctggccgcgctggcgaccctggcggcgcagtttctggtggtacgcccgcagcattttaccccgagagttttactcttaattgccgcggtcttgatggtggcgggtcttgggctgatgtgtctcgccagtttagccctgttctacgtgggaattgtcatcacttcgctgggggccgccatggcaacgccgggataccagcttttgctcaacgatcggctgacgacgggcaaaggcgcaggggtgatcgccaccagccatacgctgggatacggggccagcgcgctgctggtacccgtggtgacgcgcttttacggtgagcagtttttgattactgccgcatggggaatggcgctgctgtttctcgcggtgagcgtgtgggtacgatcgaccgatcgtaccccttaa

SEQ ID NO: 114247 - DNA, 798 bp, Enterobacter cloacae
atgattaagtggccctggaaaacgaacgacgctggtcgaaatatggcgctgccctgggatgaggctctggcgatccccgtgctggcgaatctcttgcctgaagagcaatcaaagctgattcagctagccgagcgttttttacagcaaaaacggctggtaccgctacagggcttcgaactggatccgcttaaaaattcccgcatcgccctgctcttctgcttgccggtgctggagctgggtatcgaatggctggatggcttccacgaagtgctgatctacccggcgccgtttatcgtcaatgatgagtgggaggatgacatcgggctggtgcacaaccagcgtatggtgcagtccgggcaaagctggcagcaagggccaatcatcctcaactggctggatattcaggactcgttcgatgcctcgggcttcaacctgatcattcacgaagtggcgcataagctggatacccgcaacggcgatcgcgccagcggcgtgccgctgatcccgctgcgtgaagtcgcgggatgggagcacgacctgcacgcggcgatggaaaacattcaggatgagatagacctggtgggtgaaagcgcggccagcattgatgcctatgccgcgaccgatcccgccgagtgttttgcggtattgtccgagtatttctttagcgcacctgagcttttcgctccgcgcttcccggcgctgtggcagcgtttttgccagttttatcagcaggatccgctccagcgtctgcggcaaagtgaggacgcagccagcacctcccctcatccgttccactaa

SEQ ID NO: 114248 - DNA, 903 bp, Enterobacter cloacae
atgcccgtcaattttgacctcaacgatctctatgccttccgcgctttactggaatatggcaatttccgtcttgcggcggagtctatctgcctttcccagtcggcgttgagtcgcagaattgaaaagctcgaggcggcactggggacaaaactgttcgacagaaccacccggcgcgtcacgctgaccctgtatggacagacctttgccgaccgatgcggacagctgcttgctgatgtggagtccatgctttcggatatcgataaggccagcgaggagcgtacggggctaatcaccgtggcgacggtgccgtccgccgcctgttactttatgccggatgttatccgccgctttcagtcccgttacccccgcgtgcgcataaaactgatcgacagcagcgccggaaatgttatcgaggccgtcacccgcggacaggcggattttggtatctgctttgcccggagtttgcagcccgacatcgagtttgtcccgctggtggaggatgtctacgtggctgcctgccggcgcgacagcccgcttgcaaaaagaaaaagcctgacgtggcaggctttttatcagcaggattatatcggtctggataagacctccggcaaccgcaatcttctcgaccagcgggtcgggcatattcggcctgaaagccccagcatctgcgaaacgcggcacgtgacgaccatgctggggatggttgaagccgggatcggcattgcggccgttcccgccatgtcaatgccccgcgcagagcattcgctgctgacgtcggtgcccttaaccgagcctgaagtcaggcgaaccgtggggctgatccgccgccgcgggcggatccagtcctatattgctgccgaactcgaaacgctgatcaccgagcagtatcgcgaggtgcactga

SEQ ID NO: 114249 - DNA, 789 bp, Enterobacter cloacae
atgcttacattcagaacggtgattgccgccctgaccttcgccaccctcagcgcgggcgcgcttgcgcaggatgtgacggtgatgatttctggcggcttcaaagcggcgctggagaagctgacgccgcagtacgaagcgcaaagcggcgacaggctcattgtgatctccggcccgtcgatgggcaaaacgccgcaggccattccggcccggctcgcccggggcgaaaaagcggacgtggtgattatggtgggcgatgcgctggcgaaactggaacaggatcgcaggacggcggcgggctcccgcgtggagctggcggattcgcccgtcgggatggtcgtcaaagcgggcgcgccggtgccggatatcagtacggtgcccgccctgcggcaaacgctgctgaaggcgcattccatggcttattccgacagcgccagcggccggtatgtagagagccagctgttccgtaagctgggcatcgacggccaggcccacgataaagcgcaccgggttgagcgtatcccggtggcgtctgaagtggcaaaagggaaatacgatctcggctttcagcaggtgagcgagcttctgccggttccgggggtgacgtttgtcggtaagttgcctgacgacatgcagtacattacccgtttcgccggagccgtaacgcagaaggccgaccatcccgaacagggaaaagcgctgctgacttttctcgcctcgccacaggccgccagcgtcattacggcaacgggcttaacgcccgtcagtgcacctcgcgatactgctcggtga

SEQ ID NO: 114250 - DNA, 1302 bp, Enterobacter cloacae
atggtttcctcaacctcacctgcaacgcttcgtgccaaagcgggcgcgattttccgcgtcacgtcgggcaactttcttgagcaattcgacttctttctgttcggcttttatgccacctacatcgcccatactttttttccggcaagcagtgaatttgcgtccctgatgatgaccttcgccgtctttggcgcgggcttcctgatgcgtccgatcggggccattgtgctgggggcttacattgataaagtgggtcgccgtaaagggctgatcgtcaccctgtcaattatggccaccggaaccttcctgatcgtgctgatcccttcttaccagagcattggcctgtgggcgccgctgctggtgctgaccggccgcctgttgcagggtttttcggcaggcgccgagctgggcggggtttcggtttatctggcggagatcgccacgccgggccgcaagggtttctacaccagctggcagtcgggtagccagcaggtcgccattatgatcgcggcggcgatgggatttgcgctgaatgtggtgctgcaagagagtgccattcgcgaatggggatggcgtattccgttcctgtttggctgtctgattgtgccgtttatctttttcctgcgccgcaagctcgaagagaccgaggaattcagcgcccgtcgccaccatctggcaatgcgtcaggtcttcacaacgctgctcgccaactggccggtagtcgtcgcgggcatgctgatggtggcgatgaccaccaccgcgttttacctgatcaccgtttacgcgccgaccttcggtaaaaaagtcctgatgcttagcgcgtcggacagtcttctggtcacgctgctggtggcggtgtccaacttcatctggcttccggtgggcggcgcgctgtcggatcgcttcgggcgtaaaccggtgctgatcgccatgacgctgctggcgctggcgaccagctatccggcgctgacgatgctggccgcagccccgagcttctcaatgatgctgaccgtgctgctgtggctctctttcctctacggcctgtataacggcgcgatgatcccggccctgacggagatcatgccagcagaggtgcgcgtggcgggcttctcactggcttacagcctggcaacggcggtctttggcggtttcacgccggtgatttcgactgccttaattgagtacaccggcgacaaagcctccccgggctactggatgagctttgccgccgtttgcgccctgctggcaacgctttatctctatcgtcgtcgcacgttaatcctgcaaactgccgttaaggagtga

SEQ ID NO: 114251 - DNA, 1296 bp, Enterobacter cloacae
atgaaaatcaaaacaaaccgcacgctgctcgcggcgctggttgtcagcagcctgctctcgcccgctgttatggcggcctgcaacggtaccgacctcaccacctgtccggcgcctttcgacgccagactcccggacgcacataccatgctcacctggagccaggccgatcgcgtggtgggctttcgcaatgactaccgcaactacgcgggggatgtgttccgccacggcaacgctacgccgctgctacccgcagaaaaaccgctcaccgatgcccgctatcaggtgaagggtaagagttacactcttcaggattacctgaaacgccagaacgtcagcggcatgctggtgctgaaaaatggcaaagtggcctataaatacctgggagaaggcaataccgactcaacgctctggacgtcgcgctccgtgggcaaatccgtagtctccgcgctggtgggtgttgcaattaaagaagggaaaatccactccctggacgaccttgtcacccaatacgaacctgatttaaaaggcaccgcctgggagggcgtaacgctaaaacagctcatcacccacacctctggcgtggcgtggaacgaagattacaccaacccgcaatctgacttcgcccggcttaccgaatgcgaagcgaagccgggcacctacaactgcgtgcgcaccctggtgaaggggttacaccgtgaacacccggcgggcgaaaactggtcctattcctcgggtggcgcctggctgttaggcgatgtgcttgagcgcgccaccagcatgacgctcgcggcgtatctggagaagaccatctggcagccgtacggcatggcgagcgacggcgtgtggcatgcctacagcaaaggccagcacgacgtgggtgcgcatgggttcaacgccacgctggaagactgggggcgtttcgggaagtttatcctgcataacggtacgctgccggacgggaagcagatcctccccgagggctgggtgaaacagtcctcagcctggacacaggccaaaggatcggtgtccgacgcgcatccgaaggggttatacggctaccagtggtggaacaacgaagtaccagccaccgccacacacgtggagccgaaagtcgaaaattcgctgaaggattccctgtgggcgctgggtatatttggtcagatgatcatggttaatcagaaagaaaatctggttatcgtccagtggtccacctggccgcaggcagagccgtcattcagcgcccagccgctggaagcgtcgctgatgtttagcgcgattgcgaacgcgctgcgctga

SEQ ID NO: 114252 - DNA, 933 bp, Enterobacter cloacae
atgggggaaaatcccccggaaaatcgcgtggagaatgacgtggcatcactgatctattcctttgcccagcttgaggcgttcaccgccgtcgctgaacacggcagcctgatgaaggcggccagtaaactcggcaaagatcgtactaccctgcgggatctgatcgattttcttgaggatgggctgggctacgctctgttcctgcgggaggggcgcagcctgcgcctgacgccggagggggagcagcttcagcggcaggcacacctgctgatgcggcaggtcaaagcgtttgaggcgtttgccagatcggtaccggacagcgcgacgcaggacatcgccctcgtttacgatccgttcacccccagagcttttttacaggcgctgattgccacactggcggcgaaaaagatccgcctgagcctgaccagcgcatcgcgcgatgaggcggaagcgatgctggcaaacggtcaggccgatctggggatctgccaggcgcgcaaccgcagcgtaggcaatgagatggagtggcgggcgctgggggcgatcgaaatggatttttacgctgcaacggcgctttttgcggaggttgcgtcgccggtgtcgctgctcgctctctctctggtgccacaggtgattatgcatgccgcatcagacgagccggtcgcccgtcgcctgcaaatttcagggcacacgcttttcactaacgaactggagatgctgcgcggcctgctggagcagggctgcggctgggggtttttgccgacccatcttcaggcaacgcagtggaaaaatgtaaaaaggctgcccaccgaagtgggcagccagggaataagccagacgatggtcactatctggaagccgggcagcgacaagcgcgggttgatcaacgatacgctgttgctgcttccggcgttatggaaacgctcagcgctgtga

SEQ ID NO: 114253 - DNA, 1650 bp, Enterobacter cloacae
atgtcaaacaaaccctttatctaccagaaccccttccccctcgcgcatgacgacaccgaatattatctgctgaccaaagagcacgtttccgttgccgagttcgacggtcaggaagtgctgaaagtcgagccagaggcgttgaccctgctggcacagcaggccttccacgacgcggcatttatgctgcgcacctctcaccagaagcaggttgcggctattctgagcgacccggaagccagcgagaacgataagtacgttgccctgcaattcctgcgcaactccgagattgcggcgaaaggcgtgctgcccacctgtcaggataccggtacggcaatcattatgggtaagaaaggccagcgcgtctggaccggcggcgacgacgaagcggcgctgagtcagggcgtgtataatacctatattgaagacaacctgcgctactcgcagaatgcggcgctggatatgtataaagaggtgaacaccggcaccaacctgcccgcgcagatcgacctctacagcgttgatggtgacgagtataaattcctgtgcatggcgaaaggcggcggttccgccaataaaacttatctgtatcaggaaaccaaagcgctgatcaccccggcgaagctgaaaaattatctggttgagaagatgcgaactctgggtaccgcggcctgcccgccttaccatatcgccttcgttatcggcggcacctcagcggaagccacgctgaaaaccgtcaagctcgcctctgcgcgctactacgatggcctgccaaccgaaggcaatgcgcacggccaggcgttccgcgacgtccagcttgagcaggaactgcttcaggaagcgcaaaacctcggccttggcgcgcagttcggcgggaaatacttcgcgcacgatattcgcgtgatccgtctgccgcgccacggcgcctcctgcccgatcggcatgggggtctcctgctccgctgaccgcaacatcaaggcgaagattaaccgcgaggggatctggattgagaagctggagcacaatccgggccagtatattcctgaatccctgcgccagcagggagaaggcgacgtggtaagcattgatctgaacaagccgatgcccgacattctggcgcagctttcctcgcacccggtatccacccgcctgtcgctgagcggcaccatcatcgtggcgcgcgatatcgcccacgcgaagctgaaagagctgctcgacaacggggaagaactgccgcagtacgttaaagatcacccgatttactacgcaggcccggcgaaaacgccagaaggttacgcgtctggctccttaggcccaaccaccgccgggcgtatggactcctacgtggacctactgcaatcccacggtgcgagcatgatcatgctggccaaaggtaaccgcagccagcaggtcaccgacgcctgccataagcacggcggcttctacctcggcagcatcggcggcccggcggcggtgctggcgcaaaacagcatcaagagcctggagtgcgtggcgtatcctgaactgggaatggaagcgatctggaaaattgaagtggagaacttcccggcgtttatcctggtggatgacaaaggcaacgacttcttccagcagatccagaataaacagtgcaaagggtgctcacagcgctga

SEQ ID NO: 114254 - DNA, 1437 bp, Enterobacter cloacae
atgatggctttgcccgtcattgttgccgtcctgctgttgtttgtccccgttccggaagggctgccgccttatgcgtggcactacttcgccatctttgtcggcgtcatcgtcggcttaattttcgaaccgctgccgggcgccgtgatcggtcttaccggcgtcgtggcgattgcgctgtgcagccagtgggtgctctttagcccggaacagctggctgacccaaaattcaagctggcgggcgcctcctttaaatgggcggtcagcgggtttggtaactccaccgtctggctgattttcggtgcctttatgttcgccgcaggctacgacaaaacccgcttcggccgccgtctggcgctgattctggtgaagtacctgggccgtcgcagcctcacgctcggttacgccattacgtttgcggacctgctgctggccccgttcaccccgtccaacaccgcgcgcagcggcgggaccatctacccgatcatcgccaacctgccgccgctgtacggttcaaaacccaatgacccaagcgcgcgcaaaatcggttcgtatctgatgtgggtagccatcaccgcggcctgtatcaccagctcgatgttcctttccgctttggcacctaacctgctggcgctggcgctggtaaaaagcacggtcggaattgatatctcctgggggacctggttcctcgccttcctgccgctgggcatcctgctgatcctgaccatgccgctgctggcttactggttctacccgccggaagtgaaggtaaacaacgaagtaccgctgtgggcgacccgtgaactggaaaaactgggcaaactgtcgcgcaatgagatcctgctgctggtgttcgtgtgctgtgcgctgctgatgtggatcttcgccgcggcgtggattgaaccggccatggctgccctgctgatcgttggcctgatgctgtggaccggcgtgctggagtggaacgatatcaccggtaacaaagccgcgtggaataccttcgtctggttcgccaccctggtggcgctggcggatggcctctcctccaccggttttatcagctggctgggtaaagaaggcggcctgctgatgagcggtatttctccgggtgtcgccaccatcgtgctgctgctggcgttctacctgctgcactacctgttcgccagcaccaccgcgcacaccacggcgctgctgcctgcgatgctgaccatcgcctccaccattccgggcatgaatatggaagtgttcgttctgctgatggtgacctcgctgggcgtgatggggatcattaccccctacggtacgggtccaagcccgatttactacggtagcggctacctgccaaccaaagattactggcgcctcggtaccatcttcggtgccatcttcctggcagctctgctgctgattggttacccgtggatgtccatgatgttctga

SEQ ID NO: 114255 - DNA, 2781 bp, Enterobacter cloacae
atgagcactaacgaacgtattttaagccccttcacattaccgaatggtactgaactgaaaaaccgtttgttaatggccccgatgacaacctgtaccggttattacgatggcaccgtgaccagcgagctggtggagtactaccgcgcccgcgcgggcagcatcggcaccatcatcgttgagtgctgttttgttgacgatctcggcctggcgttcccgggcgcaattggtattgataacgacgagaaaatcgccgggctggcaaaaatcgctgacgctatcaagtcaaaaggctccaaagccctgctgcaaatctaccacggcggtcgcatggtcgacccaaaactgatcggcggtcgcacgccggttggcccaagcgccgttgccgcgccgcgtgacggtgccgccacgccggttgccctgaccgcggaagaggtggaaggcatgatcggcaagtttggcgaagccgtgcgccgcgcaattcaggccgggttcgacggcgtcgaaatccacggggcgaatacctatctgatccagcagttcttctccccgaactctaaccagcgcgacgacgagtggggcggcagccgcgaaaaccgcgcgaaattcccgctggcggtgctggacattacccacaagatggtgcgccagtacgcggacgacgcgtttatcattggctaccgtttctctccggaagagcttgaagtcccgggcattcgcttcgaagacaccctgtatctgctggaaaaactggccgcgcgcggggtggattatctccacttctcccttggcgccgccctgcgtccttctatcgtcgatactcaggacccgacgccacttatcgaaaaatactgcgccatgcgctctgacacgctggcgcaggtaccggtgatgggcgttggcggcgtggtgaatgccacggatgtgaatgaagcactggatcacggttacgacctgattgccgttggccgcgccaccatcgcctatccggactggaccgatcgcatcgcggcgggcgaaagcctggagctgtttatggacagcacccgacgcgaagaactgagcatcccggaaccgctgtggcgcttctcgctggtggaagcgatgatccgcgacatgagcatgggcgaatctaaattcaaaccgggcacctttattgaaaaagtgcaggacgatgctaacgaactggtgattaacgtcagcctcgaaaccgaccgcatcgccgatatcgaactggcctccggcccgagtgaagacgtggagtttgtcaccagcttcgaagagatccgtacccgtattctggatgccaacaccccgcacgtggacgcgattacgggcgcgaccagccagagcgaggcggtgaaaaaagcggtctcgaaggcgatgctgaaatccagcaaagcgctggcggcggaagagggcgcagacccgaatgagactaaaagcgtggatgtggtggtggtcggcagcggcggcgccggtctggcagcggcgattcaggcgcatgacgaaggcgcgagcgtgctgatcgtcgagaaaatgcccaccatcggcgggaacaccattaaagcctcggccgggatgaacgcggcggagacccgcttccagcgcgtgaaaggtattcaggacagcaaagagctgttctaccaggaaagtctgaaaggcggtggcaacaagaacgaccctgaactgctgcgtcgctttgtcgagaacgcgccgcaggccatcgaatggctggccacgcgcggcattatgctgaacgacattaccaccaccggcgggatgagcatcgaccgtacgcaccgtccgaaagacggttccgcagtgggcgggtatctgatcagcggcctggtgcgtaacgtcaacaagcgcaacatcgaggtgatgctggatacctccgtgagcgacatcattttcgaaaatggcgaagtgaccggcgtgcgtctgaccaccgaagagaacgaaaccctcaccgtggcaaccaaaagcgtgattgtggcaacgggcggcttcagcgccaacagccagatggtggtgaaataccgtccggatctggcagggttcgttaccaccaaccacaaaggggcgaccggaggcggtatcgcgctgctggagcgtatcggtgcgggcaccgtggatatgggcgaaattcagatccacccaaccgttgagcagaaaacgtcgtatctgatttccgaatccatccgcggcggcggggcgattctggtaaaccagcagggcaaccgcttctataacgaaatgtcgacccgcgacaaagtctcggcgcagatcatcgcgctgccggagaaatacgcttacatcgtctttgacgagcatgttcgcgccaaaaacaaagccgcggatgagtacatcgcaaaagggtttgttaccagcgccagctcgccaaaagccctggcggaagcgctggggatggatcaccaccagttcctggcaacgctggaacgctacaacggctttgtggagaaacagcacgacgatgatttcggccgcaccaccgcgctgcgtgcgccaatcaacgaagggccgttctacgccattcagattgcaccgggcgttcaccacaccatgggcggcgtgaccattaacacagaaacctgcgtgctggacagcaaccacaacgtattgccgggagcgtttgctgcgggtgaggttgtcgggggcatccatggcggtaaccgcatcggcggtaacgcggtggcagatatcattatttttggtacgcttgcaggacatcaggcggctatgcgttcgaaaacacggtaa

SEQ ID NO: 114256 - DNA, 963 bp, Enterobacter cloacae
atgcctgatagccatcgcgtttacagctactccgccgttctgatgggatcgcccatcctcctgaaactcttttcctatgacgaagcgcttgcctctcgcgtgtttcgcctgatcaaacagtacgaagatctgcttaccgttaaccgagcgcactcccaggtaatggacatcaaccatgcggccggtcagcatccggttgccgtcagtcgcccggtgttcgagctgatccgctgcgcgaaagcggccagcctgcttaaagacagcgcctttaacctggcgatcggcccgctggtgaagcgctggaaaattggctttaagggggacgctgtaccgcccgcggacgagatcgccgccttgctgggcatcacgcatcctgcggacgtggtgctggatgaagccaacagcagcgtgttccttactcgccagggaatggagatcgatctgggggccattgctaaaggctatatcgccgacagggtgcgggattacctgcataaagagggcgttgaacttgggctgatcaaccttggcggcaacgtccagacgttaggctcgccggagggcggctggcgcgtcggcctgaaaaaaccgttcgccggtgacgcgctgattggcgccatgacggtcgaaaaccggtcggtggtgacgtcaggcacctatgagcgctacttcgagctgaacggcaaacgttatcaccacatacttgacccacgcaccggctacccgctggataacgaactggacagcgtgacgattatttcgccagactccctcgacggcgatatctggaccacgctgatctacggcatgggcgtggaaaagggctgcgccgcgctgcgttcgcgccccgatattgaagccatctttgtcaccaaaacaaaagaagtggtgatctcctcgatgcaccacttccgttttacccttctggacgacagctaccgaattactggcagtactgtttga

SEQ ID NO: 114257 - DNA, 720 bp, Enterobacter cloacae
gtgataaatgtgttaattgtcgatgatgacgccatggtagccgacctcaaccgtctgtatgttaaccgcgttgagggttttagctgctgcggcgtcgcttccacgctcaaccaggccgaggcgttgatcgccaacccaggccagccgatcgatctggtgctgctggatgtctatatgcagcaggataacgggctggatctgctgcccatcatccgcgcttcgggccgcccgattgatgtcatcatgatctcgtcggcctccgacgccgcaacgatccagacctcaatgcactatggcgtggtggattacctgattaaaccgttccagttcccgcgttttgaagaggcgctgaacggctggaaggcaaagcgcagcctgatgggatcgcatcagtattatgaacaggccgacgtcgacaggctgatccacggcggcgcgccggagctggccgacagcaaaaaattaccgaaaggcctgacgccgcagacgctgcgcaccatttgccagtggatcgacagccatccggagatagaattttccaccgacgatctggcgaatgcggtcaacatttcccgcgtctcctgccgcaaatacctgatctggctggcgcaaattaatatcctgttcaccagcattcactacggcgctaccggccggccggtttatcgctaccgtttgcagccggaacaggtcggcctactcaaacagtactgccagtaa

SEQ ID NO: 114258 - DNA, 1617 bp, Enterobacter cloacae
atgagcgatttgcagcccttccccccgacgcgcaagcgccctatgaagctgaatacgctggttacgctgatggtgtgcgcgattatcggctcggtgctgctggtggtcttcgcgctgtactctgtgcagatcacccgcgccacgcgcgatgacgtgaaagataccgcgctgggtatcgccaggacgctggccgacagcccggagatcaagcgtggcctgatggaatcgccgcaggctggcatcatccagccgattgccgaggcggtgacgaagcgcaacgacctgctgtttaccgtggtcaccgacctgcgtgggatccgctattcccatccaaacgaagcgctgttaggtttgcattttattggcgacgatctgacgcccgccctggaagggaaagagaatgtctccgttaaccgcggcgcgctcgcggaagcgctgcgcgtctttacgcccgtgtatgacgaccagcacgaccagatcggcgtggtggtggtgggtatttcgctgaataaagttgaagatcagattgcccgcgggcggctcaacgccgtgtggaccatcttattcagcgttctgatgagctcagtggcgatatggggtctggtccgggttctgaaacgtatcctctttgggctggagccttacgaaatctcagccctctttgagcagcgccaggccatgttgcagtccctgcgcgaaggcgtgatggccgtggatatgcacgggcgcgtgacgatgattaaccacaccgccagagaaatattactcctgacctcgggccagcactccgaaagcagcagtgaaccgctgctggccagcctgcgcgaagtatccaggaccggcattgcccgccaggatcaggagatcggctgtaacgggcggctgctgctgtgcaacatggtccccgtgaaaagccagaatcaggtgatcggggcgatcagcacgttccgcgacaaaaccgaaatcagccagttaatgcagcgtattgatggcatggtcagctacgttgatgccctgcgctcccatacgcatgagtttatgaataagctgcacgtgatcctcggcctgctgcacatgaagcgctacgataagctggaggagtacatcatccagaccgcgcagaattatcagacggatatcggcgcaatacagcgcaaagttaaatcgccggtcattgcgggcttcctgctgggtaaaattaaccgcgctaaagaggccggagtgaccctgacgctggcggaggagagtcagcttcccgacaccgccaatgaagagcaggttgcggtgctgatcaccgtgctgggcaatttaatcgaaaatgccctggatgcgatggaaggccagccggaaggcgagatcggcctgctgctgcattatcagaacggctggctgagcggtgaggtcagcgatgacggtcccggcattgatcccgagcggctggaggctatttttacaaagggctactcaacaaaaggtgaaaaccgcggcgttgggctgttccttgcgcgtcagcagatccagaatctgggcggagatattaccgtcgagtcggagcctggcgtatttacccaattttttgttcagatcccctgggatagcgagaggaatatcgcgtga

SEQ ID NO: 114259 - DNA, 864 bp, Enterobacter cloacae
atgagcattatgcttaccggtacggccagggaaagacggcacgccagcaccacgaacatcgacagattatcgacgctggatatgcttaacgtcatacaccaggatgacgcgcaaatctcttctgcacttacccctcacttaagtatgctggcccgcgtggtggataacgcggcggcgacgcttagccacggcggacgtctggtactgaccggcgcgggcgcgtccggacgcgtggctgaacaggcggcagaagcgtttgcgccgggaaaacatcccgtcattgcgatgacagcaggcgatcacgccggtagctacgtgcgcggcgttgccgaccttcagacgatagaatttggcgagcatgacatgatgctggcgctgtccgtcagcggcaaaaccccatgggtatggggcgcgatgcgtcatgcgtggtctctgggctcaacggttgcgatcattacggaggatgcgcaaagtgaagcggcgcagctgacgagcatggtcattgctcccgatctgggcgcggatgtggtggccgggtataccaacgctaaagcaggcattgcgcaaagcatgatcctgcatatgattaccaccggtctggcggtacgttccggacgggtgtacagcaacctgcgcgttgatctggaggcaagcaacaccagatgggccgaacgacaaattgccattgtgatggaagcggggggatgtagccgggcgcaggcgaaggccgcgctggaaagctgtaaccaccagtgcaaaacggcggtactgatggtgctgacggggctggatgcctggaaagcacacgaattgctggcgcagaataacgggtttgttcgcctggccttgcaggaagcgccgtaa

SEQ ID NO: 114260 - DNA, 1164 bp, Enterobacter cloacae
atgaaaagaaaagttctggcaattctcgtacccgcgttattaatggctggcgcagtaaatgcggcggaaatgtataacaagaatggcaacaaagttgacctgtacggtaaggttgatgcgcgtcataccttctccgacaacccaggcgacgacggtgatgaaacctatgtacaggtgggtttcaaaggcgaaacgcagatcacgaacgacctgacaggttatggccagtgggaatataaaacctacgctaacgacaccgaaggcgcaggggataaatctttcaaccgtctggcattcgctggcctgaaatatggcgactacggctcatttgattacggccgtaattacggcgtcgtgtatgacgttgaagcctggaccgatatgctgccggtatttggtggagattcttacacctggacggataactatatggttggccgtactaacggtgtggcaacctaccgtaacaatgatttctttggtctggtcgacggcctgaactttgcgctgcaatatcagggaaataatgaaggtggaccaaacgaaaatcaggaaggcaccaaaaatggccatgatgacgttcgtttccagaacggcgacggcttcggtatgtctaccacctatgacttcgatttcggcctgacgctgggtgcggcttattcttcctccgaccgtactaacgaccaggtcgcttacggcgctggcacctataaccgcttcagcaaatatgctggcggtgaacgtgcggaagcgtggacaatcggcgctaaatacgatgctaatgatgtctacctggccatgatgtatgcggaaacccgtaacatgactccgtacggcaacgatggcatcgccaacaaaacccagaactttgaagccgtagcgcagtaccagtttgacttcggtctgcgtccatccctggcgtgggtctattctaaaggcatcgatttgggcggtaacgattatcacccaggcaatggctatgactatgtagaccaggatctggttaactacatcgacgtgggcatgacctacagcttcaacaaaaacttctccacctacgttgattataaaatcaacctgctggacgaagatgatgccttctacaatgacaacggtattgctaccgatgacatcgttggcgtaggcatgacctaccagttctaa

SEQ ID NO: 114261 - DNA, 702 bp, Enterobacter cloacae
atggaacttgcgcagtggcagcaccgttatgagcgctggctcgacgaaaatcattttactgatgatgcggcgcacgatatcgcccattttcgccgcgtctggatgaccgcgcaggccataatggctgacgaggatagcgatccgctggttgtgctgaccgcatgctacttccatgacattgtcagcctgccgaaaaatcacccgcaacgtagccactcctcgcggctggcagcgcgaaaaacgcgcgaaatcctgagtcgcgactttcctgattttccgcccgatcgttatgcagctgttgaacatgctattgaagcgcacagcttcagtgccggtatcgcgccgcaaagtctggaggccaaaattgtgcaggatgccgaccggctggaggcgttaggcgctatcggcctggcgcgcgtctttgccgtgtcaggtgcgctgggcgccgcgctgtttgatgccgacgacccgttcgccggaacacgagcgctggatgataaagccttcgcgctcgaccactttcagaccaaactcctgcgcctgcctgacaccatgcaaaccgcgcgggggcgcgaacttgcgcgtcacaatgccgatttcctaatccagtttatggcgaagctgagtgccgaattacagggcgattacctcggaaccgacagccagatattgacccatttccgtcgcagtgtgcgatcctga

SEQ ID NO: 114262 - DNA, 1416 bp, Enterobacter cloacae
gtgactgtgcccgcgcctgagcgggttgagaaatcaacggcagccgtgcaggcactcctgcgtcagctgctggaaatgtatgatgctaaaacgctggcaaaccagctggtggcccatggcgagagccactggagcccggcgatactcaagcggctgctgataagcgacagggcagggcaccgcctgagcgacggtgagttccgctatctgcaaaatttgctgccgcgtcctcctgctgcgcatccaaattatgcctttcgctttatcgatctctttgccggtatcggcggcattcgccatggctttgaagctattggcgggcagtgtgtattcaccagtgaatggaacaaacatgccgtccgtacctataaagccaactggtattgcgatcccgacgcgcaccagttcaacgcggatattcgggatgtcacgctgagccacaaaactggcgtcagcgatgaagaggccgccgaacacattcgcaataccattccggctcacgatgtgctgctggcgggctttccgtgtcagccgttctcgctggctggcgtgtcgaagaagaacgcgctgggacgcgcacacggctttgcctgcgatacgcagggcacactgttctttgatgttgcccggatcattgatgcccgccgcccggcaatttttgtgctggagaacgtcaagaatttaaagagtcatgacggcggcaaaaccttccgcattatcatgcaaacgctggatgaactgggttatgacgtggcggatgcagaggacatggggccggacgatccgaaaattatcgacggcaaacacttcctgccgcagcaccgcgaacgcatcgtgctggtgggcttccgccgcgatctcaatctgaaaggcgattttacgctgcgtgatttgccctcgctgtatccggcgcgccgcccgacggtggccgatctgctggagcccgccgtcgatgcgaaattcattctgaccccggtgctgtggaaatacctctatcgctatgccaaaaagcatcaggccaaaggcaatggctttgggtttggcatggtcaatccgcttaatcctgacagcgtgacgcgtacgctgtcggcgcgctattacaaagatggtgcggaaattcttatcgatcgcggctgggataaggcgctgggcgaaaaagattttgacgatccccagaaccaacaacaccgaccgcggcgcttaacgccgcgcgagtgcgcccgcttaatgggctttgagacgccgcagggctacagttttcgcatcccggtgtcggatacccaagcctatcgtcagtttggcaactcggtggtggtgccagcctttgccgcggtagctaaactgctggcctcacgcatcagcaaggccgttcagcttcgtcagagcgaggccgtcgatggcggacgttcacaataa

SEQ ID NO: 114263 - DNA, 492 bp, Enterobacter cloacae
atggcggacgttcacaataaggccacgcgcagtaaaaacatgcgtgccatcggcacgcgtgataccgcgattgaaaaacggatcgcgggccttctgaccgccgccgggtttgaattcagggttcaggatgccacgcttgccgggcgtcctgatttcgtcatcgacgcgtaccagtgcatcatctttacccacggctgtttctggcatcatcacgactgctatctgtttaaagtcccggcgacacgcaccgacttctggctggagaagattggcaggaacgtcgagcgtgataaacgcgatgtttctcagctttacgctcagggctggcgggtgctgattgtctgggagtgcgcgctgcgtggaagaatgaagctgaatgacttggaactgacggagcggctggaagagtggatctgcggcggcggtcaggccgcgcagatcgatacccagggcattcacccgatcacggtttctccacctcacacctcgtga

SEQ ID NO: 114264 - DNA, 915 bp, Enterobacter cloacae
atgcgtttccggcatttattaccgctcattggagcactcttttccctgtatatcatctgggggtccacctattttgtcattcgtataggcgtggaaagctggcccccgctgatgatggccggtattcgtttccttacggccggcgtgctgctgatggcgtttttattgctgcgcggccacagactaccgccgctgcgtcccctgcttaacgccgccctgattggcctgctgctgctggcggtgggcaatggcgcggtaaccgtcgccgaacaccagaacgtgccgtcgggcatcgccgcagtggtcgtcgcaaccgtgccgctgtttacgctctgctttagtcgcctcttcgggatccgcacccgtaagctcgaatggctgggcatcgcgattgggcttgtgggtatcatcctgctgaacagcggcggtaacctgagcgggaacccctgggctgccgttctgatcatgatcggctccatgagctgggccttcggctcggtctacggttcacgcatcgagctgccctccgggatgatggcaggtgcgattgagatgctcgcggcgggcattgtgctgctgatggcctccgcgttgacgggtgaaaaactgacggcgatgccagacctttcaggtttcctggccgtcgggtatctggcgctgtttggctcgattatcgccatcaacgcctatatgtacctgattcgcaacgtctcaccggcggttgccaccagctacgcctacgttaacccggtggttgccgtgctgctgggtaccggttttgcgggcgaagtgctgtcgacgattgaatggctggcgctgggtgtgattgtctttgccgtggtactggtcacgctgggtaaatatttgctgcccgcgaaaccgattgtcacgaggtgtgaggtggagaaaccgtga

SEQ ID NO: 114265 - DNA, 912 bp, Enterobacter cloacae
ttggcaggaagtagcttattaacattactggacgacatcgccaccttgctggatgacatttcggttatgggaaaactggcggcgaaaaagaccgccggggtactgggagatgatttgtcgcttaacgcgcagcaggtcagcggcgtgcgggcgaaccgtgagttgccggtggtgtggggcgttgcgaaagggtcctttattaacaaggtgatcctcgttccgctggcgctgctgattagcgcctttataccctgggccattacgcccctgctgatgattggcggggcgttcctgtgcttcgagggtgccgaaaaagtgttgcatatgttcgctgcacgcaaagagaaagacaccccggaaatgcgccagcagcgtctggaagcgctggccgcgcaggatccaaaaacgttcgagcgcgataaggtcaaaggcgcgatccgcacggactttatcctctcggccgagattgtggcgattacgctggggatcgtctcagatgcccctctgatgaaccaggtgctgatcctgtccggcattgcgatcctcgtgacgataggggtttatggcctggtcgggctgatcgtcaagctggacgatatcggcttctggctggaaaaaaaatccagcgcaattgcgcgcggcattgggaaaagcctgctggtgctggcgccgtggctgatgaaaaccttgtcggtggtgggaaccctggcgatgttcctggtcggcggcggaattatcgtgcacggtgttgcttcgctgcatcacatgattgaacattttgcgtcaggccagggagcggtagttgctgcaattctgcccacactgcttaacctcgtactgggctttatcgtcggtctgattgtggtagccgttgttaagctggttgaaaaagtacgcgggaaatcgcattaa

SEQ ID NO: 114266 - DNA, 183 bp, Enterobacter cloacae
atggtctttttgatcagtgatgaagttaagcctaaaaatggtggtccaggcatgatcgtcaccgggtattccagcggaatggtggagtgtcggtggcatgatggatacggcattaagcgggaggcttttcgcgaagacgagcttcagcctgctaataaaaggcaaaaacgcgacaaggcttaa

SEQ ID NO: 114267 - DNA, 1701 bp, Enterobacter cloacae
gtgcagcacgatacctttgttgtaaaacaatcttttttgcagtggctgcataagcgtagcaatccccgtttgattgttaacttctgttttatcgttgtcctgatcttttccaccctcctgacctggcgcgaagttgtggtactggaagatgcttatatctccagccagcgtaaccatctggaaacggttgccagtgcgctggacagacagcttcagttcagcgtcgataagatattgttttttcgccacagcatgcgtgatgcgctggaaacgccgctggcgtttggcgtgctgcatgatgcggtaaagcgttttgcgcatttgcgcacgtcccccagctggcaaattgcggttgataaacagcgcacgttaccgatcaacggtgtttcggatgccttcgttgaaaagacgacccttctgaaccgtgatgatgagtaccttgataatgaactgtccgccgcgcttgaagtggggtatttgctgcgtctggcatccagcccttcccgcaacgaagagcgcgtgatttatgtctctcgcgccggattctttctggaaacggatacgccgggaaattccagcgatatcgtgcagcgctattaccatctggtcactcagccctggtttacccaacagtccgagcgtgaaaaccgtgcgcgtgccgtgcgctggtttatctcgccgccttccacctttgtcggcaaaaagccgctgatcaccgccagcgtgccggtttattacaatcacgtctggtatggcgtggtggcgatggatttcacctttgccaccctgcgtcgcctgctggtggaagccgtgggcgataacccggaaggggaataccaactgtatgacagtcggcttactcagcttgcaacgtctgaatcaccggctgcggacgttaatcattttgacgcgcgcgaattagcgcagatagcgcacgcgatagaatcggattccgaaggcggcattcgcctggggagtcgttttgtcagctgggagcgtctcgaccattttgatggcatcgtcctgcgcgtgcacaccctggatgaaggggtgcgcggtgatttcggcagcatcagcattgtgctggcattgctttgggcgctgttcaccgcgatgctgctcatctcatggctggtgatccggcgcatggtcagtaatatgtattcgatgcagaactcgctgcaatggcaggcctggcacgaccctctgacccggctgaataatcgtgggtcgctgttcgagcaggcgaaaatgctggcgaagcagtgtgaacagcagtcgctgcctttatcggtcattcagatcgatcttgattgcttcaagagcatcaatgatcggttcgggcatcaggcgggtgataaggtgttgtcccatgccgcgggtctgattgtcagcaccctccggactaaagatattgccggacgcgtcgggggcgaagagttctgtgtggtgctgccgggcatgacgcttgaagaggcggcggaagtcgcagagcagatccgcgagcgtatcgacagcaaagagatcctgattaagaaaagtaccaccctgcgcgtaagtgcgtcgtttggcgtctctggcgcgcaggagaagggcaattatcacttcgaaaatctgcaatccaccgccgatgcgcgtctgtatgaggcgaaacagcgcgggcgtaaccgggtcatctggcaggatcacgtcaaaaagtaa

SEQ ID NO: 114268 - DNA, 801 bp, Enterobacter cloacae
atgccttcgtttgaggagactctgcttgtttttaccgacctcgacggcacgctgttggattttcacacactcgactggcggcctgcggccccctggctggaaaagttaatggatgaacaggtaccggtcattctgtgcagcagcaaaaccgcgtccgagatggatgacatccagcaggagctggggcttggcgggttgccctatattgcggaaaacggcgcggtgatccagcctgacgtacggtgggaaaacgccgcacggttcatctcagaaaagaagcatgacgatatccggcagtgtattgcccgggtacgtcaggaaatgcatcttaaattcaccaccttcgatgacgtagatgagcgcgtggtcgccggatggactgggctgagttgtccccgctcagtgcttgcgcgtaaacacgaggcttccgtgacgctgatctggcgtgacagtgatgaacaaatggaacgctttgccgccgaactcgcccggcaggggttgaagattgtccagggagcacgcttctggcatatcctggacacctgctgcggcaaagacgcggcggttcactggcttgtggaccagtatcgcctgcacgagggttccgaaccgacgacgctgggcctgggcgacggcccgaatgatgccccgctgctggacagcgtaggctttgccgtcgtggtgaaaggcttcaaccgggagggcgtcagccttaagaacaacgatcccgcccgggtttatcacactcagcacaccgggccgaccggctggtgcgaggggcttgattactttttgacgtga

SEQ ID NO: 114269 - DNA, 228 bp, Enterobacter cloacae
atgaagaccgacaaagagtacagcgacaccattaagcgtgaggttgaagtggatgtcgatgccctgcttgccgccatcaatgaaatcagtgagtccgaagttcatcgcgcggaggataattccgaccgtgtcgtggtcaatggtagggattaccatacctaccgtgaactggctgaagcattcgagctggatatccatgactttagcgtctcggagacgaaccgctaa

SEQ ID NO: 114270 - DNA, 189 bp, Enterobacter cloacae
atgaaggtcaacgatcgggtaaccgtcaaaacggacggtgggccgcgccgcccgggcgtggtgctggctatagaagagtttaatgaaggcacaatgtatctggtgtcgctggaagattacccgctcggcatctggttcttcaacgaactggggcacccggatgggatctttgtggaaacggcggaatag

SEQ ID NO: 114271 - DNA, 624 bp, Enterobacter cloacae
atgtcaacgatcattatggatttatgcagctacacccggctagggttaaccgggtacttagcaagcagaggggtaagaaagagagacatcaacgatgcacacaccgttgaagaactcgcagccgcttgtgacgcccacaagcccggcgtggtgtttattaatgaggactgtttcattcacgaccccgctaacagtcagcacattaagcagatcattaatcagcatcctaagaccctgtttattgtttttatggcgatcgccaatattcatttcgatgagtatttgttggtgcgtaaaaacttattaatcagttcgaaatcgattaaaccagagtcgcttgatgatatcctgggcgattatttgaataaagaagttaagaatgtaggggcggttaacttacccaccctatcattaagcagaactgaatcaagtatgctaagaatgtggatggctggacaagggacaattcagatctcagaccagatgaatatcaaggcaaaaacagtatcgtcacacaaaggaaatattaaaaggaaaattaaaacgcataataagcaagtcatataccatgtcgtacgcctgacagataatgtgacgaatgggattttcgttaatatgcgctaa

SEQ ID NO: 114272 - DNA, 786 bp, Enterobacter cloacae
atgctgcatttcaccagcgatcagtttgttcagtggctcgggatctatttctggccgatgctgcgcatcatggcgctgatctccaccgcccccatactcagtgaaaagtcggtgcctaaacgcgtcaaaattgggctgggcatcgttatcacgattatcgttgcccctaccctgccggcggtggatatcccgatcttttccccgaatgcgatctggattgccctgcaacaggtgatgattggcgtggcggtcgggtttacgatgcagctcgccttcgccgcggtacgaacggcgggtgaacttatcggtttgcagatgggcctgtctttcgcgacgttcgttgacccgggcagccatctgaatatgcccgtgctggcgcgtattatcgacctgctggcgatgctgttgtttctctcgttcaacggccacctgtggctcatctcgatgctggtggacaccttccacacgctgccgattggcgacaacccggtaaacagcaacgcgtttctggcgctggtgcgggctgccgggctgatcttcctcaacgggctgatgctggcgctgccgatcattaccctgctgctcaccgttaacctcgcattaggtttactcaaccgaatggctccgcagctgtcggtattcgtcatcggctttccggtgactttgacggttggccttttattaatgtcattattgatgccacttatagcccccttctgcgagcatttattcagcgagatattcaatctgttagcggatattgtcagcgaacttccacgcaaataa

SEQ ID NO: 114273 - DNA, 270 bp, Enterobacter cloacae
atgacgcctgagtcggtcatgatgatgggcacggaggcgatgaaagtcgcgattgccgtcgccgcgcccctgctgctggttgcgctggtcaccggtctgattatcagtattctccaggccgccacgcagattaacgaaatgaccctgtcgttcatcccgaagatcattgccgtattcgtggcgattatcgttgccgggccatggatgctcaatttgctgctggactatatgcgcaacctgttcaccaatctgccttacatcatcggctga

SEQ ID NO: 114274 - DNA, 738 bp, Enterobacter cloacae
atgcgccgtttgttattccttacgctgacaggcctgggcctgttcgcgccctctgtgtatgcgcaactgccggggctggtttccacgccgctggcgaacgggggacaaagctggtccctgtccgtgcagacgctggtattcatcacctcgctgacctttattccggcgatcctgctaatgatgaccagcttcacccgcatcatcattgtgtttggcctgctgcgcaacgcgctcggcacgccgtccgcgccgcccaatcaggtgctgctgggtttagccctcttcctgacctttttcattatgtcgccggtgatcgacaagatttacaccgaggcctaccagccgttcagcgaagataaaatttccatgcaggttgccctggaaaagggcgcgcagccattacgtgaatttatgcttcgccagacgcgcgaagcggatctggccctgtttgcccgtctcgctaacaccggtgagttacaggggccggaagcggtgccgatgcgcattctgctcccggcgtatgtgaccagtgagctgaaaacggcgttccagattggcttcaccattttcattccgttcctgattattgacctggtgatcgccagcgtcctgatggcgctcgggatgatgatggtcccgcccgcaaccattgccctgccctttaagatcatgctgttcgtgctggtcgacggctggcagctgctggtcagctcgctggcgcagagtttctacagttga

SEQ ID NO: 114275 - DNA, 375 bp, Enterobacter cloacae
atgaaaacccaggcaacactgtccgcgccctccgccgtacccggctcaccgctgctccaggtgagcggcgcgctgttcggtattattgcctttatccttatcgccgcctggctggcaaagcgtttcggtctggcggggaaaacggccggtacccgcgggttgaaggtcagcgccagcaccccgctaggaccgcgcgagcgcgtggtcattgtggaggtggaagatgcacgactggtgctgggcgtgaccgcctccagcattaacgtccttcacacgctcccccctgcgcctgtcacggtggaggctaacgcccaggccactgcggatttccagtccgtaatgaagagtttgctcaagcgtcccgggagatcctga

SEQ ID NO: 114276 - DNA, 414 bp, Enterobacter cloacae
atgagtgacatgaacaatccgtccgatgaaaacagcggagcactggacgatctgtgggctgacgcgttaaacgagcagaaaacgacgccgacgaaaagcgcggcagacgcggtctttcagcagttaggcggcggcgacgtcagcggcacgttgcaggacatcgacctgattatggacattccggtcaagctgaccgttgagctgggtcgcacccgcatgaccattaaagagctgctgcgcctgacgcagggttccgtggtggcgcttgacggtttagcgggtgagccgctggatattctgatcaacggctacctgattgcacagggcgaagtagtggtggtggccgataaatacggcgtacgtatcaccgacatcattaccccttccgaacgcatgcgtcgtctgagtcgttaa

SEQ ID NO: 114277 - DNA, 1005 bp, Enterobacter cloacae
atgggcgacagtattctttctcaggcagaaatcgatgcgctgctcaacggcgacagcgataaaagtgacgaaccgaaaccgggtctgaccggcgatgataatattcgtccctacgatcccaatacccagcgtcgtgtggtgcgcgagcgtttacaggcgctggagatcatcaacgaacgtttcgcacgtcaattccgtatggggttgtttaacctgctgcgtcgtagcccggatatcaccgtcggtgcgatccgcattcagccgtatcatgagtttgcccgcaacctgccggtgccaaccaaccttaacctgatccatctgaaaccgctgcgcggtaccggcctggttgtgttctcgccaagcctggtgttcatcgcggtggataacctgttcggtggcgatggccgtttcccgaccaaagtggaaggccgcgagtttacccataccgaacagcgtgtgattaaccgcatgctgaagctggcgctggaatcctacagcgacgcgtggaaagcgattaacccgctggaagtggagtacgtgcgttccgagatgcaggtgaagtttaccaacatcaccacctccccgaatgacatcgtcgtgaacaccccgttccacgtcgagatcggcaacctgacgggcgagttcaacatctgcctgccgttcagcatgattgaaccgctgcgcgaactgctggtgaacccgccgctggagaactcacgtcacgaagatcagaactggcgtgaaaacctggtgcgtcaggtgcagcattcgcagctggagctggtagccaacttcgccgacatctccatgcggttatcgcagatcctgaaattacaacccggcgacgttttgccgatagataaacccgaccgcattattgcccatgtggatggcgtacccgtgctgacaagccagtacggcacgattaacggccagtatgcgttacgcgttgagcacttgatcaacccgattttgaattcgctgaatgaggaacagcccaaatga

SEQ ID NO: 114278 - DNA, 471 bp, Enterobacter cloacae
atgacagactccgctatcaccaaaaaaagcaagcgttccatctggatcccgctgctggtgttgattaccctcgcggcctgcgccaccgcaggctacagttactggcgtatgcagcaggaaccctccagcgcggccgccaaagctgaagcgccgcctccaccggcgccggtcttctacccgctggatacgttcaccgtgaacctgggcgatgcggatcgcgtgctttacgtgggtattacgctgcgtctgaaagatgaagcgacccgtgcacgcctgaacgactacctgccagaagtgcgtagccgtctgctgctgctgttttctcgtcaggatgcctccgcgctcgccaccgatgtgggcaagcaaaagctggtcgatgccataaaacagacgctggcgaccccgctggtaaacggccaacctaagcaggaagtcactgacgttctgtatacagccttcattctgcggtaa

SEQ ID NO: 114279 - DNA, 1215 bp, Enterobacter cloacae
atgatcacactgcaacaactgctgatgaccgacagcgacccgtccggcggcacgctgaccggaaaaggcgctgagggcgcgcaagattttctctctctgctggcgggcgcgttgaccgagaccaccggcaaaggcaaagatgccccgctgacgctggcggacctaaaagcggcgggcagcaagctgtcgacagcggcaaaggaaaaaaacggtgataccacgctccaggccaaaatcgccgaactgctctcccgtcaggagaccctgactggtgaagataccgccgtctccctgcaaagcctcgtctccggcctgaaccccgcagcgaatacggatgcgctgaagacgctgacccagccggaggcgaaaacaaacagcgagaccacgactgaagaagaggagctggccgggttaagcgcgctgatggcgatgttaccgcaccagcagaccaccaccccggtagcgacgcagcctgcgagcacaggggagatcgccccccgagctgccctcccctctgcgctagcccagacggacaacggccagcatcagccgcttagccatgcgttaacgggtcaggaaaaaatgccggttcaggacagcgacacgtcgctgcccgccacggcagccgttacgccagccgtcgccgccgtcgcagagaagcaggacgtagcgagcgcggcgtcgtctgccgccagcccaaccgcgacgctggcgccgatcgtcagtcacctggcgccttcacagcctgccgctaccgttgcgacagcgccggtgttaagccagcctctgggcacgcacgaatggcagcagaatctgagccagcacatcaccctgttcacaaagcagggacagcagaccgcagagctgcgtctgcacccggaggatctgggtcaggtgcaaatttcgcttaagctggatgacaaccaggcgcagttgcagatggtttcgccccacagccacgtccgcgcggcgctggaagcggccctgccgatcctgcgcacgcagcttgcggaaaacggcattcagctttcccaaagcagcgtcagcagcgagggctttgccgggcaacagcagtcctcatccgggcagcaacagcacgcttcgcgttccggccagcatggcgggtttaacgatgagagtgaagagttattgcctgcccctgccgccctgcaatccgccgcgcgcggcagccgtgccgtagacatctttgcctaa

SEQ ID NO: 114280 - DNA, 444 bp, Enterobacter cloacae
atggcgcagaacagtgcgttatcaacgctgaaagatctggctgaaaaagaagttgatgatgccgcattgcagcttggcgcaatgcgacgcgggtgccagcaggctgaagaacagttgaagatgttaatcgactatcagcatgaatatcgcaccaaccttaacaccgacatgacgcagggcattggtagccagcgctggattaactatcagcagtttatccagacgctggaaaaggcgattgagcagcatcgccagcagcttaaccagtggacgcaaaaagtcgataccgcgctgaatttctggcgcgagaaaaaacagcggttgcaggcctggcaaaccttacaggaccggcagattgcagcctcgaccctggcggaaaaccgtctggatcagaaaaaaatggatgagtttgcccagcgcgcatcaatgaggaaaccagaatga

SEQ ID NO: 114281 - DNA, 1371 bp, Enterobacter cloacae
atgaccgctcgccttacgcgctggcttaacacgctcgataattttgaaacgaagatggcgcagctgccatccgttcgtcgttatggacgcctgacgcgcgccaccggtctggtcctggaagccactgggctgcaacttccgctcggcgccacctgcgtgattgagcgtcaggacgggggggagacgcgtgaagtggaaagcgaagtggtcgggttcaacggtcagcgcctgtttctgatgccccttgaagaagtggaagggattttgcccggcgcccgcgtctacgcgaaaaacatcagcggtgacggcctgcaaagcggcaaacagctcccgctcggtccggcgctgctgggccgcgtgctggacggaagcggcaaaccgctcgatggcctgccctcccctgataccaccgaaaccggcgcgctgatcacccaacccttcaacccgctgcaacgcacgccaatcgagcacgtactggataccggcgtgcggccgattaacgccctgctcaccgtgggacgcggccagcgtatggggctgtttgccggctccggcgtgggtaaatcggtcctgctcggcatgatggcgcgttatacccaggcggacgttatcgtggttggcctgattggtgagcgtggtcgcgaagtcaaagatttcatcgaaaacattctgggtgcggagggccgcgcccgctcggtggtgatcgccgcgcctgcggacgtgtcgccgctactgcgtatgcagggtgccgcctacgccacgcgtattgcggaagatttccgcgaccggggccagcacgtgctgctgattatggactccctgacccgctacgcgatggcgcagcgtgagattgcgctggccatcggcgagccgcccgcgaccaaaggctacccgccgtcggtcttcgccaagctcccggcgttggttgagcgcgcggggaacggcatcagcggcggaggctccatcaccgcgttctatacggtactgaccgaaggcgatgaccagcaggacccgattgccgactccgcgcgagcgattctcgacggccatatcgtgctgtcgcgccgtctggccgaagccgggcactacccggcaattgatattgaagcctcgatcagccgtgcgatgacggccttgatcaccgagcaacactacgcccgcgtgcgtaacttcaaacaactgctctccagcttccagcgcaaccgcgatctggtgagcgtcggggcgtacgccaaaggcagcgacccgatgctcgataaagcgattgccctgtggccgcagctggaggcatttctgcaacagggtatttttgaacgcgccgactgggaagattccctccaggcactggagctgattttcccgcaggtgtaa

SEQ ID NO: 114282 - DNA, 708 bp, Enterobacter cloacae
atgtctgatgaactgtcgtggaagcgctggacgcctgacgacctctcccctcccaccgcagagttcacccctgccgttgtgtcgtccgacgagggcgacgccggggcgggcatccccgagctgagtgaagaggaacaacgcgcccagatgctggcccagatgcaaatgcaggcgcacgagcagggcttcaacgccgggatgaacgaaggccgtcagaccgggcacgcacagggctatcaggaagggctggcgaaaggtttagagcagggcatcgagcaggcgcgccagcagcaggcgccgctgcatgcccgcatgcagcaactggtgagcgagtttcagcacacgctggatgcgctcgacagcgtgattgcttcgcgcctgatgcagatggcgctggaggcggcccgtcaggtgatcggccagacgccggtagtggataacgccgcgctgattaagcagatccaggggctgctccagcaggagccgctgttcagcggcaaaccgcagctgcgcgttcatcctgatgatttgcagcgcgtggaagagagcctcggcgcgacgctgagcctgcacggctggcggctgcgcggcgatccgtcgctccatcacggaggctgtaaggtctcggcggatgagggcgatctggatgccagcgtcgcgacccgctggcaggaactgtgccgcctggcggcaccgggagtcatctga

SEQ ID NO: 114283 - DNA, 999 bp, Enterobacter cloacae
atgagtaatacgcttacaggcaccgataagagcgtcatcctgctgatgaccattggcgaagatcgcgcggcggaagtgtttaaacatctctcccagcgagaagtgcagatcctcagcgcggcgatggccaacgtgcgccagatctccaacaagcagctgacagaagtgctggcggagtttgagcaggaagccgagcagtttgccgcgctcaacgtcaacgccaacgaatacctgcgctccgtgctggttaaggcgctgggcgaagagcgcgccgccagcctgctggaagatattctcgaaacgcgcgacaccgccagcgggatcgaaacgctcaactttatggagccgcaaagcgccgccgatcttattcgcgacgagcacccgcagattatcgccaccattctggtccacctcaaacggggtcaggcagccgatattctggcgctgtttgacgagcgcctgcgccacgacgtgatgctgcgtatcgccaccttcggcggcgtccagccagccgcgctggcggagctgaccgaagtgctgaacaacctgctcgacggccagaacctcaagcgcagcaaaatgggtggcgtgagaacggcagcggaaatcatcaacctgatgaaaacgcagcaggaagaggcggttattacggcggtacgcgagttcgacggcgagctggcgcagaaaattatcgacgagatgttcctgttcgaaaacctggtcgaagtggacgatcgcagcatccagcgcctgctccaggaggtggactccgaatcgctgcttatcgccctcaaaggcgccgagcagccgctgcgcgagaaattcctgcgcaacatgtcccagcgtgcggccgatatcctgcgcgacgacctggccaaccgtggcccggtgcgtttgtctcaggtggaaaacgaacagaaggtgatcctgcttattgttcgtcgtctggcagaaaccggcgagatggtgattggcagcggagacgacacctatgtctga

SEQ ID NO: 114284 - DNA, 1683 bp, Enterobacter cloacae
atgagtgcgacagcagcatcgacagcgccacagaataaatcactcgagtggatgaaccgccttcgcgccaaccctaagatcccgttgattgtggcaggcgctgccgccattgcgatcgttgtcgcgatggtcttatgggcaaaaagcccggattaccgcacgctctacagcaacctttctgaccaggatggcggtgccatcgtcacccagttaacccagatgaacatcccgtatcgctttgccgataacggtggtgcgcttgaagtaccggcagataaagtgcacgagcttcgcctgcgtctcgcccagcaggggctgccaaaaggcggcgcggttggttttgagctgctggatcaggaaaaattcggcatcagtcagttcagcgagcaggttaactatcagcgcgcactggaaggtgagctggcccgtacgattgaaaccttaggcccggtgaaaagtgcccgcgtgcacctggcgatgcctaagccgtccctgtttgtccgtgaacaaaagtccccttcggcctctgtgaccgttaacctcgaacctggccgtgcgctggatgaagggcagatcagcgccgtcacgcacctggtctccagtgcggtggccggcctgccgccgggtaacgttacgctggtggatcagagtggtcatctgctgacgcagtccaacaccgccgggcgcgatctcaatgacgcccagctgaaatacgccgcggatgtggaaggccgtctccagcgtcgcatcgaagcgattctgggcccggtggtcggcagcagcaacgtacacgcgcaggtcaccgcgcagattgatttctcgaataaagaacagaccgaagagcagtacgctccgaacggggatgcctcccgcgccgtgttacgctcgcgtcagatcaatgagacggaacaggtcggcggacagtatcctggcggtgtgccgggcgcgctctctaaccagcctgcgcctgccaacgccgcgccaatctccaccccgccggcaaacccgcagaacggtcagcaaacgaatcagcagacgacctcgaccgcgaacagtaccggcccgcgtaacagcagccgtaacgaaacgaccaactacgaagtcgaccggactatccgccataccaaactgaacacgggcgatattcagcgtctctctgttgccgtggtggtgaactacaaaacgctgccggacagtaaaccgctgccgctcacggcggagcagatgaagcagatcgaagatttaacccgcgaagcgatgggcttctctgaaaaacgtggcgataccctcaacgttgtgaactcaccgttcaacccggtggatgagaccggtggcgaactgccgttctggcaacagcaggcgttcttcgatcagctgatgtccgcaggccgctggctgctggtgctgattgtcgcgtggctgctgtggcgtaagggcgttcgtcctcagctacagcgccgtgctgaagccgagaaagccgcgctggaacagaagaacgcgcgtccggacgaggaagaagcggttgaagttcgtctcagcaaagatgaacagatgcagcagcgccgtgctaaccagcgtatgggcgcagaggtgatgagccagcgcattcgcgaaatgtcagataacgatccgcgcgtcgtcgcgctggtcatccgcggttggatgggtaacgaacatgagtaa

SEQ ID NO: 114285 - DNA, 315 bp, Enterobacter cloacae
atggctatacagggcattgaaggggtactcagtcagttacaggcaacggcgatgaccgcccgtaatcagagcgtggctgaccagccgccgggcgttagcttcgccggtcaactgcatgcggcgctggaccggatcagcgacaagcaaaacgcggcccgtacccaggctgagagatttacccttggcgaacccggcgtggcgctcaacgatgtgatggccgatctgcaaaaagcgtcggtgtcattgcagatggggttgcaggtgcgtaacaagctggtgtcggcataccaggaagtgatggggatgcaggtttaa

SEQ ID NO: 114286 - DNA, 414 bp, Enterobacter cloacae
atgaaaaaagtagcaattgtggctgcgatgctgacgttagcgggatgtgttcaggtagataactatcaggaagtgattaagcacccggtaccttcgcaactggcaggttactggcagtcgaaagggccgcagagcgcgatggtgagcccggaagcgatcgccacgctggtggtgacgccagagggggatacgctggattgccgtcagtggcagcgcgttatcgcggtgccgggtaagatcatgctgcgttcagatgattattacaacgtgacgcgtaagctggatgtctatccgctggagcgtgatggggcggcgctggagtatgacggtatggaactgtacaaggttgaccgtccaacagtggaatgcgcagattacctgagcaagaatccgctggagagtaagcttccgtag

SEQ ID NO: 114287 - DNA, 1488 bp, Enterobacter cloacae
atgcgcaacccaacacttttacaatgttttcactggtactaccccaccggcggtgaactgtggcgagaagtcacggcattagcccccaacctgaacgaaatcggcatcaatatggtctggttaccgccggcatacaaaggggcatccggcggctattccgtcgggtatgactcttatgaccttttcgacctcggtgagtttgaccagaaaggcagcttcgccaccaaatacggcgataaagcccagctgctggaggccatcaacgccttaaaaagcaaccagattgcggtgcttctggacgtggtggtcaaccataaaatgggggccgatgaaaaggaacccgtccgcgtgcagcgcgtggatgctcaggatcgcacccaaatcagcgatgagatcatcgaatgcgaagcctggacgcgttacaccttccccgttcgggccgggcagtattcgcaatttatctgggattacaaatgcttcagcggtatcgaccacattgaaaaccccaatgaggacggtatcttcaaaatcgtgaacgactacaccggcgaaggctggaacgatcaggtcgacgacgagatgggcaatttcgattacctgatgggtgaaaatatcgattttcgcaaccatgcggtgacggaggagatcaaatactgggcgcgctgggtgatggagcaaacccactgcgacggcttccgcctggacgcggtaaaacacatcccggcctggttctataaagagtggattgagcacgtccaggaggtggccccgcagccgctgtttattgtggcggaatactggtctcacgaagtggataaattgcagcactacatcaatcaggtggacggtaaaaccatgctgtttgatgcgccactgcaaatgaaatttcacgaagcctcacgccagggacgcgactacgatatgagccagattttcaccggtacgctggtggaagccgatccgttccatgccgtgacgctggttgccaaccacgatacccaacccttgcaggcgctggaagccccggttgaagcctggttcaaaccgctggcctacgcgctcatcctgctgcgtgaaaacggcgtgccgagcgtgttctacccggatctttttggcgccagctatgacgacaccggcggggatggcgagacgtatcacatcgatatgcctgtgattgaacagctccacgagctgatcctcgcccggcagcgttttgcccacggcgtgcagacgctgtttttcgatcatccaaactgcattgcgttcagccgcagcgggactgaggaacacccgggctgtgttgtggtgctgtcgaatggcgatgacggcgagaagacgatctgcctcggggagaattacggcaacaagacctggcgtgattttttaggcaaccgcgaggaaaccgtgaccacggcggcggatggcgaagggacgttcttctgtaacgggggaagcgtcagcgtctgggtgattgaggacgcgctgtag

SEQ ID NO: 114288 - DNA, 372 bp, Enterobacter cloacae
atgagtaacgcaccgcaactttatgccctttatcagcaactccttgagcagagccagttgatgttgcgactggcccggcagggactatgggatgatctgatcatctgtgaaaccgactatgttaatgcggtgcactcactggctcgtctcactcaggaaagtgaaccttcgatgcagattcaggagcagcttcgcccgacgctgcgggtgatcctggacaacgaaggccaggtaaaaacgttgctgcaagccagaatggatgaactggcgaagctggttgggcaatcctccatccagaaaaccgttctctccacctacggtaaccagggcggtcatgtcctggttccgcaaagtaatagcgatattaattag

SEQ ID NO: 114289 - DNA, 411 bp, Enterobacter cloacae
atgtacggcgcaaaaggcacgcaagcctacgcaaagatagaagttgaaagcgcggtgatgagcgccagccagcagcaactggttatcatgctatttgatggtgccctcagcgcgctggtacgcgcgcgtctgttcctagcagacggtaatatcccggcaaaagggttggcactctccaaagcgattaatatcatcgaaaatggcctgaaggtcggattggatgaagagagtaaagacgagttaacacaaaacctgatcgctctctatgcctatatggttcgtcgcctgcttcaggccaaccttcgcaatgatgccagtgccatcgaagaggtggagagtttactgcgcaatattgcggatggctggaaggaggctgcaggtataccaactcttgtccaggacgccgtctaa

SEQ ID NO: 114290 - DNA, 1413 bp, Enterobacter cloacae
atggcaagtatttcatcattgggaatcggttctggccttaagttggcagacattctggatagcctgactgcagcggaaaaagcccagctaacgccgatctcaaaacaacagacatcctatacagccaagctgagtgcatacggcacgttgaaaagttctttggaagcgtttcaaaccgcaaatacagcgttaaacaaagctgatttatttacggctacaactacgacgagcagtagtgacgcattcagtgcaaccacaacaggcagcgccattccgggcaaatacaccatcagcatttctcagcttgctcaggcgcaaacgctgacaactaaaaacacccaacccgacaccaaaacggcaatcgcatcaacagacagtaagatcacctttactccggggaatggtaaagatccggtatccattgatatcagtgcaggaaactcttccttaactgggctccgcgatgcaatcaacaaagctaatgcgggtgtgtcagcaagtatcattaatgttgggaatgggcagtatcgcctttctgtgacctcaactgaaacaggggcaaataacgcggtcagtattagcgttagcggtgatagcacactcaaaagctttttgggttacaacggtaccagcgatgatgccagtaacggcatgacagagagcgtaacggctcaaaatgcaaaactgaagatcaataacgttgatattgaaaacagtagcaacaccatcagtgatgctctggaagacatcacgcttaatctaaacaatgttacgaaagataatcaaacaattactattgccaaagatgcatccaaagctgaaacagctatcaaagcttgggtagatgcttataactcgcttcaggataccttcgcctcattaacaaaatacacagccgttgatgccggaagtgatgcgcaagacacaagtaatggtgcactacttggtgacactactttgcgtacaatccagacacagcttaaaagcatgctgagtaattctgctagtacatcaaacattaagtcactttcacaaattggtattaccagtaacccaagcacagggaaacttgaactagataacaccaagcttgaaactgcactcagcaaagattcatcaggcgtcaaagaactcatcgtcggtgatggcaaaaaaaccggtatcactactgcaatggcaaccaatctgactgactggctatcaactaaaggcattatccaggcagcgaaggatggcgtaagcaaaacactgaacaatttgacggctcaatacaatgctgttagcgagcgaattgataacactgtcgcacggtacaaagctcaatttacccagttggatgtaatgatgacatcactaaacaacaccagcagttaccttacacagcagttcgaaaatacgtcttccaacaagtag

SEQ ID NO: 114291 - DNA, 1539 bp, Enterobacter cloacae
atggcacaagtcattaataccaacagcctctcgctgatcactcagaacaatatcaacaagaaccagtccgctctgtcttcttctatcgagcgtctgtcttctggtctgcgtatcaacagcgcgaaagatgacgctgcgggccaggctatcgctaaccgcttcacctctaacatcaaaggtctgactcaggctgcacgtaacgctaacgacggtatctctctggcgcagaccactgaaggcgcgctgtctgaaatcaacaacaaccttcagcgtgttcgtgaactgaccgttcaggcaacaaccggtactaactctgattctgacctgtcttcaatccaggacgaaatcaaatcccgtctatctgaaattgaccgcgtatctggtcagactcagtttaacggcgtgaacgttctcgctaaagatggcaccatgaaaatccaagttggtgcgaatgatggtgagaccatcagtattgatctcaagcaaattgacgcgaaaacattgggcctctctggcttcaatgttgacggtgctcagaaagttaccgctggtacgttgatcgctgactttggtgcaactggtactgataactattcagtaacttctggcggtacaacttcaacttatcatgttgatgttaaaactggcgctgtaactgatgatgcagctacacctgctgcgcagtatatcgatgctgcaactggtaacttgacaggtgcttccaagacaaccaacactgcggctattgataccactgacaatacgcaagcacaggcaattgctgcattggctgctggcaaggctgatggcgcgaaaatcaattataatggtgttgatcttacacttgtgggtgcagctgacgctaacggcaacgcaaccctgaaagcaaacgttgatggtaaagatgtaacgctcaaagttggtacttctaccgcacctgcaggtactggcgcaaccttcactacgactgattcaatttataccgatgcggcatctggtcaattgactacagctgcatcaacggctaaccgtgaagccaagctgtctgaccttgacctccaaggggccactaaaaccggtagcacactcaaaattaatggcaagcagtacgacgtggattcaactggaaatgtaacttcactgtttactgaccctgctaacccaacgggtccacagatttcagaagatgtttatcttggtaagacggcagctggtgcaacaactctgatcagtgctgatgctgcaaaatctcaacagtctactaatgatccactgaaagcattggatgatgctatcgctcaggtagacaaattccgttcttcactgggtgctatccagaaccgtctggattctgctgtaaccaacctgaacaacaccaccaccaacctgtctgaagcgcagtcccgtattcaggacgccgactatgcgaccgaagtgtccaacatgtctaaagcgcaaatcgttcagcaggccggtaactccgtgttggccaaagctaaccaggttcctcagcaggttctgtctctgctgcaaggctaa

SEQ ID NO: 114292 - DNA, 720 bp, Enterobacter cloacae
gtgaattcactctataccgctgaaggtgtaatggataaacactcgctgtggcagcgttatgttccgctggtgcgtcacgaagcattgcgcctccaggtgcgtttgccggcgagcgtggaactggacgatctgctacaggcgggcggtatcgggttattgaatgcagttgaccggtacgacgctctgcaaggaacggcatttacgacttacgcagtgcagcgtattcgtggtgcgatgctggacgagctgcgcagccgcgactgggtgccgcgcagcgttcgccgcaacgcgcgcgaagtggcgcatgcgatggggcagctggaacaggaactggggcgcaacgcgacggaaaccgaagtggcggagcgtctgggcatccctgttgaagagtatcgccagatgttgctcgataccaataacagccaactcttctcctatgatgagtggcgcgaagagcatggcgatagcatcgagctggtgaccgatgaacaccagcaagaaaacccgttacaccatttactggaagggaatttacgccagcgcgtgatggaagcgattgaagctttaccggaacgtgagcaactggtgttaaccctctattaccaggaagagctcaatctcaaagagattggcgccgtgctggaggtgggcgagtcacgggtgagccagctgcacagccaggccattaaacgcctgcgcacaaaactgggtaagttatag

SEQ ID NO: 114293 - DNA, 552 bp, Enterobacter cloacae
atgacggtgcagcaatctaaaagacggcctttaagccgctacctgaaagactttaaacacagccagacgcattgcgcccactgtaaaaaattactcgaccgcatcacgctggttcgtcgcggtgaaatcgtgaataagattgcgatttcccgcctcgacacgctgatggatgaagccgcctggcttgaagagcaaaaagagtgggtagcgctttgccgtttctgtggcgatctccattgcaaagagcaaagcgacttcttcgatattatcggcttcaagcaattcctgtttgaacaaacggagatgagtcacggcaccgtgcgtgaatacgtggttcgcctgcgccgcctgggtcagcatttgaccatgcaaaatatctcccgcgatctgctgacgaccggatacctggatgaaaatctggaaccctggttgcccgccaccagtaccaataattaccgcatcgcgctgcgaaagtacgcgcaatataaagtccagatgccgggcgtcataaagcagaaagtccgcgccggaacaacttctgatatatattaa

SEQ ID NO: 114294 - DNA, 801 bp, Enterobacter cloacae
atgaaattagcacttctgggtcgtcaggcgctgatggggatgatggccgttgcgctggtcgcggggatgagtgtgaaaacgttcgcggcagagaatctgctcaacaaagttaaagagcgcggcacgctgctggttgggctggaaggaacctatcctccgttcagcttccagggcgacgacggtaaactgaccggttttgaagtggagtttgcgcaggagctggcgaaacacctcggcgttaaagcctccctgaaacccaccaaatgggacgggatgttggcgtcactggattccaaacgtattgacgtggtgattaaccaggtaaccatttctgacgagcgtaagaagaagtatgacttctccacgccgtacaccgtgtccggtattcaggcgctggtgaagaaaggtaacgaaggcagcatcaagtccgcagcggacctgaaaggtaagaaagtcggcgtcggtctgggcaccaactacgaagagtggctgcgccagaacgtgcagggcgtggacatccgtacctacgatgatgacccgacgaaataccaggatctacgcgtaggccgtattgacgccattctggttgaccgcctggcagcgctggatctggtgaagaaaaccaacaataccctggctgtcgcgggtgatgcgttctcccgtcaggagtccggcgtggcggtgcgtaaaggtaacgaggatctgctgaaagccatcgacggcgccattgctgagatgcagaaagacggcagcctgaaggcgctttctgagaagtggttcggcgcagacgtgacgaaataa

SEQ ID NO: 114295 - DNA, 987 bp, Enterobacter cloacae
atgtcactacagaatttaacgcgctttccccgtctggaatttatcggcgcacccacgccgctggagtatctgccgcgattttctgactacctggggcgcgatatattcattaagcgtgacgatgtgacgcccatggcgatgggcggaaataagctgcgcaagctggagtttctcgccgccgatgctctgcgtgagggggcggacacgctgatcaccgccggggcaattcagtctaaccacgttcgccagacggcggcagtggcggcgaagctgggactccactgcgtagccctgctggagaacccgatcggcacgcaggcagagaattacctgactaacggtaaccgtttgctgctggatctgttcaacgtgcaggttgaaatggtcgacgcgttgaccgacccggctgcacagctcgacgagctggcgacgcgtctggaagcgcagggttttcgtccgtacgtgatcccggttggcggctcgaatgcgctgggtgccctcggctatgttgagagcgcgctggaaatcgctcagcagtgcgaaggcgcggtgagtttatcctcggtggtggtggcgtccggcagtgcggggacccatgctggtttagcggtcgggcttgagcaactgatgccggaggtcgagctgattggcgtgacggtttccagaagcgttgcggaacagaagccgaaagtcgtcaccctgcaacaggcggtggctgaacagcttgcgcttcaggcgaaggcggaaatactgctgtgggatgactatttcgcgccgggctatggcacccccaatgatgaagggatggaggcggttaagctgctggcccgtctcgaaggtattctgcttgacccggtctataccggcaaggcaatggcgggcctgatcgacggcatcgcccgcaagcgctttaaggatgaaggacccattttgtttgttcatactggcggggcgcctgcgctgtttgcctatcatcctcatgtctaa

SEQ ID NO: 114296 - DNA, 669 bp, Enterobacter cloacae
atgcaagaaagtattcaactggttattgattcgctgccgttcttgcttaagggcgcggtgtttactttacagctcagtatcggcgggatgttcttcgggctggtgctcgggtttgtgctggcactgatgcgcatgtcgaacatctggccggtgcggtggctggcgcggttttacatctccgtgttccgcggaacgccgcttatcgcccagctgtttatgatttactacgggctgccacagtttggtattgagctggatccgatcccggcggcgatgattggcctgtcgctgaataccgcggcgtacacctctgaaacgctgcgtgcggcgatctcctccatcgataaaggacagtgggaagcggcggccagtatcgggatgaccccgtggcagacgctgcgccgggcgatcctgccccaggcggcgcgcgtggcgctgccgccgctgagcaacagctttatcagcctggtgaaagacacctcgcttgcggcgaccattcaggtgccggagctgttccgtcaggcgcagctgatcacctcgcgcacgctggaagtgtttaccatgtatctggcggcctcgctgatttactgggtgatggcgacggtactgtccgctctgcaaaactattttgaaaaccagcttaaccgccaggagcgtgatccaaaatga

SEQ ID NO: 114297 - DNA, 753 bp, Enterobacter cloacae
atgagtgcaattgacgtcaaaaacctggtgaaaaaattccatggacaaacggtgctgcatggcattgatcttgaggttgagcagggcgaagtggtagcaattatcggcccgagcgggtcaggcaaaaccacgctgctgcgcagcatcaatttactggagcagcccgaaggcgggacgatccgcgtgggtgatatcaccattgataccgggaaacccatcagccagcaaaaagggctgattcgccgcctgcgccagcatgtcggcttcgtgttccagagctttaatctctttccgcaccgcacggtgctggaaaacattattgaagggccggtcatcgtcaagggggaacctaaggaagacgcgacggtccgcgcccgcgagctgctggcgaaggttgggctggcagggaaggagacgagctatccgcgtcgcttatctggcgggcagcagcagcgtgtcgccattgcgcgcgcgctggcgatgcgcccggatgtgatcctgtttgacgaacccacgtccgcgctcgatcctgagctggtcggggaagtactgaacacgatccgacagctggcgcaggagaaacgcacgatggtgattgtgacgcatgaaatgagcttcgctcgcgacgttgccgatcgggctattttcatggatcaggggagaatagttgagcaggggccggctaaagcgctgtttgccaatccgcagcagccccgaacccgtcagttccttgaaaaattcttaatgcagtag

SEQ ID NO: 114298 - DNA, 792 bp, Enterobacter cloacae
atgctttatgtgttaggttatattcaccataataatgattatctttatcagaggcttcattcagtaagtatgagggatatagactttttcacctggcgacgggaatgcttcctccggtttcaggaaatgacctgtgccgaagaggtatatcaggaacttcagcgacaaacgcaggcgcttgaattcgattattatgcgctttgtgttcgacaccctgtgccatttacccgcccgcgaacctccgtccattccagttatccgcaacaatggatggcgcaatatcagtccgagaattatttcgccattgacccggtgctgaagccggagaatttcattcagggacatttgccctggacggatgaattattcacggatgcccagcaattatgggacggcgcgcgggaccacggattacgcaagggaataacgcagtgtctgatgatgccaaatcatgcgctcggtttcctctccgtgtcatgtaccagcttacaggcacactcgatatccagtgaagaagttgagctgcgtttacaaatgctcgtccagatggcgctcaccacactgttacgctttgaacatgagacggtgatgccgcctgaaatgaaattcagcaagcgtgagcgggaaattctgaagtggaccgcagaagggaagacgtcggcagaaatcgccatcattctctccatctcggaaaataccgtcaatttccatcaaaagaatatgcagaagaaattcaacgcaccgaataagatccagatagcgtgttatgccgcggcgacggggcttatctga

SEQ ID NO: 114299 - DNA, 225 bp, Enterobacter cloacae
atgagcacacctgaatttgccactgccgagaataaccaggaactggcacaggaagtaaactgcctgaagtcgctgctgacgcttatgctacaggcgatgggccaggctgatgctggtcgtgtgatcattaaaatggaaaaacagatcgcgcagatggaagaccaggcggaatccgctgtttttgccaatacggttaagcaaattaaacaagcctaccgccagtaa

SEQ ID NO: 114300 - DNA, 657 bp, Enterobacter cloacae
ttgatcaacgtccttcttgttgatgaccacgaactggtgcgcgcagggatacgacgcattcttgaagatataaagggtattaaagttgccggcgaggcgtgctgtggcgaagatgccgtcaaatggtgtcgcgctaactccgcagacgtggtgctgatggatatgaacatgcccggtattggcgggcttgaagccacgcgcaaaatcgcgcgcatgttcgttgataccaaagttatcatgctgaccgtccataccgaaaatccgctgcctgccagggttatgcaggcgggtgctgccgggtatctcagtaaaggcgccgcgccgcaggaagttgtcaatgcgatccgcaccgtacacgccgggcagcgctacatcgcttctgatattgctcaacagatggctctgagtcagattgaaccggaaaaaacggaatctccgtttgccagtttgtctgagcgcgaattgcagattatgctgatgatcactaaaggtcagaaggtgaatgagatctcagagcagctgaatctcagcccgaaaacggtcaacagctatcgctatcgaatgttcagtaaactgaacattcacggtgatgtcgaactgactcacctggccattcgccatggtttgtgcaatgcggagtcgttaataagtcagtga

SEQ ID NO: 114301 - DNA, 1833 bp, Enterobacter cloacae
gtgagtgaagcgttcgattcaaaagcatttctgaaaaccgtcaccagccagccaggcgtctaccgtatgtacgatgctggcggtacggttatctatgtcggtaaggcgaaagatctgaagaaacgcctttccagctatttccgcagcaaccttgcctcccgtaaaaccgaagcgctggtcgcacttatacataacattgatgtcaccgtaacgcatacggaaacggaagcgctgctccttgagcacaactacattaagttgtatcagccgcgctacaacgttctgctgcgcgatgacaaatcctatccgtttatcttcctgagcggcgacacgcacccgcggctggcgatgcatcgtggcgctaagcatgcgaaaggtgaatatttcggcccgttcccgaatggttatgccgtgcgggaaacgctggcgcttttgcaaaaaatctttcctgttcgccagtgcgaaaatagcgtttatcgcaaccgctcccggccatgcctgcaatatcagattggccgctgcctggggccgtgcgttgaagggctggtgagcgaagaagagtacgcgcagcaggtggaatatgtccgcctgtttttagccgggaaagacgatcaggtgctgacgcaactgattgcccgtatggaaaaagccagcgcggcgctggaatttgaggaggccgcacgcatccgcgaccagattcaggcggtgcgcagggtgaccgagaagcagtttgtttccaatacgggcgacgacctcgatgttatcggcgtagcctttgacgccggtctggcctgcgttcatgtgctttttattcgtcagggcaaagtgctcggcagccgcagctacttcccgaaagtgccgggcggcactgagctgggtgaagtggtggagaccttcgtcggccagttttatttgcagggcagccagatgcgtacgctgccctcggagatcctgctcgacttcacgctcgatgataaaaccctgctggcggagtcgctttcagagctggcaggccgccgggtgaatgttcagacgaaaccgcgcggcgatcgtgcgcgttatctgaagctggcgcgaaccaatgccgccacggcgctgaccaccaaactgtcccagcagtcgaccgtcagccagcgtttaaccgcgcttgctacgctgcttaagctgccggaagtgaaacgcatggaatgcttcgacatcagccatacgatgggtgagcagaccgtggcgtcgtgtgtggtctttgatgccaacggtccgctgcgggcagagtatcgtcgctataacatcaccggcattacgcccggtgacgattatgccgccatgaaccaggtgctgcgccgtcgctatggtaaagcgattgaagagagcaaaatcccggacgttatccttatcgacggcgggaaagggcagttggggcaggcgaaagcggtatttgaatcactcgacgtggagtgggataagaaccatccgctgctgctaggggtagcgaaaggggcagatcgtaaggctggcctggaaacgctgttctttgagccggaaggcgagggctttagcctgccgccggattcccctgcgctgcacgtgatccagcatatccgcgatgagtcgcacgatcacgccatcagtgggcaccgtaaaaaacgggcaaaagtgaaaaataccagtacccttgagacgattgaaggcgtcgggccaaaacgtcgccagatgctgttgaagtatatgggcggattgcaaggattactcaacgccagtatggaagaaattgcaaaagtgccgggtatttcgcaagggctggcagaaaagatctactactcgttgaaacattga

SEQ ID NO: 114302 - DNA, 549 bp, Enterobacter cloacae
atgcgatttaatatccctacgttgctcactctctttcgcgttgtgctcattccgttcttcgtcctggcattttacctgccggtcgtctgggcgccttttgcctgtgcgcttattttcctgatcgctgccgtgacggactggtttgacggttatctggcgcgtcgctggaaccagagtacccgctttggcgcgttcctcgatccggttgcggataaggtgatggtggcaatcgcgatggtgctggtggcggaacattatcatacctggtgggtaacgctgcctgccgcgaccatgattggccgtgagattattatctctgccctgcgcgagtggatggcggagctgggtaaacgcagcagcgtggcggtgtcctggatcggtaaagttaaaaccaccgcacagatggcggcgctggtatggatgctgtggcgtccgaatgcctgggtagagtgggccggcattggtctgctgtgggttgcggcggtgctgacgctgtggtcaatgctgcaatatttgaacgctgcgcgcggtgatttgcttgaacagtga

SEQ ID NO: 114303 - DNA, 756 bp, Enterobacter cloacae
atgtataatcataatcgtgataaaagtcattttgagcataaaatccgtgaaattgagctgctcacagagcaaatcgccgcaaagcatatactttatggcacttcaaatctgttttttgaaatccaacagcttgtggggaatttgaaaagagagattgaatcccattgtcttacctattctggggggacacatatccttgatgaacagatacggcacctccatgaacaggatgagctgcttacttttaaccgagcgaagatatacatagttgtcgaaaaaaatcggacgacaacgacaaccatcgcgctcaaacagattggcttcgtcgccggtggcgcacaagtttatgggggcgctagtttatgtgttggttcgctgggtctggcatgtgctgcgtacggcgcccctatgatcgctcatggtttaaataatatgtacgaaaatggctattatctccttttccgtgaagaacaatcaggaaccctgagagatgcatatagatttgctgctacgaagttaggttatggtaataaccaggcagacttagtctatggcgtcgttgatctctctttatcagcatatggtgcgggcagaaaagttttgggcctcagagaaaagtcctggagtttattccacaatatccaatccgattatatcagaggttggcaagaagcgtctaaaaccgcaatggcgctggatttgaccagtggaagtattacgggttggcagatgtaccagatagctaaagagaattga

SEQ ID NO: 114304 - DNA, 324 bp, Enterobacter cloacae
atgtcacaagaattagaattttcgcttcatccacctgtttggcctgctatcgtgtattttgttgtatctgtggcaatttttttcctgctttatctcggtaaactaaaagttaacaggctgcgtaaatacccgctatttatcgcatatatggtgtttgtaatcgctgttgcagccgttcagataaacatctttgctaatggctacgagtttgtccgcagctttttgcatatcgattttgacccctatcgatatgactcggtatattggggatcattgtgtttctccataatttacttgctggcgttgccccggaacaagttttag

SEQ ID NO: 114305 - DNA, 927 bp, Enterobacter cloacae
atgtctttaccgccattgtatgcactgcgtgcgtttgaagttgctgcgcggttgaactccttcagtaaagccgctgaaacgctcaatattacgccgggcgcggtcagcagacatgttcgtacccttgaactgtggttcgactgcgagcttttcaaaaggcaaggtcctcgcatggaggtcactgaagccgggcgagtgcttgccgggcagctgaacgaaagcttcacgagcattgaatgggcctgccgggtatttcgcagtgaaaaccacctgctgcggttaaaagcgcccagcaccctgaccatgagatggcttctcgacgtgctgcgatcttttcgcaacaaccatgcaaaaccacaggttgagattgccagcgtctggatggacattgacaccgttgatttcaatcttgagccctacgattgcgccattcttctcggcaatgggcgttttggtgacacaacggaaagccaactgctatttcatgaatggcttatcccggtttgtactccatcgcttatcgaaccggcccggcagcggcttccgcaatgcgatctgatccatccttcaccggacagacgtgactggcggcgctggctgcgaagaacaggattgttcccggggctcgatatgagcagcggtatggtgttcgatacccttgaacagggaagtattgccgcgatgaacgggcacggcatcgctatcgccgacctgcatctcacgcttgatgccctgaaaagtggcctgctgggcctgcctttcagggaagctatcgcgacgggggatggctactacctcgtctggccaaaaaattcactcaaaagagagagcattcagcatcttctggcctggctgcaaaaccataccccggtcgttccggcgctggatatcgattatctagcatacgatgacagtcggatttattaa

SEQ ID NO: 114306 - DNA, 471 bp, Enterobacter cloacae
atgacacttgatgctttatttcagttaatgaaaattatatcgccatctgaaaccccatcaggtggcgatttagcgaattttatgaccatgcttatctccaccaaaaatcattctgacgccctgttaccgttttcgcagcgcgcgtatatgctttcagttgcctatcgcgatccccaaaaagcagctgcgttgctttcatcctgtcagcccgaagcaggcaaccctctcccgctgctcaacttctctggctggccggacgtgcgttacgccacttctggtgaattacagacgccggagtctgaggactattttaacaagatttcgtctgccgccacgctattacgcgcggcaattattgacgctgaacagcagaaaaacacgccagcattttatattctggataaggtgctcaacctgaacagcgctttgccagaacgttataaaaagatggcaaatatatcttattcataa

SEQ ID NO: 114307 - DNA, 705 bp, Enterobacter cloacae
atgcttcagtttcaggatgtggatgttttctacggggtgatccaggcgttgaagcaggtttcgcttgaggttaacaaacgggaaactgtggccctgattggcgctaacggcgcggggaagtcaacattactgatgtctgtctttggtcagccccggatccgcaacgggcagatcctcttctgcggcgaggatatcagccacaaatccacccactatgttgccaccggtggcatcgcgcaggcacctgagggacgacgcattttcccggatatgtctgtagaagagaacctgctgatggggacaatccccgtcggcaatcagcatgcagcggaagatatgcaaagcatgttcgacctcttcccccgcctcaaggagcgacgtaaccagcgggcgatgacgctctccggcggtgaacagcagatgctggctatcgcccgcgcgctgatgagccgtcctaaacttctgctgctggatgaacccagcctcggcctcgcgccaatcgtggttaaacagattttccagacgctgcgcgaactggcccgtaacggaatgacgatttttctggtcgagcagaatgcgcaccacgcgctgaagttgtccgaccgcggctatgtgatggttaacgggcagattcggttaagcggcagcggcgaggcgttgctgaaggatccggaggtgagaaaggcgtatctgggtggcgtgtga

SEQ ID NO: 114308 - DNA, 876 bp, Enterobacter cloacae
atgaacgcaacgattttacgtgtagaacatctgatgatgcacttcggcgggatcaaggccttaaacgacgtcaatcttgaggtgcagcgcggctccattaccgcactcattgggcctaacggcgcgggaaaaacgaccgtctttaactgcctgaccggtttctaccgggcctccggcggcaacattctgttcaatgcacgaaataaaaccaccaatgtcattcaggtgctcggccagaaattccagccgggcgactggctcaacccggcgcagcttggtcaacgcctgttctataagatgtttggcggcacgcatctggtgaaccgcgcgggtcttgcgcgcacgtttcagaacatccgcctgttccgcgagatgtccgttgtggaaaacctgctggtggcacagcacatgcgcgtcaaccgcaatctgctggcgggggtgctgaacacccctgcgtatcgtcgctcagagaacgatgcgctggaccgggcgttttactggctggaggtggtggatctggtggattgcgcgaaccgtctggccggggaaatgtcctatggccagcaacgacgcctcgaaatcgcccgcgccatgtgtaccggcccggagatgatttgtctcgatgaacctgctgccggcctgaacccggtggaaacgcacaagctgagtgagatcatccggttcctgcgcgaccaccatgacatcacggttttgctgatcgagcatgatatggggatggtgatgggcatttcagatgacatcattgtgctcgatcatggcgatgtgattgccagaggtaaaccagctgagatccagcacaatgaaaaagtgattgccgcgtatctgggcaccgacgaaagcgaggtaaatctgtga

SEQ ID NO: 114309 - DNA, 1275 bp, Enterobacter cloacae
atgacctctgacggtttttccctgaagcgctgcattctggactcgattttttccggaatgatcgccctgattattttcggcccgattgcgggcgtgatactggatggttacagctttacctttgacggccagcggctggcgtggattgtaggcacggtgatggtgggacgctttttactgagcgccttttcagctacggcggccggaagacgtttacaggcacggtttgaatccgacaatgcgggggtgtatgtccggccgccggcgtataaaagccgcatgcgctggatcattccgctgattgtcacgctggcgatctgcttcccgtttgtggccactaaatacgttctgacggttgccattctcggactgatctacgtcctgctcggtcttgggctgaacattgttgttggcctggcagggctgctggatctgggttatgtcgccttctatgccatcggcgcttacgggctggcgctcgggtatcagtatctggggcttgggttctggagcatgctgccgctggcggcgctaatggccgcgggcgcgggcgccctgctcggctttccggtgctgcgcatgcacggggattatctcgccatcgtcacgctcgggtttggcgagatcatccgcctggtgctgaacaactggctcaccttcaccggcgggcctaacggcgtttcagcccctgccccgaccttttttggtctggagtttggccgacgcgccaaagaaggcggcgtccccttccacgagttcttcggcctgacctataaccccaacttgaagtttatcttcatctatgcggtgctgttcctggtagtcatgctggtgctgtacattaaacaccggctgacccgaatgcccattggacgggcgtgggaagcgctccgtgaggatgagattgcctgccgttccatggggctgaatcacgttctggtcaaactctcggccttcaccctgggcgcatcgacggcaggtatcgccggggtgttttttgccacctaccaggggtttgttaacccgacctctttcaccttttttgaatcggccctgatcctcgccattgtggtcctgggcgggatgggctccaccgtcggcgtcgtactggccgcctttgtgctgaccgtcacgccggaactgctgcgcagctttgcggaatatcgcgtgctgctgtttggcatgctgatggtggtgatgatgatctggcgtcctcgcggtctgatccgcatcaaccgcagcggatttgccgtgcgtaaaggagtggtgccatga

SEQ ID NO: 114310 - DNA, 915 bp, Enterobacter cloacae
atgagtacattcttcctgcaacaattaattaatggcttaacgctgggttcggtctacggtcttatcgccatcggctacaccatggtgtacggcatcatcggtatgatcaatttcgcccacggcgaagtgtatatgatctccgcctatctctcggccattggcctggccctgctggcgttttttggactccactcctttccgctgctgatcctggggacgctggttttcaccatcgtggtcaccggcgtttatggctggacgattgagcgcatcgcctataagccgctacgcaactcgacgcgtctggcaccgctgatttcggccatcgggatgtcgttgatactgcaaaactacgtccagctcagccagggcccgcgccagcagggcgtgcccaccatgcttgatggcgtgctgcgttttcacctcggcgaagggtttgtccagataacctataccaaagtctttattctcatcgcctcgttcgcgggcatgctggtgctgacctggattatcaaccgtacccgcttaggacgcatgtgccgtgcggtacagcaggatcgtaagatggcctccatcctgggtatcaacaccgacagaattatttcgctggtgtttgttatcggcgcagccatggccgggctggcgggcgtgctaatcaccatgaattacggcacctttgatttttacgtcgggtttgttatcggcatcaaggcctttacggcggcggtgctgggcggcatcggctctctgcccggtgcgatgcttggcgggctgattctgggcgtcgcagaagcgcaattctccgggatggtgaactcggattataaagacgtgttctcgtttggattgctggtcttaattctgatctttcgtcctcaggggctgctgggccgccccgtcgtggctaaagtgtaa

SEQ ID NO: 114311 - DNA, 1122 bp, Enterobacter cloacae
atgtcgctgaaatttaccaaaactcccctctccctggtgctggccggttgtctggtgacggccttttccgcgcaggccgatatcgtcatcggcgtggccgggccgttcacaggcccgaacgcaacctacggcgatcaatactggcatggcgctacgcaggcggcggaagacattaacgccgccggcgggatcaacggtgagaaaatcaaactggttcagggcgacgacgcctgcgagcccaaacaggccgtcgccgttgccaaccgcttagtcgatcaggataaggtgaaagcggtcgtcggccacttctgctcctcgtcgaccatgcccgcctccgaggtctacagcgatgccgggatcctctccatcacccccggctcaacgaacccgcttattaccgaacgtggcatgagcgatatatttcgcatgtgcggacgtgacgaccagcagggccaggtcgccagcgatttcattcttgataagctgaaagccaaacgggtggtcatcatccacgataaagacacctacggtcaggggctggcggacgccactaaggcggcgctggcgaaacgcggcgtgaaggaggtgatgtacgaagggttatcccgcggggagaaagactttaacgcgctggtgaccaaaattggcgcacaaaaaccggacgtggtgttcttcgggggctgtcacccggaagcgggtccgctggttcgccagatgcgtgaacagggcgtgcaggcgaagttcttctcgggagactgtatcgtcaatgaagagatggtcaccgccgccggtggggcgcaatacaccaacggtatttacatgaccttcggtaaagatccgcgcctgatcccggacggaaaagccgtcatcgagaaattccgcaccggtaaatttgaacctgaaggatacaccctctacgcctacgcgtctgtgcaggctatcgcggcggcattcaaggccacgaaagggacggattccgcaaaagccagcgagtggctgaaggccaaccctgtcgacacggtgatgggtaaaaaagcctgggacagcaaaggtgacctcaaagtctctgactacgtggtctatcagtgggatgacaaaggcaaatataaagaagtgccataa

SEQ ID NO: 114312 - DNA, 669 bp, Enterobacter cloacae
atggctgaaggcccattaaatgaaagcgagatggcgtggctggaagagacattaatctcttacggtcacgacgatgcatccgtgattgacgtgtccgaactggacggcatgcttaccgcagtactttccggtcccgttgtggtggagcccgacacctggctggtggcggtctggggtggtgagaaatatattccgcgctggaaaaacgatcgtgagatgaaccgttttatcgatctctgctttaagcacatgaacgatattgccgagcgtttgagcgaatacccggatcagtttgaaccgctgtttggctataacgacgttgacggtcagagctataccgtggtggaagagtggtgctatggctacatgcgcggcgtggcgctgacggactggtcatccctgccggaagcgctggaagcggacctggcggtgattgccctgcacgggacggaagagaacagcgagaagctggatgcgctgaccgaagaggagtacatggccagcatcgagagcattcagcctgcggcgctgcgtttgtataactactgggtggctaacccgcagcagccggaagcgaaaaagccgatcgtgaacgggtcgaaggtggggcgtaacgatccgtgcccgtgcgggagtgggaagaagtttaaaagctgctgcctgcattaa

SEQ ID NO: 114313 - DNA, 1143 bp, Enterobacter cloacae
atgccgttggctgccgccggcgtcgggtttggggttaccgtagtgctgctgggcggtctgtgggccctgatgtgttacaccgcgctattattgctggaggtttatcagcatgtccctgccgatactggcttaggctccctggctgcacgctatcttggacgctacgggcagtggatcaccggtttcagcatgatgttcctgatgtacgccctgactgccgcttacatcagcggcgccggggagctgattgcgtcaagtatcaatgacggcttcggtgcgtcactttcaccggaaacaggcgccattgtctttacgctgatcggtggcggcgtggtttgtgcgggcacatcgctggtcgatctgtttaaccgttttttgttcagcgccaaaattctcttcctgattgtgatgctggtgctgctggcaccgcatgttcacaagattaacctgctctccctcccgctggagaaaggtctggcgctttcggccatcccggttattttcacctccttcggttttcacggcagcgtgccgagcatcgtgagctatatgaacggtgatattcgcaagctgcgccgcgtctttgttatcggcagcgccattccgttgattgcttacctgttctggcagctggtgacgctgggcagtattgattccaatacctttatcggcctgatggcagagcattctggtctgaatggattcctggttgccctgcgtaacgtggtggcctcttcacacgtggagctggcggtacatctgtttgcagacctggcgctggcaacctccttcctcggcgtagcgcttggcctgtttgactatatggcggatctgttccagcgtcgcaataccgttgccggacgcttacagacgggggcgatgaccttcctgccgccgctggccttcgcgctcttttacccgcgcgggtttgtgatggcgctggggtatgctggcgtggcgttatcggtactggccctgctgctgccttccctgctggcgtggaagagccgccagcaacatccgcagcaggggtatcgcgtagcgggcggtacgccaatgctttgcgcggtgtttggttgtggggtggtgattattctggtgcagattttgattgcagcggggatgctgccggaagtgggataa

SEQ ID NO: 114314 - DNA, 237 bp, Enterobacter cloacae
atgtcaattcacggacacgacgtgctgaatatgatgattgagtcaggtgagcgctatacggaggagagtctggttgaggcgatacatgcccgctttggcgaagcggcgcgtttccatacctgttcagcttcggagatgacggccgcggagctggtggcgtttctggcggcgcgcggaaaattcattccagcagcagacggattttccactcacgaaagtaaaatctgccgccattaa

SEQ ID NO: 114315 - DNA, 498 bp, Enterobacter cloacae
atgttaaaaactgaaatgatcgacaagctcaatgcgcaaatgaatcttgagcttttttcttccctgctttatcagcagatgagcgcctggtgcagctatcacagctttgaaggggcggccgccttcctgcgtcgtcatgcccaggaagagatgacgcacatgcagcgtctgtttgattacctgacggacaccggcagcctgccgcgcattgataacgtggcatcgccttttgccgaatacggctctcttgatgaactgttccgcgccacctatgagcatgaacagctgatcacccagaaaattaatgaactggctcatgccgccatgaccagccaagattatccaacctttaatttccttcagtggtatgtggctgaacagcacgaagaagagaagctgtttaaatccgtgctggataaattatctctggcaagtaaatccggggaaggtctgtacttcattgataaagagctgtcgacgctcgatacccagaattaa

SEQ ID NO: 114316 - DNA, 339 bp, Enterobacter cloacae
atgaaacgtgtaatcatagccggaacgatcctgttgctcgccgggtgcagtatcaaccgtcaggcagaagtcagcagtacggatgccccaaacggaattgtgcgcctcgactatggccaggccatgctgcaaaacgcctggtctgatgagtatgttaataacggtacggcaaccaaagcctgtcaacatatgggctacgccactgcgtcagcctacgggcagccaattaaaacctgcaccctgatcagcggttcactctgtctgaacgaaagtgtgaccattcagtataaatgtcagggatatgctgttacctcttccagccagaatccgtggtattaa

SEQ ID NO: 114317 - DNA, 639 bp, Enterobacter cloacae
atgaaaattgcactgatgatggaaaacagccaggccgctaagaatcccatcatccttaatgagctgaaagccgttgctgatgagaaaggttttccggtctataacgtcggtatgagtgatgagaacgatcatcatctcacctatattcacctgggcatcatggcgagcattctgcttaacgctaaagccgttgattttgttgttaccggctgcggtaccgggcagggcgcgctgatgtccctgaacatccatccgggtgtgatttgcggttactgcatcgatcctgcggatgctttcctgtttgcgcaaatcaacaacggtaacgcgctttctctgccgtttgcgaagggcttcggctggggggcagaactgaacgtacgctttatctttgagaaagcgtttaccggacgcaatggcgaaggctatccaccagagcgtaaagagccgcaggtgcgtaacgccgggatcctgaaccaggtgaaagcggcggtggtgaaagaaaactatctggataccctgcgagcaatcgatcctgagctggttaaaaccgccgtatcaggccagcgcttccagcagtgcttcttcgagaactgccaggacaaagagattgaagccttcgtgcgcggtattgttggctga

SEQ ID NO: 114318 - DNA, 1419 bp, Enterobacter cloacae
atgagtgaaaacgtatccggcaaagagagccgtggattatcgcctgcggcgctgctggtggccggtgctttctttatggagtttctggatgggacggtgatcgccaccgcgttgccggatatggcaaaaagcttcggcgaccaggcggtggatctgaatatcggcatcagcgcctatctgatcaccctggccgtactgatccccgccagcggctggatcgccgaccgcttcggcgcgcgaaaagtgtttgccctcgcgctggcgatcttcacgctggcctcggtattttgcggcctgtccaccacgctcgatcagttcgttgcgatgcgcgtcctccagggcatgggtggcgcgctgatggtgcccgtaggtcgcctggccgtgctacgcaccacgccaaaacatcagctcatcacggcaatcgccaccctgacgtggcctgcgctggtcgcgccgatcatcggcccgccgctgggtgggttcattaccagctatgccgactggcgctggatcttctttattaacgtgccgctggggataatcgccattttgctggcgctgcgcatcattccagacctgcatgaagatacgcgccgaccgtttgatttaccgggttttgttgtcaccacccttgccatggtgagcctggtttatgcgatggagttgatgggcgcagagcctctgcgaacaggattaaccgccacgctgtttatcgtcggtgtcgtcgccttaagcctggcgctgcgtcactttaagcgggcaacctggccgatgatcaggctcgatgcgatgcaggtgccgacgtttcgcgtcaccctgtacggcggatcgctgtttcgcgcctccatcagcgcggttccgttcctgttaccgctgatgttccaggtcggctttggcatggacgcgttccattctggcctgctggtgctggcggttttcgttggcaatctcaccattaaaccggcgacgacgccgcttatccgcagcctggggtttaagcggctgttgctgattaacggtgcgttgaatgtcctggcgttgctggcctgcgcgtttcttacgccgcagacgcccgcgtggctcatcatgctgatcctttatctgggcggcgttttccgttcgattcagtttacagccatcagtacgctggcttttgcggatgtgccatcggcgcagatgagctatgccaataccctgttttcaaccgcaacgcagcttgccgtggggcttgggatcacgctcggggcgattggtattcgtatcggggaaaaagtcagtgaggcgatggggattgccggtatgccgggaatgagcttccggctggcatttgtggcaatcgcgctgatctgcctggtgggaatggttgacacgctgcgtctgaccaaagatgcgggcagcgcggtctcatcgaaaaagtaa

SEQ ID NO: 114319 - DNA, 252 bp, Enterobacter cloacae
atgtcacaaaacctgagcgccgatcaggaactggtatctgacgtcgtcgcctgccagctggttatcaaacaaatccttgatgtgattgacgttatcgcgccggttgaggtacgcgaaaagatgtcgacccagctgaaaaacatcgatttcaccaaccatcctgctgcggcggacccggttacgctccgcgcgatccagaaagcgattgcgctgattgaactccgcttcacaccgcagggtgagtcacactaa

SEQ ID NO: 114320 - DNA, 1344 bp, Enterobacter cloacae
atgatcaccattgagtttattgtcattatcctctgcctgctgataggcacccgcttcggcgggatgggcctggggctgataagcggcatcggcctgtttgttttgagttttgtctttggtctgcaacccggtaaaccgccggttgacgtgatgctcacgatcctcgccgtcatcggctgtgcggccacgctacagaccgccggtggcctgaatgtaatgatgcagtttgcagagcgcctgctgcgtaaacatccccagcacatcacccttctcgcaccgtttaccacctggatgttgaccttcctgtgcgggaccgggcacgtcgtctacaccatgtttcccattatcgcggatatcgccctgaaaaaaggcatacgcccggaacggccgatggcggtggcctcggtggcatctcagatggcgatcaccgcctcccccgtttccgtggccgtcgtttcgctggtctcgattcttggtgcgcagcacggtatcggccacgcgtgggggatccttgaaattcttgcggtctccgtaccggcctcactgtctggcgtcgccattgcggcactgtggagcttgcgtcgcgggaaaaacctcgcagacgatcccgaatttcaggaaaagctgaaagatccgaaacagcgggagtttatctatggaggaacggagacgttgatggatcaacgtttcccgaaacaggcctactggtccacgtggatcttcttcgccgggattgccgtagtggtcctgctgggtgcgctgcccgagctgcgtccggcgtttgagatcaaagggaaaatgacagccctgtcgatgaaccttgtcattcaaatgatgatgctgatcgccggggccatcatgctgatgacctgcaaggtgaatgcgtcggccatttcaaacggggcggtatttaaggcggggatggtcgcgattttctcggtgtttggcgtggcgtggatgagcgataccttttttcaggcgcatctcgacgagctgaaaatggcgctggagggggtggtgaaaagtcatccctggacgtatgccatcgtgctgttcctggtatcaaaactggtcaacagccaggctgcggccttgaccgcggtcgccccgatggggttgatgctgggcatcgatccgaaaatgctggtggccttcttcccggcatcctacggctactttgtgctgcccacctatccgagcgatctggcctgtatcgggttcgatcgctccggcaccacccgcatcggtaaattcatcatcaaccacagctttattctgccggggctgattggcgtcagctgtgcctgcgtggtgagctatctgctggtgcagacgttcttctga

SEQ ID NO: 114321 - DNA, 504 bp, Enterobacter cloacae
atgactacccaaacgatgatgcaaaaactgaatgcccagatgaacctggagttttatgcttcaaatctgcatctgcatttgagcgcgtggtgttccagaaaaagcctcaacggcactgccaccttctttcgtactcaggcgcaaagtaacgtcacgcacatgatgcgcgtctttaactttttgaaagctgtcggcgcaaaccctaccgtcaaagagcttgaaacgattgaagataattacacttctctggaagaactgtttcagaaaacgctcgaagagtatgagcaacgctgtgcgaagctgagcaaactggctgatgaagccaaagcgcaacgggacatcattaccctcaagtttttacgtgatatggacagagagcagcagcaggatggcatgctgctgaagacgctcgcagatgaaatccgcaacgcgaaacgcgcggggatttgtctggagcagacggaccgccatcttctcgacattgctaccgtgcaacaccactaa

SEQ ID NO: 114322 - DNA, 558 bp, Enterobacter cloacae
atggctaacgttgcggtgctgctggcacccggttttgaagaagcagaagcgattatcacgattgatattctgcggcgtttacagattgaggtggagacgctggcctgtgcggcgtcccgtgcggtagtgagttaccacaatatccccatggtggctgacagtacgttaacggagcgcattaatacgctgtatgacgcggtcgtgttgcccggtgggccgcaggggagcgtcaatcttgcggctaaccaagaggtgatccgctttgtttccgcccatgacgagcagggcaaactcatctgcccgatctgctctgcggccgcgcgggtgctgggcggtaacgggctactgaaggggcgccgctacgtctgttccggcgacctctggcagagcgttgatgatggagtatatgtggatgcgccggtcgtggtagataataacctcatcagcggcaaggggctggggcacgcttttgactttgcgctggcgctctctgctcgtctgttgggtgacgacgcccccgtgcgcgatcatgctgaacacatctattaccgctggtaa

SEQ ID NO: 114323 - DNA, 990 bp, Enterobacter cloacae
atgcacaaatttactaaagcgctggcggccatcggcctggctgccgttatgtcacaatccgctatcgctgaaaatttaaagctcggttttctggttaaacagccggaagagccgtggttccagaccgaatggaaatttgctgataaagccggaaaagatttgggatttgaggtaattaaaatcgccgtacctgacggtgagaaaacgctgaacgccattgatagcctggcggccagcggcgcgaaaggtttcgttatctgtacgccggatccaaaactggggtcagcgattgccgcgaaagcgcgcggttacgacatgaaagtgattgcggtggacgatcagttcgtgaacgccaaaggtaaaccgatggataccgttccgctggtaatgatggcggccactaaaatcggtgagcgtcagggccaggagctctacaaagagatgcaaaaacgcggctgggatgtcaaagagaccgccgtgatggccattaccgctgacgagctggacaccgcccgtcgtcgtaccaccgggtccatggacgccctgaaagcggctggcttcccggaaaaacagatctacaaagttccgaccaaatccaacgatattccgggcgcctttgatgcggcgaactccatgctcgtccagcatccggaagtgaagcactggctggtggtggggatgaacgacaacaccgtactgggcggcgtgcgtgcaacggaaggccagggctttaaagcaccggacgtgatcgggatcggcatcaacggcgttgacgccgttagcgaactgtctaaagcgcaggcgaccggcttctatggctctctgctgccaagcccggatgtccacggttataaatccagcgaaatgctctacaactgggtgactaaaggggttgagccgccgaaattcaccgaagtgaccgatgtggtgctgatcacccgcgataacttcaaagaggagctggcgaaaaaaggactgggcggtaagtaa

SEQ ID NO: 114324 - DNA, 1515 bp, Enterobacter cloacae
atgcaacagtctgatccgtatctctctttccgcggcatcggtaaaacgttccccggtgtaaacgcgctgaccgatatcagcttcgactgctatgccggccaggttcacgccctgatgggggagaatggcgcgggaaaatccacgctgctaaaaattctcagcggcaactacacgcccaccaccggcacgctggctattcgcggcgacgaggtggcctttgccgacaccacggcagcgttaaatgcgggcgtcgccatcatctatcaggagctgcatctcattcctgaaatgaccgtggcggagaacatctatctgggccagcttccgcataaaagcggcgtggtcaaccgctcgctgctcaactatgaagcgggcttgcagctcaagcaccttgggctggatgtcgatccgcaaacgccccttaagtatctctccatcggccagtggcagatggtggaaattgccaaagcgctggcacgtaacgccaaaattatcgcttttgacgagccaaccagctcgctctcggcgcgtgaaatagaaaatctctttcgcgtgatccgcgagctgcgcaaagagggccgcatcattctgtacgtttctcaccgaatggaagagatttttgccttaagcgatgccatcaccgtgtttaaagatggccgctacgtgcgcaccttcaccgatatgcagcaggtcaaccatgaccaactggtgcaggcgatggtcggacgcgatctgggggatatttaccactggaaaccgcgcgagtatggccctgagcgtctgcgtctggataacgtcaaagccccgggcgtgcgcacgcccatttcactcttggtgcgcagcggcgaaatcgtcgggctgtttggccttgtgggggcagggcgcagcgagctgatgaaagggctgtttggcggcacccgaataacccagggccaggttttcgtcgacgggaaaaaggtcgatattcagaagcctgcgcaggcgattaacgcggggattatgctctgcccggaggatcgaaaggccgagggcattattccggtgcactcggtgcgcgacaacatcaacatctctgcccggcgcaagttcatccgtgcgggatgtctgattaacgacggctgggaggcgagcaacgcggatcaccatatccgttcgctgaacatcaaaacccccggggctgaacagctgatcatgaacctgtccggcggcaatcagcaaaaagccattctggggcgctggctgtcggaagatatgaaggtcattttgctggatgagccaacgcgcggtatcgacgtgggggcgaaacacgaaatctataacgtcatctatgaactggcaaaacgcggtgtggcggtcctgttcgcctccagcgatctgcctgaggtgctgggcgtcgccgaccgcattgttgtgatgcgtgaaggtgaaattgccggtgaattgctgcatgaacaggcgaatgaacaacaggcgttgagtctcgccatgcctaaagttagccaggctgtcgcctga

SEQ ID NO: 114325 - DNA, 981 bp, Enterobacter cloacae
atgtcctctgttactacatccggagcgccgaagtcggctttcagttttggccgcatctgggaccagtacggcatgctggtggtctttgctgccctgttcgtcgcctgcgcgatttttgtgccgaatttcgccacgttcatcaatatgaaggggctggggctggctatctccatgtccggcatggtggcctgcggaatgctattctgcctggcctccggcgattttgacctgtcggttgcctcggtgattgcctgtgcaggcgtcaccactgccgtggtgatcaacatgaccgaaagcctgtggatcggcgtgctggccgggctgctgctcggcgtgctgagcggcctggtgaacgggtttgtcattgcgcgcctgaagattaacgccctgattacgacgctggcgaccatgcaaatcgtgcgcggtctggcctatatcatctccgacgggaaagccgtggggattgaagacgagcgcttcttcacgctgggctatgccaactggctgggtctgcctgcgccaatctggctgacggtaggctgtttgatcctgttcggtttcctgcttaaccgcaccacgtttggccgtaacacgctggcgattggcggcaatgaagaggcggcgcgtctggcgggtgtcccggtcgtacggaccaagatcattatcttcgtgctttccgggctggtatcggcggcggcggggattattctggcgtcgcgtatgaccagcggccagccaatgacctccattggttatgagctgatcgtcatctcagcctgcgttttagggggcgtttccctcaagggcggcatcggaaaaatctcatatgtggtggcggggatcctgattctggggaccgtggagaacgccatgaacctgcttaatatttctccgttctctcagtacgtcgtacgcggcctgatcctgctggcagcggtgatcttcgaccgttacaagcaaaaagcgaagcgtaccgtctga

SEQ ID NO: 114326 - DNA, 804 bp, Enterobacter cloacae
gtggctgacttgttaaccgcaccgcctgtactgcccggaaaatttgctttcttttttgacctcgacgggacgctcgccgggattgaaccgcatccggatgacgtcgttgtaccggacacggtgttagagaatttgcagcagctctcccgacagaacgagggggcactggcattgatttcagggcgctcaatggccgagctggacgtgctcgccagtccttatcactttccgctggccggtgtgcacggagcggagcgccgcgatatccatgatcaactgcatatagtttcactccccgacacgctgattcaggcgctgcatacgcaactctcttcggctctggaaatgcttcccggtacggaactggaagccaaaggcatggcctttgcgctgcactaccgtcaggcgccccatcatgaggcggcgatctttgcggtggcaagaagcgtggcggaagcccatccggagctggcgttacagccgggtaaatgtgtggtcgagattaaaccggcaggaattaataaaggcgctgccattgcagcgtttatggcggaagcgccgttcaaagggcgtacgccagtcttttttggggatgacctgaccgacgaggccgggttcagggtggtaaaccaggcccagggcatgtctgtcaaggttggatctggtgaaaccattgccggatggcggctggaaaatgtcgccagcgtctggcagtggatatctgacgtcgctaaccagcaacaacaacaaatagcgcaaaacaacgggagaaatcattatgggtcgcttagtcgtcgtctctaa

SEQ ID NO: 114327 - DNA, 1425 bp, Enterobacter cloacae
atgggtcgcttagtcgtcgtctctaatcgcatcgcaccgccggatgataaaaaagccagtgccggtggcctggcggtcggggtattaggtgccctcaaagccgcgggtggtctctggtttggctggagcggggaaatcagtaatgatgagaaaccgctaaaaaaggtgtcacggggcaatatcacgtgggcctccttcgcccttagcgagaaggactacgatgaatattattccgagttctcaaacgccgtgctgtggccagcgtttcactatcgtctggatctggtgaaattccagcgtgaatcctatgaaggctacatgcgcgttaacgcgctgctggcagataaactgctgccgctaatcgaagaagacgatattttatggatccacgattaccatctgctgcccttcgccagggagctgcgtaaacggggtgtgaagaaccggatcggcttcttcctgcatattccgttcccgaccccggagatctttacggcgctaccgcagcatgatgaaattcttgaagcattgtctgattacgacctgctcggtttccagacggaaaatgacaggctggcgttcctcgacagcgtgtcgggtaaaacccggctggtcactcacggcggcaaatctcacaccgcgtggggacgaaatttccataccgaagtctacccgattggtattgagcctgacgaaatcgccgagcaggcctctggtccgctgccgccgaagcttgcccagctcaaggacgaactcaagcacgttaagaatatcttttcggttgaacgactggattattccaaagggttgccggagcgattcctcgcttatgaaaccctgctggataaattcccgcagcatcacggcaagatccgctatacccagatagcgccgacctcgcgcggtgaggttcaggcttaccaggatattcgtcaccagctggagaccgaagcagggcgcatcaacgggcgctatggtcagctcggctggactccacttttctatctgaatcagcactttgagcgcaaaatcctgatgaaagtgttccgctatgcggacgtcgggctggtcaccccgctgcgcgacgggatgaatctggtggcaaaagagtatgtagcagcacaagatcctgctgacccgggcgtgctggtgctgtcccaatttgccggtgcggcaaacgagttaacctcggcgctgattgtgaacccttacgatcgcgatgacgtggcaaatgccctgaaccgcgcgttaaccatgccgcttgcggaacgtatttcacgtcattcagaaatgatggagaccatcgtcaagaatgatatcaaccgctggcaggcgcgttttattgacgatttgcgcgcgatccagccgcaaactcaggaaggtgatctgcaaaaaaagatcgcgaccttccctaaactcgcctga

SEQ ID NO: 114328 - DNA, 429 bp, Enterobacter cloacae
atgagttactcccatcttcttgtttctgttgcggtttcccccgaaagtcatcaactcgtcgcccgtgccgtttccattgcccgcccgaataatgcccgcataagtctgatcaccctggcagctgaacccgaaatgtataatcaactggcagcgccaatgctggaagatattcgtgaggttcttcaggaggaaacgcagcaatttctgcgcgagctggttgagcgggcaaaatatcctgtccaccagacggtgattgccaccggcgagttaagtggacatattctcgacatttgtcagaaacagaatgttgaccttgtcatttgcggaaatcataaccagagctttttttcccgggcggcatgctcggcaaaatccatcgtttcgtcaagccaggtggatgtcctgctggtgcctctcgggggcaattaa

SEQ ID NO: 114329 - DNA, 351 bp, Enterobacter cloacae
atgcatacatccgagttgctaaaacatatttatgacatcaatttgtcgtatttattgctcgcgcagcgtttgattagtcaggacaaaccgtcagcgatgtttcgtctgggtgttaacgaagagatggcaaccatgctgggtggattaaccctcccgcaaatggtcaagctggctgaaaccaatcaacttgtctgccagttccgttttgataacccgcagaccattacgcgtctgactcaggaatcccgcgtggacgatctgcaacagatccacactggtattcttctctccacccgcctgctcaacgaaatcagccagcctgatgacgtagcccggaagaaaagggcttaa

SEQ ID NO: 114330 - DNA, 579 bp, Enterobacter cloacae
atgagcgaaaaaagcattgttcaggaagcccgtgatatccagctggcgatggaactcatcacgctcggtgcgcgtttacaaatgctggaaagcgagacgcagctgagccgtggtcgtctgatcaagctgtacaaagaattgcgtggtagcccgccgccaaaaggcatgctgccgttttcgactgactggttcatgacctgggagcagaacattcatgcttccatgttctgtaacgcctggcagtacctgcttaaaacgggcttatgcagcggcgttgatgccgtgatcaaagcctacaaactttaccttgagcaatgcccgcagcaggaagagggacccctgctggcgctgacccgcgcctggacgctggtgcgttttgttgaaagcggaatgcttgaattgtcccgctgcaactgctgtgacggcaatttcattacccacgcgcaccagcctgcgggcagcttcgcctgtagtttgtgccagcctccatcccgagccgtaaaaagacgtaaactttcccgggatgctgccgatattattccacaactgctggatgaacagatcgaacacgctgtttaa

SEQ ID NO: 114331 - DNA, 888 bp, Enterobacter cloacae
gtgcttatcttattaggttacctggtagttctcggtacagttttcggcggttacatgatgaccggcgggcaccttggagcactctatcaaccggctgaacttgtcatcatcggcggtgcaggggtaggggcttttatcgttggtaacaacggtaaatcgatcaagggcacgctgaaggcgattccgctgctgtttcgtcgctcgaaatacaccaaaagcatgtatatggatctgctggcgctgctctatcgcctgatggcgaagtcacgtcagcaggggatgttctcgctggagcgggacatcgaaaacccgaaagagagcgaaattttcgccagctacccgcgtattctggccgacgcgatgatgctcgattttatcgtcgattacctgcgactgatcatcagcggcaacatgaacaccttcgaaattgaagccctgatggacgaagagatcgaaacccacgagagcgagtccgaagtaccggccaacagcctggcgctggtgggcgactcgcttccggcgttcggcatcgtggcggcggtcatgggcgtcgttcatgccctggcctcggcggatcgcccggcggctgaactgggggcgctgattgcccacgcgatggtggggacgttcctcggtattttactggcctacggctttatctccccgctggcgagcgtgctgcgccagaagagcgccgaaaccaccaaaatgatgcagtgcgtgaaaattacgctgctctcaaacctcaacggctatgcgccaccgattgccgtcgaatttggtcgtaagacgctttactccagcgaacgtccgtcgtttatcgaactggaagagcacgtgcgcgcggtgaaaaaccctaacccacagacgacaactgaggacgcatga

SEQ ID NO: 114332 - DNA, 930 bp, Enterobacter cloacae
atgaaaaaccagtcccatccgatcgtcatcgtaaaaaagcgcaagcataaggggcacgggcacggttctcacggctcctggaagatcgcgtacgccgactttatgaccgccatgatggccttctttctggtgatgtggctaatctccatctccagcccgaaagagcttattcagattgcggaatatttcagaacgccgctggcgacggcggttaccggcgggccgcgcatttctaacagcgacagcccgatccccggcggcggtgacgattacacccagcagcagggtgaagtgaaaaaacagcctaacatcgacgagctgaaaaaaaagatggagcaggcgcgtctgaaaaaactgcgcggtgacctggatcagctgattgaagcagaccctaagctgcgcgcgctgcgtccgcatctgaaaattgacctggtacaggaagggctgcgtattcagatcatcgacagccagaaccggccgatgtttaaaaccggcagcgccgacgtggagccctacatgcgcgatattctgcgtgcgattgcaccggtgctgaacggtattcctaaccgcattagcctgtccggacacacggatgatttcccgtacgccacgggagagaagggatacagcaactgggagctttctgccgatcgcgccaacgcctcgcgtcgcgagctggtggcgggtgggcttgatgatggcaaggtcctgcgcgtggtcggcatggctgcaaccatgcgcctgactgaccgcggaccggatgacgccatcaaccgtcgtatcagtcttttagtgctgatccagcaggcggagcaggccatcctgcatgaaaacgccgaaagtcagaatgagtcactggacgatttaaaacagcctggggccgtcccttcggctgccgttccaacatcgccaccagccaatccgaggtga

SEQ ID NO: 114333 - DNA, 2010 bp, Enterobacter cloacae
gtgagcatggatattaccgatttttaccagacattttttgatgaagccgacgaattgttggccgatatggagcaacatttgctggatctggtgcccgaggcaccggactcagaacagctcaatgccatcttccgtgcggcgcattccattaaaggcggagccggaacgtttggatttaccattttgcaggaaaccacccatttaatggaaaacctgctggatgaagcacgacgcggtgagatgcagctcaataccgacattatcaacctgtttttggaaacgaaagatattatgcaggaacagctcgacgcctataaaagttcggcagagcctgatgccgccagctttgaatacatctgcaacgcgctgcgtcagttagcgctggaagccaaaggtgaggcgtctgcgcccgctgtccctgcggcaaaactgagcgttgttgacgccgtggccgaacccgatacggcgcctgacgcgcccgcaggaaaactgcgcgtagtgctgtcacgtctgaaggagaacgaggtcaacctgctggaagaggagctggggaacctggcgacgctcagcaacgtggtgaagggcaaagacagcctggccgcgacgctcgacggcgggattggccaggatgacatcgtggcggtgctctgcttcgtgattgaagcggatcagattgcgtttgaaaccgaggcggcggccgttgaagcgcctgctccggcagagaatacccctgcggtagttgccgctgccccggccctgaaagccgtgccaaaagagacggccgctccggcccgcggtgaaaaaccagcggcgcgttccagcgagtccacgagcattcgcgtggcggtggagaaagtggatcagctgatcaacctggtgggtgaactggtcatcacccagtcgatgctggcccagcgctccaacgagctggacccggtgacccatggcgatctcatcaccagcatgggccagttacaacgtaacgcccgcgatttacaggaatcggtgatgtccatccgcatgatgccgatggaatatgtcttcagccgcttcccgcgcctggtgcgcgacctggccggcaagctcaacaaacagatcgaactcacgctgatgggcagctccaccgagctggacaagagcctgattgaacgcattatcgatccgttaacgcacctggtgcgtaacagcctcgaccacggcatcgagctgccggaaaaccgcgtagcagccggaaaatcgcccgtgggcaacctgatcctgtcagcggaacatcagggcggcaacatctgcatcgaagtgaccgatgacggcgcgggcctgaaccgcgagcgcattctggcgaaggcgatttcgcagggaatggcggtcaacgaaaatatgaccgacgaagaagtgggtatgttgatttttgccccgggcttctcaaccgcagagcaggtcaccgacgtttccggccgcggcgtgggcatggacgtggtgaaacgtaacattcaggagatgggcggtcacgttgagatccagtctaagcagggcgcgggcaccacgattcgtatcctgttgccgctgacgctggccattcttgacggcatgtccgttaaagtggcggacgaagtctttattctgccgctgaacgcggtgatggagtccctccagccgcgtgaagaagatctgcatccgctggcgggcggcgagcgcgtgctcgaagtgcgcggcgagtacctgccgctggtggaactgtggaaagtgtttgaagtggacggggcaaaaaccgaggccacgcagggtatcgttgtgatcctgcaaagcgccggacgccgctacgcgctgctggtcgatcagctgattggtcagcatcaggtggtggttaagaacctggaaagtaactaccgcaaagtgccggggatctctgctgccaccatcctgggtgatggtagcgtcgcgctgatcgtcgatgtatcggcacttcagggattaaatcgtgaacaacgtgtggcgaacacagccgcctga

SEQ ID NO: 114334 - DNA, 504 bp, Enterobacter cloacae
atgaccggtatgagtaacgtaacgaaactggcgggcgagccatctggacaggaattcctggttttcactttaggggatgaagagtacggtatcgacatcctgaaagtgcaggaaattcgcggttacgaccaggtaacgcgcattgcgaacacgccagcgtttatcaagggtgtgaccaacctgcgcggtgtgattgtgcctatcgtggacctgcgcgtgaagtttagccagggcgatgtggagtacaacgataacacggtggtgatcgtcctgaatctggggcagcgcgtggtggggatcgtggtggatggcgtgtctgatgtgctgtcgctgaccgccgatcaaatccgtcctgcgccggagtttgcggtcacgctgtcgacggaatatctgacggggctgggtgcgctcggcgagcgtatgctgattctggtgaatattgagaagctgctgaacagcgaagagatggcgctgctggatatcgcggcgaatcatgtagcataa

SEQ ID NO: 114335 - DNA, 1260 bp, Enterobacter cloacae
gtggcaagtgcaaacaaactcacgctcttcatcgtgattttcatgctggcgggcattctttcaggtgcggcaatccatgagtatgcttcgcccgacgcgatacaggcctggtcggagaacatcaccctgctgaccgatattttcctgcggctgattaagatggtgattgccccgctggtgttcagcaccctgacggtgggcattatgaagctgggtgaaacgtcgacgattggacgcgtcgggggtaaagcgatggtgtggtttatcagctcatccgtgctttccattctggtggggctgtttattgttacccttgaacaacccggcagcggtctgaacctgagcattccgacagagacggttgataccggcctggccgttagcgggatgtcgctgaaagccttcctgtcacacaccattccaaccagcattgccggcgcgatggcgaacaatgagatcctgcaaattgtggtcttctcgatgttcttcggcatcggcggcgcgtcattaggtcaaaaattcaactccccgctggtggcggcgctggatgtggtctcccacattatgctgaaagtgacgggctacgtgatgtacgttgcgccgctggccatttttgccgcgatttcgtccgtgattgccactcagggtctgggcattttgctgaactatgcctcgttcattggcggttactatgtggcgatccttctgacctgtctggtattgctggcggtaggttacatggtactgaaaaaagagattttacgtctggtggcgatgctgaaagatccggtgctggtcgcgtttaccaccagcagctcagaagcggcatacccgaaaacgctggagcagttagcgcgcttcggctgttcacgtaatatcgcctctttcgtcctgccgatcggctactcgtttaacctggtcggctccatggtgtactgctcgttcgcctcgatgtttatcgcccaggcatacaacattcacctgagtttcaccgaggtgacggtgctaatgttaacgttgatgctggcctcgaaagggattgcgggcgtaccgcgctcgtcgctggtggtgctggcggcgaccattccgagctttaacattccggtggccgggatcctgctcctgatggggattgaccatttcctggatatgggacgatcggccatcaacgtgctggggaacgggattgcaacggcgatgctgtcgcagaatgaaggggcgcgggaagcggaagcagcgctggtggagcaggaggcgtaa

SEQ ID NO: 114336 - DNA, 573 bp, Enterobacter cloacae
atgaaaagaaaacttctttttatctgcgcgggtacactgctgtcggcggcgactgtcggtcaggcgctggcagtcaccagtagcggtactatcggggcgacgctgacgctgacgaacggttgtttgatcaacggctcgccaacgcaaaacggcattaacttcgggacactcgatttcgggacccatcctgcgacattctccaccctgacaacccagttaaccggagccagcggcggaaacacctttaccattcaatgtaccactgccagttacacggtggcgatcaccggcaacaccaacgcgaccgcacccggaaccgttgttggcacccctggcacacccgcccgctatctggtgaacaccgccaatgcggcacagggcgtggcatacagcctctatagcgacagcgggtacaataacgtgatcgctaacaacgccgcgttgcccgtagcttccacagcgggcggggtgaacagctataccctctacgggcgcataacgggcggcggcaatagcgtaacggttgtaccgggaacctataccgacacgattaacgtcagcgtcacctactga

SEQ ID NO: 114337 - DNA, 504 bp, Enterobacter cloacae
gtgcacccttttttggctctgatcgtcgcgctgatgatgatctgcgacgccggggcggtaacctcccagtccttcagggtgagcgcgacggtagtaccagggtgctcggtgagtaccggcacgggcgggcgctttgggacgctggattttggaacccgcaatggcgtggacaacacgccggtcagcaccagctttgtcgccgacggcgcgttgtccatcgcctgcacgccgggcgtggcgctgagcatgagcattgacggcggccagaattacagctcggtgcgacggatgacgcgttcaggcgggaccgaagttgttggttaccggctctatagcagcagctctctggcggcgaacagtgaaattggggttaaccaggccataccgattacctataccaacagcaataacatcgcgctgcctctttttggcgtcgcgctcctgacggggtttagcctgccgggaacatattcagatcaactcaccgtgaccttgtcatggtag

SEQ ID NO: 114338 - DNA, 762 bp, Enterobacter cloacae
atgaagccatttttcaggcgatcgggcctggtgggtctgttgggggcaacggctctggctgcgggccaggcgcaggcagcggcaaccattcttctgtggcccatcgatccgtggctgtcggcagaggccagagcaactgaattgtggatccagaatcagggcaacagcgccacgacaatgcaggtgcgtattgtgcgctggaagcaggagggaggatatgagcgatacaccgcccagcaggatgtggttgccagcccgccgatcgtgaccatcgccaaaggcagtaaacagcttattcgcctcatcaagcaggggacgatcccgtcgggggttgagcaggcttaccgcattattgtggatgaaattccccagccggatgccaaagcggaaccgtccatgggcctcaaactgcaaatgcgctattcgattcctttatttgtttatgggcaggggatccccaccctcaacgaaggggcgcaccacgcgctggcgaacacgcaacagctgagctggcgggtcgttcaggagggggggaaacccgcgtttcaggtccgtaatcagggggatgttcacgtccggctcagccaggttgcggttgagcagggcgggcaaaaacgcacggttgccgaggggctgctgggttatgtgctgccaggcagcacccgaagctggccgcttccggcagggatttatcagccgaaccggatgagcgcgcaaattaatgccagggatacgcaatggcaatcgacgcccgtcaactga

SEQ ID NO: 114339 - DNA, 2385 bp, Enterobacter cloacae
atggcaatcgacgcccgtcaactgaaaccggcgatgatgatcctgctttgcgtcagtaccagcgcctttgccgaaaccggcgacgacagtttaccgccgccgccggatgcacggacgatgaacggcgaagcagtattccagctcgccctggtgctgaaccactatgacacgggtctggtggtgccggtgacgcagcgtgagggcgcctggtttatttcgggcgcggatttgctccgcgccgggctgccgcccgcgcatgtgccagccggagaggtgaatctctcgacgcttacgtcggtacgcgcagagtacgacagcacggcccagcgcctgttgctgacggtcccccgggactgggttgccgcgcggatcacgcctttcagtgagcagagcacgcaaagcaaaccgcactatggccgcggcgcgctgctcaattacgacgtttataccaatcattccgaacacacgggcggccaggcgtcggtctggcacgagttccgttatttcaatgaggattattcattttcatcgacgggctacgcccggcagaatttcaccggtaacagcggacagcaggaagggtatgtgcgttatgactctacgttactgatcaccaacgaagaggatgccaccacctggtccgccggggacgtcatcagcgatgcgctgagctggagcaccagcgtgcgcatgggcgggatcagctacgggcgcgacttctccctgcgtccggatctggtgacctggccactgcccgcgttttccggcgaggcggccgtcccgacctcggtcgatctctttattaatggctaccgttccggctccacccgccttcagccggggccgtttaccctcaccaatctgccgtatatcaacggtgccggggatgcggtactggttaccacggatgcgctgggacgtcaggtgagtaccacgctgccgttttatgtcagcagcgatctgcttaagcaggggttaagcgacggcgccgtgacgctgggcagcctgcggcgtaactacggtattgagaattttgactatggcccggcggcgggcagcggatcgtaccgctacggggtgaccgactggctgacgctggaggggcatgcggaaggggcggagtcgctggcgctcggcggtgcgggcacggtgctgaagctcgggcgttttggcgtggtaaatacctcgtggacccaaagccgcatgcgcggcgatagcggcggccagataaactggggctatcagtacaacaccagcgagtttagcgtagcgacccagcatacccgacgcgaccgtggcttcggcaatctcgccctgtacgatcagcccaccgtttatgatgaaaatgataaccccgttgccagcctgagccgcaataccgaccagtattccttaacctttaacctcggcggatacggcaatatcggcgcggcgtggatcggcgttgagagttttgacagccagaaaactgaactgctcaacctctcctggagccgtaatctgtggggctcaagcagtatttatctggctgccagccgtgaccagcagcgaggcgactggacggttgcgctgtcgttgcaggttcccctcggcgaacgtgacagcgccgccgtcacctttgaaaacacccctgacgcaggcagcactcaacgcattaactacaaccactcgatgccttcagacggcggctttagctggaacatggcctgggccaaccagtcgcggtcgagtaactatcagcaggccacgctcggctggcggaataacaacgtggagctacagggcggcggctacggtgagaagggcatgatgacctggtggggcgaggcgatgggctctgtcgtgctgatggacggtgagctgtttgcggcgaacaaaatcaacgatgcgtttgtggtgatcagcaccgacggtcatccggatgttcccgtcagctacgaaaaccagccggtcggaaaaaccaataacaaaggctatctgctggtgagcggcgtttccgcctattacccggcaagttaccgcattgataccctgaacttacctgcggatacccggctgaaagagaccgagcgtcgggtggcgattcgtcggcataacggttatctggtggatttcccgatggagcaggagcgggttgccagcgtgatcctgcacgatgcgcagggcaatgagatcccggtaggaagccaggtcagacgcgcgtcccgcagcagcgcggttgtcggctacgacggcctcgcctggctggaaaacctcaacgacgtgaatccgctcgaggtcatcaccccggagggtaaacgctgtacggcaacgctgaccgttggcgcaaaccctgaacataagctgcaaacctacggtccgctgacctgtcgggaggcgccgtga

SEQ ID NO: 114340 - DNA, 963 bp, Enterobacter cloacae
gtgagacgcctgttaatcgcgctcctgctgctgtgctccggcggcagctgggcggcctgtaccgtcagtacggtgaatgcctcgtttggcagcgtcacctcgttcgcactcagcggcaccggggaagtggaaacgacgggcacgctggtggtgacctgcgataccgttctcaacctgttaactaacgactcggtgacgctgaattacacctcggcatccgtcttcgcgaatagccgggcgaccatgaagcgtacggacaacgcggctattaccgatgtcatccctgcgcggctgtgcggggcgtccggctgcggcggaaacagtgaaatacaaatcagcaaagcctatacctggagcggaaacacgctgctcgggctgctgggttcaaggcgctacaacattcccctttatttccggaccgtaatggggcagaacgtcaccgccgggccgtatcaggtgttgttaacgttcagcattaactacaacgtgtgcgccgttggcgcggtcggagcgtgcctgaccccgcaaaccggtacggcaaccacctcgatcctcctcaacatgaccgtcaccaacgattgcagcaccatgaccacgccggacgtgaattttaacagcgcgccgctggtgcaaaattttcccaccgtttcacagtcggttgccgtcacctgcaccaaaggcagcacctacaccataggcattaataatggggcaaatgccctgaacaacgtgcgtcgtatggtcagcggcagcaacttcatgagttacgacatctacaaagaggcgaccagcaaccgctggggtagcagcggcagcgagcgctgggccagcgccagctcatcgcaggtcagtacggacgggcttttacgtacctacaactacaccgccaaagttctgaccagccaggccacgccgcctgccggaacctataccgacacgctgattgtcgacgtcgcattctga

SEQ ID NO: 114341 - DNA, 1668 bp, Enterobacter cloacae
atgttgaaccgtatccgcgttgtcacaatgcttatgatggtgctggtcattttcgcacttcttcagcttacttctggcggcctctttttctcgtcgttaaaacagaaccaggacagcttcgcggcctcgaacgatttgcgtatgcagcaaagcgaactgaccacgacctgggatctgatgttgcagacgcgtatcaacctgagccgctcgtctgcccgcatgatgatggacccaaataaccagcagagcagcgcaaaaacggaactgctgaagaatgcgcgcgccacgctggcagacgcggcgaaacattacgacgccttcaaaaaaatcgcccctcagccggcaatggcgcaggcgagcgcgaacatagatgaaaaatatcaggcctacttcgccggcctcacggagctggtgcagttcctggagatgggcaatatggacgcctatttcgcgcagccgacccagggaatgcagaacgccctcggcgcggcactcggcgagtacgctaaagccagcggcgagctttatcactccgcgttcacgcaaagccagaacgactaccgtttcgcgaaatggcagatggcggttctcgccctcgcgctggtcatcgtactggtggccgtgtggtacggcattcgtcatatcctgcttaacccgcttggccgcgtcattgcccatatccgtgatattggccggggcgatctcacgaaaacgctgaccgtttctggccgcaatgagatcaccgagctggcaaccagcgtcgaccatatgcagcgttcgctgattgataccgtcgccaacgtgcgcgagggggcggatgccatctataccggcacgagtgaaatcgcgatgggcaacaacgatctctcgtcccgtaccgaacagcaggcatccgctctggaagagacggcggccagcatggagcagctcaccgcgaccgtgaagcagaatgccgacaatgcccgccaggcgtcgcagcttgcagaaagcgcgtccgacaccgcccagcgcggcggtcgggtggtcgacggcgtggtgaaaaccatgcatgacattgccgacagctcgaagaaaatcgccgacatcatcagcgtaatcgacggtatcgccttccagaccaatatcctggcgctgaacgcggccgttgaagcggcgcgtgcgggcgagcaggggcgcgggtttgccgtggtcgccggcgaagtgcgtaacctcgccagccgcagcgccaatgcggcgaaagagatcaaagccctgattgaagactctgtttcacgcgtggataccggctcggtgctggtggaaagtgcgggtgaaaccatgaatgacatcgtgaatgccgtgacgcgcgtgacggacatcatgggtgaaatcgcctctgcatcggatgagcagagtcgtggtattgaccaggtcgccctggcggtatcggaaatggatcgtgtgacgcagcaaaacgccgccctggtgcaggagtccgctgccgcggccgctgcgctggaggaccaggcgagccgcctgaaaatggccgtctcggcgttccgtcttacttcaaaaacgacaaatacggtcagctcgcggtcggcgtacagcgaagcaaccccggcgcccgtgacaacacgtacgcgcgcagcggtgaccggacaagatgaaaactgggaaacattttga

SEQ ID NO: 114342 - DNA, 1602 bp, Enterobacter cloacae
atgttaaatcgtattcgtatctcgaccacactgtttttgattctgatcctgtgtggggttttgcaggttggcagtaacgggttgtctttctgggcgtttcgcgatggctatcagaatttgcaggaagttgagacgagtaatcagcagcgctccgcactggcacaaacgcgtgccgtgctgttgcaggcaagcactgcgctgaacaaagcagggacgttaaccgcgctgagctatccgccggaggatattaaggcgctgatggtcgtggcccgcagcagcctgaagcaggccgacgcgcagtttaaggcctttacggcgcaggaggcggtcagtgagaaagagaaagcgctgaaagtcgccatgaaaaagacctttgatgtgtggtacggcgatctcgaccatcaggcgacgtggctggagaacaaccagctttctgacttcctgaccgcgccggtgcaggcgtctcaggcggcgttcgacggcagctttaacgcctggcagcaggatattaaccagtttgtggcgcgtgccggtgcggacagccgtaccagctaccgcatgtcaggggcgattttcctgaccatggtgatcctggccgccctgctgaccggcggctcgctgtggtggtcgcgcaaaatgatcgtccagccgctggccatcgtcagcagccacttcgacagtatggcgaagggcgatctggcgcgtccggtggccgtgtatggcaggaatgaaatatcagcgattttcgccagcctgaaggcgatgcaggggtcgctgcgggaaacggtaagcaacgttcgccagggcagttacgccatgcataccgggatctccgagattgcggcaggcaataacgatctctcatcccgcaccgaacagcaggcggcatcgctggcgcagacggcggccagcatggagcagctgaccgcgacggtaagccagaacgccgataacgcgcgtcaggcgtccgacttgtcaaaacaggcggcgatgacggcgaaacgtgggggcgatcaggcctctcacgtcgccagtacgatgcaggagattgccgccagctcgcagaaaattggcgacattatcagcgtcatcgacgggatcgcgttccagaccaatattctggcgctgaacgcggccgttgaagcggcgcgtgccggggagcaggggcgcgggttcgcggtagttgccggtgaagtccgaaacctcgccagccgcagcgccaatgcggcgaaagagatcaaagggctgatagaagagtcggtctcccgcgttcagcagggctccgcgctggtggataccgccgcgcagaccatgcacgagattgtcacctccgtgacgcgggttaacgacattatgggcgagattgcctcggcgtctgatgaacaacgccgtggtattgagcaggtggcgcaggccgttacacagatggatcaggttacgcagcagaacgcctcactggtggaagaggcggcggcggcgaccgatcagctggcaaaccaggcggatcaccttaccgggttggtcgccgtatttaatgtgaaagagcacgttgaagcagtaacagaagtcggacggtcacaggccgtgcccgttgtatcctga

SEQ ID NO: 114343 - DNA, 867 bp, Enterobacter cloacae
atgacatcacccatgccctcagggcaaacgtcattattgttgcagatgacacagcgcctcgcgctgtccgacgcgcattttcgtcggatatgtcagttaatctaccagcgtgcggggatcgtgcttgcggaccataagcgagacatggtctacaaccggctggtgcggcgcttgcgtacgctggggctggatgattttggccgctatctgagcatgctcgaagcgaaccagaacagcgccgaatggcaggcatttatcaactcattaaccaccaacctgaccgcgtttttccgcgaggcgcatcacttcccggtgctggcggaacacgcccgtcgccgtagcggagagtatcgcgtctggagcgcggcggcctctaccggggaagagccgtactcgctggccatcaccctggcggacaccctgggcatggcgccgggccgctggaaagtgtacgccagcgacatcgataccgaagtgctggaaaaagcccgtaacggcgtttatcgccaggatgagcttaaaacgctgtctcctcagcagctacagcgttacttcatgcgcggtaccggcccgcatgaaggactggtgcgcgtacgccaggagctggcgaactgcgtggaatttgctcccgttaatttactggataagcagtacaacgtgccggggccattcgacgccattttttgccgtaacgtgatgatctattttgataaaacgacgcaacaggacatcctgcgtcgctttgttccgttgctcaagcctgacggtttactgtttgccgggcactcggaaaacttcagcaacctcgtgcgtgagtttagcctgcgtgggcaaacggtatatgcgctgagtaaggaaaaagcatga

SEQ ID NO: 114344 - DNA, 1050 bp, Enterobacter cloacae
atgagtaaaatcagggtattgtctgtcgatgattcggcgctgatgcgtcagatcatgaccgaaatcatcaatagccacagcgatatggagatggtggcgacagcgcccgatccgctggtcgcgcgggatttaatcaaaaaatataaccccgacgtgctgacgctggatgttgaaatgccgcgcatggatggcatcgatttcctggaaaaattaatgcgcctgcgcccgatgccggtggtgatggtgtcatctctgaccggtaaaggttcagaaatcaccctgcgcgcgctggagctgggggcggtggattttgtcaccaagccgcagctcggcattcgcgaggggatgctggcgtacagcgagatgatcgccgagaaaatccgtaccgcgtcgcgcgcaaaactcgcggcccacaagccgatggcagctccggcaaccctgaaggcagggccgttactcagctcggaaaagttgctggtcattggggcgtcaaccggaggaacagaggcaattcgccatgtactccagccattgccgctctcaagcccgggtattctgattacgcaacatatgccgccagggtttacccgttcgttcgcggagcgcctgaataagctgtgccagatcagcgtgaaagaggcggaagacggcgagcgcgtgctgccgggtcacgcctatatcgccccgggtgacaagcacatggagctggcgcgcagcggggcgaactatcaaatcaaaattcatgacgggccgccggttaaccggcaccgtccgtcggtggatgtgctgtttcattcggtggcgaaacatgcggggcgcaacgccgttggggtgatcctgacggggatgggcaacgacggcgccgccggaatgcttgcgatgcaccaggctggcgcctggacgattgcgcagaatgaagcaagttgtgtggtgttcggcatgccgcgcgaggccatcaatatgggtggcgtaagcgaagtggtcgatcttagccaggtaagccagcagatgctggcgaaaatcagtgccggacaggcaatacgtatttga

SEQ ID NO: 114345 - DNA, 390 bp, Enterobacter cloacae
atggcggataaagagcttaagtttttggttgtggatgacttttccaccatgcgtcgcattgtgcgcaacctgctgaaagagctgggcttcaacaatgttgaagaagcagaagacggggtggatgcgctgaacaaactccaggctggcgggtttggttttgtgatttccgactggaacatgccgaacatggacggtctcgaactgctgaaaaccatccgcgcggatgcgggcatggcctctctgccggtgctgatggtgaccgcagaagcgaagaaagagaacattattgccgctgcacaggcgggcgcaagcggctacgtggtgaagccattcaccgcggcgactctggaagagaagctcgggaagatcttcgagaaactcggcatgtga

SEQ ID NO: 114346 - DNA, 645 bp, Enterobacter cloacae
atgttgcaacctgctatgaaacccgttgaagaacattcgccgagcgacattattgcccgcattggtagcctgacccgcatgctgcgcgacagcctgcgcgagctggggctggaccaggctatcgccgaagcggcggaagccatccctgacgcgcgcgaccgtctggactacgtcgtgcagatgaccgcgcaggcggccgagcgtgcgctgaacagcgttgaagcctcgcagccgcaccaggatgcgatggagaagggggcgaaagcgctgagcaaacgctgggatgagtggtttgagaaccctattgagctggcggatgcccgcgaactggtaacggatacccgtcagtacctgggtgacgtgccgggacacaccagcttcactaacgcccagctgctggacatcatgatggcacaggatttccaggacctcaccggccaggtgatcaagcgcatgatggatgtgattcaggagattgaacgtcagctgctgatggtgctgctcgagaacataccggaaccggctgcccgtccgaaacgcgagaacgaaagcctgctcaatggtccacagcttgacaccagcaaagcgggcgtggtggcgagccaggatcaggtggacgatctgctggacagtcttggtttctga

SEQ ID NO: 114347 - DNA, 1149 bp, Enterobacter cloacae
gtggcagaagagaacgacgacaaaacagaagcccccacaccccaccgacttgaaaaagcccgtgaggatgggcagatcccccgatcccgagagctgacatccctgctgatcctggtggtgggcgtctgcataatctggtggggcggggagatgctcgcccgcagactggcgggaatgctctcggctggcttacgttttgatcacagcatggtcaatgaccccaatctgatcctcattcagatcatcaaccttgtgaaaagcgcgatgatcgccttgctgccgctgatcgcgggggtggtcatcgtggccctggtttcgccggtcatgctcggtggcctggtgttcagcggaaaatcgctgcaaccgaaattttctaagctcaatccgttccccggcattgcgaaaatgttttccgcgcaaaccggggctgagcttcttaaagcgatcctgaaatcgcttcttatgggcagtaccgccgggttttttctgtggcaccactggccggagatgatgcgcctcatcagcgagtccccgatgacggcgatgaagaatgccctgaacctggtcgggttatgctcgctgctggtggtactcagcattattccgatggtggcgttcgacgttatcttccagatctattcccatatcaaaaagctgcgaatgtcgcgtcaggacatccgcgatgaatataaacagatggaaggcgacccgcacgttaagggccgtatccgccagatgcagcgcgccgccgcgcgtcggcgcatgatggaagatgtgccgaaagccgacgtcatcgtcaccaacccgactcactattccgtggcgcttcagtacgacgaaaacaaaatgagcgcgccgaaagtggtggcgaaaggggccgggctgattgcgctgcgcattcgtgaaattgccacggaaaaccgtgtgccgatcctggaagcaccgccgctggctcgcgcgctgtatcgccacgcggaaattggacaacagatcccgggccagctctacgccgctgtcgcagaggtgctggcctgggtgtggcaactgaaacgctggcgtttagcgggcggtcaacgacctgtaaaacctgagaacctgccggtgcctgaagcactggattttttgaacgagaaggacactgatggctaa

SEQ ID NO: 114348 - DNA, 2079 bp, Enterobacter cloacae
atggctaatctggtggcaatgttgcgcctgcccggcaacctgaaatcgacgcaatggcagatccttgccggaccgattctgatcctgttaattctgtcgatgatggtgctgccgttaccggcatttatcctcgacctgcttttcaccttcaacattgccttgtccatcatggtgttgctggtggcgatgttcacccagcgcacgctggagttcgccgcgtttccaacgatcctgctgttcaccacgctgctgcgcctggcgctgaacgttgcctccacgcgtatcatcctgatggaagggcacaccggcgcggcggcggcgggcaaggtggtcgaagccttcggtcacttcctggtgggcggcaacttcgccatcggtatcgtggtgttcgtcattctggtgattatcaacttcatggttatcactaaaggggcggggcgtatcgctgaagtgggcgcgcgcttcgtgctcgacgggatgccgggcaagcagatggccatcgacgccgacctgaatgccgggctgatcgcagaagatgaagcgaaaaaacgccgtgccgaagtgacccaggaggcagatttctatggctccatggacggtgcgagtaagtttgtgcgcggtgacgccatcgcgggcattctgatcatggtgattaacgtcgtcggcggcctgctcgtcggcgtgctgcaacacggcatggacatgagccacgcggcggaaagctatacgctgctgaccattggtgacggtctggtggcgcagatcccggcgcttgtgatctccaccgcggcgggcgtgattgtgactcgcgtcagtaccgatcaggacgtgggcgagcagatggtggggcagctcttcagcaacccgcgcgttatgctgctctccgcggcggtgctgggcctgctcggtatggtgccgggcatgccaaacctggtattcctgctgttcaccgctgcgctgctggggcttgcctggtggatgcgtggccgggaaacgcagcctaaggcagagcctgcgccggtcaaaatgcctgagaacacccaggcggtggaagccacctggaacgacgtacagctcgaagattcgctggggatggaagtggggtaccgcctgatcccgatggtggatttccagcaggatggtgagctgcttggccgtatccgcagcattcgtaaaaaattcgcccaggatatgggcttcctgccgccggtggtccacatccgggacaatatggatctcccgcccgcgcgctaccgcatcctgatgaaaggggtggaaatcggcagcggtgatgcgtaccccggccgctggctggcgattaacccgggcaccgccgcaggcacgttgccgggtgagcagacgaccgacccggcctttggtctggcggcaatctggattgagagcgccctgaaagagcaggcccagattcagggttacacggtcgttgaggccagtaccgtggtggcaacgcacctcaaccacctgattggccagttctccgcggaactgtttggacgtcaggaggcgcagcagctgctcgaccgcgtaacgcaggagatgccgaagctgaccgaagatttggtgccgggcgtactgaccttaaccaccctgcacaaagtgctgcaaaatctgctcgatgagaaggtgcccattcgcgatatgcgtaccatccttgagacgctggccgaacatgcgccgctgcaaagcgatccgcacgaactgacggcggtggtgcgcgtggcgctcggacgcgccattacccagcaatggttcccgggaaccggcgaagtgcaggtcattggcctggacacgccgctggaacgtctgctgcttcaggcgttgcagggcggtggcgggctggagccgggtctggcggacagattactggcgcaaacccaggaggcgctggcgcgtcaggagatgctgggcgcgccgccggtgctgctggtgaatcacgcgctgcgtccgttgctgtcgcgcttcctgcgccggagcctgaaccagctggtagtgctgtcgaatatggagctgtccgataaccgcaatattcgcatgacggcgaccataggagggaaataa

SEQ ID NO: 114349 - DNA, 393 bp, Enterobacter cloacae
atgcgtaagtggctgtggatcttacttttcccgctggcggcgcaggccgcaggcgagggggcatggcaggccagcagtatcggcttgacgctcaaccatcggggggagtcgatctcctcccgtccgctgtccgcctctgagcccgtgtccgggcagatgacgctggtggcctggaattacaccctgacgggacccacaccggccgggttgcgggtgcggctgtgctcgctgacccgctgcgcggaaatcgagggtcaacgtggcactacccaggccttcaacggggtgtctgctcaggagcctttacgctttatctgggaagtgccaggcggtggacgtctcatcccggcgctgaaggttcagcgcaacgaggtgctcgtcaactaccgctaa

SEQ ID NO: 114350 - DNA, 1584 bp, Enterobacter cloacae
atgaaaacacgtaaaattggactcgcaaattattttgcttacgggtcaggggacttcctcggggcggggactaccgccctgacggccgcctggcttttgtatttttataccaccttctgtggactcacaccgattgaagcaacctttatcttcgctgccgcaagggtgctggatgcggttgtcagcccgttaatgggctttttaaccgataactttggcaccacctggctgggcaagcgctttggccgtcgtaagttcttcatcctgctcggtattccctgcgttttcagctactcgctgatgtgggtaggggacatgagtttctggtactacctgctgacctatctgatctttgatatcgtctacaccatgatcctggtgccatacgaaacgctggtgccggagatgacggacgatttcaaacagaaaaccaaattctccggggcgcgaatctctatggcgcagatgtccgccattctggcctccttcctgccggggatcctgctcacgcatttcggcaaagacaacgcgatctccttcttctatgcaagcctggtcttctccgtactctgcgcgctgatgcttactttcgtctggttcttcacctgggagcgtccgcgcgaagagtggtctgaagcggctctgcgtgccgaggaagagaagaaaaagctgaccctgggccagagcctgaaccgtctttttgtcgaattaagttcgacgctgcgcatcaagattttccgccagcatctggggatgtaccttggcggctacatcgcccaggacgtctttaatgcggtgttcacctattacgtggtatttgtgctgatgcaggaggcgtcaatggcgtccaacctgctggacacgatggccatcttccagttcctcgccgtgatcggcatgatcccgctgtgcattcgcttcggacctgcgccgtcttaccgcatggtggtcgtgctgtttggtctggcctcgctctcttacgcggtgctttattacgcgggcctgagcgacgtttacgctctgctgctgctgatctctgcggttgccggtcttggccgcgggggtatcaactacgtaccgtggaatacctacacctacattgctgacgtggacgaagtgatcaccggtcagcgtcgcgaagggatcttcgcgggcatcatgacgctgacccgtaaagcgtctcaggccggtgcggtgatgctggtggggatcgtgatgcagatgtcgggctttgtcagcgggcaaaaagtgcaacctgcggaagtgagccacaccattctgatgatcctgagcgttggcactattctggtgctgttctgcggcttccttgtctccctgcgcttcaaactcaatttgcagactcacagcaccctgcgtgaagagaccgcgaaaatgcgcgagtccggccatgcgatgccagaggcggtgaccccgcaggcccgcgctaccgtggagatgctggccggtatgccgtatgaatccctgtggggcaacaacaacatcggttatctgaatcgcaataagccggcggccccttcgctgaaggatcgcgcggtactgaattcgacatacaacagaggttaa

SEQ ID NO: 114351 - DNA, 1143 bp, Enterobacter cloacae
atgatgaaagtttggcctgtcaaacatagcccgttactgcgtcagcctgagcgctttatcgccagggatgagctgaaatcgctgattcaaaaggtgacgcataacctggtcaatatccacgacaaaacgggtgagtttttgctgcggctggacgacgggcgcgtgatcgacaccaaaggctgggccggatgggaatggacccacggcgtcggtttatacggtatctggcagtattactgccagaccggtgacgaaggcatgcgcgagattatcgacagctggtttgctgaccgtttcgctgaaggcgcaaccaccaaaaacgtgaataccatgtcgccgttcctgacgctggcgtatcgctacgaagagaccaaaaatcctgcctggctgccgtggctggaaagctgggcggaatgggcgatgaatgagatgccgcgcaccgaacatggcggcatgcagcacatcaccctggcggaagagaaccatcagcagatgtgggatgacacgctgatgatgacggtgctgccgctggcgaaaatcggcaagctgctgaacaagccggagtacgtcgaggaggcgatctatcagttcctgctccacgtacagaatctgatggatcgggagaccgggctgtggttccacggctggaattacgacggcaatcacaactttgcccgggcccgctgggcgcgcggcaacagctggctgaccatcgtcatcccggatttcctcgagctggtggatctgccggaaaacaacgccgttcgtcgctatctggtgcaggtactgaacgcgcagatcgccgcactggcaaaatgtcaggacgagagcggattgtggcatacgctgctggacgatcctgattcttatctggaggcgtcggccacggcagggtttgcctacggcatcctgaaagccgtgcgcaagcgttatgtcggcgcagagtacgcagaggtggcggagaaagcgattcgcggcatcgtgcaaaacatctccccggaaggggagctgctgcaaacgtccttcgggacggggatgggaagcgatctggcgttttaccgccagataccgctgacctcgatgccgtatggccaggcaatggcgattctgtgtctgacggaatatttgcggaaatatttctga

SEQ ID NO: 114352 - DNA, 1734 bp, Enterobacter cloacae
gtgaatattcaggctcttctctcagaaaaagtcagtcaggcactgattgccgcaggtgcgcctgcggattgcgaaccacaggttcgtcagtcagcgaaagtacagtttggcgactatcaggctaatggcgtgatggcagtggctaaaaaactgggcatgccgccgcgacagctcgctgagcaggtactgacgcatctggatctcaccggcatcgccagcaaaaccgaaatcgccggtccaggctttatcaacattttccttgagcctgcgttcctggcaagccacgttgacgcggcgctgaagtctgaccgtctgggcgtggctcagccagaagcccagaccgtggtggttgactactccgcgccaaacgtggcgaaagagatgcacgtcggtcacctgcgctccaccatcatcggtgacgcggcggtgcgtaccctggagttccttggtcacaaggtgatccgcgctaaccacgtaggcgactggggcacgcagttcggcatgctgatcgcgtatctggaaaagcagcagcaggaaaacgcaggcgaaatggcgctggcagacctggaaggtttctaccgtgaagccaaaaagcactatgacgaagatgaagccttcgccgagcgcgcgcgcagctacgtggtaaaacttcaaggtggcgacccgtacttcctcgagatgtggcgcaagctggtggacattaccatgtcccagaatcagctcacctataaccgtctgaacgtgaccctgacccgtgacgacgtgatgggtgaaagcctgtataacccgatgctgccaggcattgtggcggacctgaaagctaaaaatctggcggtggaaagcgaaggcgcaacggtggtgttccttgatgagtataaaaacaaggaaggcgaaccgatgggtgtgatcgtccagaaaaaggatggcggctatctctacaccaccaccgacatcgcctgtgcgaaataccgttacgaaaccctgcatgcggaccgcgtgctgtattacatcgactcccgtcagcaccagcacctgatgcaggcgtggactatcgtgcgtaaagcgggttatgtgccggattccgtgccgctggaacatcacatgttcggcatgatgctgggtaaagacggtaagccgttcaaaacccgtgcgggcggcaccgtgaagctttccgatctgctggatgaagcgctggaacgcgcgcgtcgcctggtggccgagaagaacccggatatgcctgctgacgagctggagaaactggctaacgcggttgggatcggcgcggtgaaatacgcggatctctccaagaaccgtaccaccgactatatcttcgactgggacaacatgctggcgtttgaaggcaacacggcgccatatatgcagtacgcttatacccgcgtactctccgtcttccgtaaagccaatatcgacgaaagcgtgctggcgaatgccacggtgacccttaccgaagatcgtgaagcacagctggctgcccgcctgcttcagttcgaagagacgctctccgtggtcgcgcgtgacggtacgccgcacgttatgtgtgcttacctgtacgatctggccggtctgttctctggcttctacgaacactgccctatcctctctgctgagagtgaagcggtgcgtcacagccgcctgaagctggcgcagctgacggcgaagacactgaagctcggtctggataccctgggtatcgaaaccgtagaacgtatgtaa

SEQ ID NO: 114353 - DNA, 561 bp, Enterobacter cloacae
atggcgaactggcataccattgacgaactgcatgatatttccgcagatttaccgcgcttcattcaggcgttcacagaacttgccacccgtctcgggctggatatcgcgccgcttgaggccgatcacatctctttgcgctgccaccagaatgccaccgccgaacgctggcggcgtggctttgagcagtgcggagaactgctgtcggagaatatcattaacggtcgcccgatctgcctgttcaaacttcacgcgccggtaacggtggcgcactggcaattcaccgttgtggaactgccctggccaggagagaagcgttatccgcacgaaggctgggagcatatcgaaattgttctgcctggggagcccgagacgctgaacgcccgtgcgctggcgctgctttccgacgaggggttaagccagccgggtattttcgtcaaaaccagctcgccaaaaggggagcgcgaacgcttaccgaaccctacgcttgccgtaacggacggcaacgtgacggtgaaattccatccctggactatcgagcagatcgtcgccagcgaagcgtaa

SEQ ID NO: 114354 - DNA, 744 bp, Enterobacter cloacae
atggcgctgctggaaatttgttgttacagcgtggagtgtggcgtcactgcgcaacggcacggggccgatcgcatcgagctttgcgcggcaccgaaagaagggggattaaccccgtcctttggcgtgctgaaatcagcccgccaggccatcaccattccggtgcacccgattattcgcccgcgcggcggtgatttttgttatacggcgggtgagttcagtgccatgcttgaggatatcgccctcgtccgtgattccggttttccggggcttgtgatcggtgtgctggacgaagacggcaacatcgatcttccgcgtatgcgtcaggtcatgcgcgccgcccgggggatggcggtcacttttcatcgtgcgttcgatatgtgtaaggatccgatacaagcctttgatacgctggcagaactgggcgtggcgcgcgttctgacgtcgggccagcagtcctcggctgaaaaaggactgaaattaattacggaactaaaagcacattccggtgttccaataatcatggcgggcgcaggagtacgcgccagcaatctggaactgtttttaaacgcaggggtggaagagctgcacagctcggcgggtaaatggataccttcacccatgcgttatcgcaatacagggttgtcaatgtcgacggatgctgaagcggatgagtactcgcgctacggtgtggatggagagtcggttgcggtaatgaaatcgttgattgaacgtcatcacgtgtag

SEQ ID NO: 114355 - DNA, 972 bp, Enterobacter cloacae
atgatcgagttcggtaatttctatcagctgattgccaaaaaccacctttcccactggctggaaaccctgcctgcgcaaattgccgcctggcagcgcgatcagcagcatggtctgttgaagcagtggtccaacgccgtggagtttctgcctgaactgacgcctcatcgtctggatttgctgcacagcgtgacggcggagagcgaagagccgctcccggccgggcagatcaaccgcatcgaaacgctgatgcgtaacctgatgccgtggcgcaaagggccgttctcgctgtacggtgtaaatatcaacaccgagtggcgctctgactggaagtgggatcgcgttctgccgcatttatccgacctgaccgggcgcaccattctggacgtgggctgcggtagcggctatcacatgtggcgcatgatcggcgcaggcgcgcatctggccgtcggtatcgatccgatgcagctgttcctgtgccagtttgaagcggtgcgtaagctcctgggtaacgaccagcgtgcgcacctgctgccgctgggtatcgagcaactccctgccctgaaagcgtttgataccgttttctcgatgggtgtgctgtaccaccgtcgttccccgctggagcatctctggcagttgaaagatcagctggtcagcggcggcgaactggtgctggaaacgctggtcatcgaaggcgatgaacatgccgttctggtgccgggcgatcgctatgcgcagatgcgcaacgtttacttcatcccttccgcgctggcgctgaagaactggctggagaaatgtgggtttgtcgatgtacgcatcgccgatgtgtgcgtgacgtcagttgaggaacagcgccgcaccgactggatgatcaccgaatcgctggagcaattcctcgacccggacgatcacagtaaaaccatcgaaggctatccggccccgatgcgtgcggtattgattgcgaccaagccgtag

SEQ ID NO: 114356 - DNA, 744 bp, Enterobacter cloacae
atgtcagatcgcgacacgcttttttccgcgcctatcgccagcctgggcgactggacctttgatgaacgggtagccgaagtcttcccggatatgatccagcgctctgttcccggttattccaatattatctccatgatcggcatgctggcggagcgttttgttcaacccggcacgcaggtctatgacctgggttgttcgctgggagcggcaacgctgtctattcgtcgtaacgttcatcacgaaggctgcaagattgtggctgtcgataactcaccggctatggttgaacgctgccgtcgccacattgatgcgtataaagcccctacgcctgtggaggtggtagaaggcgatatccgcgatatcgacatccagaacgcctcgatggtggtactgaactttacccttcagttcctggtaccggacgatcgtcagcggttgctggataagatttatcagggcctgaacccgggcggcgcgctggtgttgtctgagaaattcagctttgaagacgccagcgtgggcgaactgctgttcaacatgcaccatgatttcaagcgtgcaaatggctacagcgagctggagatcagccagaagcgcagcatgcttgaaaacgtcatgctgacggattctgtagaaacccacaaagcgcgcctgcgcaaagccggatttgaacacagcgaactgtggttccagtgctttaactttggttctctggtggcgcttaaagccggagacgcagcatga

SEQ ID NO: 114357 - DNA, 396 bp, Enterobacter cloacae
atggtcagcgcgctgtatgcggtgttaggtgcattactgctgattaagttttcatttgatgttgtgcgcctgagaatgcagtaccgcgtctcgtacggtgacgggggcttttctgagctacaaagcgcaatccgcatccacggcaacgcggtcgagtacattcccgtcgcgttaattttactgctgttaatggagatggatggcgctgaaacctggatggtgcacgtctgtgggctgctgctgattgcagggcgtttgatgcattattatggttttcaccaccgcctgatccgctggcgtcgttccggcatgagcgcgacctggtgctcgcttttgctgatggtgctggctaacctttggtatatgccgtgggagttggttttctccttccattag

SEQ ID NO: 114358 - DNA, 819 bp, Enterobacter cloacae
atgatgtacgtgggcctgccccagtggtcgcacccgaaatgggtgcgcctgggtattaccagccttgaagagtatgcccgacactttaactgcgtggagggcaataccacgctgtacgctctgccccgcgcggagatcgtcgaacgctggcgcgagcaaaccagcgacgacttccgcttttgctttaaattcccggcgaccatctcccacaacgccgcgctgcgcaactgcgatgatttaacccacgagtttttcacccggatgtcgcctctggccaaccgtattggccagtactggctccagcttcccgccacgtttggcccgcgcgacctgcctgccctctggcagtttctcgacgccctgccgcatggcttcacctacggcgtagaagtaaggcatccggaattctttgccaagggcgacgcggagaaagcgctcaatcgcggcctgcatgaacgatcggtcaaccgcgtgatcctcgacagccgccccgtacatagcgcaatcccgcacagcgaagccgttgttgatgcccagcgcaaaaaaccgaaagtgcccgtccacgcgatcgtaacggcacagaacccgatggtccggtttatcggcagcgataacatgcagcaaaatgaggagatgttcgccgtctggctgcaaacgctggcgaaatgggagcacaccaccacgccgtacctttttttacatacgccggatatcgcacaggcgcctgaactggtcgatgctctctggcaggccttgcagcaggcggttccgtcggttggccccgcgccgtccatcccacaacaatcttctcttttctga

SEQ ID NO: 114359 - DNA, 567 bp, Enterobacter cloacae
atgtttacacttgatgccaccaaaaccgcccttgtggtcattgatttacaggaaggcattctgccttttgccggtggtccgcacaccgctgacgatgtggtcagccgcgctgcgcgcctggcagaaaaatgccgcgccagcggctcgcctgttgttatggtgcgcgtcggctggtccgctgatttcgccgaagcgttaaaacagccggttgatgccaaggccccggcgcaggcgctgccggacaactggtggacatatcctgtctcgctcggtaaacgcgacagcgatatagaagtcaccaaacgccagtggggcgcattctacggcaccgacctggagctccagctgcgccgtcgcgggatcgacactattattctgtgcgggatctccaccaacatcggtgtggaatccaccgcccgtaacgcctgggagctgggctttaacctggtgatcgcggaagatgcgtgcagcgcagcctctgcggatcagcaccagggcagcatgacccatatcttcccgcgtatcggtcgcgtgcgcagcacggatgagatcctcagcgcgctatga

SEQ ID NO: 114360 - DNA, 1773 bp, Enterobacter cloacae
atgcgtacagaatattgcgggcagctgcgtcagtcccacgtcgggcagcaggtcaccctgtgtggttgggtcaatcgtcgtcgcgatcttggtagccttatctttattgatatgcgtgaccgcgaaggtatcgttcaggtgttcttcgatccggatcgcgctgatgcgttgaagctggcttctgagctgcgcaatgagttctgcattcaggtgacgggcaccgtgcgtgcgcgtgacgagaaaaacgtcaacgccgacatggcgaccggcgctatcgaagtgctggcgtccgatctgacgatcatcaaccgcgcggaagcgttgccgctggactccaaccacgtcaacaccgaagaagcgcgtctgaaataccgctacctggatctgcgtcgtccggaaatggctcagcgcctgaaaacccgtgcgaaaattaccagcctggtgcgccgttttatggatgaccacggtttccttgatatcgaaaccccgatgctgaccaaagccacgccggaaggcgcgcgcgactacctggtgccatcccgcgtccataaaggcaaattctacgcgctgccgcagtcaccacagcttttcaaacagctgctgatgatgtccggcttcgatcgctactatcagatcgtgaaatgcttccgcgacgaagacctgcgcgctgaccgtcagccagaatttacccagatcgatgtggaaacctccttcatgaccgctgagcaggtgcgtgaggtgatggaagccctggtgcgtagcctgtggaacgacgtgaaaggcgttgagctgggcgatttccctgtcatgaccttcgcggaagccgagcgtcgctacggttctgacaaaccagacctgcgtaacccgatggagctggtggacgtggcagacctggtgaaagccgttgagttcgcggtctttgctggcccggctaacgatccgaaaggccgcgtggctgccctgcgcgttccgggcggtgctgccctgagccgtaagcagattgacgactacggcaacttcatcaagatctacggcgcgaaaggtctggcctatattaaagtaaccgagcgtgcaaaaggtctggaaggcatcaccagcccggtggcgaagttcctgaatgcggacatcgtggaagcgatccttgagcgcaccggcgcgcaggacggcgacatgatcttcttcggcgcagacaacaagaaagtggttgcggatgcgatgggcgcgctgcgtctgaagctcggcaaagacctgaacctgaccgacgaaagcaaatgggcgccgctgtgggtgatcgacttcccgatgtttgaagacgacggtgaaggcggcctgaccgcgatgcaccacccgttcacctcgccaaaagagatgacggcggcagagctgaaagcggcgccggaagacgcggtggcaaacgcctacgatatggtcatcaacggctacgaagtgggcggcggctccgtgcgtattcacagcggtgaaatgcagcagaccgtgttcggcattctgggcattaacgagcaggagcagcgcgagaagtttggcttcctgctggacgccctgaagtacggtacccctccgcacgcgggtctggccttcggtcttgaccgtctgaccatgctgctgaccggcaccgacaacatccgtgatgtgatcgccttcccgaaaaccaccgcagcggcgtgtctgatgactgaagcgccaagctttgccaacccggccgcgctggctgagctgggcattgaggtggtgaagaaggaagagaaaaactga

SEQ ID NO: 114361 - DNA, 444 bp, Enterobacter cloacae
atggcatataagcgtcccgtttcggttctggtggtcatttatgcagaagacacgaagcgggtgctgatgttgcagcggcgcgacgatccggatttctggcagtcggttaccggcagcctggaagagggggagaccgcgccgcaggccgccgcgcgtgaagtaaaggaagaggtcgccattgatgttgcttacgagcaactgaccctgaaggactgtcagcgcacggtggagtttgaaatttttagccatttacgtcatcgctatgcaccgggcattgagcgcaatacggaatcgtggttctgccttgcgcttccccatgagcgggagatcgtgttcacggaacacctgacctaccgctgggtgaatgcggcggatgccgccgcactgaccaagtcgtggagcaaccggcaggcgattgaagaatttgtaattaacgctgcctga

SEQ ID NO: 114362 - DNA, 741 bp, Enterobacter cloacae
atggcaggtcatagtaagtgggccaacaccaaacaccgcaaagcggcacaggatgccaaacgcggtaaaatctttaccaaaatcattcgtgagctggtgacagcggcgcgtttgggcggcggcgatccggcctctaacccacgtctgcgcgcggcggtggataaagccctgtccaacaacatgacgcgtgacaccctgaaccgtgccatcgcacgtggcgtgggcggtgatgaagacgcgaacatggaaaccatcatttatgaaggttacggtcctggcggtacggcggtgatggttgagtgtctgtccgacaaccgtaatcgtaccgttgcggaagtgcgtcacgcgttcaccaaaactggcggcaacctgggcactgacggttctgtagcgtacctgttcagcaaaaaaggcgtcatctccttcgagaaaggcgacgaagatgcgatcatggaagcggcgctggaagccggtgcggaagacgtggtgacctacgacgacggtgctattgatgtttacaccgcatgggaagagatgggtgccgtgcgcgatgcgctggaagcggctggcctgaaggcggataacgctgaagtctccatgatcccgtctaccaaagcggacatggatgcggaaaccgcaccgaaactgctgcgtctgatcgacatgctcgaagactgcgacgacgtgcaggaagtgtatcacaacggtgaaatctctgatgaggttgcagcgactctctga

SEQ ID NO: 114363 - DNA, 522 bp, Enterobacter cloacae
atgtcgattattctcgggattgaccccggctcacgcgtcaccggctatggcgttatccgtcaggtgggacgccagctaacctacctcggcagcggctgtattcgcaccaaagtggacgatctgccgtcgcgcctgaagctcatctatgcgggcgtgtcggagatcatcacccagttccagccggactatttcgccatcgagcaggtctttatggcgaaaaacgctgactcggcgttaaagctcggtcaggcgcgcggcgtggcgattgttgccgccgtgaaccaggatctgccggtgtttgagtacgcggcccgtcaggttaagcagacggtggtgggcattggtagcgcggagaaaagccaggtgcagcacatggtgcgtaccctgctgaagctccctgcgaacccgcaggccgacgccgcggatgcgctggccattgcgattacccactgtcacgtcagccagaatgcgatgcaaatgagcgagtcgcggctcaatctggcgcgaggcaggttacgataa

SEQ ID NO: 114364 - DNA, 615 bp, Enterobacter cloacae
gtgataggcagactcagaggcatcatcattgaaaaacaacccccgttagtgctgctggaggtgggtggcgtgggctatgaagtccatatgccgatgacctgcttctatgagctgccggaggcgggcaaagaggcggttgtctttacccagtttgtggtgcgtgaagatgctcagctgctgtacggcttcaataacaaacaggaacgcacactgttccgcgaattgattaaaaccaacggcgtcgggccgaagctggccctggcgattctgtccggtatgtcagcgccacagtttgtgaacgccgttgagcgtgaagatccagctgcgttaattaaacttccgggcatcgggaagaaaaccgccgagcgcctgattgtcgagatgaaggaccgcttcaaaggtctgcatggcgatctgttcacgccggcagccgatctggtgctgacttccccgggcgcgcctgcatcggatgatgatgccgagcaggaagcggttgccgcgctggtggcgctgggctataaacctcaggaggccagccggatggtgagcaaaattgctaaaccggatgccagcagtgaaactctgattcgtgaagcgctgcgcgctgcattgtga

SEQ ID NO: 114365 - DNA, 1011 bp, Enterobacter cloacae
atgattgaagcagaccgcctggtatcggcaggcactattcagccagatgacgtggtggatcgcgcgatccgtcccaaactgctggatgagtacatcggccagccgcaggttcgttctcagatggagattttcatccaggcggcaaagctgcgcggcgatgcgctcgatcacctgctgatttttgggccgccggggttaggtaaaaccaccctggcgaatatcgtcgccaatgaaatgggcgttaacctgcgtaccacctccggcccggtactggagaaagcaggggacctggcggcgatgctgaccaacctcgaaccgcatgacgtgctgtttatcgatgagatccaccgtctttcaccggtggtggaggaagtgctctatccggcaatggaggattaccagctggatatcatgatcggtgaaggcccggccgcgcgctcgatcaaaatcgatctgccgccgtttaccctgattggcgccacgacccgcgccggctctctgacctctccgctacgcgaccggtttggtatcgtgcagcgtctggagttttatcaggtgcctgaccttcagcatattgtgggccgcagcgcgcgctacatggggctggatatgagcgaagagggggcgtttgaagtggcgaagcgctcccgcggtacgccgcgtatcgccaaccgcctgctgcgccgggtgcgtgactttgccgaggtgaagcacgacggcaccatatcggccgagatcgccgcccaggcgctggatatgctgaatgtcgatgccgaaggctttgactatatggaccgtaagctgctgctggcggtgctggataagttctttggcgggccggtagggctggataacctggcggcggcaattggcgaagagcgtgagactatcgaggacgtgctggagccgtatctgatccagcagggcttcttgcagcgtaccccgcgtggtcgtatggcaacggtgcgggcgtggaatcatttcggcattactccgcccgcgatgccgtaa

SEQ ID NO: 114366 - DNA, 786 bp, Enterobacter cloacae
atgattgaactgttactgcccggctggctggccgggattatgcttgcctgcgccgcgggtccactcggctcgtttgtcgtctggcgcagaatgtcctatttcggcgatacgctggcccatgcttcattgctgggtgtggcgtttggtttgttactggacgtgaacccgttttatgcggtgattgtcgtcacgctgctgctggctgccggtctggtctggctggaaaaacgccctcacctggcaattgataccctgctcggcattatggcgcacagcgccctgtcgctgggcctggtggtagtgagcctgatgtcaaacatccgcgtagacctgatggcctatctgttcggcgatctgctggccgtcacgcccgaagatctgatttctattgccattggcgtggcagtggtgctcgggatcctgctgtggcagtggcgaaatttactggctatgaccgtcagcccggatctggcctttgtcgacggcgtgaagcttcagcgcgtgaagctgctattgatgctggtgacggcgttaaccatcggcgtggcgatgaagtttgtcggcgcgctgatcatcacgtcgctgctgataattcctgccgccactgcgcgccgttttgcgcgtacgccggagcaaatggccggtatcgcggtgattatcggaatgattgcggtgacgggcgggttaaccttctcggcgttttatgacacgccagcggggccgtcggtggtactgtgcgcggcggtgttgtttattttcagtatgatgaaaaagaccgcgcagtag

SEQ ID NO: 114367 - DNA, 756 bp, Enterobacter cloacae
atgacgactttagtttctcttgaaaatgtttcggtctcattcggccagcgccgcgtcctttctgaggtgtcgctgaatctgaagcccggcaaaatactcacgctgctcggccctaacggtgcaggcaagtcgacgctggtacgcgtcgtattaggcctggtagcccctgatgcaggtgttatcgtccgccaagacaagttgcgtatcggctatgtgccgcaaaaattacacctcgatgccaccctgcccctgacggtgagccgcttcctgcgcctccgtcccggtacgcgtaaagcggatatcctcccggcgctgaaacgcgttcaggcgggacatcttgttgaggcgcccttgcaaaagctgtcgggcggtgaaacccagcgcgtattacttgcccgcgccctgctcagcagccctcagctgctggtcctggacgagccgacgcagggtgttgacgtcaacggtcaggttgcgctgtacgatctgattgaccagctccgtcgggagctaaactgcgcggtgctgatggtgtcccatgatctgcacctggtgatggccaaaaccgacgaagtgctgtgcctgaaccatcacatttgttgttccggcacgccggaagtggtgtcaatgcatccggaatttatctctatgtttggccatcgcggcgccgaacagctgggcatctatcgtcataatcacaatcaccgccatgatttacagggacgaatcgtcctgcgtcggggaaatggacactcatga

SEQ ID NO: 114368 - DNA, 960 bp, Enterobacter cloacae
atgattagtcgcattatgttacagaaaaatacgcttcttttcgcagctttatccgctgctctttggggtacaacagcacaagatgttaacgccgccgttgtcgcttcgcttaaaccgcttggatttatcgcctctgccatcgcggatggggtcactgagacccaggttctgctgcctgacggtgcttccgagcatgattattccctgcgtccatctgatgtaaaacgcttacagaacgcggacttagtcgtctggattggtcctgagatggaagcgttcatgcagaagtcagccagtcagcttcccgctgagaaacaggtgacgattgccgggctgtccggcgtgaaaccgttactcatgaaaggagctgaggacgagggtgacgaacacgaccacgaccatgctcacggtgaaaaaggtgacgaccatcaccatcacggcgaatacaacatgcatctctggctctccccagagatagcgcggcttacagcggttgcaatccacgacaaattagtggaacttatgccgcaaagtcgaatcaaactcgacgccaacctgaaggattttgaggctcaattagccgcaaccgacaaacaggtgggtaacgagctcgcaccgcttaaaggaaaagggtacttcgtttttcatgatgcctacgggtattacgagaaacattacggtctgaccccgctggggcattttaccgtcaaccctgaaattcagcctggtgcgcagcgtttacatgaaatcagaacacagttggttgagcaaaaagcgacatgcgtttttgctgagccacagttcaggccagcggtcgtagaagccgtggccaggggaacatccgtgcgcatgggaacccttgacccgctaggtacgaacatccagttgagcaaagcgagctattcgcagttcctcagccaactggcgaatcagtatgcgagctgcctgaaaggagattaa

SEQ ID NO: 114369 - DNA, 1320 bp, Enterobacter cloacae
gtgcaacagatagcccgctctgtcgccctggcatttaacaatctgcctcgacaccaccgcgttatgctggggtcgcttacagttctcacattagcggtcgccgtctggcggccctatgtttaccacccgagttccgccccaatcattaaaaccatcgaactggagaagagcgagatccgctctctgctgcctgaggccagcgagcctatcgatcaggccgctcaggaagatgaagcgattccccaggatgagctggatgacaagatccagaatgaagccggcattcatgaatatgttgtatctactggcgatacgctgagcagcgtcctgaaccagtacggtatcgacatgggcaacatcagccagctcgccgcatccgataaagagctgcgtaacctgaaaattggtcagcagctttcctggaccctaacgcccgacggcgatctgcaacgtctgacctgggagatgtcccgtcgcgaaacccgcacctacgatcgcactgcaaacggtttcaaaatgaccagcgaattgcagcagggcgactgggttaacagcgtcatgaaagggaccgtcggcggcagctttgtttccagcgcacgcgatgccggcctgaccagcgctgaaatcagctcggtgatcaaagccatgcagtggcagatggatttccgcaaactgaaaaaaggcgatcagttctctgtcctgatgtcccgcgaaatgctggacggtaagcgcgagcagagccagctggtgggcgttcgtctgcgttcagacggcaaagactactacgctattcgcgcggaagacggtaagttctatgaccgcagcggtacgggtctggcaaaaggcttcctgcgtttcccaacggcgaaacagttccgcgtctcctccaacttcaacccgcgtcgtctgaacccggtaactggccgcgtagcgccgcaccgtggcgttgacttcgccatgccgcagggcacgccagtgctggcggtaggggatggtgaagtggtcatggcgaaacgcagcggtgctgctggctactacgttgctattcgtcacggtcgtacgtacaccacccgctacatgcacctgcgtaaactgctggtcaaaccgggccagaaagtgaaacgtggcgatcgcatcgcgttgtccggtaacaccggccggtcgacggggccgcacctgcactacgaagtgtgggtcaaccagcaggcagttaacccgctgacggcaaaactgccgcgcaccgaagggctgaccggcaaagatcgcaaagattacctggcgcaggtgaaagaggtgatgccgcagctgcgcttcgactaa

SEQ ID NO: 114370 - DNA, 972 bp, Enterobacter cloacae
atggaaaccaaaaaaaacaatattgagtacattcctgagtttgaaaaatcttttcgccacccgcgtaactggggcgcctggcttggcgtatacgcgtttgctggcatggcgttgctacctgcttccctccgcgatccggtgctcggcaaagtggggcgcctggcagggcgcttaggtaaaagcgcacgccgccgcgcgcaaataaatctgttgtactgttttccggataaaagcgacgccgaacgcgaagcaatcattgatgacatgtataccaccgcgccccaggccatggcgatgatggcggaactggcgctgaaagggccggagaagatcgtcgaacgcgttgactggaaagggctggagatcatcgacgagatgcgtcgcaatgatgaaaaggtgattttcctggtgccgcacggctggggggtagacattccggcgatgttaatggcgtcgcagggccagaaaatggcggcgatgttccataatcagggaaacaaaatctacgacttcgtctggaataccgtgcgccgtcgctttggcgggcgtttgcacgcccgaaacgatggcattaagcctttcattcagtcggtacgtcagggttactggggctactatctgcccgatcaggaccacggcccggaacacagcgagtttgtcgatttcttcgcaacctataaagccacgctacccgcgattggtcgcctgatgaaagtctgccgcgcccgcgtgatcccactgttcccggtttatgacggtaaaacgcatcgcctgagcattgaggtacgtccaccgatggacgatctgctgaccgcagacgatcacaccatcgcacgtcgcatgaatgaagaggtggaggtgctggtggggccgcataaggagcaatatacgtggatcctgaagttgctcaaaacgcgtaaacctggtgaaacagagccgtacaagcgtaaagagcttttcccgaagaaatag

SEQ ID NO: 114371 - DNA, 1443 bp, Enterobacter cloacae
atgtccagaaggcttcgcagaaccaagatcgtcaccaccttaggcccggccaccgaccgcgataataacctcgaaaagattatcgccgcgggtgccaacgtggtgcgcatgaacttctctcacggtacgccagaagaccataaattacgtgccgacaaagtgcgtgaaatcgcagctaaactgggccgccatgttgctatcctcggtgacctgcaaggtccaaaaatccgcgtatcgacctttaaagaaggcaaagtcttcctcaacatcggcgataaattcctgctggatgccaacctgagtaaaggcgaaggcgataaggaaaaagtgggtatcgactacaaaggtctgcctgctgacgttgtgcctggcgacatcctgctgctggacgacggacgcgtacagctgaaagtgctggaagttcagggtatgaaggtattcaccgaagtgaccgtcggcggcccgctctccaacaacaaaggcatcaacaaactcggcggtggcctgtctgccgaagcgctgaccgataaagacaaagcggatatcgtgaccgcagcgcagatcggcgtggattacctggccgtctccttcccgcgctgcggcgaagatctgaactatgctcgccgcctggcgcgcgatgcaggctgcgatgcgaaaatcgttgcgaaagtggaacgcgctgaagcggtctgcgatcaggacgcgatggacgacgtgatcctggcgtctgacgtggtgatggttgcccgtggtgacctgggcgtggaaattggcgatcctgaactggtcggtatccagaaagcgctgatccgtcgcgcgcgtcagctgaaccgcgcggtgatcaccgccacccagatgatggaatccatgatcaccaatccaatgccaacccgtgcggaagtcatggacgtggcgaacgccgtgctggatggtaccgatgcggtgatgctgtcagcggaaaccgcggcaggtcagtatccggcagaaaccgtggccgccatggcgcgcgtgtgcctgggtgcagagaagatcccaagcattaacgtctccaagcaccgcctggatatccagttcgacaatgtggaagaagcgattgcgatgtctgcgatgtacgcagccaaccacctgaaaggggtcacggcgatcatcaccatgaccgaatctggccgtaccgcgctaatgacgtcccgtatcagctccggtctgccgatcttcgccatgtcccgtcacgagcgtacgctgaacctgacggcgctgtatcgcggcgtgacgccagtatacttcgacagcaccaacgacggcgtggccgccgcgcacgatgccgtgaacctgctgcgcgacaaaggttatctggtatccggtgatatcgttatcgtgacgcagggtgacgtgatgagcaccatcggctcaaccaataccacccgcgtactgaccgtagagtaa

SEQ ID NO: 114372 - DNA, 888 bp, Enterobacter cloacae
atgagcgtcttgttaacaatgaacatgctggaaaaaatccagtttcaactggaacaccttagcaaatccgagcgcaaagtggctgaagttattctcgccgcgcccgctcaggcgattcattcaagcatcgccgctctggcacaggaatcgggcgtcagcgaaccgacggtcaatcgattctgtcgtagtctggacacgcgcggctttcctgattttaaactgcatctggcccaaagtctggcaaacggcaccccgtatgttaatcgcaatgtagatgaagacgacagcgttgatgcttacaccgcaaaaatatttgaatcggctatggccacgctcgaccacgttcgccagtctctggacatgagttcagtgaatcgcgcggtcgatcttctcacgcaggccaaacggattgccttctttggccttggctcgtccgccgccgtggcgcatgacgccatgaataagttctttcgctttaacgtgccggtgatttactccgatgacattgtgctgcaacgcatgagctgtatgaattgtagtgaagatgatgtcgtggtactcatctcccatacgggccgcaccaagagccaggtggagctggcgcagctcgcgcgtgacaacgatgcgatggtcatcgccctgacgacggcaggtacgccgctggcccgggaagcgacgctcgccattaccctggacgtaccggaggacaccgacatgtacatgccgatggtctcccgcctggcgcagttgacggtcatcgacgtgctggcgaccggttttaccttacgccggggcgcaaaattccgggataacttgaagcgggtcaaggaagccctgaaagaatcgcgttttgataaagaattgcttataaagagcgatgttccctaa

SEQ ID NO: 114373 - DNA, 1476 bp, Enterobacter cloacae
atggcggtaacgcaaacagcccaggcatgtgacctggtcattttcggcgcgaaaggcgatcttgcacgccgaaaattgctgccttccctgtatcagctcgaaaaagcgggccagatccatcccgacacccgaatccttggggtagggcgcgcagactgggataaggaggcttataccaaagtcgtgcgcgaggcgctcgaaacgttcatgaaagagaaaatcgatgaaagcctttgggataagctgagcgggcgtctcgatttctgcaacctggacgtcaatgatgtaggcgcctttacccgtctgggtgaaatgcttgaccaggaaaatcgtgtcactattaactatttcgcgatgccgccaagcaccttcggcgccatctgcaaaggtctgggcgaggcgaagctgaacgccaaaccggcgcgcgtggtgatggagaaaccgctgggtacgtcgctggcgacctcgcgtgaaatcaacgaccaggtgggcgagttctttgaggagtgtcaggtttaccgtattgaccactatctgggcaaagagacggtactgaacctgctggcgctgcgttttgccaactccctgttcgtgaacaactgggacaaccgcactatcgaccacgtggaaattaccgtggcggaagaggtgggcatcgaaggccgttggggctacttcgaccaggccggccagatgcgggacatgatccagaaccacctgctgcaaattctgtgcatgattgccatgtctccaccgtcagatctgacggccgacagcattcgtgatgccaaagtgaaagtgctgaaatcactgcgccgtattgaccgctccaacgtgcgtgagaaaaccgtgcgcggccagtacaccgcaggttttgcccaggggaaaaaagttcctggctatctggaagaagagggcgcgaacaagtccagcaacaccgagacgtttgtggcgatccgcgtggatatcgacgactggcgctgggccggtgtgccgttctacctgcgtaccggtaaacgtctgccagcaaaatgctccgaagtggtggtctacttcaaaaatccggaactgaacctgttcaaagaatcctggcaggaactgccgcagaacaaactgaccatccgtctgcaaccggacgagggtgtggatattcagatcctcaacaaagtgccgggccttgatcacaaacacaacctgcaaactactaagctggacctgagctactctgaaaccttcaaccagacgcatctcgccgatgcttacgagcgtctgctgctggaaaccatgcgtggtatccaggcgctgttcgtccgccgcgatgaagtggaagaggcgtggaagtgggtcgactccatcactgaagcgtgggcagccgatcaggacgcgccaaaaccgtatcaggcgggaacctggggacctgtcgcctccgttgcgatgatcacccgtgatggccgctcctggaacgagtttgaataa

SEQ ID NO: 114374 - DNA, 1812 bp, Enterobacter cloacae
atgaatccgacattgttacgcgtaacacaacgcatcgttgaacgctcgaaagagacccgtgctgcctaccttgcccgcatcgaacaggcgaagagtgaaactgtccatcgctctcagctggcctgcgggaatctggcccacggctttgcggcctgccagcctggtgataaagacgcgctgaaaagcatgttgcgtaacaatatcgccatcattacctcctataacgacatgctttcagcccaccagccgtatgaggcctacccggctatcatccgcaatgcgctgcacagcgtgaacgcggtgggccaggttgcaggcggcgtgccggccatgtgtgatggcgtaacccaaggccaggacggtatggagctgtccttgctgagccgcgaagtgatcgccatgtcggcggcagtgggcctctctcacaacatgtttgatggcgcgctctatctgggcgtgtgcgacaaaatcgtcccggggctggtgatggccgcgctgtcgtttggccatctgccagcgatttttgtgccgtcaggcccgatggctagcggtctgccaaacaaggaaaaagtccgtatccgccagctgtatgccgaaggaaaagcggaccgtcaggcactgctggaagcggaagccgcgtcctatcatgcgccgggcacctgtacgttctacggtacggccaacaccaaccagatggtggtggagtttatgggtatgcagctgccgggctcgtcgttcatccagccggatgcgccactgcgtaaagcgctgaccgaagccgcagcccgtcaggtgacgcgcctgaccggtaacggcaacgagtggatgccaatgggcaaaatggtggatgaaaaagtcatcgtaaacgggattgtcgccctgctggcgaccggcggttcaaccaaccataccatgcaccttgtcgcgatggcgcgcgcggcgggcattctgatcaactgggatgacttctccgatatctcctccgtggtaccgctgatggcgcgtctgtacccgaacggtccggcggacatcaaccacttccaggccgcgggcggcgtgccggtgctgatgcgcgagctgctgaaaggcggcctgctgcatgaggatgtcaacacggtggcgggctttggtctgcatcgctatacccttgaaccctggctgaacaacggtgagctggactggcgcgaaggggcgagcgactcgctcgatcctcaggttatcgcaaccttcgaacagccgttctctcctcacggcggcaccaaagtgctgagcggtaaccttggacgtgccgtgatgaaaacctctgccgtgccggaagagaatcaggttatcgaagccccggcggtggtgtttgaaagccagcacgacgttttacctgcctttgacgcgggtctgcttgataaagactgcgtggtcgtggtgcgtcatcagggaccaaaagcgaacgggatgccagaattacataaacttatgccgccgcttggtgtattattggaccgccgtttcaaaattgcgctggtaaccgatggacgcctctcgggggcatccggtaaagtgccttcagcgattcatgtcaccccggaagcctacgacggcggcctgctggcgaaagtgcgtgatggtgacatgatccgcgttaacggtcagacaggcgagttaaccctgctggtggatgaagcagagctggcggcgcgtcagccacatattcctgacctgagcgcgtcacgcgtgggtaccggacgcgaaatgtttggtgcgttgcgtgagaaactctccggtgcggagcagggcgcaacctgtattacgttttaa

SEQ ID NO: 114375 - DNA, 642 bp, Enterobacter cloacae
atgaaaaactggaaaacaagtgcagaagcaatcctgaccactggccctgtcgtgccggttattgtggtaaacaaactggagcacgctgtcccaatggcgaaggcgctggttgcgggtggcgttcgtgttctggaagtgaccctgcgtacggcctgtgcgatggatgcgatccgcgctatcgccaaagaagtgccggaagcgatcatcggtgcaggtacggttctgaatgcgcagcagctggcggaagtgaccgaagcgggcgcacagtttgccatcagcccggggctgactgagccgctactgaaagccgcaaccgaaggttctattccgctgatcccgggtatcagcaccgtttctgaactgatgctgggcatggactacggcctgaaagagttcaaattcttcccggctgaagcgaacggcggcaccaaagcgttgcaggccattgcgggcccattctcccaggtgcgtttctgcccaacgggcggcatctctccggccaactaccgtgactatctggcgctgaaaagcgtgctgtgcatcggcggctcctggctggttccggcggatgcgctggaagcaggcgactgggatcgcatcactaaactggcttgcgaagcggtagaaggcgcgaaacagtaa

SEQ ID NO: 114376 - DNA, 1179 bp, Enterobacter cloacae
atgactcgtttaggaaccgcgctgcgtcccgccgcgacgcgcgtcatgctgttgggatcgggtgaactgggtaaagaagtggccattgaatgccagcgtttaggtgtggaagtgattgcggtggaccgttacgcgaatgcgcccgccatgcacgtcgcgcatcgctcgcacgtcatcgatatgcttgacggtaatgcgctgcgggggttaattgccgacgaaaaaccggatttcgtggtacctgaaattgaggccattgccactgagatgttgattgcccttgaacaggaaggccagcgcgtggtgccctgcgccactgcggcaaaactgaccatgaaccgggaaggcattcgtcgcctggcggctgaagaattacagctcccgacctccagctaccgttttgccggggataaagctgcgtttctccaggccgtagaggagattggctacccgtgcatcattaagccggtaatgagctcctccggcaaagggcagagctttatccgcgacagcagcacgctggacaacgcctgggactatgcccagcagggaggccgagccggggccgggcgcgtcatcgtggaaggcgtggtgaagtttgattttgaaattaccctgctcaccgtcagcgccgtggatggcgtttatttctgcgacccgattggtcatcggcaggaagacggcgattatcgcgaatcctggcagccgcagcagatgagcgcgctggcgctggcacgcgcacaggagatcgcccgcaagacggtgctggcgctgggcggctacggcctgttcggcgtggaattgtttgtttgcggcgacgagatgatcttcagcgaagtctcccctcgtccgcacgataccgggatggttacgctgatttcacaggatctctctgagttcgcgctgcatgtacgcgctttcctcggtctgccggttggcggcatccgtcagtacggcccggcagcctcggcggtgatcctgccgcagctgaccagccagaatgtcacctttgataacgtcgaaggtgcggttggcgcaggcttgcaggtccggctgttcggcaaaccggagatcgacggaagccgtcgtctgggcgtggcattagcgaccggggaaaatgtggacgaagccgtcgcgagagcaaaaagagcggctgcgaacgtcagcgtagcaggataa

SEQ ID NO: 114377 - DNA, 651 bp, Enterobacter cloacae
atgtcaggctggatgaatcaactgcaatccctgttgggacaaaaaggctcgtcgtccggcgagcagggtctgagcaagctgctggtgccgggtgcgctcggcgggctggccggtttgctggttgccaataaatcatcgcggaaactgcttaccaaatatggtaccggcgcgctgctggcgggcggaggggctattgcaggctccgtcttatggaacaaatacaaagacaaggtgcgcagcgcgcatcaggatgaaccgcagtacgggaagcaggtatcgccgttagatttacgcaccgagcggttgatcctcgccctggtctttgcggccaagagcgacgggcatattgatgccagtgaacgtgccgcaattgaacagcagatgcgggaagcgggcgttgaggaacagggcagggcgctggtggcgcaggccatcgaacagccgcttgatccgcagcgtctggcgcaaagcgtgaaaaacgaagaagaggcgctggaactctattttctgagctgtgccgccatcgatatcgatcactttatggagcgcagctacctgaacgccctgggcgatgcgctgaagatcccacaggacgttcgtgagggaattgagcaggatattcagcagcagaagcagaccctcgtgggctag

SEQ ID NO: 114378 - DNA, 2076 bp, Enterobacter cloacae
atgcctccaaaagcccgacgtactccttatgcgatcaccacgcatggcgatacgcgtatagataactactactggctgcgggacgattctcgttcccggccagaggtgctggactatctgcacgaggaaaacgactatggccgccaggtcatggccagccagcaggcgcttcaggatcaacttctgaaggaaatggtgcagcgtatcccccagcgtgatgtctctgccccgtggtgcaagaacggttatcgctatcgccatatttatgagccgggaaacgaatatcccatctaccagcgccagtctgtgctgagcgccgagtgggatgaatgggagatcctgctggatgccaacaaacgtgctgcccacagtgagttttatacgctgggcggcatgtccatttcccccgataacgccattatggcgctggctgaggattacctttcccgccgccagtacggtttgcgtttccgcaatcttgaaacgggaaactggtatcccgaaatgctggataatgtctcccccgatttcgtctggggtaacgattcagaaacggtctactacgttaaaaagcatgtctcaacgctgctgccttatcaggtctggcgtcatacggtggggaccgattccgccgacgatgaactggtgtatgaggaaaaagatgagacgttctatgtcagcctgcacaaaacgtcgtctcgccactacgtgatcattttcctctccagcgccaccacctcagaagtgctgctgctggatgcagagctgccggatgcgcagcctctgtgcttcctgccgcgccgtaaagatcatgagtacagcctggatcacttccagcacagcttttacttgcgttcgaaccgcgagggcaaaaactttggcctttataaaaccaaagtgcgcgatgaacgcaaatgggaagtgttaattcccgcgcgcgatcaggtgatgctggaggggttcaccctgtttaccgactggctggtggtggaagagcgtcagcgcggactgaccagtatccgccaaatcaaccgcaaaacccgcgaagtggtgggcattgcgttcgatgacccggcttacgtaacgtggatcggctttaacccggaaccggaatcgtcccgcctgcggtacggctattcgtcgatgaccaccccggatacgttgtttgaactggatatggacaccgggcagcgtcaggtgattaaacaggctgaggtccggggttttgagtcggaaaattatcgcagtgagcacctgtgggtgaccgcacgtgacggcgttgaagtccctgtgtcgctcgtctatcacaaggcgcacttcaacaaaggtaaaaaccccatcctcgtctatggctatggctcctatggatccagcatggacgccgatttcagcagcagcaggctgagcctgctcgaccgcggttttgtttatgcgattgcccatattcgcggcggcggcgagctgggtcagcactggtatgaagacggaaaatttctcaaaaagaaaaatacctttaatgactaccttgatgtttgcgatgcgctgatcgcgcagggttatggcgatccgcagctctgctttggcatggggggcagcgccgggggcatgcttatgggcgccgtgatcaaccagcggcctgaactgtttaaaggcgttatcgcccaggtgccgtttgtggacgtggtgacgaccatgctggatgagtccattccactgaccaccggggagtttgaggagtgggggaacccgcaggatgaaacctattatcgctacatgaaagagtacagcccgtacgataacgtcgaggcgaaagcctatccgcatatgctggtgaccaccggcctgcacgattcccaggtacagtactgggagcccgcgaaatgggtggcgaagttgcgtgagctgaaaactgacgataatttactgctgctgtgtaccgatatggactcggggcacggagggaaatcagggcgatttaaatcctatgaaggggtggcgctggagtacgcctttttgattggcctggcgcaggatacgctgccaggccgggcggggactcaggcttcgcctaaataa

SEQ ID NO: 114379 - DNA, 663 bp, Enterobacter cloacae
atgctgcgcgttatcgataccgaaacctgtgatttgcagggtggaattgtggaagtcgcttctgtcgacgtgattgacggaaagatagtcaaccccatgagccatctggtgcgcccggatcgtcccatcagtgcgcaggcgatggcgatacatcgtattacggaatcgatggtggcggataagccgtggattaaagagatcatccctctttaccacggtagccagtggtatgtggcccataacgccagctttgaccgccgcgtgctgccggagatgcccggcgaatggatttgcactatgaagctggcgcgccgtctgtggccggggatcaaatacagcaatatggcgctgtataagtcgcgcaaactcagcgtacggacgccggaagggctgcatcatcaccgcgctctttacgactgctacatcaccgcagcgctcctgattgatatcatgaatacttccggctggacgccagacgatatggcgaccattaccgggcgccccgcgctactgaccacctttacgttcggaaaatatcgcgggaagccagtatcggaagtggcggacaaagatccgggctatctgcgctggctgtacaacaacctcgacagaatgagcccggaactgcgcctgacgctgaagcattatttaggcgaagcctga

SEQ ID NO: 114380 - DNA, 651 bp, Enterobacter cloacae
atgtcacgatggaatattgccgcggctcagtatgccccgcggcacaactgtgttgatgagcacgtaaaacatcacctgcactttattgccgaggctgcctggcatgggtgcgatttaatcgtctttccggagctttcgcttaccggcccaggcggaacatccttacccccaccccctgacgatttgcagcttgcccccctccttcacgccgcccagtcacgtttcatcacggtgattgctggtattacactccagcaacacggccagcgccagaaaggactcgcgcttttcacccctaacctgtcgaccatccggcgttatccgcagggcaacggtgcaggtgttattcctggcgataaacggttaaccatcgtggataaccaggctgacgccccggaactggacccggaggcaacgctgttcaccagcagcctggccgtgggcgagcatcgctggcggcaatccatcggttcgttacaacgcttcgcgcacaagtacgccatcgcggtattaatggcgaacgcgcgcggcggtagcgcgttatgggatgaaaaaggtcagctgatcgtacgtgccgataagggagaactgctgctaaccggttctttaggccaacagggttggcaaggcgatatcattccattaggctag

SEQ ID NO: 114381 - DNA, 231 bp, Enterobacter cloacae
atgaacgttaacctggccgcccttcctcaggacgagatggacaaagtgaatgtcgatctcgccgccgcgggggtcgcattcaaagagcgttacaacatgcccgtcgtggctgaagtggtagagcgtgaacaacccgcgcatctgcgcgactggtttcgcgaacgtctcattgcgcatcgcctcgcctccgtcaatctctcgcgcctgccgtacgaacctaaagttaaataa

SEQ ID NO: 114382 - DNA, 372 bp, Enterobacter cloacae
atgcattttaccccttcccgtgtcgcgtgcgcgctggcatttctgctctcttcagccatcacgccctcagttctggcccatgcgcatcttaagcagcaatccccgcaggaaaataccgttgcggtggcaccagaggtcattaccctgaacttctcggaaggcattgagccagccttcagcggcgtggtggtgacggacgcgcagcagcacaagatccagaccggcgcggtgaagcgtgacgagaaggataacgcaaagctgattgttcctcttgagaaaccgttgacgtccggcacctacacggtggactggcatgtggtctccgtggatggccacaaaaccaaaggcagctatcactttagcgtgaaatag

SEQ ID NO: 114383 - DNA, 870 bp, Enterobacter cloacae
atgctgaccctgagctacgtcgcgttacgctttatccattttgctgcgctgatgctgcttttcggcaacgcgctctacagcgtctggtttgcgccgtcttcgttgcagcgcctcatgacccggcgtttccagcggcagcagaaactcgcggccttaatcagcctgatagcggctctgctgatgtttggcctgcaaagtgggttgatgggcaacggatggggcgatgtcattcgtccggcggtctggcgcagcgtgctgggaacgcaatttggcggcgtctggttgtggcaaatggtgctggccgctgtgacggcgggcgctgcatggcttaccccgcaaaaaggctcacggctgttactgctcgcgatggggcagctggtgctgctggcgggcgtgggacatgccgcgatgaacggtggcgcaccgggagcgttgcatcgtctcaaccatgcgcttcacctgctctgcgccgcgacctgggtgggtggtttactgccgctgctgttttgtatgcgtctggcgaaaggccgctggcagccagccgctatctttaccatgatgcgcttctcccgcgtggggcattacgccgtggcaggcgtgctgctgaccgggataatcaatacgctctttattgttggcataaacgtgccgtggcaggcgccttatgtccagctgttgttgttcaaatgtgcgctggtcatgatgatggtggcaattgcgctggcgaatcggtattttcttgtgccacgctttcgcccggaggccgggcgggaacaacagatttttatcaggatgacacaggcagaggtggtgctgggcgcgctggtactggccgccgtcagcctgttcgcgacctgggaacccttctga

SEQ ID NO: 114384 - DNA, 339 bp, Enterobacter cloacae
atgaaaaagacactgctttctcttttacttctcacctgtgccagcagtgcgttagccgcgccgcaggtcatcaccgtcagccggtttgaggtgggtaaggacaactgggcatttaatcgtgaagaagtcatgcttacctgccgtcccggtaacgcgctgtatgtcatcaatcccagtacgctcgtgcagtatccgttaaatgacgtggcggagcagcaggttgccagcgggaaaagtaacggacagcctgtcagcgtgatccaggtagatgacccggcaaaccccgggcagaagaagagtctggcaccgtttattgagcgcgctgaaaagctctgctag

SEQ ID NO: 114385 - DNA, 981 bp, Enterobacter cloacae
gtgtcaaacatacacctgcaaaacgatgttttttatccgcatcgcacaaatattatttctgaactggtgagaggaaaacgcgttcccggcccaatctggcacaaacgtgattaccggttaaagttccttctacgctcgcttttattctggtcctccacccatcgcatgctggaggccctgtccgggcgcgatgatttcgacaggctgctcacctctcaaattaccttgccgagcaaaactcaccgccagtatctgatgcgcggcctgaactcaaacgatcgggccgatgctatcatcagccactatcagtggattgatagtctgaaaaacatcgccctcgcccacgcgctgaccagcccgcaagaggtgccggttgtccggttcgaggcaaaaaacggcgaaatctataccgtccacgcctcgtccgcaggtaaggccgaacgcgaaggcgaaagcacgctttggctgcacgacaatgacaatacgctgcttgccagcctgacgttctgtgtcgcacgcagtaacggccgtacggtgctggtgatcggcggccttcagggtccacgtcgtcatgtttcacgggaggtgattaagcaggctacccgtgcctgccatgggcttttcccgaaacgcgtgctgatggaggtgatcttccagcttgcctcacgctcgaacattagcgcgatttttgccgtcagcgatgaaggccatgttttccgcgcgctgcgctaccgtctgagcaaaggccgtcattttcacgccagctacgacgagttctgggaaggcctgaacggaaagaaactctcccccttctgctggcagttgccgctccagatggagcgtaaagcactggaggagattgccagcaaaaaacgcgccgaataccgtcgccgctttgcgttacttgatgatattgcggcttccgtacatgcgcgcattgatcccgcagtcgtctcaggcaaaatacaaacaaaaatttaa

SEQ ID NO: 114386 - DNA, 645 bp, Enterobacter cloacae
atgtatcagaaaatagagggagaacactggcgtcatgtctgggttgtcagcgatattcatggttgctatcagtggcttatggatgagctgaaacgacggcattttaatcctgatacggatctgctgatctcggtgggggatattatcgatcgcgggcctgacagcgtaaaatgtttacagctgatgcaggaaaactggttttatgcggtacgcggcaatcacgagcaaatggcgttagatgcgcttgaaaataatgattttagtccctggtcgataaatggcggtaactggtttaccgggcttaaggacgctcaacaaaaacaggcgaagggtttactcgatgcgtgtcgggacttaccgcacattattgaaataacctgcaaaaacggtctgaacgtgattgctcatgcggattatccctccgccgaatatggctggcataagccggtggatgcccagcgcgtgctgtgggatcgcgaccggctaatgggctttatggtgggcaaagggcagggcattagcggtgcggatcacttctggtttggacatacgcctgtggacaaacgctacgattttaacaatctgcactacattgatacgggggcagtattcgggggctttctgacgctggcgcagcttcagtaa

SEQ ID NO: 114387 - DNA, 240 bp, Enterobacter cloacae
atgacgaaaaccagcgtacgcattggcgcttttgaaatcgacgacgctgaattgcgcggcgaatcacaaggcgaacgaacgttaagtattccctgcaaatccgatccggatttgtgcatgcagctggacgcctgggatgcagataccagcgtcccggcgatccttgatggggaacattccgttctgtaccgtgagcattacgacagtaaaaccgatgcctgggtcttgcgtcttgcctga

SEQ ID NO: 114388 - DNA, 1464 bp, Enterobacter cloacae
atgtttccctgtggtgtgcccgtggctcaaaactccgtattccttcccgaacaattcctcgcacagatgcgcgaggcgcttccagctcatctctctttcgacgatttcgttgccgcctgccagcgccctttgcgccggagtattcgcgtcaatacgctgaaaatcagcgtcggggcgtttctggatctcgtctccccctacggctggcaattaacgccagtgccgtggtgtgaagagggtttctggatcgaacgggatgacgaggagagcctgccgctcggcagcaccgccgagcacctgagcgggctgttttatattcaggaagccagctccatgctgccggttgctgcgctgtttgccgacgggaaccagcctgagcgggttatggatgtcgcggcggcgccgggctctaaaaccacgcagattgccgcccggatgaataaccgcggcgcgatcctcgccaacgaattttccgccagccgcgttaaagtcctgcacgccaatatcagccgctgcgggatccacaacgtcgcgttaacgcacttcgatggtcgcgtgtttggcgctgccctgccggaagcctttgatgccatcctgctcgacgcgccctgctccggcgaaggcgtggtgcgtaaagatcctgatgcgttaaaaaactggtccgttgaaagcaacctggagatcgccgccacacagcgcgaactgatcgacagcgcgtttcatgccctgcgcccaggcgggacgctggtttattccacctgcacgctgaatcgcgatgaaaacgaggacgtctgcctgtggctcaagcaacgctatgcggatgccgtcgagtttctgccgctggacaccctcttcgactcggccagtcatgcggccacgcctgaaggcttcctgcatgtcttcccacagatttacgattgcgaaggcttctttgttgcccgtctgcgtaaaacccgcgccgtcgatcccttgcctgcccctaagtttaaggtcggcaacttcccgttcacgccggtcaaaggccgtgaggcggcacaggcgcaagcggctgcgagcaaagtcggcctgcactgggatgagagcctgcgcctctggatgcgtgacaaagagctgtggctgttcccggtcaacatcgaaccgctgattggtaaggtgcgtttctcccgcctcggtattcgcctggcggagatccacaacaaaggctatcgctggcagcacgaagcggtcattgcgctggccggcagtgagaacacctttgccctgacgcatcaggaagcggaagagtggtatcgcggtcgtgacgtttacccggaagacggcccgtcacaggatgaagtcatcgtgacgtatcagggctatccgctggggctggcgaaaaaagtcggctcgcggctgaaaaacagctatccgcgcgaactggtacgcgatggccgcctgtttaccggtaacaaccgcagcgcctga

SEQ ID NO: 114389 - DNA, 2634 bp, Enterobacter cloacae
atgagtcaggaaacgcccgcttcgccgactgaagcgagaattaaaacaaaacgccgcatttcgccattctggttgctgcctgtcatcgcgctgatgatcgcaggctggcttatctggacgagctatgaagatcgcggaagtaccatcacgattgatttccagtctgcggacggcattgtcgccggacgtacccccgttcgcttccagggggtggaagtgggtaccgtgcaggatatttcgcttggcaaagggctgaacaaaatccaggtccgggcgagcattaagtctgatatgcaggatgccctgcgtgccgaaacgcagttctggctggtcacgcctaaagcctccctggccggcgtttccggactggatgcgcttgtgggcggtaactatatcggcatgatgcccggcaaaggtgagccacaggatcactttgttgcgctggatacccagccgaaatatcggctgaataacggcgatttgatgatccatctccgcgcgccggatttgggctcgctgaacagtggttctctggtctatttccgcaaaattccggtaggccgcgtttacgactacgccattaacccgaacaaagatggcgtgaccattgatgtactcatcgagcgccgttttaccaacctggtgaaaaaaggcagccgcttctggaacgtctcaggcgtcgatgctgacctgagcttaagcggtgcgaaagtgaagcttgagagcctggcggcgctggtgaatggcgctatcgccttcgactcacctgctaactccagccctgccgccgcagaagatacctttggcctgtacgccgacctggcgcacagccagcgcggtgtcatcgtcaagctgaccctgccggatgccaaaggcctgaaagccggttcgaccccgctgatgtaccagggtttagaggtcgggcaactgacaaaattaaccctcaatgcgggcggttccgttaccggcgaaatgacggtggatccgagtgtggtggatctcctgcgggaaaaaacgcgcattgaactgcgtaatccgaagctctccctcagcgacgccagcattagttctctgctgacgggaagcacctttgagctgatccccggtgaaggcgcgccgaacaaaaactttgttatcgcgccggcggataaagccctgctgcaaaaaccgggcgtgttgacggttacgctgaatgcgccggaaagctacggtatcgaggccgggcaaccgctgatcctgcacggtgtgcaggtgggccaggtcctcgaacgtaagctgtcggaaaaaggggtctccttctccgccgccatcgatccgcagtatggcaacctggtccacggcgacagtaaatttgtggttaacagccgggtcgacgtgaaggtgggtctggacggggttgagttcctcggcgccagcgccagcgagtgggttaacggcgggatccgcattctgccgggcagcaaaggtgcgctgcgcgaaagctatccgctgttcgccaatctggacaaagccattgaaaatagccttggcgacctgccaaccaccacgctgaccttaagcgctgaaacgctgccggatgtccaggcaggctccgtcgtgctttaccgtaagtttgaggtgggggaagtgatcaccgttcgtcctcgtgcggacgcgtttgatatcgaactgcatatcaagccggagtaccgcaagctgctcacgccaaacagcgtgttctgggctgagggtggcgcgaaagtgcagctcaacggcagcgggctgaccgtacaggcatcgcctctctcccgtgccctgcgcggtgcgatcagcttcgataacctgagcggcgcgggcggcaacatgcgtaaaggtgacaagcggatcctcttcccgtccgaaaccgcggcgcgcgcggtcggggggcagattaccctgcacacctttgatgccggtaaactggcagaaggcatgcccatccgctatctcggcattgatatcgggcaggtccagaagctgacgctgatcaccgcacgcaatgaagtgcaggcgaccgccgtgctttatccggaatatgtgcagacgtttgcccgggcaggctcgcgcttctcggtagttacgccgcaaatttctgccgcaggggttgagcatctcgataccatacttcagccgtacattaacgttgaaccgggtcgcggcaacgcacgtcgtgaatttgagttgcaggaggccaccatcaccgactcccgttacctggacggtctgagcattgtggttgaagtgccggaagccggttcgctgggcatcggtacgccggtcctgttccgcggcattgaagtagggacagtaacaagcctgacgctgggtaatctgtccgatcgcgtgatggtcggcctgcgcatcagccagcgttatcagcatctggtgcgcaacaactcggtgttctggctcgcttcaggctactcgctggacttcggcctgaccggtggcgtggtcaaaacggggacctttaatcagttcattcgcggcggcattgccttcgcgacgccgcctggcacgcctctggcgcctaaggcgcaggcaggtaagcacttcctgctgctggaaagtgaaccgaaagagtggcgcgaatggggaacggcgctgccgcgttaa

SEQ ID NO: 114390 - DNA, 1284 bp, Enterobacter cloacae
atggccctaaaaacaccccaaattacgccgacacgaaagatcgttgtccgtacggtaagccaggctctgccccgtgcacattatcagcgttgtccccagtgcgatacgctttttatgttgccgaagatgaaatcgcaccaaagtgctttttgtccatgctgcgatgccaaaatccgcgatggccgggactggtcattgacgcgtctggcggcaatggcggtcaccatgctgctgctgatgcccttcgcctggaccgagccgctgttaaagctctacctgcttggcgtgcgtattgacgctaacgtgttgcaggggatctggcagatgacgcgccagggcgatccgcttacggccgccatggtgctgttctgcgtcgtcggcgcgccgttggtgctggtcgcggcaattgcctacctgtggtttggcaacattctggggatgaacctgcgccctgtcctgctcatgctggaaaagctcaaggagtgggtgatgctggacatctatctggtaggcattggcgtggcctccatcaaggtgcaggattatgcgtttttacaacccggcattggacttttcgcgtttatttcactggtcctgctgagtattttgaccctgattcatctcaatgttgaacagctttgggagcgattttacccgcagcgccccgcgacccggcctgatgaaaacctgcgcgtctgcctgggctgccattacaccggttttccggataaacgcgggaggtgcccacgctgccacattccgttaagattgcgacgcaacaacagcctgcaaaagtgctgggcggcgctaatcgcctccctggtatttttattcccggccaacatgctgccgatctccgtaatttatgtgaacggcgcccgtcaggaagatactatcctttcggggattatctctctggcgcacagtaacgtgggggtcgccgccattgttttcatcgccagtattctggtgccctttaccaaagtggtggtgatgtttacgctgcttatcagcattcactttaaatgcgaacaaggactacgcacccgcatcctgcttctgcgatttgtgacctggattggtcgctggtcgatgttggatctgttcgtgatttcgctgatgatgtcgctcatcaatcgcgatcagttacttgcttttaccatgggacccgcagctttttatttcggctctgcggtgatattgactattcttgcagtggaatggctggacagccgcttactttgggacgcacatgagtcaggaaacgcccgcttcgccgactga

SEQ ID NO: 114391 - DNA, 498 bp, Enterobacter cloacae
atgaacaaaacagaattctacgcggatctgaatcgcgattttaaggcattaatggcaggggaaaccagtttcttagccactctggcaaataccagtgcgttactgttcgaacgcctttctgacgtgaactgggcgggcttttatctgctggaaggtgacacgctggtgctggggcctttccagggtaaactcgcctgcgtacgcatcccggtaggtcgtggcgtgtgcggtaccgcagtggcgacccgtcaggttcagcgtgtcgaagatgttcatgcgtttgacggccacattgcctgcgatgccagcagcaattctgaaatcgtactgccgctggtggttaaaaatcagattattggcgttctggatatcgacagcacggtcttcagccgctttactgccgaggatgagcaggggctgcgcgcgctggccgcaaacctggaaaatgttctggcagagaccgattatcataaattctttgcgagcgtcgcaggataa

SEQ ID NO: 114392 - DNA, 687 bp, Enterobacter cloacae
atggaaaatcaacctaagttgaatagcagtaaagaagttatcgcatttctggccgagcgtttcccgcagtgcttcagcgctgaaggtgaagcgcgtcctctgaaagtcggtatctttcaggatctggtcgcgcgcgttgagggggagatgaacctcagcaaaacgcagcttcgttctgccttgcgcctttatacctcgagctggcgttacctgtacggtatcaagccgggtgcgacccgtgtcgaccttgacggcaacccgtgcggtgagctggacgagcagcacgtagaacatgcgcgtaagcagcttgaagaagccaaagctcgcgtgcaggcacagcgtgcggaacagcaggcgaaaaaacgcgaagccgcagcggcaaacggtcaggaagacgcccctcgtcgcgagcgtaaaccgcgcccggcaccgcgtcgtactgaaaataacgatcgcaaaccgcgtgctgacaaacccgcagctaaagccccacgtgcgccgcgcgaagagccgcgtcacaccccagtttctgacatcaatgcgctgagcgtaggtcagtctctgaaggtgaaagcgggtaacaacgcgatggacgccaccgtactggaaatcaccaaagatggcgttcgtgtacagctgacttctggtatgtcaatgattgtacgcgcagaacacttgttgttctga

SEQ ID NO: 114393 - DNA, 2049 bp, Enterobacter cloacae
atgaacactttttttaagctcaccgcgctggctggcctgtttgctataacaggccatgctttcgctgtggacgatattacgcgtgttgatcaaattccggttctcaaggaagagactcagcacgcgacggtgagtgagcgcgtgacgtcgcgctttactcgttcgcactatcgtcagttcgatctcgatcaggccttttcggccaaaatctttgaccgttatctgaacttgctggattacagccataacgtactgctggccagcgatgtcgaacagttcgctaaacgcaaatccgaagtgggtgatgagctgcgctccggaaagctcgatctgttctacgatctgtacaacttatcgcaaaagcgccgttttgagcgttatcaatacgcgctgaaagtgctggaacgtccgatggacttcaccggcaacgacacctttaatctggaccgcagcaaagcgccatggccgaaagacgaggctgaactgaatgcgctgtgggacggaaaagtcaaatatgacgaactgagcctcaagcttacaggcaaagacgagaaagagatccgtgagacgttaaatcgtcgatacaaattcgctattcgtcgtctggcgcagaccaacagtgaagatgttttctcgctggcgatgaccgcgtttgcgcatgaaattgatccgcacactaattatctctctccacgtaacaccgaacagttcaataccgaaatgagcctgtctctggaaggtatcggtgctgtgcttcagatggacgatgactacaccgtaatcaactccatggtggccggtggccctgcgtcgaaaagcaaagcgatcagcgtaggcgaccgtattgtcggtgtgggtcaaaccggaaagagcatggtggacgtgattggctggcgtcttgatgatgttgttgcgctgatcaaagggccgaagggcagcaaagttcgcctggagatcctgccagccggtaaggggactaaaacccgtatcgttactctcacccgtgagcgtatccgtctggaagatcgcgcggtgaaaatgtcggtgaaaaccgtaggtaaagagaaggttggcgttctggatatcccaggtttctacgtcggcctgaccgatgatgtgaaagtgcagctccagaagcttgaaaagcagaatgtcagcagcgtgatcattgacctgcgcagcaacggcggcggggcattgaccgaggccgtctcgctttccgggctgtttatcccgtctggcccggtggtacaggtgcgcgataacaacggtaaagtgcgtgaagatgccgataccgatggtgtggtctactataagggtccgctggtggtgcttgtcgatcgcttcagcgcctctgcatcggaaatcttcgctgctgccatgcaggattacggccgggcattaatcgtcggcgaaccgacgtttggcaagggcaccgttcagcagtaccgctctctgaaccgtatttacgaccagatgctgcgccctgagtggcctgcgctgggctcagtacagtacaccattcagaagttttaccgcgtcaacggcggcagtacgcagcgcaaaggcgtgacgccggatatcatgatgccgacaggtaccgaagagacggaaacgggcgagaagtttgaagataacgcgctgccgtgggatagcattgatgccgcgacattcgtgaaatcaggtgatatgaaacagttcggaccggaactgctgaaaaatcacaacgatcgcatcgggaaggatccggaattccagtacatcatgaaggacatcgcgcgtttcaacgctttgaaagcgaaacggaacattgtgtctctgaactacgcccagcgtgagaaagagaacaatgaagatgacgcgacacgtctggcgcgtatcaacgatcgcttcaaacgtgaaggcaagcctctgctcaaaaaactggacgatctgcctaaggattaccaggagcccgatccgtatctggacgagacggtgcatatcgcgcttgatctcgcgaagctggaaaaagagaaacctgccctgcaacctgctccgacaaaataa

SEQ ID NO: 114394 - DNA, 882 bp, Enterobacter cloacae
atgatgcgaatcgcgctcttcctgctcaccaacctggcggtgatggtggtattcgggctggtgctaagcctgacgggaattcagtcgagcagcgttcagggtctgttgattatggcgctgctgtttggtttcggtggctctttcatttcactgctgatgtccaggtggatggcactgaaatccgtgggcggtgaagttattgagcaaccgcgtaacgatatggagcagtggctgatgagcacggttgctcagcagtcaaagcaggcgggcattgccatgccgcaggtagccatctaccacgcgccggatattaacgcgtttgctaccggtgcgcgtcgtgacgcgtccctggtggccgtcagtaccggcctgctgcaaaacatgagccgtgacgaagcggaagcggttattgctcacgagatcagccatatcgccaatggcgatatggtcaccatgaccctgatccagggtgtggtgaacaccttcgttatctttatttctcgtattctggcacagattgctgccgggtttatgggtggcaaccgtgatgagggtgaagagagcaacggcaacccgctgatctattttgctgtttcaatggtgctggagctggtgttcggtatcctggcaagcatcattaccatgtggttctcccgtcatcgtgagttccacgcggatgccggttccgcgaaactggtgggtcgtgaaaagatgattgctgcgctgcaacgtcttaaaaccagctacgagccgcaggaagcaaacagcatgatggccttctgcatcaacggcaaatcaaagtcgctgagcgagctgtttatgtctcacccgccgctggataaacgtattgaagcgctgcgtagcggcgaatacctgaagtaa

SEQ ID NO: 114395 - DNA, 1374 bp, Enterobacter cloacae
atgcaaaaaaacgtttctgatggcctgcccttaccgcagcggtacggggcaattgccactattgtcatcggtatttcgatggctgtccttgacggtgcgattgccaacgtggctcttcctaccattgccaaagacctgaatgcttcgccggccagctccatctggattgtcaacgcgtaccagatagcgattgtgatttcccttttgtcactctctttcctgggcgatatgtttggttatcgccgggtgtaccagtgcgggctggtggtctttaccctcacctcgctcttctgtgccctttcagattcactgcacacccttacgctggcgcgtatcgcacagggctttggcggggcggcgctaatgagcgtgaacacggccctgatacggcttatctaccctcaccgccacctggggcgcgggatgggcattaactcctttattgtggccgtgtcgtccgccgccgggccgacgattgccgccgccatcctgtccgttgcctcgtggcagtggctgtttgccattaacgtgccgctgggcattgtggcgatcttcttcgccctgcgctatcttccggaaaatggtccgaaaaacaccatgccacgtttcgatctgcccagcgctgtgatgaacgcgctgacctttggcctgctgattaccgcgctgagcggatttgcgcagggacagtctctgtcgctcattaccacagaaatcgttgccatgcttatcatcggctttttctttgtacgacgtcagctggcgctgcccgtgccgttactgccggtggatttgctgcgtattccgctgttttcgctatccatttgtacctccatttgctcgttctgcgcccagatgctggcgctggttgcgctgccgttctttttgcagagcgtgattggccgttcggaagtggagacaggcttgctgctcacgccctggcctctggcaaccatggtgatggccccgctggccggttaccttattgagcgcgtccatgccgggcttctgggggcgattggactggttgtcatggcggtggggctgtttgcgctggcgctcctgcccgcctcgccgggggatctggatattatctggcgcatgatcctgtgcggggccggttttggtctgttccagtcccctaataaccacacgattatcacctctgccccacgtcatcgcagcggtggcgccagcgggatgctgggcacggcaagactgttagggcaaagcaccggggccgcactggtggcgttgatgtttaaccttgccgggcagaatgcgacacacgttgcgctgattaccgcagggaccctggcgaccctcgcggctgtcattagcggccttcgcgtcacccagccaaaggcgcaggcataa

SEQ ID NO: 114396 - DNA, 792 bp, Enterobacter cloacae
atggcaatcgcagatttggataagcagccagattctgtttcttccgtgctgaaggtgtttggcatcttgcaggcgctcggagaagagcgtgaaattggtattacagagttgtcgcagcgtgtgatgatgtcgaaaagcaccgtttatcgctttttgcagacgatgaaatcattgggttatgtcgcgcaggaaggagaatcagaaaaatattctctgaccctgaaactgtttgaactgggcgcccgcgccttgcagaacgtggatctgatccgcagcgctgacattcagatgcgtgaactttcacgactgacgaaagagacaattcacctcggtgcgctggatgaagacagtattgtttacatccacaaaattgactccatgtacaacctgcgcatgtattcacgcatcggtcgtcgtaacccgctgtacagcaccgcaattggtaaagtactgctggcctggcgcgatcgcgaagaggtgaagcaaatccttggcggggtggaatacaaacgcagcaccgaccgcacgattaccagtacggaagaactgctgagcgtgctggataaagtgcgtgagcagggttacggggaagataacgaagagcaggaagaggggctgcgttgcatcggtgtgccggtgtttgaccgcttcggcgttgtcattgcgggcctgagcatttcgttcccaacgctgcgtttctctgaagagcgtcttcatgaatatgtggcgattctgcataccgcagcgcgcaaaatttcagagcagatgggctataacgattatccgttctga

SEQ ID NO: 114397 - DNA, 240 bp, Enterobacter cloacae
atgcgtttacttattcgtacagtaattgtactggctattgtctggatcggcctgttattaagtgggtacggcgtattaatggggagcaaagaaaatgccgcgggtctgggtatccagtgtaaatatcttaccgcccaggggataagcacggctcagtacatccattccgacagcgggatcatcgggttaaccaactgtcctgtgctgcgtaaatcatctgttgtggttgataacggttaa

SEQ ID NO: 114398 - DNA, 288 bp, Enterobacter cloacae
atgggtgagttactgaattcggggctgctgagcattgcatccctggtaatgtctttggtggtgctggtcgttgggctggtgctgtggtttttcgttaaccgcgccagctcccgcacaaatgagcagattgagctgctggaagcattgctcgatcagcagaaacggcagactgcgctgctgcgtcgtttgtgcgaagccaacgagccggaggagaaagcggtaccgaaggacgctgttgctcaacaacaagacgaggaagacttcattcgcctggtagctgagcgatag

SEQ ID NO: 114399 - DNA, 210 bp, Enterobacter cloacae
atggcaaagattaaaggtcaagttaagtggttcaacgagtctaaaggttttggtttcattactcctgctgacggcagcaaagacgtgttcgtacacttctctgcaatccagggtaacggcttcaaaactctggctgaaggccagaacgttgagttcgaaattcaggatggccagaaaggcccagctgcggttaacgtaactgctatctga

SEQ ID NO: 114400 - DNA, 1746 bp, Enterobacter cloacae
gtgaaaaaaaagacaataaccaccaccggaaattttactccggcacgttttgcacttctgtgtctcgccatcttttgtagccttgcgtttctgctgggccgcgtagcgtggctacaaattatcaaaccggataatctggtgaagcaggaggatatgcgctccctgcgcgaagtggcgatagacgccccgcgtgggatgattgttgaccgtgaagggcgaccccttgcggtgagcgtacccgtccaggccgtctgggccgatcccaaaacagtgctgcaaaaaggggggatcggttttgactcgcgctggcaggccctggcaaatgccttacacctttctctgagcacgctcgcatcgcgaattaacagtaacccgcacgggcgatttatttacctggcccgtcaggttgatcccgcccaggcaaagtggatcgataagctgcgtctccccggtatcaaccttcgcgatgagtcccgccgcttttatcctgccgggcacgtggcggcgaacctgattggcttcaccaatattgatggtcagggcattgagggcgtcgagaaaagctttaacacgcagcttaccgggaaggcaggcgtgcggctggtcaggaaagatcgctacggacatgtggtggagaaccttacggaggtggctcccgtacctgcacataatatccagcttagtatcgatgaacgcctgcaaactatcaccgaagacgcgctggataatgccgtggcgtggaacaaagccgagtcaggcgcgtcggtgctgattaatatccggacgggcgaaattctggcgatggcgagcttccccgacttcaatcccaacaaccgggaaggggcaacgctggatgattttcgcaatcgcgcgatcagcgacacctttgaacctggctcgaccgttaagcctctggtgctgatgacggcgctacagcaggggctggtacagcctgacagcgtgatagatacgcatccctacaccattgatggtcatcgtattcgtgatgtgggctactaccccgagctgacgatgaccgggattttgcaaaaatccagcgacacaggcgtatcccgtctttcgctggcgatgcccgtgcaacggttactggatacctataaaaactttggttttggcgagagtaccgggcttggtttaacgggagaaagcgcaggtttactgccgcagcgaaaattctggagtcagttagatcgggcgacctttgcctttgggtatggcctgatggtaacccccctccagctggcgcatgtgtatgccaccatcggcagctacggcattgaacggcctctgtccatcacccgtattgacccgccggtgattggcaagcgggtgatgcccgaggaaattgttcacgaggtggaacatatgatggagagcgttgcgttacccggcggtggcggggtcaaagcggcggtgcgtaactatcgcgtggcgataaaaaccgggacggccaaaaaaatcgatgaacatggtaagtatgtggataaatacgtcgcctataccgcaggcgttgcgcctgccagcgatccccgtttcgcgctggtggtggtgatcaacgatccgcaaaacggtgcctactatggcggggccgtttctgcgcccgtgttcagcgaaattatgggtaacgtcctgcgcctggaaaacgtgaagccagacgggctgccggcagattctgaccatctgatcgtgatgcgtcacccagccgtttataaccctggcgaatag

SEQ ID NO: 114401 - DNA, 816 bp, Enterobacter cloacae
atgtctttcagttgtcccctttgctacgcgccgctgacgcgcgcggagaaaacgtttatctgtccacagggacatcagtttgaccgggcgaaagagggctatgtaaatcttctgccggtacaacataagcgctcccgggacccgggtgacagtgcggagatgatgcaggcgcgccgggcgtttctcgatgccgggcactatcaaccgctcagggatgccgttgtcgccttactccgtcaatatctgacagaaggcgcatccgccatgctggatatcggctgcggcgaaggttactacaccgccacgtttgctgacgtggcggctgagaagggtgccgaaactttcgggctggacgtgtcgaaagtggctatccgtgcggcagccaaacgctattcagcggtaacgttctgcgtggcctccagccaccgcctgccgtttgaggaagcgagtatggacgccgtggtgcgtatctatgcgccgtgcaaggcagaggagctggcgcgcgtcgttaagtccggcggctgggttattaccgtcacgccagggccgcgtcatctgctggagctaaaagggctgatctatgatgaagttcacctgcatgcgccgcactctgaacagctggcgggctttgcgttaaagcaggcgcagtcggtagcgtatgaaatgacgttgcagggaagtgaagcggtggcgttactgcaaatgacgccgtttgcatggcgggcaaaaccagaggtgtgggaaacgctggcagcgcagacagaatttcgctgccagacggatttcagcattcattgctggcagcgcgaaggttaa

SEQ ID NO: 114402 - DNA, 567 bp, Enterobacter cloacae
atgaatatctccgctacgatccttctggcttttggcatgtccatggacgcatttgccgcctctattggtaaaggtgccaccctccataaacctaaattttccgacgccctgcgtaccggtctcatctttggtgctatcgaaacgctgacgccgcttatcggctggggtctggggatgctcgccagccagttcgtgctggagtggaatcactggattgctttcgtgctgctggtgttcctcggcggacgcatggtgattgaaggctttcgtggtaacggcgatgaagatgatgcgccgctgcaacgccacggcttctggcttctggtgacaaccgccatcgcaaccagcctggatgcaatggccgtgggtgtcggtctggcgtttttgcaggtcaatattatcgccaccgcgctggcgattggctgcgccacgctgatcatgtcaacgctggggatgatggtgggtcggttcattggcccgctgttaggcaaacgagccgaaattctgggcggtatcgtgttgatcgggattggtgcccaaatcctttgggcacacttcgcgggttaa

SEQ ID NO: 114403 - DNA, 459 bp, Enterobacter cloacae
atgactgtcacggacaccgtactggttttatttattgttgcccttctggcttacgcgatctatgacgagttcattatgcctcgccgccacggcgagacgctgctgacccttcccctcttacgccgtggacgcattgatgcgtttatcttcgccggtctggtagtcatcctgatttacaataatgtgaccagccacggcgcaatattaaccacatggttattatgtgcgctggcattaatggcgatttacctgttctggatccgctcgccaaaactcatttttaaaaaacacggattcttcttcgctaatgtctggatagaatataaccgtattaaagagatgaatttatccgaagacggggttctggtgatgcaattagaacaacgccgcctgctcatccgggtcaaaaatattgatgacctggaaaagatctacaaattactcgttaaaactcaatga

SEQ ID NO: 114404 - DNA, 852 bp, Enterobacter cloacae
atggttgatatgacaaaaactaccactgagaaaaaactcactccgggtgatattcgtggcgtgttcatccgttctaacctgtttcagggttcatggaacttcgaacgtatgcaggcgctcggcttctgcttctccatggtgccggccatcaaacgcctgtatccggaaaacaacgaagcacgccgtcaggcaattaagcgtcacctggaattcttcaacacccatccttatgttgcggcgcctgttctgggcgtgacgctggcaatggaagaacagcgtgcgaacggggctgagatcgacgatggtgccatcaacggtatcaaagttggtctgatggggccgctggcaggcgtgggcgacccgatcttctggggtaccgtgcgtccggtctttgcggcgctgggcgccgggatcgccatgagcggcagcctgctcggtcctctgctgttcttcatcctgttcaacgcggtgcgtctgctgacccgttactacggcgtggcgtacggttatcgtaaaggggtggatatcgttaaggatatgggcggcggcttcctgcaaaaactgactgagggggcgtcaatcctcggcctgtttgtaatgggggcgctggttaacaagtggacgcacgtgaacatcccgctggtggtatcgacgatcactggtcaggatggtcagacgcgcgttaccaccgtgcagacgattctggaccagctgatgccgggcctggtaccgctgctgctaaccttcgcctgtatgtggctgctgcgtaagaaagtgaacccgctgtggatcatcgttggcttcttcgtcatcggtatcgcgggctacgccgtcggcctgctgggtctgtaa

SEQ ID NO: 114405 - DNA, 801 bp, Enterobacter cloacae
atggagattactactcttcagattgtgctggtgttcatcgtcgcatgtattgcgggtatggagtccgtacttgatgaatttcagttccaccgccctctggtggcctgtacgttgattggcgccgttctcggtgacatgaaaaccggtatcatcatcggtggtactttggaaatgatcgccctcggctggatgaacatcggtgcggcagttgcgccagatgccgcgctggcgtccattatttcaaccgttctggttatcgctggtcatcagagtattggtgccggtatcgcgctggccatcccgctggccgcagcgggtcaggtgctgaccattatcgtccgtactattaccgttgccttccagcacgcggcggataaggcggccgaaaacggcaacctcaccgcgctctcctggatccacgtttcttccctgttcctgcaagcgatgcgtatcgcaatccctgcggttatcgtggcgatttctgtcggtaccagcgaagttcagggcatgctgaatgcgatccctgaagtggttaccagcggtctgaatatcgccgggggtatgatcgtggtggtcggttatgcgatggtcatcaacatgatgcgcgcaggctacctgatgccattcttctaccttggcttcgttaccgctgcgttcaccaacttcaacctggttgcgctgggtgtgattggtgcggtgatggcgattctttatatccagctcagcccgaaatacaaccgtgtcgcgggtgcccctgcgcaggctgctggtaacaacgatctcgataacgaactggactaa

SEQ ID NO: 114406 - DNA, 963 bp, Enterobacter cloacae
gtgaccattgctattgtcataggcacacatggttgggctgcggagcagttactcaaaacggcagaaatgctgttgggcgagcaggaaaacgtcggctggatcgatttcgttcccggtgaaaatgccgagacgctgattgaaaaatacactgctcagcttgagaagctggataccagcaaaggcgtgctgtttctcgtggatacatggggcggcagcccgttcaacgctgccagccgcattgtcgtcgataaagagcattatgaagtcgtcgccggggtgaatatcccgatgttggtggaaaccttcatggcgcgtgacgacaacccaggttttgatgaactggtggcactggcggtggaaaccggtcgcgaaggcgtgaaggcgctgaaagcgcagccggttgaaaaaccggcccctgcccctgctgcaccaagggcggcagcaccggcgaagccaatgggtccgaacgattacatggttatcggccttgcgcgtattgatgaccgtctgatccacggccaggtggcaacacgctggaccaaagagaccaacgtacaacgcatcatcgtggtcagtgacgaagtggccgccgacactgtccgtaaaacccttcttacccaggttgcaccgccgggcgtcaccgcgcacgtcgtggatgtcgccaaaatgatccgcgtttacaacaacccgaaatatgcgggtgagcgcgtgatgcttctcttcaccaacccgacagacgtcgaacgcattgttgaaggcggcgtgaaaatcacctccgttaacattggcggtatggcattccgtcagggcaaaacgcaggtcaacaacgcgatttcagtggatgcgaaagatatcgaggccttcaacaaactgaatgcacgcggtatcgaactggaagcccgtaaggtttccacggaccagaaactgaaaatgatggatttgatcggcaaagtggggaaataa

SEQ ID NO: 114407 - DNA, 1560 bp, Enterobacter cloacae
atggaattcttaatggacccgtcaatctgggtaggcttgcttacgctggtcgtgctggagatcgttctcggtattgataacctggtgtttatcgccatcctcgcggataagctcccgccgaaacagcgtgataaagcccgtctgatcggcctctcgctggcgctgatcatgcgtctgggcttgctgtctgtgatctcgtggatggttaccctgacgaagccgctgttcaccgtcatggatttcaccttctccggccgcgatttaatcatgctggtggggggcctgttcctgctgttcaaagccacaacagagctgcatgaacggctggagaaccggcagcacgatgatggccacggtaagggttacgccagcttctgggtggttgttctccagattgtggtgcttgatgcggtcttctctctggatgcggtgattacggcagtcggcatggtgaaccatctgccggtgatgatggcggcggtggtgattgcgatggcggtaatgctgctggcgtcaaaaccgctgacgcgtttcgtcaaccagcatccgacggtcgttgtgctgtgtctgagcttcctgctgatgattggtctgagcctggtggcagaagggtttggcttccatattccgaaaggctacctgtacgccgcgattggcttctcgattctgatcgagctgtttaaccagattgcgcgccgtaactttattaagcagcagtcgaatcagccgctgcgagcccgtaccgcagatgcgattctgcgactgatgggtggacgtcgtcaggtcaacgtgcaggctgataacgagaaccgtaacccggttccggtgccggaaggcgcgtttgtggaagaagaacgctacatgatcaacggcgtgctttcgctggcttcccgctccctgcgcggcattatgacgccgcgcggtgagatcagctgggtggacgccaacctgagcgtcgacgaaattcgtcagcagctgctctcctcgccacacagtctgttcccggtctgccggggtgagctggatgagatcatcggtgtcgtacgcgcgaaagagatgctggtggcgctggaagagggcgttaacgtcgaggccgtagcggccgcgtcgcccgccatcgtagtaccggagacgctggatccgatcaacctgctgggcgtattgcgtcgtgcccgcgggagctttgttatcgtcaccaatgaatttggtgtggtacagggcctggtgacgccgctggacgtgctggaagccattgccggtgaattccctgatgcggatgaaaccccggaaatcgttgccgacggtgacggctggctggtgaaaggcaccaccgacctgcacgcgctctcgcacacgctgggcgtcgaaaacgtggtcaatgatgatgaagacattgccaccgtcgcggggctggtgattgccgttaacgggcagatcccgcgtattggtgatgtgctggagctgccgccgctgcaaattactatcgtcgaagccaacgactatcgcgttgatatggtgcgtattgttaaagagcactctgcacacgacgaagaagagtaa

SEQ ID NO: 114408 - DNA, 1599 bp, Enterobacter cloacae
atgcaaactgcacaaacgatcattaaagactatcgccgaaaacgcgttatcgtctgtgtcacggttgcgctcgttacgctcgtcctgacgctgggtattcgctttatttcacagcgcaacataaatcaggatcggatccacgactttacccaccacaccgtgcgtgcgcttgataaggtgcttctttcgttagaggcccagcgggaaacgctactttcactggttggcataccctgttccgaagcaaatctgatcctgcgaaaacaggcggcgatcctccagaccgtacgctccatcgccctcattcaagacggaatactgtattgctcaagcgtctttggcagccgtaatgtgcccgtcagtgagtttgtgccggagctgccggtcagtgaatccaggctgttgctgctgaccgatcggtggctggtaaaaggcagcccggtactgattcagtggtctcccctcgcgagcgacggcaacgacggggtgatggaggtggtgaatatcgatctcatcactaaaatgattctcgagccgcagcggccgcagatcaccgacgttgtcctgagagtaggagataacttcctccgcgacgggcaacaggtgacgactacgccgaccttcgatgaaaacgcctccctgctggaacaatcgtcacagcattaccctttcagcgtcacggtgagtggccccgggcctggcgaaatggcgttaaaaaatctgcccacccagctgccgctggcgttaatgctcagcttactgatgggctatatcgcctggctcgccaccgcgcggcgcatcagtttcacctgggaaatcaatatgggaattgcggccagggagtttgagctcttctgccagccgctggtgaatgcccgcacccgggaatgcgtcggcgtcgagatcctcctgcgctggaacaacccgcgtcagggatggatttcgcccgatgtctttatccctctggccgaagaacataacctgattgttccgcttacccgctacgtcatcagcgaaacggtgcggcagataggctatttcccggcctcgcgcgatttccatatcggcattaacgtggccgccagccattttcgccgcgctgcgctgatccaggatctcaaccgcatctggtttaacgccagccctgttcaacagttgatcgtggagttaaccgaacgcgatgcgttgctggatgtggattaccgcatcgtgcgggagctgcaccgcaaaggggtgaaacttgcgattgatgactttggtaccggcaacagctcactttcatggctagaaaaactgcatccggatgtgctgaaaattgataaatccttcaccaccgcgatcggcaccgacgccgtgaactcaacggtaacggatattattattgcgctgggtcagcggctgaatattgaactggttgcggaaggggtggaaaccgaggagcagtcacgctacctgcgccgtcacagcgtacatattttgcaggggtacttgtatgcgcggccaatgccgctgcgcgagtttccgaaatggctggcggaaagtcactctccgccagcccgccacaacggacacatcgtgcccttactgccgttacgctag

SEQ ID NO: 114409 - DNA, 1365 bp, Enterobacter cloacae
gtgattagtatattcgacatgttcaaagtggggattggtccatcttcttcccacactgtagggccgatgaaggccggtaaacagttcgtcgatgatctggtcgaaaaaggattactggaaagcgttactcgtgtcgccgtagacgtttacggttcactgtcattaacgggtaaaggccaccacaccgatatcgccattattatgggtctggcgggcaatatgccggacacagttgatattgatgccattccggcatttatccgcgacgtggaaacgcgcggtcgtttgctgctggctaacggccagcacgaagtggacttcccgcaggatgacgggatgcgttttcgtagcgacaacctgccgctgcatgaaaacggcatgaccatccacgcctggagtggcgaaaaagagatctacagcaaaacttactactccataggcggcggctttatcgttgacgaagaacactttggtaaagagagcgcgggcgacgtcaatgtgccctatccgtttaaatcggccaccgagatgctgggctactgcaaagagaccggtctgtccctgtcaggcatggtgatgcagaacgaactggcgctgcacagtaagaaagagatcgaagactattttgctaacgtgtggcaaaccatgcgcgcctgtattgaccgcgggatgaacaccgaaggcgttctgcctgggccactgcgcgtaccgcgtcgtgcctctgcgctgcgccgcatgctggtcactaccgacaagttctccaatgacccaatgaacgtggtcgactgggtgaacatgtttgctctggcggtgaacgaagagaacgccgcagggggccgcgtggtgaccgcgccaaccaacggcgcgtgcggtatcgttccggcggtgctggcctattacgatcactttattgagcccgtgacgccggacatctacatccgttatttcctcgcggcaggcgctatcggcgcgctgtacaagatgaatgcgtccatctccggcgctgaagtgggctgtcagggtgaagtgggcgtggcctgctccatggcggcagcgggtctggcggaactgctgggcgcaagccctgagcaggtgtgcgtggcggcggaaatcggcatggagcacaacctcggcttgacctgtgacccggttgccggtcaggtgcaggtgccgtgcattgagcgtaacgccatcgcctccgtcaaagcgatcaacgcctcgcgtatggcgatgcgccgtaccagcgagccacgcgtgtcgctggataaggttattgaaaccatgtacgaaaccggcaaggacatgaacgcgaagtaccgtgagacctcgcgcggcggtctggccattaaggtgcagtgcgactaa

SEQ ID NO: 114410 - DNA, 579 bp, Enterobacter cloacae
gtgaagaaagacaacctgacgctggatgattttctgtcgcgctttcagcttctgtggccccaggttaaccgcgccacgctgaatcaacgtcaggcggcggtgctgatcccggtcgtgcgtcgtgagcagccgggtctgttgcttacccagcgctcaccgcatatgcgaaaacacgccggtcaggttgcgttcccgggcggcgcggtggacagcaccgatgcatccctgattgccgccgcactgcgcgaagcgcatgaggaagtggcgatccccccggaggcggtcgaggtgatcggcgtgctgccgccagtggacagcgtaaccggttttcaggtcacgccggtcgttggcattattccgcccgatcttcagtatcacgccagcgtcgatgaagtttcagcggtattcgaaatgccgctggaagaggcccttcgtctgggtcgctatcacccgctggatattcaccgccgcggacacgatcatcgggtctggctgtcgtggtatcagcattattttgtctggggcatgacggcaggcatcattcgtgagctggccctgcaaatcggcctgaagccttga

SEQ ID NO: 114411 - DNA, 1344 bp, Enterobacter cloacae
atgccatacatgaacatgcgcttccccactgttatgaccttgccctggcgtgcagacgccgccgagttctggtttgcccgtctgagccaccttccttttgccatgctgctgcactcagggcatgcggatcacccctacagccgctttgatattctggtggccgacccggttaaaacgctgacgaccgatgcgctgtcgccaacggacgatccgctgatgcggcttcagaacgagatccatgctctgggcttatctgccacaccggatccggatctgcctttccaggggggcgcgctgggcctgtttggttacgatctgggtcgccgtttcgaaaagctgcccgagcatgcgcaggcggatatttccctgccggatatggcggtggggctctatgactgggcgctgatcgtggatcaccgtaagcagacggtttctctgctaagccaccgggacgtgcaggcgcgtctggcctggcttgaggcgcaacggcccgccgccccggaacgctttatgctaacctccggctggcgctcgaacatgagcgcggaggaatacgcggaaaaattctcccgcgtgcaggcgtatcttcacagcggcgactgttatcaggtcaacctcgcccagcgtttccaggcggcatacgagggagacgaatggcaggcgtttacccgcctcaatgccagcaataaggccccgttcagcgcatttttacgccttgaacacggcgccatcctcagcctttcgcctgagcgttttattcacctggctgacggtatgattcagacccgcccgataaagggcaccctgccgcgccttgccgatgccgacgccgaccgtcagcaggcggagacgctggcggcctcgccgaaagatcgcgctgaaaacctgatgattgtcgatctgatgcgcaatgatattggccgcgtcgccgagccgggcagcgtgcgcgtgccggagctgttcgtcgtggagccattcccggcggtgcatcatctggtcagcaccatcaccgcacgtctgccggcctcgcgaaccgcctgcgatctgctccgcgccgcgtttccgggcggctccattaccggcgcgccgaaggtccgggcgatggagatcatcgacgaactggaaccgcatcgccgcaacgcctggtgcggcagcatcggctatgtgagtctgtgcggcaccatggatactagcatcactattcgcaccctgacggcctgcgacggtaacctgtactgttccgcaggcggtggcattgtggccgacagccaggcggaggcggaatatcaggaaacctttgataaagtgaatcgtatcctgaaacaactggagaactcacggtga

SEQ ID NO: 114412 - DNA, 183 bp, Enterobacter cloacae
atgtttgcaggtttaccttctctcagccatgaccaacagcagaaagccgttgaacgtattcaggagctgatgtcccaggggatgagcagcggacaggcaatttcccaggtcgcggaagaacttcgcgccacccataccggcgagcggatcgtggcgcgctttgaggatgaagatgaagaataa

SEQ ID NO: 114413 - DNA, 345 bp, Enterobacter cloacae
atgacaattacgcgcattgatgccgaagcccgctggtctgacgtggtgatccacaaccagacgctgtactacaccggcgtccctgccaatctggacgctgacgccttcgagcagaccgccaacaccctggcgcagatcgacgccgtactggaaaaacagggcagcgataaatcccgcattctggatgcgacgatttttctggcgaataaagacgatttcgcggcgatgaataaagcctgggatgcgtgggtggtggcgggtcacgcgcctgtacgctgcaccgtacaggccacgctgatgaaaccggaatataaggttgagatcaagattatcgcggcagtgtaa

SEQ ID NO: 114414 - DNA, 1911 bp, Enterobacter cloacae
gtggcagacgatttttccccagaaggtcagttagcacaggctattcccggctttaaaccgcgcgaaccccaacgtcagatggcgcatgccgtcgcgcacgccatcgacaaggcgcagccgctggtcgtggaggccggcaccggtacggggaaaacgtatgcttacctcgctcctgcgctgcgggcgaaaaaaaaggtgatcatctctacgggatcaaaagcgctccaggatcagctctacagccgcgatttacccacggtggcgaaagcgctgaaatacaaagggcgtctggccttgctgaaagggcgttctaactacctgtgtctggagcgtcttgaacagcaggcgctggcgggcggcgacctgccggtacaaaccctgagcgatgtgatcgtcctgcgcgcctgggccaaccagacggaggagggggacatcagcacctgcgcgagcgtgccggaagactccccggcctggccgctggtgaccagcaccaatgacaactgcctcggcagcgactgcccgctgtataaggactgttttgtggtgaaagcgcgtaaaaccgcgatggacgccgacgtggtggtggtgaaccatcacctgtttcttgcggatatggtggtcaaagacagtggtttcggcgagctgatcccggaggcggaggtgatgatcttcgatgaagcccatcagctaccggacatcgccagccagtattttggtcagtcgctctccagccgtcagcttcaggatctggcgaaagatattaccattgcctatcgcaccgaactcaaagatacccagcagttgcagaagtgcgcggaccgcctggcgcaatgcgcacaggatttccgcttacagcttggcgagccgggctatcgcggcaacctgcgcgaactgctcgcagacaaaaatatccagcgcgcgctgctgctgctcgatgatgcccttgaactctgttacgacgtggcgaagctgtccctcggacgttcagcgctgctggacgccgctttcgagcgcgccacgctctaccgtgggcggctgaagcggctgaaagagatcaaccagccgggctatagctactggtacgaatgtacctcgcgccacttcaccctggcgctcacgccgctgaccgttgctgataaattcaaagaggtgatggcgcaaaagcccggcacctgggtctttacctcggccacgctgtcggtcaatgacgatctgcaccactttaccgagcgcctcggcattgagcaggcggaatccctgcttctgccgagcccgttcgactatgagaaacaggcgctgctgtgcgtgccgcgcaatctgccgctgcctaaccagccgggcgcggcgcgccatctggcggccatgctgaagccgatgattgaggccaacaacgggcgctgctttatgctctgcacctcacacgccatgatgcgcgatctggccgagcagttccgcgccaccatgacgctaccggtgctgttgcagggggaaaccagcaaaggccagctgctccagcagtttgtcagcgccggtaatgccctgctggtggcgaccagcagcttctgggaaggggtggacgtgcgcggcgatacgctctcgctggtgattatcgataagctgccgttcacatcgccggacgatccgctcctgaaagcgcgcatggaggattgccgtctgcgcgggggcgatccgttcgacgacgtccagctgccggacgcggtcatcacgcttaaacagggggtagggcgactgatccgcgacgtcaccgaccgcggggtgctggtgatctgcgacaaccgcctggtgatgcgtccctacggcgccaccttcctcgccagcctgccgcccgcgccgcgcacgcgggatattaaacgcgcggtccgcttcctggcgaacccgacggcggagtaa

SEQ ID NO: 114415 - DNA, 696 bp, Enterobacter cloacae
atgcgaattctggctattgataccgcgacagaggcctgttccgttgccctgtggaacgacggtacgacttttgctcatttcgaagagtgcccacgggaacacacccaacgtattctgcccctggtaaaaaccattttaaccgagggcaacaccgccctgactgacctcgacgcgctggcctacggccgtggtccgggcagctttacgggcgtacgtatcgggattggcattgcgcaggggctggcgctgggcgctgacctgccgatgatcggcgtctcaacgcttgcgaccatggctcagggcgcctggcgcatgaccggcgccacccgcgtgctggctgcgattgatgcccgcatgggggaagtctactgggcggagtacacccgtgacgaaaacggcgtctggcacggcgaagagacggaagcggtgcttaaacctgaagccgtcaccgggcgcctgaagcagctctccggtgagtgggcgacggtcggaaccggctggccggcatggcctgagatggcgaaggacaccggccttacgctggtggacggtaacatgctcctgcctgccgccgaagatatgctgccgattgcctgtcagctgcttgccgcaggaaaaaccgtggcggttgaacatgctgaaccggtttatttacgaaacaccgtcgcgtggaagaaacttcctggccgcgagtga

SEQ ID NO: 114416 - DNA, 582 bp, Enterobacter cloacae
atggcggttcagactaaagttgtacgctttcttatggcaggcgcggttgccatagcactgagcgggtgcgtcaccgttcctgatgcgatcaagggcaccagcccgacgccacagcaggatctggtacgcgtgatgaatgccccggagctgtatgtcggacaggaagcgcggtttggcggcaaggtggttgaagtgataaaccagcagggtaaaacccgactggagattgccactgtcccgctggacgacggcgcgcggcctgttctgggtgaagcctcgcgcgggcggatctacgctgacgtcagcggcttcctcgatccggtagatttccgcgggcagctggtaaccgtcgtcgggccgattaccggttcggtggcggggaaaatcggcaatacgccatacaaatttatgaccatgcaggtgaacggctacaaacgctggcgtatcgcccagcaggtggtgatgccgccacagccaatcgatccgtggatgtggggaccgcatccgtatcgatacggctacggtggctggggttggtacaatccaggccctgcacaggttcaaacaatcgtaactgagtaa

SEQ ID NO: 114417 - DNA, 1719 bp, Enterobacter cloacae
atgacgacgaacactcatttcagaggtgatgcattgaaaaaggtttggcttaaccgttatcccgcggatgttcctgcggagatcaatcctgaccgttatcaatccctgattgaattatttgaacactcggtacggcgttacgctgaccagcctgcatttgtgaatatgggtgaagtgatgaccttccgtaagctggaagagcgcagccgggcgtttgcagcctatttacaggaagggttgggcttgcagaaaggggatcgcgtcgcgctgatgatgccaaacctgctgcaatacccggtggcgctgttcgggatcctcagggcagggatgatcgtggttaacgttaacccgctctataccccgcgcgagctggaacatcagttgaatgacagcggcgcggcggcgattgtgattgtctccaactttgcccacacgctggaaaaagtcgttgaaagaacccaggttaaacacgtcatcctgacgcgcatgggcgaccagctctctaccgcgaaaggtacgctggtcaactttgtcgttaaatacgttaagcggctggtgccgaaataccacctgccggatgccatctctttccgccgcgccctgcatgcgggctaccggatgcagtacgtgaagccggagatcgtgtccgaggatctggcatttctgcaatacacgggcggtaccaccggcgtggcgaaaggggcgatgctgacccatcgaaatatgctggcgaaccttgagcaggttaatgccacctacgggccgctgctgcacccgggcaaggagctggtgatcaccgcgcttccgctgtatcacatttttgcgctgaccatgaactgcctgctgtttattgagcttggcggtcaaaacgtattgatcaccaacccgcgcgacattccggggctggtcaaagagctggcgaaatacccgttcaccgccatgaccggcgtgaacaccctgtttaacgcgctgcttaacaataaagagttccagcagctcgatttctccacgctgcacctctctgcgggtggcgggatgccggttcagcaggcggttgccgagcgctgggtgaaactcaccgggcagtatctactggaaggctatggcctgacggagtgcgccccgctggtcagcgttaacccgcatgatatcgactatcacagcggcagtatcggtctgccggtcccgtcgacggaagcaaaactggtggatgatgaggataacgaagtgcctcacggtgagccaggggagctgtgcgtcagagggccgcaggtgatgctgggctactggcaacgtccggatgccacggatgagatcatcaaagacggctggctgcacacgggcgacatcgcggtgatggatgacgaaggcttcctgcgcatcgtcgatcgcaagaaagacatgatcctggtgtcagggttcaacgtctatccgaacgaaatcgaagacgtggtgatgcagcacagcggcgtgctggaagtggcggcggtgggcgttccctccggcagcagcggtgaagcggtgaagatatttgtggtcaagaaagatccttctctgaccgaggatgcgctgataacgttttgtcgccgtcagctgacgggctataaagtgccgaagctggtggaatttcgggatgagctgccgaaatccaacgtcgggaagatattacgacgagaattacgtgacgaagcccgtgccaaagtggacaataaggcctga

SEQ ID NO: 114418 - DNA, 1155 bp, Enterobacter cloacae
atgggcgcaaacaaaagagagtccgatttgaattaccagatgatcactaccaacgacgagctggcttcgctgtgcgaggtgacgcgtgaatttcccgctatcgccctggatacggaatttgtccgcacccgaacgtactatccgcagctgggtctgattcagatgtatgacggcaaacacgtgtcgttgattgaccccctcggcattaccgactgggcgccaatgcgcgagctgttgctggataccgccgtgaccaaatatctgcacgcgggcagtgaagatctggaagtctttctcaacacctttggcatcatgccgcagccgctgattgatacccagatcctcgcggcgttcagcggtcgtccgctctcctggggcttcgccgcgatggtggaagagtacaccggtctgacgctggataagagcgaatcgcgtaccgactggctcgcgcgtccgctgacggcgcgtcagcttgaatacgccgcggcagacgtcttttacctgctaccgattgccggccagctcatgaaagaggctgaggcgtccggttggctgtctgccgcactggacgagtgccgcatgacgcagcagcgtcgtcaggaagtggttgatccgaaagaagcctggcgtgacatcaccaacgcctggcagctgcgcacccgtcaactggcctgtctgcaattgctggctgactggcgtctgcgtaaagcgcgtgagcgcgatctggcggttaacttcgtggtgcgtgaagaacacctgtgggcggtggcgcgctatatgccgggtagccttggtgaactgaacagcattggcctttccggaagtgagatccgtttccacggtaaaacgctgctcgcgctggtagagaaagctcagcagctgccggaggacgcactgccagaaccgctgcttaacctgatggatatgccgggctaccgcaaggcgttcaaagatatcaaagcgctggtgcagacggtggcgggggaaagcaaactgagtgccgaactgctggcttcacgtcgtcagattaaccagctgctgaactggcactggaagttgaaaccgcaaaatggtttaccggaactggtcgccggatggcggggggaactgatggccgaacgcctgaataccctgctggaagggtatccgcgctaa

SEQ ID NO: 114419 - DNA, 267 bp, Enterobacter cloacae
atggcattactggacttttttctctcgcggaaaaaaagcaccgccaacatcgcaaaagaacgtctgcaaatcattgtggcggaacgtcgtcgtagcgacgccgaaccgcactacctgccgcagctgcgcaaagacattctggaagtgatctgcaaatacgtgcagattgacccggaaatggtcaccgttcagctggagcaaaaagacggggatatttcgattctggagctgaacgtgacgcttccggaagcggaagagtcgcgttaa

SEQ ID NO: 114420 - DNA, 813 bp, Enterobacter cloacae
atggcacgcattattgttgtgacttcgggtaaaggaggcgttggcaagaccacctccagcgcggccatcgctactggtttggcccagaagggaaagaaaaccgtcgtaatcgacttcgatatcggtctgcgtaacctggacctgatcatgggttgcgagcgtcgcgtggtgtatgacttcgtgaacgtcattcagggcgatgccacccttaaccaggcgctgattaaagataagcgtaccgagaacctctacattcttccggcgtcccagacccgtgataaagacgccctgacccgcgaaggcgtggaaaaggtgctcgacgatctgaaaaagatggagttcgacttcgtggtctgcgactccccggccggtatcgaaaccggggctttgatggcgctctacttcgcggatgaagccatcatcaccaccaacccggaagtctcgtcagtacgtgactccgaccgtattctcggcattctggcctcgaaatcccgtcgcgcggaaaatggccaggagccaatcaaagagcacctgctgctgacccgctacaacccgggccgggtgaacaaaggtgacatgctgagcatggaagacgtgctggagatcctgcgcatcaaactggttggcgtgatcccggaagatcagtccgtgttgcgcgcctctaaccagggcgagcccgtgatcctggatacacaggcagacgcaggtaaagcgtatgcggataccgttgaccgtctgctgggagaagaacgtcctttccgcttcattgaagaagagaagaaaggtttcctcaaacgcctgttcggaggataa

SEQ ID NO: 114421 - DNA, 708 bp, Enterobacter cloacae
atgtcaaatacgcccatcgagcttaaaggcagtagcttcaccttatcagtggttcatttgcatgatgcaaaacccgaggttattcgtcaggcgttagaagacaaaatcgcgcaggctcccgcttttcttaagcatgctcctgtcgtcgtcaatgtaagcgaccttgaggggccggttaactggaagcgactccagcaggccgtcgtctccacggggttgcgcatcgtgggtattagcggctgcaaagacgcagagttaaaagccgaaattgaacgcgcgggtttgcccttgttaaacgagggcaaagaaaaagccccgcgtgcaacgcctgcaaccgttcccgctcccccgcctccggcgcaaaatgtagccccagtcacaaaaacgcgattgattgatctgccggttcgttccggtcagcgcatttatgcgccaaactgtgatctgattgttacaagccacgtcagtgcgggcgcagaactgattgcagatggcaatattcacgtttacggtatgatgcgtgggcgtgcgcttgcgggcgccagcggcgatcgagaagcacaaattttttgtactcacctgacggcagaactggtgtctatcgcaggtgaatattggctgagcgataaaatcccagccgaattttatggcaaagcggcccgtctgcaactggcagataacgctttgaccgttcaaccgttaaattga

SEQ ID NO: 114422 - DNA, 276 bp, Enterobacter cloacae
atgttttgtgtgatctacagaagtaccagccgcgaccagacctacctttatgtcgaaaagaaagacgatttttcccgcgtgcctgaagaattaatgaaaagctttggccgaccgcagctggcgatgctgctgccgctggacggccgtaagaagctggtgaacgccgatcttgagaaagtcaaaaaggcgttaatcgagcagggctattatttacagcttccgccgccaccggagaatttattaaaacagcaccttgagctgagcggaaagaaataa

SEQ ID NO: 114423 - DNA, 660 bp, Enterobacter cloacae
atgtatcaacatcataactggcaaggtgcattactggattatcccgtcagcaaagtggtctgcgtgggcagcaactatgcaaaacatattcaggagatgggcagcgccgtgccggaagagccagttctgtttattaagccagaaaccgcactgtgcgatattcgccagccgctggttctgccgcagggactgggctcggtgcatcatgaagtggagctggcggtgctgatcggcgcgacgctgcgccaggcaactgaagagcatgtagagaaggcgattgcgggttacggtgtcgcgctcgacctgacgctgcgtgacgtccagggcaaaatgaagaaagcggggcagccgtgggaaaaagccaagggttttgataattcatgcccgatttctggtttcgttccggtgagtgaatttaccgacgatccgcagaacacgccgctcagcctgaaggtcaacggcgagatccgccagcagggaacaaccgctgacatgatccataagatcgttccgctgattgcctacatgagccgcttcttcaccctgaaacctggcgacgtgatcctcaccggcactccggaaggtgtggggccgctgcttagcggcgacgaactggacgtcagttttaacggcctgtcgctgaaaacccgcgtgctgtaa

SEQ ID NO: 114424 - DNA, 441 bp, Enterobacter cloacae
atgaacgacattcctttctggcaaagcaaaactctcgacgacatgaccgacgcggagtgggaatcgttgtgtgacggctgtgggcagtgctgcctgcataagctgatggatgaagattcggacgagatctatttcaccaacgtagcctgcaagcagttaaacatcaaaacctgccagtgccgcaactatgagcgccgtttcgaatatgagccggactgcatcaagttaacccgtgaaaatctgccgacctttgagtggctgccgcatacctgcgcgtatcgcctgctggcggaaggaaaagatctgcccacatggcatccgctgttgacggggtcgaaagcggcgatgcacggtgaacgtatttccgtgcgccacattgcggtgaaagagtccgaggtgcgcgactgggaagaccacattatgaatcaccctaataggtga

SEQ ID NO: 114425 - DNA, 480 bp, Enterobacter cloacae
atggccctgaccgcctttgcgctggaaatggtcgcgctgtggtttcagcatgtgatggggctgaaaccttgcgtactgtgtatttatgagcgttgtgcgctgttcggcattatgggcgcgggtctggtaggtgcgattgcacccaaatcaccgttacgctatgcggcaattgccatctggctgtacagcgccgggaaagggattgcgcttgcctgggagcacacccagatgcagcttcacccgtcgccgtttatgacctgcgattttgccgcccgcttcccgagctggctgccgctggataaatggctgccgcaggtgtttgtggcctccggtgactgctctgtacgccagtgggagttcctgacgctggagatgccgcagtggctggtgggcatttttgtcgcctactttgtggtggcgctgctggtgctgattgcccagccgttcaaaccaaagaaacgcgatctttttggaaggtaa

SEQ ID NO: 114426 - DNA, 1539 bp, Enterobacter cloacae
gtggaaatttcatttgggcgcgcgctgtggcgcaactttttaggtcagtcacctgactggtacaaacttactttactggtattcctggtcgttaatcccgttatctttttgctggatcccttcgttgccgggtggatgttggtcgccgagtttatctttaccctggcgatggcgctgaagtgctatccgctgttgcccggcgggctgctggcgctggaagccgtggtcattggaatgaccagcgcggagcatgttaaaaacgagatagcgtcgaatcttgaagtcttgctgctgctgatcttcatggtggcggggatctactttatgaagcagcttctgctgtttatcttcacccgtttgctgctgagcattccatcgaaaacgctgctctcgctggcgttttgcctcgccgcggccttcctctctgccttcctggatgcgctgacggtcgttgcggtggtgatcagcgtcgccgtcggcttttacgggatttaccaccgggtggcctcgtctcgtcctggcgataacttgcaggacgacagtcacgttgaggcgcacaaccgcgatgtgctggaacagttccgcgcgtttctgcgcagcctgatgatgcatgcgggcgtggggacggcgctgggcggcgtgatgaccatggtcggggagccgcaaaacctgattatcgccaaagcggctgagtggcattttggcgaatttttcctgcgcatggcgcccgtcagcgtgcccgtgctggtctgcgggttagcaacctgtgtgctggtcgaaaaattcaacctctttgggtatggcgctaagttgcccgatcaggtccgccaggagctgcataagtttgacgagcagagccgcaaacaacgcacgcgccaggagacgctgcgtctgattgcacagggtttcatcggcgtgtggcttatcgctgcgctggccttccaccttgccgaggtggggctgattggcctgtcggtaattatccttgcaaccagcctgggcggcgttacggacgaacatgctatcggaaaagcctttaccgaagcgctgccgtttaccgccctgctggcggtgtttttcgcggtcgtggcggtgattattgaccaacatctgttcgcgccgatcatcgcgtttgtgcttcaggctacgccagattcgcagctaacgctgttctatttgtttaacggtctgttgtcctctatatccgataacgtctttgtcgggacggtatacatcaatgaggccaaagccgcgatggagcaagggattgtcagcagtgaacagttcgagctgctggcggtggcgatcaacaccggaaccaacctcccctccgtggcaaccccgaacggtcaggcggcattcctcttcctgctgacctcggcgctggcaccactcatacgactttcttatggaagaatggtctggatggcgctgccgtatacgctggtgcttaccctggttggtttgctgtgcatcaaaattactctcgttccctgtacgcaatggttattgcaagcaggtatacttgcggcgcattaa

SEQ ID NO: 114427 - DNA, 720 bp, Enterobacter cloacae
atggtcattaaggcgcagagcccggcgggtttcgcggaagagtacatcattgaaagcatctggaataatcgtttccctgcgggatcaattctacctgctgaacgcgaactctctgaactgattggcgtcacccgtaccacgctgcgagaagtgctccagcgtctggcgcgcgatggctggttgacgatacagcatggcaaacccactaaggtgaacaacttctgggaaacgtccgggctgaacattctggaaacgctggcgcgtctcgaccacgaaagcgtaccgcagctgattgataatctgctttccgtgcgcaccaacatcgccaccattttcatccgcaccgcgtttcgtcagcatcctgaagatgcgctgaaagtgcttgccaccgctaatgaggtggaagaccacgcggatgcctttgcgaccctggattacaacgtgttccgcggtctggcgtttgcttccggcaatccggtttacggtctgatcctgaatggaatgaaagggttatatacgcgcattggtcgtcactactttgctaaccctgaagcccgcagcctggcgctcggcttctaccataaactgagcaaactctgcaccgaagggctgcacgatcaggtctatgaaacggtgcgtcgttacggccacgactccggtgaaatctggcatcggatgcagaaaacgctgccgggcgatttagcgattcagagtcgctga

SEQ ID NO: 114428 - DNA, 1533 bp, Enterobacter cloacae
atggctacactagattccatgtccagggacagcacccgtctgagcgatggacccgactggaccttcgagttgctggatgtctacctggcggagatcgaccgggtggccaaactctatcgtctggatacctatccccatcagattgaagtcatcacctcggaacagatgatggacgcttactccagcgtcgggatgccaattaactatccgcactggtcgtttggcaaaaaattcattgaaacagagcggctgtataagcacgggcagcagggactggcgtatgaaatcgtcattaactctaacccgtgtattgcctatctgatggaggagaacaccattaccatgcaggcgctggtgatggcgcacgcctgctatggacataactcgttcttcaaaaataactatctgttccgcagctggacggacgccagctccatcgtcgattacctgatcttcgcccgcaaatacattaccgactgcgaagagcgctacggcgtggacgaggtggagaagctgctggactcctgccacgcgctgatgaactacggcgttgaccgctataagcgcccgcagaagatctcattgcaggaagagaaagcccggcagaagagccgcgaggagtatctgcaaagccaggtgaatatgctgtggcgcaccctgccgaaacgtgaagaggagaaaaccgtcgccgaggcgcgtcgctacccttccgagccgcaggaaaacctgctctactttatggagaaaaacgccccactgctggagccgtggcagcgtgagatcctgcgcatcgtgcgcaaggtgagccagtatttctatccgcagaagcagacccaggtgatgaacgaaggctgggcgaccttctggcactacaccattcttaaccacctgtacgacgaaggaaaagtcaccgagcggtttatgatggagtttctgcacagccacaccaacgtggtattccagccggcatataacagcccgtggtacagcggcattaacccgtacgcgctcggctttgccatgttccaggatatcaagcgtatttgtcagtcgcccaccgaagaggacaaatactggttcccggatattgccggttccgactggctggaaacgctgcacttcgcgatgcgtgattttaaggatgagagctttatcagccagttcatgtcgccgaagatcatgcgtgatttccgcttcttcaccgtactggatgatgaccgcaacaactacctggagatctccgcgatccacaacgaagagggttatcgcgagatccgctcgcgcctgtcatcccagtacaacctgagtaatcttgaaccgaacattcaggtctggaacgtggatctgcgcggcgaccgctccctgacgttgcgctatattccgcacaaccgcgcgccgctggataaggggcgtaaggaagtgctgaagcatgtgcatcgcctgtggggatttgacgtgttgctggagcagcagaacgaagatggcagcgtggagctgctggagcggtgtccggcgcggttgaatacgctgtag

SEQ ID NO: 114429 - DNA, 1299 bp, Enterobacter cloacae
atgcgtgttgtcatactgggaagtggtgtcgttggcgtaaccagcgcctggtatttaagtcaggcgggacatgaggttaccgttatcgatcgcgaatccggtccggcgctggaaaccagtgcggcgaatgcggggcaaatctctccgggctacgctgcgccgtgggcggccccgggcgttccgctgaaggcgatcaaatggatgtttcagcgacatgcgcccctggcgatcagccttgacggcacgcagttccagcttaagtggatgtggcagatgctgcgcaactgcgacacccgccactatatggaaaacaaggggcgtatggtgcggctggcggaatacagccgcgactgcctgaaggcgctgcgtgcctcaacgggcattgaatatgaagggcgtcagggcggcacgcttcagctgttccgtaccccgcaacagtacgaaaacgcgacccgcgatatcgccgtgcttgaagatgcgggcgtaccgtatcagctgctggaagccagccagctggcgcaggtggagccagcgcttgccgaggtcgcgcacaagctgacgggcggtctgcgtttaccgaacgatgaaaccggcgactgccagctattcacccagcgtctggcgcgcatgtgtgagcaggccggggtgaaattccgcttcaatacttctgtcgacaaactgctgtcggaaggtgagaagatttacggcgtgaagtgtggggaagaggtaattaaagccgatgcctacgtgatggcgtttggctcctactcaaccgcgatgctgaaagggatcctggatatcccggtctatccgctgaaaggctactccctgaccattcctgtgaaagaggacagcggcgcgccggtctcgaccattcttgatgaaacctacaaaatcgccatcacccgcttcgataaccggatccgcgtcggcggcatggcggaaatcgtgggcttcaataccgagctgctcaaaccgcgtcgtgaaacgctggagatggtcgtgggcgatctcttcccgcgcggcggcttcattgagcaggcgacgttctggaccggcctgcgcccaatgaccccggacggcacgccgattgtgggccgtacaccatacaaaaatctgtggactaacaccggccacggcacgcttggctggaccatggcctgcggttcgggccagctgctgagcgacctgatctccggacggacgccggcaattccgtttgacgatttgagcgccgcacgctatcaatcagggtttaccccatcgcgtccacaacacctgcacggcgcgcataattaa

SEQ ID NO: 114430 - DNA, 1071 bp, Enterobacter cloacae
atgtcccgtcccattctggcccagctggatttgcaggcgctgaaggataacctgcaaattgttcgccgtgctgcgccgggttctcgtgtctggtcggtggtgaaagccaacgcctacggtcatggtatcgaccgtatctggagtgcgctcggcggcaccgatggttttgccttgctgaatctggaagaggccatcctgctgcgcgagcgcggctggaaaggaccgatcctgctgctggaaggattctttcatgcgcaggatctgcctctgctggataagtaccgcctgacgaccagcgttcacagtaactggcagatcaaggccatccaggacgcgaagctgcatgccccgctggatatctatctcaaagtgaacagcgggatgaaccgtctgggcttccagcctgaacgggtgcatacggtctggcagcagcttcgtgcgctgaaaaacgtcggtgagatgacgctgatggcgcacttcgccgatgcggaaaagccggacggcattgccgatgccatggtccgcattgagcaggcggcagaaggtctggactgtccgcgctcgctgtcgaactcagcggcaacgctctggcatcccgaggcgcactacaactgggtacgtccggggatcgtactgtacggcgcgtcaccctcaggtcagtggcaggatattgccaacagcggcctgaagccggtgatgacgttacgaagcgagattatcggcgtgcaaaccctgaaagcgggcgatacggtgggctatggcagccgctatcgggcagcaggtgaacagcgcatcggtatcgtggcggggggctatgcagatggttatccgcgcatcgccccgagcggcacgccggtgtgggtcgatggcgtgcgcaccggcacggtaggtaccgtctccatggacatgctggccatcgatttgacgccgtgtccccaggcggggatcggctcaccggttgagctgtggggcaacgaggttaaaattgatgatgtggccgctgcggcgggcaccgtcgggtatgagctgatgtgcgcgctggcgtcaagagtgcctgttgtgacggtgtaa

SEQ ID NO: 114431 - DNA, 1734 bp, Enterobacter cloacae
ttgggtgccacagcgataatcagtcttttcattctgggttccatcctggtaacctttagcattttattaagttcattttcatcgcgtcttggcatacctattcttgtcattttcctggctatcggcatgcttgccgggatcgacggtatcggcggtatccccttcgataattaccctttcgcctatatggtgagtaacctcgcgctggcggtgattctgctggacggcggcatgcgcacccaggcaagttcgtttcgcgttgccttaggcccggcgctgtctctggcgaccgtcggcgtgctgatcacctccggcctgaccggcatgatggcggcctggctgtttaacctcgatataatggaaggcttgctgattggcgcgattgtcggctctaccgatgcggcggcggttttctcactgctcggcggcaaggggctgaacgaacgcgttggctccacgcttgagattgaatccggcagtaacgatccgatggcggtgttcctgaccattaccctgattgagatgatccagcagcacgaaaccggcctgagctggatgttcgcctggcacatcctccagcagtttggcctcgggattatcattggtctcggcggcggttacctgttacagcatacgattaaccgtattacgctgccttccggcctttacccgctgctggccctgagcggtgggatcctgatctttgccgtcaccaccgcgctggacggcagcggtattctggcggtttacctttgcggtttcctgttgggcaaccgaccgattcgcaaccgtcacgccatcttgcagaacttcgacggtctggcctggctggcgcagatcgccatgttcctggtgctgggcctgctggtgacgccgtcggacctgctgcctatcgccgtgccggcgctgcttttgtcggcctggatgatcttcttcgcccgtccgctgtcggtgtttgccgggctgctgccgttccgcgggtttaacctgcgtgagcggatatttatcagttgggtggggctgcgcggcgcggtgccgattattctggcagtgttccctatgatggccgggctggacaacgcccgtctgttcttcaacgtcgccttcttcgtagtgctggtgtcgctgctattccaggggacgtcgctgggctgggcggcgaaaaaagccaaagtggtggtaccgcccattggctggccggtctcccgcgtggggctggatattcaccctgagaatccctgggaacagtttgtctaccagctaagcgccgataagtggtgcgtgggcgcatccctgcgcgatctgcatatgcccgctgaaacgcgcattgccgccctgttccgggataacgccctgcttcacccgaccggcagcacgcggctgcgtgagaacgatatcctctgcgtgattggccgcgagcgcgacctacctgccctaggcaagctcttcagccagtcgcccccggtggcgctggatcagcgtttcttcggcgattttatcctcgaagccagcgcccgctttgcggatgtggcgctgatttatggcctggaaggtggactggagaatcgcgataaccagcaaaccctgggtgagattattcagcaattattaggggctgcgccggtcgtcggtgaccaggtggagtttgccgggatgatctggacggtagcggagaaagaagataacgcggtgcgcaaagtcggcgtaaggccgatggaggaggaggcggagtag

SEQ ID NO: 114432 - DNA, 915 bp, Enterobacter cloacae
atgcctcagtttcatctcatcgcaccgtcaggctactgcatcaaccaggaggcggcacagcggggcgttcagcgcctgctggaaatgggccatcaggtagaaaatcagacaattatcccccgccgcatgcagcgttttgccggtacggaggcgcagagactgagcgatatcaacagcctgacgacgctggaaggtgaaaacaccattgtgctggccgtgcgcggcggctatggcgcaagccggctgctggagagcatcgactgggccgggctggccgcgcgccagcagcaggatccgctgttaatctgcggacacagcgatttcacggcgatccagctcggcctgcttgcgttgcataacgtcattacctttagcggcccgatgctggccggcaactttggtgcgccggagctggatgcatttacgcaggaccatttctggcgcgccctgcaaaacccgacgttcaccgtcgagtggcaaggcaatggaccgcactgggaatgtgaaggacagctgtggggcggcaacctcgcgatgctggtgtcgctgattggaacgccgtggctgccgcagatcacggacggcatactggtgctggaagatatcaacgaacacccgttccgcgtcgaacgtatgctgttgcagctgtatcacgccgggatcctggatcggcagtcggccattgtgctgggcagttttagtggttcagcccccaacgattacgatgcgggctattccctggagacgatgattgatttcattcgttcccggctggatatcccggtgatcgccggtctggatttcggccatgagcagcaaaccgttaccctgccgctgggtgcccaggcgcactttgtacacgataattcaggcagtcggttaacaatcagcggtcatccggtcttaaaggcataa

SEQ ID NO: 114433 - DNA, 612 bp, Enterobacter cloacae
gtgaaattgagatggtttgcttttttgattgtgctgctcgctggctgtagttcaaaacatgattatcaaaatcccccctggaaccctgaagtgccggtaaagcgggccatgcagtggatgccgatcagcgaacaagccgggaaggcctggggcgtgagcccgcgtctgatcacggcgatcattgccgtggaatccggtggcaacccgacgctggtgagtaaatcgaatgcggtggggctgatgcagttaaaagcctcgacggcgggaagagaggtctatcgctacatgggctggaagggacagccatccaccagcgagctgaaaaacccggaacgtaatatctctatgggaaccgcttacctgagtattctcgagcatggcattctgaaggggattgacgatccggaagtgatgcaatatgcgctggtggtgtcgtacgttaacggagccggcgcgctgctccgaaccttctcatccgatcgcaaagaggcgatagaagagattaacgatatggataaagatgaattcttcgagcacgttgtgaagaatcatccgtcagcacaggctccacgttatatctggaaagtacagaaagcgatggacgccatgtaa

SEQ ID NO: 114434 - DNA, 732 bp, Enterobacter cloacae
gtgagtagctacagtgagcagttcctgaaacaaaatccgctggctgtattaggggtgttacgcgacctgaaaaagggcgaggtgccgctgcgcatcaactggtcaaccagccagtttatcagcaagatcctggacgtgacggcagaacacctgatcgtggatctgggtagccagagcgaagaaaaccgtgccgcgctccaggcagaaaacctctcggtgatggccgaaacgcagggggctaaagtcgagtttatactgccccgcctgaccacgatcgcgtaccagggtttgcctgcgtttatcgctcccctgcccgctaacctctggttcgtgcaacgccgcgagttttttcgcatcagcgccccgcttcacccggcctatttctgtaaggcaaaaatgccggacaaaaaagagatccgctttcgtctcttcgacctgtcactgggcgggatgggcgcgttaatggatacgccgaagccggaaggactggtggaaggcatgcgttttagtcagattgagctggatatgggcggatggggacgcttctggtttgacgcccagctgattgccatcagcgagcgtaaggtggtggacagcaaaaacgaaaccattaccacgccgcgattgagctttcgctttctgaatgtcgggccaggcgccgaacgcgaactacagcgcatcatcttctcactggagcgtgaagcgcgggaacgcgcgaacaaagtgcgctga

SEQ ID NO: 114435 - DNA, 2103 bp, Enterobacter cloacae
atgagcacctcacgttttgcgttatgcgcgttggcaggcgccgtcacgctggcattgcaaacacaggcttttgcagaagaacccaccatcgtggtgaccggtacagagcagggcagcgcgctccctgcctggaccaacagcgccacgaaatcagccgtcgcggaaagtaaaacgccccaggtgatcaacaccatcgccgctaaagagattgagcagcggcacgccagttcggtaaacgagatcctgcgctatgcgccgggcgtttccacggaggtgcgcgggagcacctcttacatgagcgagtacaaaatccgcgggttcaacgtcgagcaggagttctacaacggcctgcaacttccctataacgtcaccgggaacactaaagcgcgaatcgatccgctgctgattgagagcgtcgatatcctgaaggggccgtcatccgtgctgtatggcggtggctccccgggcgggctggtcaatattcagagtaaaaagccgcagaaagaggcgaaaacagaactgggctttaacaccggaaaccgcaatctgaaagaggggtacctggattccacggggcagattgcgaccagcgactggaactatcgcctgctgggtaaagcgacagagagtgacgaacaggcgcacaccacgcgctatgaaaactatctggtggccccctccgtgacctggcagccggatgacaaaacgcgcctgaccattgacgcgctggcgcaaaatacgccgagcctgacgccgtctgatccgatgccgcttagctatctgcggtctaaatacgccgatcgtcgtgactatgccggggatgagtggagcggctttaagcagcgccagtggatgctgggctacagctttgagcacgagtttgacagtggctggggctttaatcagaaagcgcgctactttgacgtggacacccaccagcgcagcgcctattcaaccgggacgggcagcgaggtctaccagcttaaccgcttcgcctataccacggatgaagatttacagagcttcaacattgataaccaggtcacccgaaccgtcgcgctgggggactggaaacatcatctgctggcgggctttgactaccagaagctgaactctcacttccattatcgttacgcctcgtccacaccgggtatcgatatgcgtaatccggatcactcgcagatcgataacgatgcgctggggcttgaaaccgcgcagaaaaaccgtctcagctatcagcagaatggctattacctccaggatcagattgcgtttggcgggctgaacgtgttggccagcctgcgctatgacgactaccgttccgtcaccaccaactatctgcaaaacggtgacaaagcctgggtatcgcaggatcgcctcaccaagcgactgggcgcgctttatgccttcgacaatggtctctcgccgtttatcagctattcggaagggttcgccccggtatcgccgcagggcacgctgaccgcgaaagacgttaagcccaccaccagcaagcaggtggagggtggggtgaaatacctgctggcggaatacgcaaccaccttcaccgcctcggtgtttaacattcgtcagaaaaatgtggtgaccagcgatccgggcttcctcaactatcgccagaccggggaagtggaatcgaaaggtgcggagctttccgctatgagtcgtccaacggataacctgacgctgattgccaactatgcctacacccacgccatcaataccgaagatgacaagtaccagggcaaacgaccgacgcaggcccctgagaacgcctttaatctgtggggagattacacctttgacagcacgccgctgagagggttaacgctgggggcaggggcacgctacaccgggccgatggagatctcgccagccaacgacgcaggcaagctgggcggtacgacgcaatacgatctggcggcgtcttaccgcatgggcgagctggcgccatcgctggaggggctgacgttgaaagcgagcgcgcagaacgtcaccaacaaagagacgctcacctgctatgacgcgaccaactgctggataggccgcgaccgcacgttccaggtcggggcgagttacagcttctga

SEQ ID NO: 114436 - DNA, 1683 bp, Enterobacter cloacae
atgataaaaactcgaatgctacgccctggcttgttacaccttacgttggcaggcgccctactcggtgttaccgcatttggttatgctgaagaccagccaacgagccagcaaagctcacctgatattctccttggccccctctttaatgaagtacagagtgccaaactgttcccggatcagaaaaccttcgcggatgccgttcccaaaagcgacccgctaaccatcctggcggattaccggatgcagcatacccagtccggttttgacctgcgccacttcgtggagatgaactttatcctgccgaaggaaggtgagaaatacgttccccctgagggccagagcctgcgcgaacacatagacgatctgtggcctgtactgacccgcaccactgacaaagcgaacaaatgggactccctcctgcccctgccaaagccctatgtcgtgccgggaggacgcttccgcgaagtctattactgggacagctatttcaccatgctgggcctggccgagagcggccactgggataagatcggcgacatggtggacaacttcgcttacgagcttgatacctggggccatatccctaacggtaaccgcagctactacctgagccgctctcagccgcctttcttctcgctgatggtggaattgctggccacgcatgacagcgacgcgttgaagaaataccgtccgcagatggagaaagagtacgcttactggatggagggggctgatgggctccagcctggtcaggcgaacaaacgcgtggtgaagctggatgacggctcgatcctcaaccgctactgggacgatcgggacacgccgcgccctgagtcgtggctggatgacgtgaccaccgccaaaaataaccctaaccgtccggccaccgaaatttaccgcgatctgcgctctgccgcggcctcgggctgggatttcagctcccgctggatggacgatccacagaagctgggtaccatccgcaccaccagcatcgtgccggtggatctgaatgcgctgatgtttaagatggaaaaactgctggcccgcgccagtcaggaagacggcgataacgccagtgcaagtaaatatgacgcgctggcctccgcacgtcagaaagccatggaaagccacctgtggaacgataaagagggctggtatgcggattacgatctgaaaaccgggaaggtgcgtaatcagctgacggccgcagccctcttcccgctgtatgtgaaggccgcatcacaggatcgcgccgataaagtggccgcagccgcgtcgtcacgcctgctgaaaccgggcggtatttctaccaccaccatcaacagcgggcagcagtgggatgcgccgaacggctgggcgccgttgcagtgggtagcggtggaagggttgcagaactatggtcagcagaaagtggcgatggacgtaacctggcgtttcctgaaaaacgttcagcatacctacgatcgcgagaagaaactggttgagaagtacgatgtctcttcgaccggtaccggcggtggcggcggtgagtatccgttgcaggacggtttcggctggagtaacggcgtgacgctcaggatgctggacatggtctgtccgaaagagaagccgtgcgacagcgtaccggagaatcagcctgcggcaaacgatgatgttgcacctgcgaaacaggcggcgcagtag

SEQ ID NO: 114437 - DNA, 1338 bp, Enterobacter cloacae
atgcaattaaaaaaaatggttgtcctcgtgggggcactctgttctggctctctttttgcggcacaaagcgcgacgagcgtagatgaaaaactggcgcaactggaggcgcaaatcgaggcgttgaaacaacagcaggcggccagtcagcaggctgctcccgtggtcgtccagtcagaagagcccgtcaataaagacgcaccaccgaagctgacgctttcgggctttggagatataaaattttatggcgatgtggaatttaatatggatgctgccagcaaaaccggcagtctgacttctgttaagcaaagtgctaatagcgactgggcaccgggagataaagaacggtgggatattaatggtcgtattttgctggggtttgatggttatcgaaaaatggataacggccatttttccggattttctgtacaaccactgggcgatttggcagggcaaatgtaccttgatgatgcggtatttttctttggcgcagaaaacgactgggaaattaaagttggacgttttgaagcctacgatatgttcccgctcaaccaggatacctttgttgaatactcaggcaatacagcggacgatctttatagcgacggctatggttacatttatatgctgaaagaggggcgtggccgtaccgacagcggcggtaacttcctgatgagtaaaacgctggataactggtatttcgagctgaatacgctgttcaaagacggcagcgatctgtacgtcgaccagcgctaccatggtgcggaactggaaaatgataagaacgtcgcctatgtccggccagttatttcgtggcaggacggcccgttctcaacggccgtcgccatggaaaccaatctggtcaacaatgcttatggctatcgggatgacgcgggtcgttgggtcgatcagtctgaccgcacccgttacggattcacgatgacctgggatggtctgaaagccgatcctgaggatggcatagtcgtgaatctcaacacagcgtatcttgacgccgcagacgaaacggacttcacctccggcgtcaatgccctgtggcgtaacgctgagctgggctatatttatgcgcataacgaaatcgacgaatttaacacttcaacctttgacgcagagtgtgagaatgattgctggatcaccgatccgggtgagtatgatattcacactgtccatgcgtcgtaccttattcccaacgtaatgaagatgaagaactttaacatttacctgggcgcctacgcttcgtgggtgaacgcgtcgccgaaaaagggaagcgataagaacgacgatcgttatggcggtcgtgtgcggtttaaatattatttctga

SEQ ID NO: 114438 - DNA, 1011 bp, Enterobacter cloacae
atggttaaggtcggtattaacggtttcggccgtatcggacgtaatgtcctgcgcgcggcgctgggcaacccggatctccagattgtggccattaacgatctgacggacagtaaaaccctcgcccatctgctgaaatatgactctctgctcggcacgctgccggtgcccgttgaagcggcggacggcgcgctacaggttgacgggcaacgcgtcaccgtattcagtgaacgcgacccggcaaacattgcgtggaaagacgcaggcgttgaggtggtaattgaagcaaccggcttctttaccgaacgtgaaaaggcggcggtgcatatcacgagcggcggcgcaaaacgcgtcattatttccgccccggctaaaaatgatgatctgacggtggtaatgggtgtgaaccacacgctgtacgatccggcccagcattttgtggtcagcaacgggagttgcaccactaatggtctggcgccagcggcgcaggtgctgcaccagcagtttggcattgagcacgggctgatgaacaccacgcatgcctacaccaacagccaggcgctgcatgaccagccggaaaaagatctgcgcggcgcgcgcgcggcagcattatccattgtgccttactccagcggcgcggcaaaagcgctcgggaaagtgatccccgagcttgacggtaaactcaccgggtattctctgcgcgtgccggttccggtggtgtcgattgtcgatctgacggtgacgctgagccgcaacgtgaccgccgaagaggtgaatgacgcgttccgtcaggctgccgccagcgggccgctgaaaggcatcctgggctacagcgatgaaccgctggtctcccgtgattatcagggcgacccgcgctcatccatcatcgacgggctttcaacgctggtgattggcgggaatatggtgaagatcctgtcgtggtatgacaacgagtggggcttctcgaaccgtctggtggatctggcggtgctgatggataagaaagggttgtag

SEQ ID NO: 114439 - DNA, 981 bp, Enterobacter cloacae
atgaagaagatcctgattatcgttcctgatggtggcatgttgtttgaggccgccggtatcgccgacattctgatgcaggccaaccggctgcacccggacggccttgcgcagccccgctaccgcatcattatcgccaccacccagcctcatctggtgatccacggccagtccggcttgaacctgctggcggactatcgcctgccggagcttgatccgcgcgagccgctggacacgatcatcattaccggccgcggcatgaatgagctggagagcaccgccgtggtggactggctgcacctggccgcgccgcatgcgcgacgcgtcgcctctgtctgcggcggggccctgctgctggcacaggccggactgctcgatgggcgccgggcaacgacccactggcggcttctggaaaccctgaaaacccgctatcctgcggtcaacgttgagggcggcccgctctatgttcaggatggccccgtctggacgtccggcggcgtcagctccgggtttgacctgacgctggcgctggtggaggatgattacggcttcaccctcgcccgcaacgtggcgcaggatatggtgatgtacctgcgtcggcctggcggccagctacagttcagccgctataatctggagcagtccggcgcgagcggaccggtcagcgaactgcaaagctggatcctgcaaaacctcaccgcagatttgtgcgtcgaaaggctggccgaacgggtcgccatgagcccgcgcaatttcacccgcgtgttcacgcgtgacgtgggtgtgcctccggcccgttatgtcaccgaagcgcgcctggccgccgcccgacagcttctggagcagacccaggatccgcttgagatcattgccgaaaaaagcgggtttggtaccagcatcaacctgcgccgcgtttttgaaaagcagcttcatctcacgccgggcgaataccgccagcgcttccactgccgcagaatggcgtaa

SEQ ID NO: 114440 - DNA, 495 bp, Enterobacter cloacae
atgaaactgcgcgtattgttatcacttctgtttgttatggcggtggcgggctgtaaggcgccgcagaaaccagcgatcaccgatgatacgattgtgaccagccaggtgaatggcatcacgctgacgcaccgtcacgctgttacccctccggcggagttcactcaggtgaatgaaccgtaccgtgccatgtacccggcatccctgatgagccgtcctgactacggcggaaaagtgatccgtacgcttgagaccggtaaaacttacgtcgtgctggggcaggttgaacatttctggatggcgctggccgatgaagggagtgaacagctgattggttatgtgccgatgcgtgccgtaatcaaggctgaccagtacgaagccaccgtgcgtaaacaggcactgcgcccgaaagcgcgcaagaaaaccacctgtgttgatgtcgatggcaacagcaaagcctgcaaagacagcgcgaacggtacctggatcctgaactaa

SEQ ID NO: 114441 - DNA, 504 bp, Enterobacter cloacae
atgaataataaaaattttcatcggatgtggttccctttttttgcgttgattttcgcgctgatcggtggttgtacgtcgtcttcacacagcgacccatcccgctacaatcttcagtttcaggctcatcctcaaatcaatgattctgcgccgcttaaggtcagagtgttgctgctgaaatccgatgcggatttcatgtccagtgacttctactccttacagaacaacgcgtcagccacgcttggcgcgaatctgctgaacagcgatgtgttcttcctgatgccgggccagctttcgaaaaccctgagcggacaaagctcaccggaagcgcgctatatcggcgtgatggcggaataccaggcgctggacggcaaaaaatggcgcgtctcacttcctttgcctgttcccggcgaaaacgcgatttaccagttctggaaatggtccgcagatgaactccaggccagcgtctttcttgacgtaaatggtatccgggtcatcagccagtaa

SEQ ID NO: 114442 - DNA, 1344 bp, Enterobacter cloacae
atgacgaaagcagaaaaggtcgtctggaccgagggcatgttcctgcgtccccaccattttcagcggacagaaagctacctcctcaaccacgttcgtgagtggggggccttgcagcgatcgtatctttggggctttctcgaccttgagctggatgaagcgatgcttcgccagggctgtattgccctgagctactgtagcggtttgctgcctgacggcacctttttccaggttcgcagcgaccgcaacggtccggctccgctaaaaatccccgataatctgaccaatgaaaaggtggtgcttgcgctgccggttcgtcgcggtggccgtgaagaggtgattttcagcgaggagcagtcttctctggcgcgttttattacctttgaacaagaggtggaagacgacaacgccatgtcggtcggggaggcgacggtccagtttggccgcctgcgtctgaccctgatgctggagaaagatctgacggcagaatggaccgccatcggcgtggcgtacgtcaccgaaaagcgcaacgacaaccacgtgcggctggataacagctacattccgccaatgctgaacgccaataacagcccgcagctgtacggcatgatcaatgacctgcacggcttgctggtgcagcgtagccagcagatcggcggtcgactgcgccagccggggcgtttcaatacgtccgagatggttgagttcacgcttctctcgctgatcaaccgccaccttggcgacgtctcacatttaaaaacgctgccgctgcttcacccggaagcgctctggcgcagctggctgccgtttgccacggagctcgccacctggacgccgcagcgtaccgcagagagcatactgccggtatacgaccatgacgatctcgccgtttgcttcagcaaactgatgctgatgctgcgtcaggggctgtcgctggtcatggaagatcatgccatccagctgccgttgcacgaacgctcccacgggctgaacatcgccaccgtgccggagaccagcatggtccgcgaatttggcttcgtgctggcggtaaaagccaatgtccccggcgaacacctgcaaacccatttccctgcccagatgaaggttgcgccagtgtcgaaaattcgcgatctggttcagctccagctgccgggcatcatgcttcgggcaatgcccgtcgcgccgccgcagatcccgtggcatgcaggctacagctatttcgagctcgagaggggcagcgaactgtggcacgagatggacaagtccggggcattcgcgctgcatctcgcaggggagttcccgggtctcgatatggagttctgggccatccgtagcccgacagaataa

SEQ ID NO: 114443 - DNA, 1239 bp, Enterobacter cloacae
atgcaggaacgacaggataccggcagtgatgccgtgtttaccggagccagtgggaacaatcagctggtggcggccgccaatccgctgctcaatgcgattccgcaaatccgtcattcggtttcccacgacgatcaggtcgggctgcgccagcgcctgattgacgaaattcgccgtttcgaagtgcgatgccagcaggcgggcttaccgtatgaagtgattgtcggcgcgcgctactgcctctgcacggcgctggacgaagccgccgcgctgaccccgtggggaagcagcggcgtctggtcaagcaatggtctgttggtgacgtttcataacgaaacctggggcggtgagaagtttttccagctgctggcgcgtctgtcgcagaatccgcgcgaacacattctgctgctggagatgatcaactactgtctgctgctcggctttgaaggccgctaccgcgtgctggacaatggccggacccagcttgaaaccatcaaacagcgcctgtggcagatgatccgtggcgtgcgcggcagctatccgccgccgctctcgccgcacccggaagatcgccccgttctgcgcaagctctggcggccgatgatcccactctgggcgtgcgtggcgctggtcggctttatcgcctgcctgttctatatcgtgctgaactggcgtctgggtgataacaccaacccggtgctggcgaaaatttaccagtcccaactgccggaaaccaccatccagcagcctgcgcgtcagctgccagcggtgctgaacctgcgcggcttcctgaaaccagaaattgatgccggtctggtggccgttaaggatgaggcggatcgcagcgtggtgatcctgaaaggggacggactctttgcctcggcctcaacggtggtgcgcgatcgctatgagccggtcatcgaccgcatcgcccaggcgatgaataacgtcagcggcaaaattctggtggtggggtacagcgacaacgtgccgatccgcagcgcacgcttcgcttctaactatgaactctcgcttgagcgcgcccgttcggtgcaaaaacagctccagggtagcctctcacagcctgagcgcgtcaaagccgaagggcggggtgagatcaacccggtagcgcctaacaccacgcctgaaaatcgcgcccgtaaccgccgcgtagagattacgctgctggtatcgcctgacaatacccaggccgagctgaacggattgccgcaaggaaactaa

SEQ ID NO: 114444 - DNA, 3621 bp, Enterobacter cloacae
atgctgacaactctactttctatactgaccaatcgcattctgtggagcttcctgggcgtaacggcgctcgcggcggtcatctggatgattggcccgctgttgtccatcgtggatacccggccccttgaatcagagcagaaccgcgtcatcagcattgcggtggtctacctgatttgggcccagagccacattctgccgcggctgtataacgcctggctgaaccgtaagctgatggacaagctcaacgaaaataccaccagcccggaggcggccgatccgcagaaacgtctgaacagcgaggagcagatccttgccgggcgtttcgatgaagccgcccagatgctgaaaaaagcccacttcagcaaagcgggacatggcgcgcagtggacgcagcgcttcagcacacagtacctctatcagctgccgtggtacgtcattattggcgcgccgggttcaggtaaaaccaccgcgctggccaactccgggctgcaattcccgctggcggatcgcttcggtaaaaccgcgctgcgcggcattggcggcacgcgcaactgtgactggtggtttaccaacgaggcggttctgctggataccgcggggcgctacaccactcaggagagcgagcaggttcaggacgctggggagtggctggagtttatcaacctgctgcgtaaataccgccgtcgccagcccattaacggcgtgattatcaccatcagcatttccgacctgctttcgcagtccgctgaggcctcgcgccagcaggcggtcaacctgcgccagcgtctctccgagctgcatgaacagctgggtattcgcttcccggtgtatgtgatggtgaccaaagcggacctgcttaaaggcttccgcgcctggtttgcggattacgacaaagcccagcgcgaccagatctggggctttacgctgccgtgggagcagaccaaacacgctgattacgacctgatgggcaacttccagcaggaattttccctgctgcaacagcgtctggacgccggcctgccggaaaccatgctcaaagagcatgacgccaaaacccgtgcggaagcctatctcttcccgcaggagttcgccgcgctgcgtccgctgctggcagactacctgagcacggtctttgcccgttcaaacttcgaaaccgaattttcgccgcgcggcatctactttgccagtggcactcaggaagggatgccgtttgaccgcgtgatgggcgagctgaaccgcgcgctctccttacctgaagggggggaaagcacgcgctgggattcggtgagcaaagaggcgccgatcccgggcgcgaagggccaaagcttcttcattaaaaacctgctgcaaaacgtcattttccaggaagcgggcatcgccggggaaaaccgctggtgggagctacgcaaccgcgcggtgatgtggtccggctacgcggcgctgctcgctctgctggtgatcctgggtggcctgtggctgaccagctacgccaagaataaagcctatctggaagaggtggatgcaaaagtgccgatgctggagcagcagagcaaggcgctgcaaaaccagccccagcgcgatctgtttgtgcttctgccgctgcttaacagcctggtggatctgccgaaaagcgatgccttcgacgttaacgacccgccggtttcccgccgtatggggctttatcgcggggatgacgtcagcgatgcctcgcagtctttgtatcagaaggcgctggatcagatgctgctgcccgccgtggcaatgcacattaccacctggctgcgcaacgacaacggcagcgacgtggagtacagctatgaggcgctgaaagcctatcagatgctctaccagccgaagcactatgacggcaaattcctgcactcgtgggtgatgctcaacctgcaacgcaacctgccgcagaacgtgacgcaggcgcagcttcaggagctggaatggcacctgacccagctgctggagccaaaaattcaggcttcaccgtatgcgcaggatgaggatctggtggcacgtgaaagggcgcttatcaaccagcagccgctctcaacacgcgtatatggccgcctgaaacgtctgctggagcatgatgagaacctgaagccggtttcgctttcagatctcggcggcccgcagagcgagctggtgttttcccgtaaaagcggcaagccggtgagtgagggcgtaccgggcctctatacgccggacggctactggaagagcttcaacgaccagatcgacagcgtgaccaccgccctgcacgaggacgacgcctgggtactgggagcaaccaccgcccaggaagataaacagcagatcgataacgccgtgcgccagctctacatgcgcgactttatcgtcaactgggatcgctttctcgctgacattcagctcaacaacagcgccgatctttcccagcgcattaacaccgcgcgcctgctttcaggcaccaactcgccgctgcgccgtctggtgcttaacctgagcaaggtgctgaccctgtcgcgcactgcgccagcgccggaagatgcgcagaaagcggaagaccaaagcaaccgcgccacccgcacgctggaagcgctgttcagcaacggtgacaacgccccgacgcagggcgcggttgtgacgcaggcgcctgaacaactggtgactgaccactatgcgccgatgattgagctggcgcagccgctggagaagggtggcaagaccatcgtctttgacgattttcttaagcaggttgacgagctttatcgctacctgaccgccgttcaggatgcggcaaacagcggtatgcccgcgccgggcggcgatgcaatcagccgcctgcaagccagcgcgggacgtctgccgggcgggctgcaaaccatgttcagcaatatggccgtcggcgccagcagcgacacccagcgtcgcgatctggagaacgtgcgtaagcgcattaacgtggaagtgggtgggttctgccgtcaggcgattgccgggcgttatccactggtgcgcagcgccagcaccgaggtgacgccggacgatctcgcccgcatgttcgcgccgggcaccggactgatggacacctttttccgcgacaacctgaccaacaaggtggacaccacccaggcgaactggcgctttatgccgggcatcgacggtaaaacgctgccgggcagcgaagggctgttgcgtccgttccagcaggcgcagtctgtccgcgatgccttcttcgccaacggcgcgaccacgccatccttcagggtgacggtgcgcaccgtgcggatggacaacaccattctgaacctgacgctggacgtggacggccagctgctgcgctacagccacggtccgcaggcggtgcagatcatgacctggccggggccgggcgggacgaaccaggtgcgtatgcagctcggtctggccaatggcagcaccgcaacgctggtaactaacggttcctgggcgctcaaccgctttttcgacaaggcgcgcaccagccctggcgcgggtagcctgagccgtcaggcgaccttcaacgtcgacggacatcaggtcacgctggagtttgccccgaacagcatccgcaacccgttccagcttccccgtttcacatgcccataa

SEQ ID NO: 114445 - DNA, 717 bp, Enterobacter cloacae
atgacgaatacccctgcgatgaaccgttatagctggtatggcaaattacccagcgccggagattttttgcagcgtcgctttccggataccctgcaacgccagtggtcgcactggttccaggtcggcctgctggcctggcaacaggaagagcagcgcagcggcgagcgcccgttttcaaaagccccggtgtggaactttgtcgtcccgccgatgctcggtagccagatgattcagatgggctgcctgctgccgggccgtgacagcgtaggccgccactatccggtatgcctgcaactgagcttcacccccgccgagtggtcatcccgcctgctcgggcaggctgaaagctggtaccagcagcttggccgtctggggctgcacgcggtgcgtaacagctattctgcctcccagctggatgaaatgctgatgaccatcccggcgccccagccggttgagccgcaaaagcgttccgacattctcgacgtgattggctatgacgacgatggtcagagcacgctgggctggccgcaggcggcggagtgttttgatccgctgcgccagaccagctactggtggacaaaccgctgcgacggctatccgctgtacacacacgtccacagtggaaacttcaccgggcagctctttacgctgctgttcgatccggcaggcggcgcccgtccgggccgccacggtctttacccgcctatgtttgaataa

SEQ ID NO: 114446 - DNA, 1017 bp, Enterobacter cloacae
atgaatatcgatgaatttctcgcgccgataagccccgataacccctgcggtgaaaacctggagtacgacgctgatttccaggccatgggtcaggccagtcagggtaaagccgagcagcagtttggcgacaccatcattccggcagagcctgccgactggaacacggtggaaaaactcgccaccagcctgctgggtcgcaccaaagatcttcgcgtcatgctggcgttaacccatgcctggacgcgtcgtcgcgggctggcaggttacgccgacgggctactgctggtgcaggaagccctgtcccgttactgggagcaactttacccgctgctggaagagtatggcgaaaccgatccgttctaccgcatcaacgccctcgccgggctgagtgataaatctgacctgacggtcgcggtgcgtaacgcctcactgctccgctcaaacggcgatgagatttcgctccgtgacgcccaggcgctgcttgacggcagtaaaaccgagtgtccggattatccgggcggtcgtccacgactgatcgatgagctggcccggggcgatcagcccggcaccgaagcggtaatcgtgatcaacgaacgcctgctggccatccgcgaactgcttaccggctatctcggggaaagtggcgtcccggagatggaacagctgttgaaaaccgtcggactggtttccagcgcctgtcaggtgaccgatatcagcaagctgctgccgaaccgtgacgcgcaggctgaacagcacgccgagccgcagccggtggccgcgtcgcccgttcagcaggtgacggactggcgcagcgtgcaggtgaccagccgcgccgacgcccagctgatgctggaaaaagcgaaacagtattttgcgcagtacgaacccagccatcccgcaccgctgatgattgaacgggtgcagcggctgtctgaactcaactttatggacattattcgcgacctggcgccagacggcgttaaccaactggaaaacatctttggacgccgcgaatga

SEQ ID NO: 114447 - DNA, 525 bp, Enterobacter cloacae
atggcaatgagtaacagtggacagaaattcatcgcacgcaaccgtgctccccgcgtgcagatcgagtacgacgtagagatctacggcgcagaacgcaaaattcagctgccgtttgtgatgggcgttatggccgatctggttggcaagccggtggaaaacctgccagccgtcgacgagcgtaagttcctggaaatcgacatcgacaacttcgacgaacgcatgaaggcgctgaagccgcgcgtggcgttccaggtggataacaccctgaccggcgaaggtaagctcaacgtcgatctgaccttcgacagcatggacgacttcctgccggacgcggtggcccgcaaagtagagccgctgaacaagctgctggaagcccgtacccagctctccaacctgctgacctacatggacggtaaaaacggtgcggaagagctgatcgcgaaaattctccaggatccgacgctgctcaaatccctgagccagttgccaaaaaatgacgaaagtgcgaaaggtagcgaggaataa

SEQ ID NO: 114448 - DNA, 1500 bp, Enterobacter cloacae
atgagcaaccagactcaacaacacgatcagcaggcaggccaggcgttcagccaggacgagttcagcgcgctgctgaataaagagttccgcccgaaaaccgatcaggcgcgctctgccgtagaaagcgcggttaaaaccctggcgcagcaggcgctggaaaacaccgtgaccttctcaaacgatacctaccgcaccattcagaacctgattgccggtattgacgagcagctttcacagcaggtgaaccagatcattcaccacgaggagttccagaagctggagagcgcctggcgcgggctgagctacctggtgaacaataccgaaaccgacgagatgctgaagatccgttttatgagcatctccaagcaggagctgggccgcaccctgaagcgctacaagggcgtgggctgggaccagagcccgatcttcaaaaaaatctacgagcaggagtacggccagttcggtggcgagccgtttggctgcatcgtgggcgactactacttcgaccacagcccgcaggacgttgagctgctgggcgagatggcgcgcatcggctctgcggcccactgtccgttcatcaccggcaccgcgccgggcgtgatgcagatggagtcctggcaggagctggctaacccgcgcgacctgaccaaaatcttccagaacaccgaatacgctgcctggcgttcactgcgtgaatccgaagatgcccgctatctgggtctggtgatgccgcgcttcctgtcgcgtctgccgtacggcattcgcaccaacccggtcgacagctttgattttgaagagcagaccgacggcgcgaaccacaacagctactcgtgggcaaacgctgcctatgcgatggcggccaacatcaaccgctccttcaaagagtacggctggtgcacctcgattcgcggcgtggaatccggcggggcggtggaaaacctgccgtgccacaccttcccaagcgatgacggcggcgtggacatgaagtgcccgaccgagatcgccatcagcgaccgtcgtgaagcggaactggcgaaaaacggctttatgccgctggtgcaccgcaaaaactccgacttcgccgccttcatcggcgcgcagtccctgcaaaaaccggccgagtaccacgacccggatgccaccgctaacgcgcgcctggcctcccgtctgccgtacctgttcgcctgctgccgttttgctcactacctgaagtgcatcgtgcgcgacaaaatcggctccttccgcgagcgcgaagagatggaacgctggctgaacgactgggtgatgaactacgtggacggcgacccggcgaactcctcccaggaaaccaagtcccgcaaaccgctggcggcggcggaagtgcaggtgcaggaaatcgaagacaacccgggctactacgccgcgaagttcttcctgcgtccgcactaccagctggaaggtctgaccgtttccctgcgtctggtatctaaactgccgtcgctgaagacgaaggacgcgtaa

SEQ ID NO: 114449 - DNA, 507 bp, Enterobacter cloacae
atgaccgcgagaccttcgtttgttgctgcctgggcggcggcaacacgtatttacgatgcaaatgattctatcggcaaagttaagcaagttatcggcggcaaagttaagcacaatttcgaaatagcgccagatgagggcgggtggtcaaatagttgtgccgtacggatgagttatgttcttaactataccgggcatcccgttccgcgtattgcaaatctcacggtatccggtgctgataataaatggtacttctaccgcgtaaaggatgtcattgcctggttgacgcgtcagtggggtaaacctgacatgatcgtgagttatccttccttacccgttgagcaattagccaacaaaaagggcgtaattctgtttgaggtacagggctggagtgacgccgcaggtcatgcaacattctggaatggtttaacctgttcggatcactgttatttcaatgcgccggagacgaattacacgacgaccaaagctaatttttgggagttgccatga

SEQ ID NO: 114450 - DNA, 426 bp, Enterobacter cloacae
atgaaaaaaatgattgctagtctactgttgctcaccagttccgcctctgtgtatgcaactgacgatccggtgtcgtttgtcaaaaaaatgccttataagcaagttgttaaagacgttgttttttctcgctgcctggcacaagttgcagatgataaaagccagttttctctggatgcagcccgtagcagtagcgcattactggaatgggtgcctttcgatattgaaaatggcaatgacaaaattaatgctcttattaataaatataaaggtgcaaccaatgcctttcattctgagagaaaacccgatgtaaaaggcgtaaccttaaactgcctgcgtctttatcatagtgacgaacttaatcaacttgctcctcaattaatcatcggaaatcctgaccgcacctggattcaggataatccacaatag

SEQ ID NO: 114451 - DNA, 483 bp, Enterobacter cloacae
atggctattgatatgtttctgaaggtcaagggtgttacgggcgaatctaaagattctaaccacaccggctggactgatattacctccttctcctggggcgcgtcccagccaggtaatatgagcgttggcggtggcggcggtgccggtaaagtgaactttaacgatctgcacgttaacgctctgatcgacaaatccactacagcaatcctgaaacactgcgcaagcggtaaacacctgaccaaagttgaactgtccgtctgcaaagcgggtggtcagcaggttgaatacacccgcatcaccctggaagacgttctcgtgacttccgttcagtacacgggtgcagacaacggcgataccgttggcgtgacctatgcattccaggctgcgaaagtgaaacagcagtactgggagcagaccactgccggtggtaaaggtgctgaaagcagcgctggctggaacatcaaagaaaacaaagaagcgtaa

SEQ ID NO: 114452 - DNA, 990 bp, Enterobacter cloacae
atgagcgtaaaatcaacggttgctcctggttattgtgttgttcagcaggctggtacgttagatttccaggcaagactactgttcaataaaccagacagtgaagcggcacgttattttatgcaagtgaacagggacacacggtggttaaaacccgggcaaatattgatccttaatgctccgggtgctgaaaatgcggttcagctaaaacaattacaaaatgcaaagcaaaaggttaatggagcattggcagaactgaatacagatgaagctaatttctttaacaagcattttagtaccatcgcagcattaactaattttatggataaatctctcggggtggttgctgatgcaggtgaaaggtactttagcgaaatagaaaagaaattaaaagctatcgaactggcttatcaaaatcaatacagaacgcaaggcacattgatcgggcagcagttttttgttgaaaggcaaaaacttttttctgagatggacgttttattaaataagctgtccagactaacgctgaaactgaaaccttatgaagaaatcaagcacgctttaggtttatcaagcaggtcaattgtccacgaatggagtactgcgggtgttgcctcgatacgagggtattcaacatatgtagacaatgcttcaaaagctgcccgttttctgaaaatgggaggatggcttgctatcggcttcgctggtgcaaacacaaccaatgaagtttacgatgcctgtacagtaggtagagagcagagttgttccaaagtcgccgttaagaagtacagtcaatttggcgccagtcttgcgggcgggatttatggcggaaaatatggcgccatggctggggctggcgtatgtgttgcattgggcgtggcaacaggtggtgtagggttgctcgcgtgttctgtggtaggagccgctgcgggtggatacattggtggcgaagttgccggtggagcaactgaatatgtcatggataagctatggtga

SEQ ID NO: 114453 - DNA, 417 bp, Enterobacter cloacae
atggtgaatttagaaaatattcttttatttctgattgttgttttatttttacttgtcgtaattatggacttcatcagttcccgttattttaaaaaacacgaggccgaatataatcagcttctttcagaatataggcaaaaaggctacgatctcgatctggtgacaaattacgcatcattatttggttcgctggcgaactatcaaaaaataatctggtttgttcgtcttcgcaaaggcgtgaagatgaaatttaccaaagacagaaatgttcaggacgatgcctataaattcgttcaggctttaccggaagagagaatcggctggatattaaaactgcatcgacgctataaagctcaggccttactttttacgctatggctgcttatcggcattattttcctgaatgtagtcaaatag

SEQ ID NO: 114454 - DNA, 1776 bp, Enterobacter cloacae
atgcgattcacgattatttctacgaaacccggtcatcagccgccgcaaagcagctgtgatttttatgccccgggcggcaccattgggcgcggtacggataacaatctggtgctgccggacaatgaccgcaccatctcgcgtttgcaggccatcgttcacgtcgacgccagtggcgaatgccgcgtcacgaaccgcggcagcgttacccgcgtggtactgaatgatatcccgctggagcgtgggcgtcaggttgagcttcaggatggggatattctcggtattgatgattatcgcattgaagtcagcgaactcattcatgacacccagcccgtaagccgcatggcggccagcatgcagcaggcgcgcccagtggcgacacctgcaccagcgccgcaaccgaaaccggccagcgccgcgcctcgtggaaaagctgaacctacggccgtgccgtcggaaatctgggacagcctgatgcaggagttttccatctccgacagcatctccagcaaccgggcaaaaccacagcccgccgcatcccacgatccgttctctcagcctgcggccccggagcggaatgccgaagatccgctggcaatgtttaacgacgccgaaccgtcgcttgaacgtaaaaacgttgacccggacacgctgtttagcgatgaagcgttgtttaaaaaagagagcatctttgacgatgtcaccccttcaacgctggtacagccggacgaaagcaaacctgcccagccaaaggaagaggcgtcggacgaactcgatccgttagccctgtttggcgggtcggcgagcgcacctgccgcgcgtcatgatgaccctctcggcctgatgggcggcgcgccgttaacccatccggatgaaatcgtggccgataagccggagccaaagcctgaagcgcaagccgcacaggaagaggatgcgctggccagctcaccgctgttcgatccggaaccgactgaaccacaggacgcgccgcgcgcggaagaggagcccgcgcgccccgattacgctggcttcaccatgccaacgccgcaggccgtggcgcgcagcaacgcgcaggcgcctaaaggccgcctgcgtatcgacccggttaaaaacgctgcatcgcctgctgcctccgcgcagaccggcgagcggggcgaggtgcttcagggcgaactgctggaggcgctgctggagggcatgggcctgagcgaaatgcagccggtaccgcaattcgaccgggaaaatatgcgtcagctggggcagatcctgggcatgttctcgcaggggaccgtggcgctgctctcctcgcgctccatcctcaagcgtggggtgaaagccgatatgaccatggtgctcgacgatgcgaacaacccgttcaaactgttgccgaccgggaaaacggtgctgatccagatgttcggcacgccgatgccgggctttatgccgccgaccaaatcggtgcgtgatgcgctgatcgatctccaggcacaccagctagggatgatctctggtatccgcgccattatcgccgccatgctgcaatcctttaacccggaacaactggaagagcaggcgaagcagaacgggatgacgtcacgcctggcgctgccgggcagccgtaaagccgcgctgtgggattatttcgttcgcagctatggcgagacggcgggcgagatcgaggacgacttccataccctgtttggcgaagccttcctccatgcctatgacatggaggtcaatcagtacaaagactcacaaagcggatcggaagaaaaatga

SEQ ID NO: 114455 - DNA, 798 bp, Enterobacter cloacae
atgaatatcgaaacggcttctctctcccgccaggggacgcgcgccagcaaccaggatcagacgggagaaaccatcggggaacgttcagcctgctttgtcgtctgtgacggcatcgcgggcctgccgggcggcgaggtggccgctgagctggcccgcaacagcattatttcccgctttgacggcgacaagcacctgaatgcgcagcatattcgtgactacgtccaaacggcgaaccgcaccatcctcagcgaacaacaggccgtgcaggactatcgccggatgggcaccacgctggtcagcctgtttatcgacagggattaccgtctggcttactgggcgcacgccggagacagccgcctgtacctgtttcgccgcggctggctgtggcatgtcaccaccgatcacagcctcgtccagcagatgaaagatgccgggcatcagaccgacgatctcaacagcaacctgctgtatctggcgctgggtattgagaatggcggaccggaagcgagctacagcgatgtcgtgcaggttgaggacggtgatgccttcctgctctgcaccgacggtttctggcacggcgtcagcgaagagcagatgaagcagtcgctgcacatggtcaatacgccacaggagtggctgaccttaatgaaccaaatcattcaaaagaatgccgaacaggagggcaatgctcaggataactataccgccgtggcggtgtggatgggcaaccctcaggacaccactttgctgcatacgctctctgacgcagcacaatttcttccctgcggaactgattag

SEQ ID NO: 114456 - DNA, 987 bp, Enterobacter cloacae
atgaaactttggctatcgggtttggctcttctgacggtggcgaccaccgcccaggctgaaaacttccgcatcgtgcagtctcctgcgcagaagctggatatctggatcgacaacattaaagacaatacgccgcaaagctggtgtaaggcggacgtggcgctgcgtatcgtggcgaacggcaagaaagaggtttcggtgctggaaaacttcgtgccgcgccttggctcgctgctggagcaccagtgcagcaagctgaataccctgaactggacgcttaacgatccggaaggcacgacgcttgcccggggcacagcggctaaagcgcaggactgggcgctggtggtgaagcagcaggaaacggcggcggcaacgacccccacctcaggcgcgctgctgccgcctgaccagaatccggagacgcacaccgtggcggcagatcgtacgccatggcaggagttcacccttcaggacggttgccacctgcgcaccttctgggagggcggttcctccgcgccagcgctgtttattccggattccgacaccacccgctgcggcaacggcagctggctcagcggccactccgtggtgacgcagaaccgtaacgggacgcagaaagcgattccggtcacctacattcacggcttcccggtgatggggctgaacaacgcggtcgatcctgaaaaggcgctgatcacctccgtcaacaaagaacgcatggtcttcagcacccagaacagcgaccagagctggatgatcctgccgtacgacagcaccctgaacggctggaagagcaacggcacggtggcggtggaaatcacccgtgagatcgccagcgacgacgccagactccaggcgcgtatcgcagaggtgaagaagatctggagcgcatgggttgcaccgggcgcggagctgaacgttgttctgattgacacgctgcgtccgcagctgcgcgatccggcagtgggcgcctggcgcgcggcgaattaa

SEQ ID NO: 114457 - DNA, 813 bp, Enterobacter cloacae
atgaatacgctttatcaacgtctggcgggggagtcgattagcgacgcgctgcttcgcctggaagccgatatcaaagcccgtccggcggatgccgatctgcgcgccgcgtttgtgcagtttctgatcctcagcggcaactgggcgcgcgccctgacccagctgaaaagctggctggcgctgaagccgcaggcaaaaccgaccgtaacgctgctggagcaggccattcagggtgaacagcagcgtgcgcgcgtgttcgcgggagaggtacgaccggcaatgcccgaggcgcagtggccgtggctgacgacgttagcccaggcgctgaccgaaagcgcagggcaagcgcaaacgctgcgcctggcggcactcgaacaggccccggcaagccgcgggcaggtcacgctggagaatgaagagagccacacctttgaatggctgatggacggcgatgcccgtctggggccggtgtgtgaaaccctggtcaatggccgttatttctgggtgccgttctgcgccatcgacgcgatccgttttcaggctccggccagcgtgaccgatctggtgtggcgtcatgcgctggtccgcctcacggacggcaccgagcaggtgtgtcagatcccggcgtgttatccgtttgctgacggggcgccagacagcgttaagctggggcgcaccaccgaatggctcccgctggacgatgacggcgccctgtatgaaggcatgggacagaaagcctggctgagcgagcaaagcgaaagcccgctgcttaccctgagcctggtgacatttacctcggatggtgcggatgagtaa

SEQ ID NO: 114458 - DNA, 564 bp, Enterobacter cloacae
atgagtaatcccgcaggcgaaggcgatctgctgcgcagcggctggcaggcccgcagcaggcaggagaaagtgggggcgcgcgacaaaatgcagccctcactgctggatcgcctgacggataacgatccggaaaaaaaacgcgagtccgccaacagcaatctgattacccacgccgcgctgcgtcgtaacgtcctgcgggatttacagtggttgtttaacaccattaaccacgatgcctccagcgatctgagcgggttgacgcaggtgagccgttccgtcgtgaattttggcgtggcgccgctggcggggaaaagaatgtccgatatcgaatggcacgacattcagcgcaagctcaccgaagcgattattaactttgaaccgcggatcctgccgcaggggcttcaggttcgctgcgtgtccgatacctcctcgttagatctgcacaacgttctgtctatcgaaatcaaaggtcgcctgtggtgcgtgccgtatccgctggaatttctctttcgcaccgacgtcgatcttgagaacggccattttgaactgaaggatgcggggtaa

SEQ ID NO: 114459 - DNA, 1872 bp, Enterobacter cloacae
atggaaagcaaactgctcgaatattacaaccgtgaactggcctatctgcgcgagatgggcgcagagttcgccgagcgctacccgaaagtggcggggcggctcggcatgcgcggcatcgaagtggcggacccgtacattgagcgcctgatggaaggtttcgccttcctgacctcccgcgtgcagatgaaaatggacgccgaattcccgcgcttttcacagcgtatgctggagatgattgcgccaaattatctggcgcctacgccgtcgatggcgatcgctgaaattcagcccgacagcagccggggcgacctgagcaaaggctttattgtgccgcgcggcaccatgatggacagcctggcgctgaaaaagaccggggttacgtgcagctataccacggcgcacgaggtcaacctgctgccgttaaaaattgagcggatcgagctgggcggcgttcccgccgatctgccgctggcccagctcggcctgagccagcgggggatcagcagcgccttgcgggtccgcattgcctgcgatggcccgcagcatctcgggcacctggactttgaccgcctggagttcttcttaagcggcccggacatcgaggcgctgaagctgctggagctggtgatggagcaccacgcgggtattgtctgccagacggtcagcaagcagccccagcgccagctgctgtcgtctgacgccctgcgtcaggaaggctttaatgcggaccaggcgctgctcccggacgatctgcgcaacttcgacggctatcgcctgttgcaggagtactttgcgttcccggcgcgttttcgtttcatcagcctgagcgggctgggcaagctgatccagcgctgcgaagacgaaaaagcgtttgatatcttcattctgctcgacaagagcgacgatcagctggagcgcgtggtggatgccagccacctggcgctgcactgcacgccggtgatcaacctgttcccgaaagtggcggcccggcagaagctgagcgaaagccagcatgaataccacctggtggtggataacatccgcccgctggattatgaaatttatgccgtgaaaaaaatctatgccagcgcggatggtcagcgggacgaccagacgtttcgtccgttctggagtacctggagcggagacgcgggcaactacggcgcctatttttccctgcgccgtgagcagcgcgttctctccgaacacgcgctgcgctatggcacccgcacgggctatatcggctcggaggtcttcgtctcgctggtggatgcgcagcacgcgccgtggcaggagaatttgcgctacatttccgccgaggtgctgtgcaccagccgcgacctgccgctgatgctccagcaggagcttgggcagtttattatggccgactccatgccggtgaaggcgttaaccctgcgtaaaggcccgacgccgccgcgtccggcgctggccgaagggttcagcacctggcggctcattagccagctgcaaatgaactaccttagcctgatggacagcgaaaacgaagagggcgcagccgcgctgcgtcagctgttagggctatacgccaacctcgccgagacgccggttgcccgccaggtggatggcgttcgtcactgcgtgctggagccggtgcaccgccgcgtgcctgaacccggcccggtggtgttcgcccgcgggatcggcatcaccctgacggtggacgaacgcgccttttccggcgccagcccgtggcttttcggcagcgtgctggaacgcctttttgcccgcctggtctccatcaacagctttacggagttcacgctcaagagccagcagcgcggcgaaatcggctactgggcgccgcgcatgggtaaaagggcgctggtatga

SEQ ID NO: 114460 - DNA, 1044 bp, Enterobacter cloacae
atgagtgaagttgcccctgtaacgctgcgcgtgcatcgcctgacgccgctccccgatgcgttctggcgcggggtgcgcgagacgccgtggcgctacgatctgttccagctgttaagacgcattgatgcccagggcagtgagcgttacccgctggggcgcgcgccgctgcctaaatttgagccgctgcgtattggtcagcagccttcaatgggctttgcgccgtcaacggttgctgaggtccggcagcgggaagagaacggactgcatgacgtttccatactgagcttcggcctgtttggtcctaacggcccgctgccggtgcacatgactgagtatgcccgcgagcgtattcatcatcatcaggatcacagcctcagcgcgtttgccgacctctttcaccaccgcctgacgctgctgttctaccgcgcctgggcggacgcgcagcctgccgtttcactggatcgcaacgacaacaggcgcttcgaagggtatctggcatcgctgattggcatggggcagcctgcccagatgtcgaaaggcagtctgagcgcgcacgcccgctttactcacgccgggcacctgacccgccacggacgggacccggaagggctggagaaaatcctgcgcaactatttcaacgtgccggtcaggctggtggccaacgtcccgcagtggatgccgctctcaatgcgggagcaggcacagctgggtgaggggcgtcgcctgccgcgcatgggagagtccgcttttctcggcattgcggtacgcgacgtgcagcataaattccggctcgagattggcccgttgagcgcagacgactacaaccgttttctgccgggcgaaggatgggtgaccgagctgcgcgactgggtgcgacagtacgccggggtggaatttgaatgggaaacacgggtgatcctgcgcgccgatgcggtgcagggcgccacgctcggtagcgccgggcgattagggtacaacacctggctcggccttcagcctcagcctgttccgcgtggcgatctggtgtatcgcgcagagcgataa

SEQ ID NO: 114461 - DNA, 2616 bp, Enterobacter cloacae
atgtcagaaattagccgtgccgtgcttttcggcaaactggatacgctgttatttacctctctggaaagcgcgactgccttctgtaagctgcgcggcaacccgtacgttgagctggtgcactggctgcatcagctgatgcagcagcaggatggcgatctgcaacaggtcatccgtcacttcgcccttgatgaacagcagctgacacgcgatatcgtggcggcgctggatgccctgccgcgtggcgcgagttccgtgtctgatctttccgagcatatcgacagcgccgtcgagcgcgcctgggtctacggctcgctgaagtttggcgtcagccgcatccgcggcggccatttgctgatcggcatactgaaaacgtggaatctggctaacgtgctgaaaagcatttcggcgcagttcacccgtcttaacgtcgaggtgctgatcgagcagttcgacgccatttgcgccagcagcaaagagagccagcaggccgccgccgctgcggacgcgcctgccggggcagtaccggctgcgcagggcacgctggcgcagtatggtcaggatctgacggcgcgcgcccgggaagggagaatcgacccggtggtggggcgcgatgaagagatccgccagatggtcgatattctgatgcgtcgtcgccagaacaaccccctgctgaccggggaagccggcgtcgggaaaacggcggtggtggaagggctggcgctgcgtatcgctgacggcgacgtgccggagccgctgcaaaacgttcagctgtggctgctggatatcggcatgcttcaggccggcgcgggcatgaaaggggaatttgaggcgcgcctccaggcgctgattaacgaggtgcagtccagcgccacgccaattattctgtttatcgatgagatccacactctgattggcgctggcggtcagcagggcaccggcgatgctgctaacctgctcaagcctgccctggcgcgcgggcaactgcgcaccatcggcgcgaccacctgggcggaatacaaaaaatacattgagaaagatccggcgctgacccgccgtttccagaccgtacaggttcacgagccggacgaagccaaagccgtgctgatgctgcgcagcaccgtgtcgccgctggaaacccatcatcaggttttactcctcgacgaagcggtcagcgcggcggtgaaactgtcgcatcgctatattcctgcgcgtcagctgccggataaagcggtggcgctgctggacaccgcctgcgcgcgcgtggccgtcagccagagcgcgccgcctgcccagctggaagactgtctgcgtcacctggcggccctggacgtggagctggagattgctgaacgcgaagtgcgcgtgggggcgggcgatccggcgcgtgtggcggccttaaccgccgaacgtgacgcgttcgaaacccagcgcgaagctctggcccgtcgctgggaagaagagcgcacgcgggtgcaggagattatccgtctgcgtgccgcgctgtttgcggcgggtgatgaggatacggctgaactgcgcggccagctggcagaacagcagcaggcgctgaagaccttacagggtgacgaaccgctgctgtttgccgcggtggatgagaacgtggtggctgcggtggtctcagactggaccgggatcccgctgggccggatggtgaaaaatgagattgacgcggtgctgaacctggccgacacgctgaaccagcgggttattggtcagcgtcacggtctggatctgattgcccgtcgggtaaaaacctcgcgggcgaagcttgacgatccgaacaaaccggtcggcgtattcatgctctgcgggccatccggcgtgggtaaaactgaaaccgcgctggcgctggcggagtcgctttacggcggcgagcagaacgttattaccatcaacatgagtgaattccaggaagcgcacaccgtttcgacgttaaaaggtgcgcctccgggctatgtgggctatggtgaaggcggcgtcttaaccgaggccgtgcgccgccgtccctacagcgtggtgctgctggatgaaattgaaaaagcgcacccggacgtgcacgagatcttcttccaggtcttcgacaagggctggatggaggacggcgaagggcgtcacattgatttccgtaacaccattattattctgacctctaacgtcggcaccgacctgatcgcagccatgtgcgccgacccggaactgatgccggagcctgacgcgttaagcggcgccctgcgccagccgctgctggaggtgttcccgcctgcgctgctgggccgcctgctggtggtgccgtattacccgctgagcgacgagatgctggggcagattgtgcgtcttcagctcaggcgcattcagcgtcgtctggaagagaatcacaacattatttctgaatttgacgacagcgtggtcgaacagattgttcagcgctgtaccgaggttgagtcgggcgggcgtatggtggatgcgattctgaccaatacgttgctgcctcagatgagccagattttacttaccgccagccgcagcgacgagcagtaccgacgtctgcatgtcacctgcgagcagggcgagttccactgtcagtttgccgcgtaa

SEQ ID NO: 114462 - DNA, 1434 bp, Enterobacter cloacae
atgacggataatgataacaatcggactgtcccaaacgcgctcccggtcgggtaccgtttcaatgagtttgagataaaagaggtgattggcggcggcggattcggcatcgtctatcgcgcctgggatcaccagctcgaacgcactatcgctatcaaagaatttatgccttcctccctcgccgtgcgcggcgaggatatgacgctggtgctgcgcagcgagcgcttcggcaaagcgttttctgccggtttgaacagcttcatccaggaagcccgcctgctggcgcgctttaaccacccgaacctgctgcacgtactgcgtttctgggtgcaaaacgacacggcctatatggggacgctgttttacagcggtaccacgctgtcgcgtctgcgcgaagagaaaccggagctgattaacgaggcgtggatccgccgcatgctgccaatgctcttcggcgccatcaaaacgatccacgacgagggttatctacaccgcgacatctcgctggataacattcagattcaggataacggcctgccggtgctgctcgatttcggatcggcgcgccgcaccatcggtaatctctcggatgagacggaaaccatgctgcgtccgggcttcgcgcctatcgagcagtataccgacgacaatgaaagcgagcaggggccgtggacggatatctacgcgctcggcgccgtattgcgcaccctcatcgtgggctctccgccaccggtcagcgtggtgcgctcgattcaggacacctgcaaaccgctggtggagctgatgccgcaggggtattccatcccgttgctacaggccatcgacaaggcgctggcgctgcatatggaagaccgtccgcaatccattgaggagttcgcggcgctgatcgagatgcccgtcgccggtatcgacgaggtgctgaccgcgaagaagaccggcacgatgctggtgccggtggaagaggagacatctgcttccgcgctggactggcgacgttacaagcttccggggctggtggctgcgggcgtgctggttggggtggttgccggtgcgatgctgttcggcggcgacagtcaggaaacgccagcgcagacggcgcaaacgcctgccgtgagccctccggctgagacctccgcccaggcggaaaccagaccggcaacggcagacgtgagcgagccggttgcgccacctgcttcggcgcagcagagtgcgccgcctgtcgacgccagcccggtcgcgttggtctacattcgcatgcttgatggcgagacgctgaaggtgaacggcgagtctaaagcgctgcgtccggggaataacggttacgcatcgctgaaattgcctgcgggcgagacccgcattgaactggaaggcaatggaagaacgcgtacccagacgctggatattgcgaagccaggcacctggctggtgaatccgtaa

SEQ ID NO: 114463 - DNA, 1467 bp, Enterobacter cloacae
atgtataacatcaagtttgtctatctgttccacgagaacgtctcgccagcgctgtttgcgaaaataatccgcccgtccgttgccggacagtggattatgtcggttcccgaccattcgctgcgctcgctcttcacgcgctacgatctgctgcgcacgatcaccggtgcgaatccttatcagtccgggcgcgatacccgcacgctgatcgcgcaggatttagagatgggcagagtggttgccattgacgaaagttttcgtgactggtcatcagtaacggaaattttttacatcaatgccaaagggcaactccaggctgcctcgctggtcggcctgggctggtatccggtgagtacgattgtcgaccgctacgaagccatggtgagaacgtacggatctcgccctgcgccaacggtactgccaaaacaggtggtgaaatctaaaacggcacaggtgccggatgaacctactccgggcaaggacggtaaaacctatgccgggcagcttcagaagatgaccaaagcagagcgctggcaggcgcgtaaagatctgattgcgaaggggagcaatagcctttatccggatgcccagatcgccgcgaagcgtctggcggcgaataatatcgcggtggaaaaagcgaagcttgcggaaaatatttataagaccgtgaacccgctggaaaccacaccgggcgtgccggaggggtggacggatatcagtaatgacgatgcgctgttaggaaagttcgggctgaacaaatcaatgctctttgacgatgatacgtcccccaattttctggcgcgcgtctatcaaccgaagccggaagtgtttggtacagatatgaaccccacactggtattcaggggatcgcgcgagcctggtttcgcctctctgtctgagaatgtctcctctttactgaccaaaggggagctggcgccggtggtaaacggggctgactggtcgaataacttctcacagggcatgggtatggcttcagattattataaaaaggccgtgagtattggtaaggagctggcaaggtcaggccagaatattgatattgccggtcattcccttggcggtggcctcgcctctgcaacctctatgggcagcgggaaagcggggtggacgttcaacgccgccggcctgaatgccggaaccgtagaaaaatacggcggtaagatattaggcagtacggataatatccaggcgtatcgggttgaaggtgaactgctgacgaagattcaggaagttaacccctgggaagatctgaaaacgatgaaagggcatgtcccttcgtggatcctcaaagaggaaatctctgcgctgagccctaatgctgccggaataccccacgatcttcccggtggaaccggaagcgcgctggaccgccacgggattaatcaggcgattgattgcatagagcaacagaaggacgaggatatttcgataatcgggagtcgattgtga

SEQ ID NO: 114464 - DNA, 762 bp, Enterobacter cloacae
gtgaaaaaacggttgatggcttttgtcgcgttatgttttttattcatgattcaggggtgtaagcaggatatggaccttaatccacaggactacttcagcggtcagcagcttgaactggcgaaagcgattgaagaaggtgatgtcgacgcggtgaagacgcttgcaccagaaagcgatcttaataaaccgggaaagcaggatatgaccctgcttttttgggccatcggcaacgcgattaatgataaaaaaacatcgccccatttaaaggtgattacattgcttgttaaggccggcgcagatccgctccagcctcgaccgcagggaaaaagcagccctgccgaatttgccctgaagggggacagcgcggattggatcgatgcgatgctggacggtggcctctcacccaacgtgaaagataaggtcttccacgaaccgatcgtcttccagtcgcttaaagcgaaaaacacagagactctggaagccatgctcgatcgcggagctgacgtcaatgcaaccaattcactgggtaaaacgctggtgtttgatgcgctggataaccaggcttacgagcatgtcttgttactgctcgatcgtggagcggacccgtcagttaaggctaaaaatggctggtcaatgagtaatgcgcttgcggacgcgctgagtggacttgatagaggcagcgagcaatacgagaagttaaatgaaataaaagagaaacttattcagaaagggggcgtgtggccacctgcgccggttaagtga

SEQ ID NO: 114465 - DNA, 1923 bp, Enterobacter cloacae
atgctcaaccgaattaccgtccagctcccggttgaggggctgcttttctggaaactctccggccgtgaggcgatgtccgagtcgttcgcgctgacgctgaccctgcttggtacggacgcgcgcattgaccgcagcaagctgctgggccagccggtcacggtgaccatccccacgcagaacctgctcaccccccgctatatcaacggcaaggtgacgcgcgtggcggtgagcgccgtggagctgacgggcacccgctacgcggtgtaccagctgacggtggagccggacctgtggccgatgaagcgcgaccgtaacctgcgtatcttccagggccagacggtaccgcagattgtcaaaaccctgctgggtgagcatcaggttaacctcgaagacaaacttaccggcagctaccgggtgtgggactactgcgtgcagtatcaggaatcgagcctggacttcatcagccgcctgatggagctggaggggattgcgtactacttcagccacgaggccgacaagcataccctggtactgaccgacgccgcgacccagcaccagccgttcagcggctatgaagtcattccttaccaccagacgccgtccggcggcagtacggatgaagagggcatcagtcagtgggcactggaggacagcgtgacgccggggatatacagcctcgacgactatgacttccgcaagccgaacgcgtggctgttccaggcgcagcagaacccggcgtccccgaagccgggcagcatcgacgtgtacgactggccgggccgctttgtggagacaggccatgcggagttctacgcccgaatccgtcaggagcgctggcaggtggagcatcagcagattcaggcgacggccacggcggcgggcattgcgccgggccacatctttaccctgtccaacgcgccgttcttcagtgacaacggggagtatctggtgacggcggcgggttaccacttcgaggagaaccgctacgcgagcggtgagggggaaaccattcaccgcaccgatttcaccgttatcccggcgtcggtgtcctaccgtccggcgcagagcacggcgtggccgcgcacctacggcccgcagacggcgaaagtcgtgggaccgcagggggagagtatctggacggacaaatatggccgcgtgaaggtgaagttccactgggaccgcctggcgaagggcgatgacaccagctcctgctgggtgcgcgtgtcgagcgcctgggcgggccagggctacggcggggtgcaaatcccgcgcgtcggcgatgaggtggtggtggactttatcaacggcgacccggaccgtccgattatcaccggccgcgtatacaacgaagcaagcatgccgccgtgggcgctgccggctgccgcgacgcagatgggctttatgagccgcacgaaagacggttcagtcgacaatgccaacgccctgcgctttgaggacaaggcgggcgcggaacaggtgtggatccaggccgagcggaatctggacaccagcgtcaagaatgatgaaacgcacagcgttggcggcgcacgcagccattacgtgaagaaaaatgagcttcatcgcgtggaggctaatcagatccaggccgtgaaaggcggaaccgagatcctgacgggtaaaggcaagctggatgcggcggtagagcagtatgttattgcttccgggacgaagctgcggctggtctcgggcgagagtgctattgagcttaacgctaacggcaaaattaacctgatcggcaaagagttcaacttcttcgttgaaggggacggctatatcaccacgggcggcaagctgcacctgaatacgtcgggcacccaaccgggcacaacggcgccggggtcagggcataaaggggatattgatgcggcggtgcaggagaaatttacgcccccggaagagtaa

SEQ ID NO: 114466 - DNA, 441 bp, Enterobacter cloacae
atgaaatacaccctccaggaaggttcctttaccctttttcctgccgcctggcaggacaacagcatgaacatcattcgcgatgacgaaagcgggctgtccgtggtggtcagccgcggcgttatcccggatggcagcgactacgaacaagagtttcaccgccagtgggacgtgctgcgtcctcagatgggtgagatcgcccagagcgaatttcagcacgtaaaagccgggcctgacggaaaaattaacgggctggaagttgagaccacctttgaccgtaacggccagcgcctgtggcaaaaacagctggccgtgcagacgccgggcaaaccggtactgataatttttaccctctcggccttaaaagcctttacggaagaggacgaggcgcgctggagcgcactgaagcagagtctgacgctaaacgacaaccggaatgtgtaa

SEQ ID NO: 114467 - DNA, 4464 bp, Enterobacter cloacae
atgagcgataacaacgcggcccgtaagggcgacgagattattcactccagcatttttgctgatattaccagcattgtggcggaaggtgccgcctatgcggtgattggcgcggcggtgggcgcggcagcgaccgtcgcggccccactgctgggagccggggccgcagcagcaggcgtggcggcgattggatccagctgtctgttgagcggcattatcggcggggttctggcgaacgtcgccgggatcaccgacgatatcagcaacgccgctgaagggctgggtaacgcgcttttcccgccgtcgcccgcgggcaaaatcaccaccggttcgagcaatgttctgacaaataaacttcccgctgcacgcgccgccgggacgttaacccctgccgataccccgtcccctgagccgcagtcgccgggcagctttgccgactacgcgggcatgctgctctccgctgccggacagttcggcagcgagatgtggcagccgagcgtcgcctctgccgccgcagggacctcgccgctggaagaagacaaggtggcgtgtgataaacactccgggccgcagtatctggcggaaggctcgaaaagcgtcttcatcaacggacagcctgcggtgcgcgcaaaagatcgcaccacctgcgagggcaccgtttccgacgacgtctccccgaacgtgatcataggcggcgacacgctcacggtccgcgatatcaaaagcggtaaaacgccgggtctggcgctggggatgattgcgctctccctgctgcgcgggcggccaggcaagatcctgaaaaacatgccctgcgcgctggctgctgccggtggcgggatgctggcggatatggccgtcaacgccgtgttcggctcctcgcacccggttcacgccgctaccggcgtgaaggtgctgaatgacgacgacgaactcgatttctcgctgccagggcgctttccgctgcgctggcagcgcagctacaacagcctgaccacccgcgaagggcttttcggtctgggctgggctaccacctttgacagctatctggcgctggaagaaaacaacgccacctggttcgatgaaaccgggcgcgagctgagctttgaactgccgccggtcgaccgcgcgttttacagcatcagcgaaggcatcattatccgccgcaatgagagcggcgacgtggcgatagctgacgatgacggcgcggtgtggcgtctgtataaaccgacccgcgctaacccctccatcctgcgcctggcctccctcagcgacgagtacggcaacgcgttgctgacggaatgggatgagcacgggcggctggtcggtctgcacgatgagccgcgagcgatcgatgtcaccctgcgctatgacgatgaacgtttcccgcagcgcgttaccgctgccagccattttgacggcaaccagacatggccgctgatgcagtgggggtacgacgcgcgcggccagctggccagcgcaacggatgcctccggcgtggtaacccgtgaataccgttataacgatgatggcctgatggtctggcaccgtctgccgggcgggctggagagcgaataccgctggcaaaaattcgaccactggcgcgtggtggaaaatcgcaccagcaccggcgacggctgtcgctttacctacgatttagccgccgggctgacgaccgtcgatcactacgacggtcagacgcgaaagcattactggaacgcgcaaaacctgattgttcgctacgttgacgagcgcggtgagaactggcgctacgagtgggatgacaacgaactcctcacgcgtcgcatcgatccgctgggtaatgccgttaccttcgtctatgacgagatgggcaaccgggtgcaggagatcgacgccgacggcaatacccgcaccaccacctggctggagcaccgtgcgcttccggcgtccatcatcgaagccgacggtagcgccacccggttcctgtatgacgaacatcacgggctgaaacgcgtggtggatccgatggggcagaccacgctgctgcgtcgggacgagtttggtcaggttgtggaagaagttgatgccgccgggaacagccgctaccaggagtacaacgaagccgggcagatggtgcgtgcgacggactgttctggccgcgtgacacaataccgttatcatccgctgggctggctggtggctgagataagcgccgacggcgaagagacgcgttaccgctacgacgccgcggggcgtccggtgcagctcgaccgatcagaaggctggaccgagtcgctcaaatggaacgaacgtggtctgccggtgaagcatgcgggcgccgacgggaaagagagcgagttcagatacgacgaggcagggcgcttaaccgccacccgcaatacgcagggtgaagaggtgcgccgccgctgggacagccgcggacggctggtcgccatggaaaacgaaaacggcgaagcgtatcagttccgctggggcgcagactcgctgctgctggaagaggtgggactcgatggcgtggcctcgcagtatcgctacgatgcctgcggacgtacgatagcgcgcacctttgccgccggacatccggaggccatcacccacgctttcgcctggagcgcgagcggccagctggtcgcccgcaccacgccggaggggcagacccgctaccactacaccccgtccggccttctgagccggattgggctgcatcccgcgctttcagaagatgcctggagcgccgaggccgagcaggagcttgtgtttgagtatgacgcgctcgggcgcgtcacgcgcgaaacgggcgaacacggggagctggcgtgggagtatgacgcgctgggtaaccgcacctccgtcacgctgcccgatggtcgggagctgaaacagttctactacggtagcgggcatctgctcagcattgcccttgataagctgtcggtctccgactttacccgcgacgaactccaccgtgaaaccagccgtacgcaggggctgctgaccacccgcagcgaatacgaccgccttggccgactgcatcgccgggacgtctttaccggcaatgcccagcgcccgtcgccgcgccgctggtcccgccgctgggattacgactatcgcaataacctggtgcgggaagagcgggacgataacccgttcagctggtaccgctggcagtacgacagcgccggacgtctgctggttcaggacggcacgctgcccggccaggagcagtggcgctgggatgctgccggtaacccgctcgaaggctctgctgagaaggtcacgcacaaccgtctgacgcacctcaacggcattcgctggcgctatgacatccacggccgcaccgtggagaaggataacggccagacccgctggaactaccgctacgacggcgagcaccgcctgacggaggtcatcagccagccgcgggaccgcaacaggccgcagacgcaggtcagcttccgctatgacccgctcgggcgacgcatcagcaaaacgcgccgccagatgctgggcggccagccaaccggcaagccggtcaccacccggtttgtctgggaagggttccggctgttgcaggaggtgcacggggatgtgccgctcacctacgtctacagcgatcaggacagctacgatccgctggcacgtattgacggcgttgatgccccggaattcttctggttccactgccagcccaacggcacgccggagcggatgacggatagcgaagggcaggtgcgatgggaaggggtgaacagcgcctggggcaaactgctgcgggaaagcgagacgcaggtatcaggatattcccagaacctgcgtatgcaggggcaatacctggaccgtgagacagggctgcactacaatctgttccggtattacgacccggactgcggaaggtttacgcagcaggacccgatagggctggcgggagggattaacctttaccagtatgcgccgaatgcgctgggttgggtggatccattaggtttacgatgtgggcgaactaatacttggaatgattttcagcggcagcataaaggtcgtttcaaatcatcaactgaagcggcttctgcttataacaaattagtgaatgaacaatcgccttggccattaaatgagcctcctttagatgcaacattagtcccagggactcgagtaaaaatggccgtatctccaggccagccagcgacgagacctggagggtttgctacatttgacgatattcctaatacttcatatgttagaaatgagctcgctgtgaagatggaatggaaaccggatattgatagagtaataacttatgaagttaagaaaccattaccagttaaaattggtgcagttggacctcaagttgataaaggtgcgaatgtatatctgcctggcggcggttcacaagtcgaaatggctgtgccacctgcagaacgcatgaattatttggaagttattgacgagtcgttgctcaagccctaa

SEQ ID NO: 114468 - DNA, 483 bp, Enterobacter cloacae
atgaataataaaaacatacaaacagttgatctacttatcacacatagtcaaatattgctacgatcacgagactatgatgaaaaactgagccagtggggcaaaggtaatgtatctcaaggcgctgtgattcataaagattatgttatttttgatcctttacctgaggacgcatttggagcaaacgtaaatattaaaatagaaaatacttttaatttagatgaaaatgctcaacgctgcattgtagtgccattttttattacagataaaaataagcttcaggtggcttctgcgacagagaaatttgacataaacataaatgtaaccaacaaaacgtattcgctctattatgagatttgtgaaggggatgaaatttattacaatttcactcttgtgccggaaaaagacactgtcacagctaagtttttattagacgacccttggggcggaaaaaaagataatccactcaaagaaggtgttttttaa

SEQ ID NO: 114469 - DNA, 1095 bp, Enterobacter cloacae
atgggattcaaatgcggtatcgtcggtctgccaaacgtgggcaaatccaccctgttcaacgcgctcaccaaagcaggtattgaagcggcgaacttcccgttctgtaccatcgagccgaacaccggtgttgttcctatgcccgatccgcgtctggaccagctcgcggaaatcgtgaagccgcagcgcattctgccaaccaccatggagttcgtggacatcgcgggcctggtaaaaggcgcatccaaaggtgaaggcctgggcaaccagttcctgaccaacatccgtgaaaccgaagcgatcggccacgttgtgcgctgcttcgagaacgacaacattatccacgttaacaacaaagtggatccagctgacgacatcgacgtcatcaacaccgagctggccctctctgacctcgacacctgcgagcgcgccattcaccgcgtgcagaagaaagccaaaggcggcgacaaagacgcgaaagcggaactggctgcgctggaaaaatgtctgccacagctggaaaacgcgggcatgctgcgcgcgctgaaaaacctgactgacgaagacaaagcggcgatcaaatacctgagcttcctgaccctgaagcctaccatgtacatcgccaacgttaacgaagacggtttcgagaacaacccgtatctggacaaagtgcgtgaaatcgctgcggctgaaggctctgtagtggtagcggtttgcgctgccgttgaatctgatattgcagagctggacgacgccgaccgcgaagagttcatggccgagctgggtctggaagagccgggcctgaaccgcgtgatccgcgcgggctatgagctgctgaacctgcaaacctacttcaccgctggtgtaaaagaagtgcgtgcgtggaccatccctgtcggtgcgaccgcgcctcaggcggccggtaagatccacaccgacttcgagaaaggcttcattcgtgcgcagactatcgcgtttgaagacttcataacctacaagggtgagcaaggcgcgaaagaagcaggcaagatgcgtgcggaagggaaagattacatcgttaaagatggcgacgtgatgaacttcttgtttaatgtttga

SEQ ID NO: 114470 - DNA, 585 bp, Enterobacter cloacae
gtgacgattaaactgattgtcggcctcgccaatccgggcgcagagtatgccgctacccgccataacgccggcgcctggtatgttgatctgctggcggagcgtttgcgcgctcccctgcgtgaagaacccaagttttacgggtatacctcacgcatcaatcttgcgggtgctgacgtgcggttgctggtgccaaccacctttatgaacctgagcggcaaagccgtggcggccatggcaacgttttatcgcatcaatccggatgagatcctggtggcccacgacgaactggacctgccgccaggcgtggcgaagttcaaactgggcggcggtcatggcggccataatggtctgaaagacatcatcagcaaactgggtaataaccctaatttccaccgtttgcgcgtgggaatcggccatccgggcgataaaaacaaagttgttggtttcgtactgggtaaacccccggtttctgagcagaagttgattgacgaagcggtggacgaagcggcccgctgcaccgagatttggcttcaggatggcctgacgaaagccaccaatcgactgcacgctttcaaagcgcaataa

SEQ ID NO: 114471 - DNA, 276 bp, Enterobacter cloacae
atgaaacgcaaaaacgcttcaatgctcggtaacgtgctaatggggttgggactgttcgtgatggtcgccggtgtcggttattcaatcttaaaccaattaccgcagcttgacctcccacaatactttgcgcatggcgcggtgctgagtatcttccttggtgcggtattgtggctcgccggggcgcgcgtgagcggacatgaggaagtctgcgataaatactggtgggtgcgccattacgataaacgatgccgccgcgaccagcgcaagcatagctag

SEQ ID NO: 114472 - DNA, 1059 bp, Enterobacter cloacae
atgttgatacaggtgggtgaactggcgaaacgtgccgggatcaccgtgcggactttgcatcactacgagcaaacagggctgttgttaccttctgccagaagcgcggcaggctaccggctttataacctggcggatgtgcagcgtctgcatatgatccaggcgctggcaaaagccggactggagcttgccgaaatcagggattttctggaacagcgttcgctgtcattagccgaattactcgacgggcaaatcactctgctggacaagcaactgcgtagcatccatacgctgcgcaaccggctggtggaattgcgtaccgggctgaccgacgatgcgacgccggatctggaatcctggctacagactctggagttaatgaatatgtacgatcgctggtttagcaaagaagagttgcagcaactaccgtttgcggtagagaaagaggcgctggcggatatctggtcgggtctggtgacggaggttaaacacttgctggaacagaacgtcagcgtcacggacgcgcgggcgaccgatttggcttcacggtggatggaacgcctggagcaggataccgcaggcaaaccggaatttttgacccgtctgaacgagatgcacagcgtggagccgcagatgcaggagcaaaccggcattacgccggagataactgattacatcacgcgggcgtttgccgaatcaaagctcagcatctgggagaaatatctcactgccgaagagatggcctttacccgggcgcactactttgaccggatgatggagtggccgccgctggtggcgaagctgcatcaggcgcagcaggataatctcagtcccgcttctgacgatgcgcaaaagctggcagaaaagtggctggttttattccagtcctatgcaggaacaaacccgcagacccagcaaaaatttcgcctcgccatgcagcaggagccgcatctgatgaaaggcacgtggatgacgcctgccgtgcttgaatggctccagcaggcgatcggggtgatgatgcaaagacgagtctctgcatcagatgactcacagatccgctaa

SEQ ID NO: 114473 - DNA, 1680 bp, Enterobacter cloacae
gtgaaaaacgtaacctcctcacatgttctgccctttcgcgccctcatcgacgcctgctggaaagagaaatacacatcgtcacgctttgttcgtgacctgatagccgggatcaccgtcgggattattgccatcccgctggcgatggcgctggcgattggtagcggcgtcgcgccgcagtacgggctgtacacctcggccgttgcggggattgtgattgcgctgacgggcgggtcccgcttcagcgtctccggcccgactgccgcctttgtggtgatcctctacccggtttcccaacagtttggtctggcaggcctgctggttgccaccctaatgtccggcatctttttaattctgtttggtctggcccgctttggtcgcctgattgaatatattcccctttccgtaacgctggggttcacctcggggattgggattaccatcgggaccatgcagattaaggatttcctcggcctgcaaatggcccatgttccggagcactatttacagaaagtgggcgcgctgtttatggcgttgccgacggccaacctgggcgatgcagccattggcatcgttaccctcggcacacttatcgtctggcctcgcttaggcattcgtctcccggggcatctgcccgctctgctgctgggctgcgcggtgatgggcgttgtcaacctgctcggtggacaggtcgccaccattggctcccagttccactatattctggcggacggctcacagggcagcggcattccgcagctgctgccgcagctggttctgccgtgggacatgccgggctcaagcttcaccctaagctgggattcccttcgcgctctgctgcctgccgcgttctccatggctatgctgggcgcgattgaatccctgctctgcgccgtcgtgctcgacggcatgaccggaactaagcacaaagccaacagcgagctggtcggccagggcatagggaacatcgttgcaccgttcttcggcggtattaccgctacggctgcgattgcccgttccgccgcgaacgtacgtgcgggcgcgacatcaccggtttcggcggtcattcactccctgctggtgatcatggcgctgcttatccttgccccgctgctttcatggcttccactctctgccatggctgcgttgctgctgatggtggcctggaacatgagtgaggcgcataaggtggttaacctgctgcgccgtgcgccgaaagacgacattatcgtgatgctgatctgcatgtcgctgaccgtgctgttcgatatggttatcgccatcagcgtcggcattgtgctggcctcgctgctgtttatgcgccgcatcgcgcagatgacgcgtctctccccggttaacgttgaggtgcctgacgatgtgctggtgctgcgcgtgattggtccgctgttcttcgccgcagcggaaggtttgttcagcgatttggaatcccgcatcgcgggcaaacggattgtggtgctgaagtgggatgccgtcccggtgctggatgccggcggtctggatgccttccagcgctttgttgcccgcctgccggaaggctgcgagctgcggataagtaaccttgaattccagcccctgcgcaccatggcgcgcgcgggcgtgcagccgatccctggccgattgtccttctaccctaaccgtgaagctgcgttagcggatctgtga

SEQ ID NO: 114474 - DNA, 948 bp, Enterobacter cloacae
gtgcctgatatgaagctttttgctggtaacgccaccccggaactagcacaacgtattgccaaccgcctgtacacttccctcggcgacgccgctgtaggtcgctttagcgacggcgaagtcagcgtacaaattaacgaaaatgtacgcggtggtgatattttcatcatccagtccacctgtgctccaacgaatgacaacctgatggaattggttgttatggtcgacgcgctgcgtcgtgcttctgctggccgtatcactgctgttattccttactttggctatgcacgtcaggaccgtcgcgtccgttccgcgcgtgtgccaatcaccgctaaagttgtcgctgacttcctgtccagcgtcggcgttgaccgcgtactgacggttgacctgcacgcagagcagatccagggcttcttcgacgtgccggttgataacgtattcggcagcccaatcctgctggaagacatgctgcaactgaatctggacaacccgattgtggtttctccggacatcggcggcgtggtacgtgctcgtgctatcgcgaagctgctgaacgataccgacatggcgatcatcgacaaacgccgtccgcgcgctaacgtttctcaggtgatgcacatcatcggtgacgtggctggccgcgactgcgtgttggtggacgacatgatcgataccggcggtacgctgtgtaaagccgctgaagcgctgaaagagcgtggtgcgaaacgcgtattcgcttacgccactcacccgatcttctccggcaatgcggtaaacaacctccgtaactccgtcattgacgaagttgtggtgtgcgataccattccactgagcgacgagatcaaagcgctgccaaacgtgcgtacgttgactctgtccgggatgctggccgaagcgattcgtcgtatcagcaacgaagaatcgatctctgcaatgttcgaacactga

SEQ ID NO: 114475 - DNA, 870 bp, Enterobacter cloacae
atgatgacccactggccctctcccgcaaaactgaacctgtttctctacattaccgggcagcgcgctgacggctatcacaccctgcaaacgctgtttcagtttgtcgattacggcgacaccatctccatcgaaccgcgtcaggacgggcagatttgcctgctgacgccggtcgacggcgtggcgcatgacgataacctgatcgtgcgcgctgcccgcctgctaatgaaaacggcgtcgacgtcgggtcgtctgccggcgggaagcggtgcggatatccgtatcgacaaacgcctgccgatgggcggcggtcttggcggcggctcatcaaacgccgcgaccgtactggtggcgcttaaccacctctggggctgcggtctgacgacggacgaactggcagcgttagggttgacgctgggcgccgatgtaccggtgtttgtgcgcggccacgcggcgttcgctgaaggtgtcggtgaaatcctcacgccggtcgatccgccggaaaaatggtatctgatcgttcaccccggcgtgagcattcctaccccggtcatctttaaagatcctgacctgaaaagaaataccccggcacggtcaataaaaacgttattaaattgtgaattcagcaacgattgcgaggatatcgcaagaaaacgttttcgcgaggttgatgcggtgctttcctggctgttagaatacgcgccgtcgcgcctgaccggtacaggggcctgtgtctttgctgaatttgacaccgaaaccgccgcccgtcaggtgcttgagcaagcgccggtttggctgcatggttttgtagcacgcgggatgaacacctcccccctacagcaggccattctggcgcagactgagtttcggtga

SEQ ID NO: 114476 - DNA, 612 bp, Enterobacter cloacae
atgacccgaatgattcgcctgctgcctctggcggccctggttctgaccgcctgttccgttcatcagccgaaaggcccgggcaaaagccctgactcaccgcagtggcgtcagcaccagcaggacgtgctgaaattaagccagtaccagacccgcggtgcatttgcttatctctctgacgaacaaaaagtttacgctcgcttcttctggcagcaaacgggtcaggacaactatcgcctgctgctgctgaacccgctgggcagcaccgagctggagcttaacgcgaagcctggcgaagcgcagatcaccgataacaaaggccagcattacacggcaaccgacgccgaagagatgattggcaagctgaccggaatgccgattccgctcaatagtctgcgccagtggatcctcggcctgccgggtgacgcaaccgactatacgctcgacgatcaataccgtctgagccaggtgaactacacccagggcggtaaaacctggaaagtggtgtacagcgcgtatgacagcaagacgcaaccgtcgctgccgtccaatatggagctgacgcagggtagccagcgtatcaagctgaaaatggacaactggatcgttaaatga

SEQ ID NO: 114477 - DNA, 1257 bp, Enterobacter cloacae
atgaccctattagcactcggtattaaccacaaaacggccccggtttcactgcgagaacgcgttacgttttcgccggatacgctcgacctggcgctggacagcctgcttgcacagccgatggtgcagggtggcgtggtgctgtcgacgtgcaaccgtaccgagctgtatttgagcgtagaagagcaggacaacctgcacgaggcgctgatccgctggctgtgtgactaccacaacctcaacgaagaagagctgcgcaacagcctgtactggcatcaggataacgatgcggtcagccatctgatgcgcgtggccagcggtctggattcgctggtgctgggcgagccgcagatccttggccaggtgaaaaaagccttcgcggattcccagaaagggcatctgaaagccagcgaactggaacgaatgttccagaagtcattctccgtggcgaagcgtgtgcgaaccgaaaccgacattggcgccagtgcggtttcggttgctttcgcggcctgtacccttgcccgtcaaatttttgaatccctgtcgaccgtcaccgtactgctggtgggagcgggcgaaaccatcgagctggtggcgcgccatcttcgcgaacacaaggtgaagaagatgatcattgccaaccgcacccgcgaacgtgcgcaggtgctggcggacgaagtgggcgctgaggtgattgcgctgagcgacatcgatgaacgtctgaaagaggcggacattattatcagttctaccgccagcccgctgccgattatcgggaaagggatggtcgagcgtgcgctgaaatcccgccgcaatcagccgatgctgctggtggatatcgccgttccgcgtgatgtcgaaccggaagtgggcaaactggcgaacgcctacctgtacagcgtggatgacctgcaaagcatcatttcgcacaaccttgcccagcgtaaggcggcggctgtgcaggcggaaaccatcgttgaacaggaaaccagcgaatttatggcctggctgcgcgcgcaaagcgtcagcgagaccatccgcgaataccgcggtcaggcggagcaggtgcgtgatgacctgacggccaaagcgttagcggcccttgaacagggcggcgacgcgcaggcgattatgcaggatttagcctggaaactgaccaaccgcctgatccatgccccaaccaaatctcttcagcaggctgcccgtgacggggacgatgaacgcctgactattctgcgcaacagcctcgggctggaatag

SEQ ID NO: 114478 - DNA, 1083 bp, Enterobacter cloacae
atgaagccttctatcgtcgctaaactggaagctctgcacgagcgccatgaagaagtccaggcgctgctcggtgatgccgggaccattgccgaccaggaacgttttcgcgcgctgtcgcgtgaatacgcgcagttaagtgatgtttcaaaatgctttaccgactggcgacaggtccaggaagatatcgaaaccgcgcagatgatgctcgacgatcctgagatgcgcgagatggcgcaggaagagttacaggatgcgaaagcgcgttcagaagagatggagcagcagcttcaggtgcttctgctgccgaaagatccggatgatgagcgtaacgcctttgtggaagtccgcgccggtaccggtggcgacgaagcggcgctgttcgccggagatctgttccgtatgtacagccggtatgccgaatcccgtcgctggcgcgtggagatcatgagcgccaacgaaggcgagcatggcggctacaaagaggttatcgccaagatcagcggcgacggcgtgtacggtcgtctcaagtttgaatccggcggtcaccgcgtgcagcgcgtgcctgcgacagaatctcagggacgcattcatacgtcagcctgtacggtggcggtgatgccggagctgccggaagcggaactgccggatatcaacccggcagatctgcgcatcgacaccttccgctcatcaggggcaggtggtcagcacgttaacaccaccgactccgctatccgtattactcacctgcccaccgggattgtggttgagtgtcaggatgaacgttcccagcacaagaacaaagctaaagcgttatccgtgctgggcgcccgtatccacgcggcggaaatggcgaaacgccagcaggcggaagcctctacccgccgtaacctgctgggcagcggcgatcgtagcgaccgtaaccgtacctataacttcccgcagggtcgcgtaaccgaccatcgcatcaacctgacgctctaccgtctggatgaggcgatggaaggcaagctcgatatgctgattgagcctatcgtgcaggaataccaggccgaccagctggcggcactatccgagcaggattaa

SEQ ID NO: 114479 - DNA, 831 bp, Enterobacter cloacae
atggattttcagcgctggttacgccatgccgccagtgagctttctgcaagtgaaagcccgaagcgcgacgccgaaattctgcttgagcatgtgacgggtaaagcccgcacgtatcttctggctttcggcgaaaccgctctgaccgctgaacagcaatcgcagctggaggcgctgcttgcccgccgtaaaaccggcgagccggtggcgcatctggttggcgaacgcgagttctggtcacttccgctgtacgtttcagcggccacgctgatcccgcgcccggacaccgagtgtctggtggagcaggcgctggcgcggttaccggcgcagccgtgtcagatcctcgatctcggtactggcaccggcgcgattgcgctggcgcttgccagcgagcgaccggactgcaccgtgacggcggtagacgtgatgcctgatgcggtcgccctcgcgcggcgcaacgttgaacggctggggctgaacaatgtttccgttctgcaaagcagctggtttgccgcgcttgaaagccgcatgtttgaaatgattgtcagcaatccgccctacatcgacgaagacgatccgcatctcgcgcagggcgacgtgcgttttgaacctttgaccgcgctggtcgctgcgaatcagggacttgcggatctcgatcacattgtgacaacgtcacgacaacatttgcttcccggtggctggctgctggtggaacatggctggacgcagggagaggcggtgcgagcgctgtttacgcgtgccggatacgctgccgtggaaacctgccgggattacggcggcaatgaacgtctgacgctggggcagtggtcatga

SEQ ID NO: 114480 - DNA, 393 bp, Enterobacter cloacae
atgagcctgtttacgctgctgatctccgttcacctgatttccgttgccctgaccattggctttttcattgcccgctactggtggcgctacagcaacaatccgctgattaacgcccgctgggtacgcatcgccccgcactgtatcgacacggtgctgttcctttccggagccgggttaatgtggaaaaccggctatctgccatttactgataaaggcgcatggctgactgaaaagctgtttggcgttatcatctacatcgttttgggttttatcgcgcttgggcgtcatcgtccgcgcagccagcagacagggtttatcgcctttttgctgggtctggtggtgctgtacatcatcattaaactcgccaccacaagaataccgttactggggtaa

SEQ ID NO: 114481 - DNA, 810 bp, Enterobacter cloacae
atgaggtccttagccgatttcgaatttaacaaagtgccgctctgcgatggtatgatcctgatttcagagatgatccgcgacgattttacgtcacagtacgtttacgctgaactggagaatctggtcagcctggcgcgcgaagagatcaatcaggcacgtccgcaggactggcaattagagaagctgattgagcttttctacggcgaatggggtttctgcgacacgcgaggcgtgtaccgcctgtctgacgcactgtggctggaccaggtgttgaaaaatcgtcagggcagcgccgtcgcgttgggcgccattttactgtgggttgcgcacgagctggatattccactggtgccggtcattttcccgacgcagatgattttgcgggcggagtggctggacggtgagatgtggttaatcaatccgtttaacggcgacacgctggatgagcatacgctggacgtctggctgaaaggcaacatcagcccgatagctgagctgttcaatgaagatctcgatgaagccgataacgccgaagtgatccgtaagctcctggatacgctgaagtctgcgctgatggaagagcgtcagatggagctggctctgcgcgcaagcgaagtgctgttgcagttcaatccggaagatccgtacgaaatccgcgaccgcggcctgatttatgcgcagctcgactgcgagcacgtggcgctgaatgatttgaattatttcgtcgagcaatgtccggaagacccgatcagcgagatgatccgcgcgcagattaacgcgatcgcgcataaacacattacactgcattaa

SEQ ID NO: 114482 - DNA, 855 bp, Enterobacter cloacae
atgaaacaaaaagtggttagcatttgtgatatcaacgtggcaaacgacctgccgttcgtgctgtttggcggtatgaacgttctggaatcccgcgatctcgctatgcgcatctgcgaacactacgtgaccgtgacccaaaagctgggcatcccgtacgtgtttaaagcctcttttgacaaagccaaccgctcctccattcactcctaccgtggcccgggcctggaagaggggatgaagattttccaggagctgaaacagacgtttggcgtgaaagtgatcaccgacgtgcacgaagcgtctcaggcacagcccgtggctgatgtggtagacgtgattcagcttccggcgttcctcgctcgccagactgacctggtagaagcgatggcgaaaaccggtgccgtgattaacgtgaaaaaaccgcagttcgtgagccctggccagatgggtaacatcgtcgacaagtttatcgaaggcggtaacgaccaggtgatcctctgcgaccgtggttcaaacttcggttatgacaacctggttgtagatatgctgggcttcagcgtgatgaagaacgtctctaaccagtctccggtgattttcgacgtgacccactccctgcaatgccgcgacccgtttggcgccgcgtctggcgggcgtcgtgcgcaggtgaccgaactggcgcgcgccggtatggcaaccggcctggcgggtctgttcattgaagcgcacccggatccggctaacgcgaaatgcgacggtccatccgcgctgccgctggagaagctggagccgttcctgaaacagatcaaagcgattgacgatctggtgaagagcttcgacgagctggataccagcaactaa

SEQ ID NO: 114483 - DNA, 1101 bp, Enterobacter cloacae
atgacagcaacacacgaggcggtaaaaccccgccacaaggagacctctctcattttcccggttctggcactggctgtgctgctcttctggggaagcagtcagtcattgccagtggttgtggggatcaatattctggctctggtgggtattttaaccagtgcatttagcgtggtacgccatgcggatgtgttagcccaccgtcttggagagccgtatgggtcattaattttaagcctttcggttgtgattcttgaagtcagtttaatttccgcattaatggccaccggcgacgccgcgccaacgctaatgcgcgatacgctctactccatcattatgattgttaccggcggcctggtcggtttttcacttttattaggtggtcgcaaatttgccacccagtacatgaacctctttggcattaaacagtacctgatcgccctgttcccgctggcgattattgtgctggtatttccgatggcgctgccgggtgcaaatttcaccaccggccaggcgctgctggtggcgctgatttccgcggcgatgtacggcgtgttcctgctgatccagaccaaaacgcaccagagcctgtttgtttacgagcatgaagacgacggcgacgacgatgacccgcatcacggtaagccgtcggcgcacagcagcgcgtggcatacggtttggctgatcgtgcatctgattgccgttattgcggtcaccaagatgaatgcgaacccgctggaggcgctattaactgaactgaacgcgccggtcgcctttaccggtttcctggtggccctgttgatcctgtcgccagaaggcctgggagcgctgaaagcggtgctcaataatcaggtgcagcgggcgatgaatctgttcttcggctccgttctggcgaccatctcccttaccgttccggtggtgacgttgattgcctttatgacgggaaatgaattgcagtttgcgctgggtgcgccagagatgattgtgatggtggcatccttgctgctgtgccagatatccttctccaccggccgcaccaatgtgctgaacggcgcggcgcatatggcgctgtttattgcgtatctgatgacgatatttgcgtaa

SEQ ID NO: 114484 - DNA, 231 bp, Enterobacter cloacae
atgccatacaaatcgaaaagcgaattaccggataacgtgcaaaacgtattgcctgcccacgcccaggatatctacaaagaagcctttaacagcgcctgggatcagtacaaagataaagaagatcgccgggacgatgccagccgtgaagagacggcgcataaggtggcctgggccgccgtgaaaaatgactatgagaaaggggacgatgataaatggcacaaaaagaaatag

SEQ ID NO: 114485 - DNA, 696 bp, Enterobacter cloacae
gtgttaacgcgtgatttcttgatgaaggcagattgtaagacggcatttggtgctattgaggaatcgcttctgtggtcggctgaacaacgtgcggcgtcgcttgcggcaacgctggcctgccgcccggatgatggcccggtctggatctttggttacggctcgctgatgtggaacccggcgctcgaatttgttgaatcagcaaccggaacgctgcctgggtggcaccgcgccttttgtttgcgcctgaccgccggacgtggcagcgcctgtcagcctggccgcatgcttgcactaaaagagggcgggcgcaccacgggcgtggcataccggctgccggataccacgctggaagatgagctgacgctgctgtggaagcgcgagatgatcacgggctgctatatgcccagctggtgcaagctggaactggatgacgggcgcaccgtcaacgcgctggtgttcattatggatccgcgccacccgctgtatgaagccgatacccgaacccaggtgattgccccgctgattgccgccgccagcggaccgctgggcactaacgcccagtaccttttctcgctcgatcaggagctgacgcgtctcggtatgcaggacgactgtctgagtgagctggtggtgaaggtgaaagcgctgctggaagggaacccgctcagcaatacgctgcggccgggttttgcctga

SEQ ID NO: 114486 - DNA, 240 bp, Enterobacter cloacae
atggcacgagttaaaacgagtctgaaactgtttggcggggatacggtagtggtgcgttgctcagagcgttgccgcatccatctgatgagtacaaaaggacagaagcaatcgcaggcagatatccttaccgtccaggacgataaggcctggctgacggtgccttacaccggcacctgggatgtgctgatcgacagccacagccagtcgctcgaacattccgtaagttacgtggcggcataa

SEQ ID NO: 114487 - DNA, 1785 bp, Enterobacter cloacae
atgttcagatccattcgcgcccgcatcattgccgcgacgacaggctgtctggtcgtcgcccttcttcttaataccattattaactttcaggtcacgcgccaggataatcagcagtcgcagcgcgatattctgaccagcaccagcgccagccacaacatggcgattgccgactgggtgaacagcaaaatgaccgtcatcacctcggcgcagccggtcgcgctcagcgacgatccggttccggtgtttaaacagcttgcgctggcgggtggattcaccaacgtctacgtgggttatgccagcaaaacggctaaattttctgacccaaccggggtacccgcagattacgatcccacccttcgcccgtggtatcagcaggccgtcagcgctgatggcccggtagtgactgcaccctatgtggacgcgggcaccgggaaactggtggtgacgttcgcggtacccgttaaagagcaaggtgccctgaaagcggtggtggcgggcgatgtggcaatggacagcgtggtagctaacgtgcgcggtattcacccgaccccggccagcagcggactgcttctggacagcaacggcaccgttattgccggcagcgatcctgcgctgacgcttaagccttttacggagacgatcaaagggaccgattttgccgccctgaaaagcggcaacctgattgacggaacgtttaacggacgcgaaaaaacgttcctggccaccgccgtaccggggacgcactggctgctggttgtggcgctcgataacagcgatgccaccgccgggatgcggtcattgctgaaagcatctgcactatctctggcgatccttgccctgctgagcggagccctcatgcacctcctgattgcccgcctgcttaagcggctgtccggtatccgtgacgcgatgaacaacattgccaacggtactaacgatctgtcgcagcgtctgccggataaggggggcgatgaagtggcgcaaatcgcgcaggcgtttaacgccttcagcgataagctttctgtggtgatggttcagctgcgtgatgccagcgcctcagtgaaaaacgccgcgcatgagattgcggcaggtaatcaggatctttccgggcgtaccgagcaggcggcatcaagccttcgcgaaaccgccagcgccgtggaagagatcacggcctccgttacgcagtcaaacgagtcggcagcagaagcgaacgaacaggcgagcaaggcctctgccgccgcatcccgcggcggcgacgtcgtcgctcaggccatcagcaccatgcagtccatcgaactggcttccgcgaaaatcggcgatatcaccagcgtcattgacggcatcgccttccagaccaatattctggcgcttaacgcctcggtggaagcggcgcgtgccggggagcaaggccgtgggttcgcggtcgttgcgggggaagtacgtaacctggccagccgcagtgctcaggcggcgaaggagatcaaatcccttattgattccaccaccgaaagcgttgcaaccggctcccggtttgtgcaccttgcgggcgacagcatggatgagatccgcgccagcgtcgggagcgtgtcaggcattatgcgtgaaatatccattgccacccgcgagcagatgaaagggatccatgagattaaccacgcggtgactcacctggatcgcatggtgcagcagaacgccgaacttgttgtacagtctgctgcggcggccagcgcgctgcaaagccaggcaggcgaccttgctgagaccgctggccatttccgcatataa

SEQ ID NO: 114488 - DNA, 354 bp, Enterobacter cloacae
atgcagaagattgtgatcgtcgccaacggtgcggcctacggcagtgaatccctttttaacagcctgcgcctggcaatcgcgctgcgcgataaggagagtgagctggagctgcgcctctttttgatgtccgatgccgtcacggccgggctgaaggggcagaaacccgcagagggctacaacattcaacaaatgctggagatcctgaccgcgcaaaacgttgcggtcaaactgtgcaaaacctgtaccgacgggcgcggcattaccgggctaccgctgattgatggcgtggaaattggcacgctggtggagctggctgaatggacgctttccgccgataaagtattaactttttaa

SEQ ID NO: 114489 - DNA, 1173 bp, Enterobacter cloacae
atgacgatagtggctggcagttcccctggcgcaaccgaatggttccagcgtgcgagaatgttgcgcgaggaacagctcggcagactggcgcagctgggcgcactggtgaacggcatcagtcgactggtgcatatgctacagtgcgagcgcggtgcgtcaaatgtctggctctgctcgcagggcaaattgtacgcgcctgaatgcaaggccagcagggccctggtggatgaaaacctcgccgcattgcaccgtctgtttaacgaaccgctgcctggcagcgccctgtgcgaacgtattgccagcgcactgcacggccttgagacgctaacggcgctgcgtgatggcgttacaggtcaacgcgtcaccgcgccgcaggcgatggaacattacagccgcatactgcgtcatttgctcagtatcgtaccccaactcagcgacagcattgacgatccgcacatcgcgggccgatttgtggccctttacagcctgatgcagggcaaagaacttgtgggacaagagcgggcgctgggggctattggtttcacccagggattctttgacgatgaaacccgccagcggctggtggatcgcattgatggccagcaggcctgctttgaggtttttatctcccattgcactccagacgtgcaggagtcatttaccctcaactgcctgccgggtctggagactgaaaaactcaggcgtgaagcgtgcacccgccagcctccggcagataacggcgataccgccctcaaatggtttgccctgcaaaccgcgcgccttgagcacctgcgcacgctggaggaggtggcaattgccgatctgatgacggcagttgaggagcgccgctatagcgaaaacctgcacgcagacgatgagcacgacgatatcctggcgcgatttcctgacagaccgctgctgccgttggtgcgccagcaggcgcgtgaaattgagcaactctcccgtcagcttgcttccctgcgcgacacgctggaggagcgtaagaccatcgacaaagccaaaagcgtgctgattacgcaccagaacatgagcgaggagcaggcgtggaacgccctgcgcaaaatggctatggataaaaaccaacgcatggtggatatcgcccgtgcgctgcttacggtgaaaaatttgtggaagataccccctggggagtag

SEQ ID NO: 114490 - DNA, 1248 bp, Enterobacter cloacae
atggcggatttgtcgagacggcggttattgcaggccagcatgctggcgagtggtgcgatgctgttgccgggtgtcatgcaggccgcatgggcggcggggtcagataagccggagcaggataccgtgcgtatcgggtttatccccctgaccgactgcgcgcccgtggttatcgcggccctgaaggggttcgataaaaaacacggcattactattgtgccgaccaaagaggcgagctgggcggcggtgcgcgacaagctggtggcgggcgaactggacgccgcgcacattctttacggcctgctgtacggtctggagctgggtatcgcgggcaagccgcagcagatggcgaacctgatgaccctcaaccagaacggtcaggccattacgctctccagcgatctggcggagaagggcgttcgtgacctcgacgggctgaaaaagctgattgcgcagcaggcgccgggaacctacaccttcgcgcataccttcccgacgggaacgcacgccatgtggctctactactggctggccagcgcggggattaacccgtttgacgacgtgcgcaccgtggtggtgccgccgccgcagatggtgatgaacatgcgcattggcaacatggtcgggttttgcgttggcgagccgtggaacgcgcgggcgattaacgaccgcatcggatttaccgccgccacgtcgcagtccatctgggccgatcacccggaaaagatcctcggcacccgacgcgactgggtggcgaaaaatccgcacaccgcacgggcgctggtgagcgccgtgatggaagccgcgcgctggatcgaggcgtcagcggaaaacaaacgcgaaaccgcgcagatcctctcgcgccgcgcctggctcaactgcaaggaacagtatctcaccggacgtatgcttggcgagtacgacaacggggtcggtcagcgctggcaggatgcgcacccgatccgtttcttcaacgagggtgccgtgagctacccgtatctctcagacgggatgtggttcttaacccagttccgccgctggggcttgctcaacgccgcgccggattacgcgggcattgcacagcgcattaaccagaccgcggtctggcaggatgccgcgaccgccgtgggcggcatgtccacaccgtcatcaccatatcgcagcagcaccctgatggacggcaccgtctggaacggcaccgatccggaagggtacgccaaccgcttcgccattcaccgtaaaggggcctga

SEQ ID NO: 114491 - DNA, 879 bp, Enterobacter cloacae
atgcagcatctgcaaaatacaaaaccacaagagacgtcagagagcggggaagtgattgtcctgcctccgctacaggttcgccgtcgtgcgccagcgtttacgcgtcggatgaatgattttttacagcgcgtcatcccggcgctgctcggtctcggcctgctggtggtgctctggcagctggcagcgataaacagtaaaggctttccgacgccgctcagcacgctcgattcggccatgaccctgtttgccgatccgttttatcgcgacgggccaaacgatatgggcattggctggaacgtgctggcgtcgttgcagcgcgtcgccatcggcttcggtctggcggcgatggcgggcattccgctgggctttttgattggccgcttcacctttttctcgcgcatgttcaacccgctgatcgcgctcctgcgtccggtcagcccgctggcctggctgcctatcggcctgctgctgttccagaaagcggagcctgcatcgagctggaccatttttatctgctccatctggccgatggtgatcaacaccgctgaaggggtacgccgtattccgcaggactacctcaacgtggcccgggtgttgcaactctcagagtggaccatcatgcgccgcattcttttccccgccgtgctgcctgcggtgctgaccggggtacgtctttccattggcattgcctggctggtgattgtcgccgccgagatgctcaccggaggtttaggcattggattctggatctggaatgagtggaacaacctcaacgtcgaaaacattctcatcgccatcgtcatcattggcgtggtcgggttgctgctggagcaggggctgatgctgatcgcccgtcgctttagctggcaggaaaaataa

SEQ ID NO: 114492 - DNA, 789 bp, Enterobacter cloacae
atgaaaccgttaattcaggtccaggccgtgagccagcgtttttccaccgccagcggcgagtttctggcgctgcaaaacgtctcttttgatatccacgagggcgaaaccgtcagtctgattggtcactccggctgcggcaagtcgacgctgttaaacctgatcgccgggatcacgctgccgacggaaggcgggctgatttgcgacaaccgcgaaatcgccgggccggggccagagcgcgcggtggtgttccagaaccattcgctgctgccgtggttaacctgcttcgacaacgtggcgctggcggtggatcaggtcttccgtcacaccatgagtaaggccgagcgcaaagcgtggattgaacacaacctcgaccgggtgcagatgggccacgcgctgcataagcgcccaggggagatctccggcggcatgaagcagcgcgtcgggattgcccgggcgctggcgatgaagccgaaagtgctgctgatggatgagccgtttggcgcgctcgatgcgttgacgcgtgcccatcttcaggattcggtgatgcagatccagcaggcgctgaacaccaccatcgtgctcatcacacacgacgtggacgaggcggtactgctctctgaccgcgtactgatgatgaccaacggcccggcggccaccgtgggtgagatcctgcgcgtcgatctgccgcgcccgcgcaaccgggtgcagctggcggacgacagccgctatcaccacatgcgccagcagatcctccatttcctctacgaaaaacagccgaaagcggcgtaa

SEQ ID NO: 114493 - DNA, 3987 bp, Enterobacter cloacae
atgcgactggtcattatcggtaatggtatggcggcagcccggctgattgcgtcgctcaccgggcgtgttcccggtcgtttcgctgtcaccgtcatcggtgacgagccggagcaggcgtacaaccgcatccagctttcgccggtgctgggtggcgaaaagcaggcggagcacatctgtctgcacgatgaagactggtacacggcacgaggcgtgacggtgctgcgaggagaaaaggcgctcgcagtagacgtcaacgcgcgtgaagtgcatacctctgctcgcacgctgggctgggatgcgctggtgtttgccaccgggtctacccctgtcgtgccgccgatccccgggggcgatgcgccgcatgtgttcacctttcgcaccctggcagagacccgcgccatccggaacctctccggaccggcggtagtgctgggcggcggcgtactcggcgtggaggccgcggcagcgctggcgcgcaacggtgacaacgtcacgctcgtgcatcgcggtccgtggctgatggaacagcagctggatcagcaggcgggactgctgctggaagaggcgctggcggtgcggggcgtacgctgtgaactcgcctccggcatcaccgccatcgctgacgatgccgtgacgttgctcgacggacgccgcatcgccgccacgcgcgtggtgctggccacgggcgtgcagcccaacgttgcgctggcaaaagccagcggcattcgctgcgcgcgcggcatcgtggtggatcagcagatgcaaacctccgtgccggatacctacgccatcggcgagtgctgcgaaattgacggccagacgtttggcctggtcgccccctgtctggcgcaggcggatattcttgccgcgcggctggccggggaggtcaccgcgccgtttaccctgaccgacaacggcgtgcgccttaaggtgaccggcgtggcgctgttcagcctcggacgcgcgacggcgcaggcggacgatgtggtctggagttcatgggatccgctcacccgtcactatcgacgtttactgatccatcagggggcgctggctggcgtgctgctgatgggtgactgccgcagcgcggcaacctttaccgatttactggcaacggctgcgcccgcccacgcggactggctgttcgatcgtttcacaacgcaaccgcaggttgcaggacagaacgctatgacaaaacctactctggtggtggttgggcacggtatggtcggccatcatttcctcgaagactgcgttaaccgcaatttgcatcagcagtatcagattattgtttttggcgaagagcgctatgccgcctatgaccgcgtgcatctgtcggaatattttggcggacgcagcgcggactcgctctcgctggtggcgggggcgttctttgccgataacggcattgagctgcgcctctcgcagcagatcgtcgctatcgatcgtgatgcacacgtagtgcgcaccgccagtggccatgagacccactgggacaaactggtgctggcgaccggctcgtacccgttcgtcccgcccgttccgggcaacgatctgccggggtgttttgtctaccgcaccctcgacgatctggacaacattgcggcccatgcggcaggctctcgccgcggtgtggtgattggcggcggcctgctggggctggaggcggcaaatgcgcttaagcagctcgggctggaaactcacgtggtggagtttgcgccgaacctgatggcggtgcagctcgacagcgacggcgcggcaatgctgcgcaagaaaattgaggcgctgggcgtaggagtacacaccagtaaatcgacgacggagattgccaccgcagacaacgggctggtgctgcgctttgccgatggcgagcagctggaaacggacatggtggtcttctctgccggtattcggccgcaggacgcgctggcgcgcagcagcgggctggctgtcggcgagcgcggcgggatctgcattgacgacggctgccggacctccgatcaggacgtgcttgccatcggcgaatgcgcgctgtgggaggggaaaatctttggcctggtggcaccaggctaccagatggcgcgcgtggccgccgctgtgctggcgggtgaggagaagcgcttcaccggcgcggatatgagtaccaaactcaagttgctgggcgtggatgtggcgtcgtttggcgatgcccacgggcgcacgccgggggcgctgagctaccagtggacgcacgggccgcagcaaatctacaaaaagattgtggtcagccacgacagcaaaaccctgctgggtggcgtgctggtgggcgatgccagcgaatacgccacgctggtgcagatgatgctcaacggcatcagcctgccaaaagaaccggaaacgctgatcttacccgcgtcgtcaggcggcgcgccgaaagcgctgggcgtggcggcgctgccggaaagcgcgcagatctgttcgtgtcataacgtcagcaaaggggatatctgccaggcggtaagcgcgggtgcgacggatatcggcgccattaagcagtgcaccaaagcggcgaccggctgcggaggctgtagcgcgctggtgaagcaggtgatggagttccagcttgcggagcagggcgtggaggtgaagaaagatatctgcgaacacttcccgtactcgcgtcaggagatttaccacctggtgcgcgtcaaccatatccgcaccttcgaccagcttatcagccgctacggtcaggggcacggatgcgagatctgtaagccgctggtggggtcggtattggcttcctgctggaacgagtatctgctgaaaccggcgcatctgccgttgcaggacaccaacgaccgctatttcgccaatattcagaaggacggaacctactccatcgtcccgcggatgcctgcgggtgaagtgaccgccgacgggctgatcgccatcggccagatcgcgaaacgctatagcctttacagcaaaattaccggcgggcagcgtattgacctgtttggcgccacgctcgagcagttgcctgaaatctggcaggcgctggtagaggccgggtttgagaccggacatgcttacgggaaatccctgcgcacggtgaaatcctgcgtcgggtcgacctggtgccgctacggcgtgcaggattccaccggcctcgcggtcaggctggagcaccgctacaaggggctgcgcgcgccgcacaaaatcaaaatggcggtctccggctgtacccgtgagtgcgcagaggcgcagagcaaagacgtaggggtgattgccacggacaaaggctggaacctctatctgtgcggcaacggcgggatgaagccgcgccacgcgaatctcttcgccagcgatctggacgacgaaacgctgatccgcaccgttgaccgtttcctgatgttctacattcgcacggcagatcgtctgcaacgcaccagtacctggatggataacctggaaggcggcctcgactatctgcgcgaggtgatcctcaacgacagcctggggatcgcccacgagctggagcaggagatggcccgggtggtggagacttaccagtgcgaatggcaaaccacccttaacgatcctgaccgcctggcgctgttccgcaccgcggtgaacgtccccgccgcggaggagaacaagcgctggcaggaaatttgtaatatcgacgagatcccggagcaggcgggcattggcgcgcatcttgggcgcaaaccgattgcgctgttccgctttggcaaaaccgtttatgccctcgacgatcgggagccgggcagccgcgcgaacgtgctctcacgcggcatcctcggcgatgcggcgggggaaccggtggtgatctcgccgctctacaagcaacgtattcgtctgcgcgacgggtgtcaggctgagagcggggcgcctgcggtgcgtgcctggccggtaaaaattgaaaacggcaaggtgtgggttggaaatgaagagctggtgatgcgcgcggaggcctcatga

SEQ ID NO: 114494 - DNA, 987 bp, Enterobacter cloacae
  misc_feature (938)..(947): n is a, c, g, or t
atgacggaaacccggacaacgtgcccttactgcggggtgggctgcggcgtggtcgccagcgcagacggtgaaaaggtgagcattcggggggatgaaactcatccggcgaatttcggtcgtctgtgcgtaaaaggatccgcccttggggaaaccacggggctacagggacgactgctgcgcccggttgtcgatggccgggaggtggcatggccgcaggcgctgggcgaagcgggcgagcggctgcggaacattatcaacgaatgggggccgcaggcggtggcgttttatgcctccggccagctgttgaccgaggattactatgccgccaacaagctgatgaaaggctttatcggggcggcgaacattgataccaactcgcggctgtgcatgtcatcggcggtggtgggctacaaacgcgccttcggtgaggacgtggtgccgtgcagctacgaggacgtggaaaacagcgatctggtggtactcgttggctcgaacgcggcctggacgcatccggtgctgtatcagcggctggtgcaggcaaaacacaacaatccgcagatgaaagtggtcgtgatcgatccgcgtaaaaccgccacctgcgatatcgccgatctccacctcgcgctcagacccggcagtgacgccgggctgtttgtggggttgctcaatctgattcaggggcgcggcgagtggccgatccctcgcgtggcggcgttttgcgatctgccttcagacgagattggcaccttctacgactggtttgtcaccgcgcctcgcgcgatcacgctctacaccatggggatcaaccagtcctccagcggcagcgacaagtgcaacgccatcattaacgtgcatcttgccagcggaaagttcaaccgtcctggctgcggcccgttttcgctgaccggacaaccaaatgccatgggcgggcgggaagnnnnnnnnnngaagtggggggactggcgaatcagctggcggcgcacatga

SEQ ID NO: 114495 - DNA, 1509 bp, Enterobacter cloacae
atgaacttcgagccggacgatctcgcgcgcgtggcgcgtttctggggaacggaacggctggcgcagaccccgggcctgatggcggtggaactgtttgacgccattgcccgcggcgaggtgaaggcggtgtggatcatgggcaccaaccctgccgtgtcacttcccgacagccacgcggtgtgccaggcgctggcggcctgcccgctggtcatggtatctgaggtgatgcaggagacggacaccagccggtttgcccatatccgttttcccgccctgggctggggcgagaaaaacggcacggtgaccaattcagaacgccgtatctcccgccagcgcgcctttctgcctgcgccgggcgaggccagaccggactggtggatcatcgcccggatcgcagaccagctcggttatggcgatgccttcgcctgggaacaccctcaggagatattttgtgaacatgcggcgctgacggcgtttgagaataacggcgaacgggcgctaaacctgcgcgaactggcgtcgctgtcgcgagaggcgtgggatgagctggcgccgtatcagtggcatgccggtgatttcccgcaaagaacgcttgttccggttgacccctccccgcatggggcaggcgtcgacgaattgtaccccttgatactgaataccgggcggatccgcgatcagtggcacaccatgacccgcacggggtatgttccgcgcctgatgcagcatatcgatgagccttttgttgagacgaacgcaaccgatgcggcgcgcgctgggctgactgacggccagctggcgcgggtaagttccccgcgcggagtgatggttgccagagtacgtatctccaccgcgcagcgtgcaggcgagctgtttgcgccgatgcactggaacgcgcaatttgcccgacagggtaaggtcaatgcgctggtggaagggcgggttgatgccgggtccggccagccggagagtaaacaaaccgcggtgaggatcataccctggctacccgcctggcagggtgaactgtatgcccgcgagctgccagcgctgccgccgtcggtctgctggtggcgtaaagcctcacgtctgacggtggcgggggagcagccgttgctgtcgtggatcatggcgtacgccagcggtcggggctggcagttacaagtggcacagacgggagaacgcagcagcgtgctcgcctggcatcacgatgagctgatgctgggctactgggagggccatacgctgccggcgctggcgcatgcgtttattgaagaagcctttgctgctgcgcccgtccaacttgctgaacgccatgcgctgctgcacgggcaacggccggacgaagatgccgatcccgggcgaattatctgtagctgcttcagcgtgggtgaaaatacgatacgtaaggcaatagccggaggctgtgattctgccccagcgctgggcgtgaagctgcgctgcggcacgaactgtggttcctgcgtgccggagctgaaagcgctgttgggataa

SEQ ID NO: 114496 - DNA, 1419 bp, Enterobacter cloacae
ttgacgacgttgaaggctgtatcgtcccgcatccgttttttgctgttactccccctttttacggctggagccgttcatggtgcgccgaaatccttcgtgcagcaggcgcaaaatccgtttgataacaacggcgatagtctgccagatctcggcatggcgcaaccgaccagcgaaggcgaaaagcatctggctgaaatggctaaggccttcggtgaagccagtatgaccgataacggcctgacggccgggcagcaggcgcgacagttcgcgtttggcaaggtgcgggatgccgtgagcggggaagtcaacgagcagattgaatcctggctttcaccctggggaaacgccaacgtcaatgtgctggtggatgacgacggcaactttaacggcagcagcggaaactggtttatcccctggaacgacaacacccgctatctgagctggagccagcttgggctgacgcagcagacagacgggctggtgagtaacgtcggggcaggtcagcgctgggttgccggaaactggctgctgggctacaacactttttacgacaacctgctggaagacaacctgcaacgtgccgggctgggcgcagaggcgtggggtgaaaacctgcgcctgtcggccaattactaccagccgttcgctggctggcagccgcgttccgacatccgcgagcagcgcatggcgcgcgggtacgacgtaacggccaaagcctggcttccctggtttcaccacctgaacaccagcgtcagctttgaacagtattttggcgataacgtcgatctgtttaacagcggtacggggtatcacaacccggttgcggtcaacctggggctgaactatacccccgtaccgctggtcaccctgacggctgcccataagcagggggagagcggcgttagccagaataacctcgggctgaagctcaactatcgttttggcgtgccgctggcgaaacagctttccgccggggaagtggcggcgacgcgctcgctgcgggggagccgctatgattcacccgatcgcgataatctgcccgtgatggaattccgtcagcgcaaaaccctctcggtatatctggccacgccgccgtgggatcttaagccaggcgaaacggtgatgctgaagctgcaaattcgcagcacgcacggtatccggcagatccactggctgggtgatacccaggcgctcagcctgacctcaccggcaaacggcaacagcagcgatggctggagtgtgatcatgcctgtatgggatgattcagaaggggcgaaaaacgcatggcggcttacggccgtggtggaagataaggatgggcagcgtgtctcctccaatgagatcacgctttccgtggtgcaaccgctcgtcgcaatgcctgccgacgatccacggtggaagttgctgccggatgagtaa

SEQ ID NO: 114497 - DNA, 651 bp, Enterobacter cloacae
atgactaatcaggaaccggcatctatcctgttgattgacgatcatccgatgctgcgcactggcgttaaacagcttgtcagcatggcgccagatatcaccgtcgtcggggaagccagtaacggcgaacagggtattgaacttgccgaatcgctcgatcctgatttgatcttgctcgatctcaacatgccgggcatgaatggcctggaaaccctcgacaagctgcgggagaaatccctctctggccgggtggtggtcttcagcgtctcaaaccatgaagaagacgtggtcaccgccctcaagcgaggggcagacggctatctgctgaaagatatggagccggaagatctgctcaaggcgctgcaacaggctgccgcaggcgagatggtgctgagtgaagcgttaacgccggtactggccgccagcctgcgtgcgaaccgcgccacgtctgatcgtgacgtcagccagttgaccccgcgtgagcgtgacattctgaagctgattgcccaggggctgccgaacaaaatgatcgcccgccgtctggacatcaccgagagcacggtcaaagtgcatgtcaaacacatgctgaaaaaaatgaagttaaaatcccgcgtcgaagccgccgtctgggtgcatcaggagcgcattttttaa

SEQ ID NO: 114498 - DNA, 1797 bp, Enterobacter cloacae
atgttaaaaagatgtttatctccgctgacgctggttaaccagctggcgcttattgttctgctgtccaccgctatcggcgtgaccggcatggctatttctggctggctggtacagggtgtacagggtaacgcgcatgccatcaacgaggcaggctcgctacgtatgcagagttaccggctgctggcgtcggtgccgctgacgcaggctgaccaaccgcttatcgacgaaatggagcgtaccgcattcagccctgaactggaaagagccgccatccgtgacggtcagcaatctcagcttaaggcgcttcagggctactggcatacccaactggagcccggattaaagcgggcggaagaccgggaaacggtcgcccgggatgtcgccgggtttgtatcacgcatcgatcatcttgtctcctcgttcgatcgcaccacggagttacgcattgaccgtgtggtgatggttcaccgcgcaatggcgctgtttatgggtttgctgctgattttcacggttatctggctgcgcgcgcggttgcttaacccctggaaacagctcctggcgatggcccgcgccgtcacacagcgcgattttacccagcgcacgcacatcagcgggcgcaacgaaatggcgatgctcggcgaggcgctcaacaccatgtcggcagagctatcagaaagctacgcggtactggaacaacgcgtccaggagaaaaccgccgggcttgagcagaaaaacgagatcctctctttcctctggcaggcaaaccgtcgcctgcatatgcaggtcccgctttgcgaacgtctctcgccggtactgaacggcctgcaaaacctgactctgctccacgatcttgagctacgggtttacgacgttgaagatgaggaaaaccatcaggaatttacctgtcagtcggacatctcctgcgacgataaagggtgtcatctgtgcccgcgcggcttgccgccgcttaccaccagcggcacgaccctcaagtggcggctgatggacagccatacccagtacggtattttgctggccaccctgcccgccggacgtcacctgagccacgaccagcagcagctggtcgatacgcttgttgagcagctcacggccacgctggcgctcgaccgccaccaggagaaacagcagcagctgatcgtgatggaggagcgtgccaccatcgcccgcgagctgcacgactccatcgcccagtccctctcctgcatgaagatgcaggtgagctgcctgcaaatgcaggacgaaggcatgcccgagagcagcaaacagctgctcagccagatccgcaacgagcttaacacctcgtgggttcagcttcgcgagctgctgaccaccttccgtttgcagctcaccgagccggggctgcgccctgcgctggagtccagctgtcaggagtttagtgcccggctgggcttcccggtgaaactggattaccagttgccaccgcgttttgttccctctcaccaggcgatccatttgctgcaaattgcccgtgaagccctgagcaacgtgctcaagcatgccgaggcgacggccgtcacggtcaccgtcagctgccaggataatcaggtgaagctcagggttcaggataacggccgcggcgtgccggaaaatgccgaacgaacgaaccattatggtttaattatcatgcgagaccgcgcgcaaagcctgcgcggtgattgccaggttcgccggggagagtcaggtggcaccgaagttgtggtcacctttatacccgaaaagcccctcataactgctcaaggagaaaaccatgactaa

SEQ ID NO: 114499 - DNA, 1398 bp, Enterobacter cloacae
atgagtcactcttccgctcccgaaagggaaactggtgccgttattacagactggcgtccagaggatccggcgttctggcaacagcgcggccaccgtgtagcaagtcgtaatctgtggatttccgttccatgtctgttactggcgttttgcgtctggatgttgtttagtgcggttgcggttaacctgccaaaagtgggctttacctttaccaccgatcagctgtttatgttgaccgcgttgccgtcgctttcaggcgcactgctgcgcgttccttacgcgtttatggtgccggtctttggcggtcgtcgctggacggttttcagtaccgggatcatgatcgtaccgtgcgtgtggctcggttttgcggtgcaggatacctccacaccgtttagcgtattcgtgattatctctctgctgtgcggttttgcgggggcgaactttgcgtccagtatggcaaacatcagcttcttcttcccgaaagcgaagcagggtggtgcgctgggcattaacggcggcctcggtaatatgggcgtgagcgtgatgcagctgattgccccgctggcgatctctgtctccatctttgcggcctttggcggcggcggtgtgacgcagcccgacggttccgtgctgttcctgcaaaacgcctcctggatttgggtaccgttcctggtggtctttaccctggcggcgtggttcttcatgaacgatctgtccgcgtccaaagcgtcactgagcgagcagctgccggtgctgaagcgtggccacctgtgggtgatggcgctgctgtatctggcgaccttcggctcgttcatcggtttctccgcaggctttgccatgctgtctaaaacccagttcccggacgtgcagatccttcagtttgccttcttcggtccgtttatcggcgcgctggcacgttcgctgggcgggatgatctccgaccgtctggggggaacgcgcgttacgctggtgaactttgttgtgatggccatcttctgtgcgctgctgttcctgacgctgcctgcgggtggtgaggggggtaacttctttgccttcttcggcgtcttcatggtgctgttcctgaccgccgggctgggcagtgcgtctactttccagatgatctctgtcatcttccgcaagctgaccatggaccgcgtgaaagcgcagggcgggagcgacgagcaggcaatgcgtgaagctgccaccgataccgctgcggcgcttgggtttatctctgcgattggcgcgattggcggcttctttattccaaaagcgttcggtatctcactggatctgaccggctctccggcgggtgcgatgaaggtattcctcgtcttctatatcgcctgcgtggtcatcacgtggctggtatatggccgtaataccaagaaaaacaagtaa

SEQ ID NO: 114500 - DNA, 3744 bp, Enterobacter cloacae
atgagcaaatttttggaccggtttcgctacttcaaacagaagggtgaaacttttgccgatgggcacggccaggttctggataccaaccgggactgggaagacggttaccgtcaacgctggcagcatgacaaagttgtccgttctacccacggcgtaaactgcactggctcatgtagctggaagattttcgttaaaaacggtctggtgacctgggaaatgcagcagaccgattatccgcgtacccgtccggatatgccgaaccacgagccgcgcggctgcccgcgtggggccagctactcctggtatctctacagcgctaaccgtctgaaatacccgctgatgcgtaaacgcctgatgaaaatgtggcgtgaagcgaaagtgcagcacagcgatccggttgatgcctgggcctccattattgaagatgccgacaaagcgaaaagcttcaaacaggcgcgtggtcgcggtggtttcgttcgttcttcctggaaagaggtgaacgagctgattgcggcttctaacgtctacaccgtgaaaacctacggtcctgaccgtgtggcaggcttctcgccaatcccggcgatgtcgatggtctcttacgcctccggcgcgcgctacctgtcactcatcggcggtacctgcctgagcttctacgactggtactgcgacctgccgccagcgtcgcctcagacctggggcgagcagaccgacgtgccggagtccgctgactggtacaactccagctatatcatcgcctggggctctaacgttccgcagacccgtaccccggatgcgcacttctttaccgaagtacgttacaaagggaccaaaaccgtcgccgtgaccccggactacgccgaaatcgccaaactgtgcgacctgtggctggcgccgaaacagggtaccgatgccgcaatggcgctggcgatgggccacgtcatgctgcgtgaattccacctcgacaagccaagccagtatttcaccgattacgtgcgtcgctataccgacatgccaatgctggtgatgctcgaagagcgtgacggctattacgccgcaggccgtatgctgcgtgccgcggatctggtggatgcgctgggtcaggaaaacaacccggagtggaaaacggtcgcctgcaacagcaacggcgagctggtggcgccaaacggttctatcggcttccgctggggcgaaaaaggcaaatggaacctggagcagcgtaacggcaccacgggtgaagagacggagctgcgtctcagcatgctgggcagccaggatgagatcgccgatgtcggcttcccgtactttggtggtgaaggttccgagcacttcaacaaggttgagttgcaaaacgttctgatgcacaagctgccggtgaagcgcctgcaactggcggacggttctactgctctggtcactaccgtctacgatctgaccatggcgaactacggcctggagcgcggcctgaacgacgaaaactgcgcgaccagctatgatgacgtgaaggcttataccccagcctgggcggagcagatcaccggtgtgccacgcgcccagatcacccgtatcgcccgcgaatttgcggaaaacgccgacaaaacccacggtcgctccatgatcatcgtcggtgccggtctgaaccactggtatcacctcgatatgaactatcgcggcctgatcaacatgctgatcttctgcggctgcgtcgggcagagcggcggcggctgggcgcactacgtgggccaggaaaaactgcgtccgcagaccggctggcaaccgctggcgtttgcccttgactggcagcgtccggctcgtcacatgaacagcacctcctacttctataaccactccagccagtggcgctacgagacggttaccgcccaggaactgctgtcgccgatggcggataaatcccgctacagcggccacctgattgacttcaacgtgcgcgctgagcgtatgggctggctgccgtctgcgccgcagctgggtacgaacccgctgcgtattgcggaagcggcgaagaaagcggacatgtcaccggtggactacaccgttaaatccctcaaagacggctcaatccgcttcgcggcagaacagccggagaacggtaaaaaccatccgcgtaacctgttcatctggcgctctaacctgctgggttcttccggtaaaggccacgagtacatgctgaaatacctgctcggtaccgaaaacggtattcagggtaaagatctcggcaagcagggcggcgtaaagccggaagaggtggagtggaaagacaacggtctcgacggcaagttggatctggtggtgacgctggacttccgtctgtccagtacctgcctgtactccgacatcgtgctgcctactgccacctggtacgaaaaagacgatatgaatacgtcggatatgcatccgtttattcatccgctgtctgcggccgttgacccggcatgggaatcaaaaagcgactgggaaatctacaaagacatcgcgaagaaattctctgaagtctgtgtagggcacctgggcaaagagaccgacgtggtgacgctgccaatccagcacgactccgctgccgaactggctcagccgctggacgtgaaggactggaaaaaaggcgagtgcgatctgatcccgggcgtaaccgcgccgcacattattccggttgaacgtgattacccggcaacttacgaacgctttacctctatcggcccgctgatggagaagatcggtaacggcggtaaaggcatcgcctggaacacccagagcgaaatggatctgctgcgcaagctcaattacaccaaagcagacggcccggcgaaaggccagccgatgctgaacacggcaattgatgcggcagagatgatcctgaccctggccccggaaaccaacggccacgtggcggtgaaagcctgggcggccctgagcgagtttaccggtcgtgaccacacgcacctggcgaagaataaagaggaagagaaaatccgcttccgcgatattcaggcccagccgcgcaagattatctccagcccgacctggtctggcctcgaagatgaacatgtgtcctataacgccggatacaccaacgttcacgagctgatcccatggcgcacgctttctggccgtcagtctctgtatcaggatcaccagtggatgcgtgacttcggtgaaagcctgctggtttaccgtccgccaatcgacacccgctccgtgaaagcggtgatgggcgcgaaatcgaacggtaaccctgagaaggcgctgaacttcctgacgccgcaccagaagtggggtatccactccacctacagcgacaacctgctgatgctgacgctgtcgcgcggggggccaatcgtctggatgagcgaagcggacgccaaagatctgggtatcgaagataacgactggatcgaagtgttcaacagcaacggcgccctgacggcacgtgcggtggtgagccagcgtgtaccggccgggatgaccatgatgtaccacgcgcaggaacgtatcgttaacctgccggggtctgagatcaccgagcagcgcggcggtattcacaactccgtgacccgtattacgccgaagccgacccacatgatcggtggttatgcccagctggcctacggctttaactactacggcaccgtaggatcgaaccgcgatgagttcgtggtggtacgtaagatgaagaatattaactggttagatggcgaaggtaatgaccaggtacaggagagcgtaaaatga

SEQ ID NO: 114501 - DNA, 1536 bp, Enterobacter cloacae
atgaaaattcgttcacaagtcggcatggtgctgaatctggataaatgcatcggctgtcatacctgctcagtcacctgtaaaaacgtctggaccagccgtgaaggtatggagtacgcctggttcaacaacgtggaaagtaagccgggcaccggcttcccgaccgactgggaaaaccaggagaagtggaagggcggctggatccgtaaaatcaacggcaaactgcaaccgcgcatgggtaaccgtgccatgttgctgggaaaaatcttcgctaacccgcatctgccgggcattgatgattactacgagccgtttgattacgactaccagaatctgcacaacgcgccggaaagcaaacaccagccgatcgcccgtcctcgctcgctgatcaccggccagcgcatggacaaaattaccagcggtccaaactgggaagagattctgggcggcgagtttgaaaaacgcgccaaagaccagaacttcgagaacatgcagaaggcgatgtacggccagttcgaaaacaccttcatgatgtacctgccgcgcctgtgcgaacactgccttaacccggcgtgtgtggcgacctgcccaagcggcgccatctacaagcgtgaagaagatggcattgtgctgatcgaccaggacaagtgccgcggctggcgtatgtgcatcaccggctgcccgtacaaaaaaatctacttcaactggaagagcggtaagtctgagaagtgcatcttctgctacccgcgtatcgaagccggtatgccgacagtctgctcagaaagctgcgtaggtcgtatccgctacctcggcgtgctgctgtacgacgcggacgcgattgaaaatgccgcaagcaccgagaacgagaaagatctgtatcagcgtcagctggacgtcttcctcgatccaaacgatccgaaggttattgagcaggcgctgaaagacggtattccgcagagcgtgattgacgccgcacagcagtccccggtgtacaaaatggcgatggactggaagctggccctgccgctgcacccggaataccgcacgctgccgatggtctggtacgtgccgccactgtctccgattcagtctgcggcggacgcgggtgaactgggcagcaacggcattctgccggacgtggaaagcctgcgtatcccggttcagtatctggccaacctgctcaccgcaggggatacccagccggtactgctcgcgctgaaacgtatgctggcgatgcgtcacttcaaacgtgccgaaaccgttgacggcgttaacgatacccgcgcgctggaggaggttggtctgaccgaagcgcaggcgcaggagatgtaccgctatctggcaatcgctaactacgaagatcgtttcgtggtgccgagcagccaccgtgaactggctcgcgaggccttcccggagaaaagtgggtgtggctttacctttggcgacggttgccacgggtcagacagcaaattcaacctgttcaacagccgccgcattgacgcgatggatgtgaccagcaaaacggagccgcaccaatga

SEQ ID NO: 114502 - DNA, 711 bp, Enterobacter cloacae
atgattgaactcgtcattgtttcgcgtctgctcgagtaccctgatgctgcgcttgtgcagcatcaacaggaactctttgatgcactcgcgtcatctgaaaacctggataaagaggatgcccagaagctgggcgttttcctccgcgatctgctggcacgcgatcttcttgatgcgcaggcggactacagccagctgtttgaccggggccgtgccacgtctctgctgctgttcgaacacgttcacggtgaatcccgcgaccgtggtcaggcgatggtggatctgatgggccagtacgagcagcacggtttgcaactcgacagccgcgagctgccggatcacctgccgctgtatctggaatatctggcgcagttgccgaaagaggaagcgctgggcgggttgcaggacattgctcccattctggcgttgctcggcgcgcgtctccagcaacgtgagagcagctatgcagtcctgttcgatctgctggtgaaactggctaacgcctcggttgacagtcaaaaagtggcggaaaaaatcgcggatgaagcccgtgacgataccccacaagcactggatgccgtctgggaagaggggcaggtgaaattctttgctgaccagagctgtggcgaatctgaaatctccgcgcatcagcgtcgttttgccggagcggtggctccgcaatatttgaatatctctaacggaggacagcactaa

SEQ ID NO: 114503 - DNA, 678 bp, Enterobacter cloacae
atgcacttcctgaatatgttcttctttgacatttacccgtatatcgcgggcaccgtattcctggtgggaagctggctgcgttatgactatggccagtacacctggcgtgctgcctccagccagatgctggatcgtaaagggatgaacctggcgtcaaacctgttccacatcgggattttggggattttcgccggtcacttcctggggatgctgaccccgcactggatgtacgaagcgtggctgccgattgacgtgaagcagaagatggcgatgattgccggcggcgcctgcggcgtgatgaccctggtgggtggtctgttgctgctgaaacgccgtctgttcaacccacgcgtgcgggctaccacgaccggagcggacatcctgatcctctccctgctgatggtgcagtgtgcgcttggtctgctgaccattccgttctctgcgcagcatatggacggcagcgaaatgatgaagctggtgggatgggcgcagtctgtcgtgaccttccgcgggggcgcttctgagcatctggacggcgtggcgtttatcttccgcgttcacctggtgctgggtatgaccctgtttgtgctgttcccgttctctcgcctggtgcacatctggagtgcgccggtggagtacctgacgcgcaaatatcagattgtgcgtgctcgtcgctga

SEQ ID NO: 114504 - DNA, 843 bp, Enterobacter cloacae
atgcaatcattacaacgtaaagttctgcgcactatctgtcccgatcaaaaagggctgatcgcacgaattaccaacatttgctacaagcatgaactgaatatcgtgcagaacaacgagttcgttgaccaccgtaccggtcgcttctttatgcgtaccgaactggaaggcattttcaacgacacaaccctgcttgccgatctggacagcgccctgccggaaggctcggtgcgtgagcttaacccggcgggccgtcgccgcattgtcattctggtcaccaaagaggcgcactgcctgggcgatctgctgatgaaagccaactacggtggcctggacgtcgaaattgccgccgtcattggcaaccacgagacgctgcgtacgctggttgaacgtttcgacattccgtttgaactggtcagtcacgaaggccatacccgtgaagagcacgacaacctgatggctgctgcgattgaagcgcataacccggactacgtggtgctggcgaaatatatgcgcgtgctaacgccatccttcgtggcgcgcttcccgaacaagattatcaacatccaccactccttcctgcccgcctttattggcgcgcgtccgtatcaccaggcatacgagcgtggggtgaagatcattggcgcaaccgcgcactacgtgaatgacaatctggacgaaggcccaatcatcatgcaggacgtaattcacgtggatcacacctacacggcagaagatatgatgcgtgctggccgtgacgttgagaagaacgtactgagccgtgcgctgtatcaggtacttgcccagcgcgtctttgtgtacggcaacagaacgattattctttaa

SEQ ID NO: 114505 - DNA, 465 bp, Enterobacter cloacae
gtgtctcaactctgcccctgtggtagcgctctggagtatagcctatgttgccagcgatatctttctggcgagcaggttgcaccagacccgtcacaccttatgcgctcgcggtatactgcttttgtgatcaaaaacgcagactacctgattaaaacctggcatccgtcctgccatgctgccgattttcgccaagagattgaagccggatttgccaacaccgtctggctgggcctcaccgtctttgaagccgctcccggccgcgatgccaacgagggctatgtcagttttgtcgcccgctttagcgaacaaaacaaacccggcgccatcattgaacgctcacggttcttaaaggacagcgggcaatggtattatattgacggcacacgtccgcaattcggtcgtaacgatccctgcccctgtggttcaggaaaaaaatttaaaaagtgttgcggcagtaatgcctga

SEQ ID NO: 114506 - DNA, 903 bp, Enterobacter cloacae
atgagaaaggtaaaaattggactggcgttgggctcaggtgcagcccggggttggtcacatattggcgttatcaataccttaaaccagatggggattgacgttgatattgtcgcaggatgttctatcgggtcgctggtcggatccgcgtacgcctgcggtaagcttccggagcttgaaagctgggtgcgctccttcagttactgggatgtgctgcgcctgatggatctctcctggcagcgtggcggcctgctgcgcggcgaacgcgtgttcaatcagtttcgtaagataatgcccctcgctgacttcagccactgccaaatgcctttcggggccgttgcaaccaacctcagtacgggcagggagttatggctcactgaaggggatatacatctcgccgttcgtgcatcctgtagcatgccggggttaatggcgcctgtgcctcacaacggctactggctcgttgatgggggcgtagtgaatcctgtccctgtctctctgacgcgcgccatgggggcggatatcgttattgccgtggatttacagcacgacgcacaccttatgcagcaggatttgatgccggttaatcttcagagcgatgacacggaagaagagaaacttgcctggcatgcgcgattacgcggcagaatagggcgcctgaccgcccgtcgcgcggtgaccgcgccgaacgccattgaaatcatgacgacctctattcaaatccttgagaatcgcctgaagcgaaaccgtatggctggcgatcctccggatattcttattcaaccctattgtccacaaatctctacccttgatttccaccgggctgaggccgccatagcagcgggctcgttagccgtcgaaaagaaaatagatgaactgttgccttttgtgcgtacagcacgttga

SEQ ID NO: 114507 - DNA, 1014 bp, Enterobacter cloacae
atgacacagccattggccggaaaacatattttgatagtagaagacgagcccgttttccgatcgctactggattcgtggttatcctcactgggtgcaaccacgtcccttgccgaagatggcgtcgaggcactggaaaaaatggccagcatggcgcctgatctgatgatctgcgaccttgaaatgccgcgcatggacggattaatgctggtggaaaacctgcgtaatgaaggttatcagacaccgatactggtgatctcggcaaccgaaaatatggcggatattgctaaggcgttgcgtttaggtgtgcaggatattctgctcaaaccggttaaagatttgaaccgtctgcgtgaaacggtgttggcctgcctgtatcccaatatgtttaattcccgggtggaagaagaagaacgtcttttccaggactgggatgctttagtcagtaatccgctcgcggccgcgaagctgcttcaggaacttcagccgccggtgcagcaaaatatctctcattgcagagtaaattatcgccagctggtagcggctgaccagcctgggctggtgctggatattgcgccgttatcagattctgacctcgctttttattgcctggatgttacccgggcgggagataacggcgttctggcggccttattactccgtgcgctgtttaatggattgctacaggaacaattatcccatcaggggcaacgacttcctgagttaggcagtttactaaaacaggtcaaccaactttttcgccaggccaatttgccggggcagttcccgcttctggttggctattatcacagcgggttgaataaccttattctggtctctgcgggtttaaatgccacgctgaatactggcgaacaccatattcaggtgagcaacggcgtgccgttgggtacgctgggaaatacttaccttaatcaaattagccatcgctgcacctcctggcagtgccaaatttggggtgccggagggcggttacgcttaatgttgtccacggagtaa

SEQ ID NO: 114508 - DNA, 906 bp, Enterobacter cloacae
atggctgcccttaattcgaaagtcagaaaggccgttatcccggtggcgggattgggtaccaggatgttgccagcgacgaaggcaatcccaaaagagatgctgcctctggttgataagccattaatccagtatgtcgtgaatgaatgtattgcagcaggtatcaccgaaattgtgctggtgacgcattcatctaaaaactctatcgaaaaccatttcgataccagtttcgaactcgaagcaatgctggaaaaacgcgttaagcgccagttgctggaggaagtgcagtctatttgccctccacacgttaccattatgcaggttcgtcagggcctggcgaaaggcctggggcacgcagtattgtgtgcacacccggtagtgggtgatgagccggtcgcggttattctgcctgacgtgattcttgatgagtacgagtccgatctttcccaggaaaacctggcggaaatgattaaacgcttcgacgaaaccggcagcagccagattatggttgagccagtcgacgacgtgaccgcttacggcgtggttgactgcaaaggcgttgacctgcaacctggcgaaagcgtaccgatggttggcgttgttgaaaaacctaaagcggacgtcgcgccgtctaaccttgctgtcgttggtcgttacgtactgagcgctgaaatttgggctctgctggcgaaaacgcctccgggtgcgggcgatgaaatccagctgacggatgctatcgatatgctgatcgagaaagagaccgtggaagcctaccatatgaaaggtaagagccatgactgcgggaataagctcggttatatgcaggcattcgtcgaatatggtattcgccataacagcctgggtgaagaatttaaagcctggctcaaaggtagcgtgggtattaagtaa

SEQ ID NO: 114509 - DNA, 414 bp, Enterobacter cloacae
atgagcgaagcacttaaaattctgaacaacatccgtactcttcgtgcgcaggcaagagaatgtacccttgagacgcttgaagaaatgctcgaaaaattagaagttgtagttaacgaacgtcgtgaagaagaaagcgctgctgcggctgaaatcgaagaacgtacacgtaaactgcaacagtatcgtgaaatgctgattgccgatggtatcgatccaaacgaattgctgaacagcatggctgcggctaaaaccggtaccaaagcaaaacgcgcggcacgtcctgctaaatatagctacatcgatgagaacggcgaagagaaaacctggaccggccagggccgtactcctgctgtaatcaagaaagcaatggacgaacaaggtaaacaactggatgacttcctgatcaaggattaa

SEQ ID NO: 114510 - DNA, 525 bp, Enterobacter cloacae
atgcgtaccgttgtttataccgccgaaatcgacgatcgctttggggcagggaaggtgagctcaagaatagggctctcgtcgcctgcaaggctgtttaaccctgaaacggacctgctggaggacattcgtgccgagcatgccttcaagcctgtccattgcgttttggtagatgaaagccagttcctgacccgagagcaggtccatgcgctttcagaggtcgttgatgagctggatattcccgttctttgctatggattacgtaccgattttcgtggggaattatttgccggcagtcagtatctactggcctggtcggataagctggttgagctgaaaacaatctgcttttgtggccgcaaggcaagtatggttcttcgcctggaccagtcgggtaaaccctatgctgatggcgagcaggtggtgataggaggcaatgaacgttatgtctcggtctgccgcaagcattataaagaggcgctggctgtaggctcgctgacggcgttacagggcgacaatcgaaaataa

SEQ ID NO: 114511 - DNA, 2682 bp, Enterobacter cloacae
atggctgttaccaatatcgctgaactgaacgccctcgtcgagcgcgtaaaaaaagcccagcgtgaatatgccaatttcacccaagaacaggttgataaaatcttccgcgcggccgctctggctgctgctgatgctcgaatccctctcgctaaaatggccgttgccgaatccggcatgggtatcgttgaagataaagtgatcaaaaaccactttgcttcagagtatatctacaacgcctataaagatgagaaaacctgcggtgtgctgtcagaagacgatactttcggcaccatcaccatcgcagaaccgatcggcatcatttgcggtatcgttccaaccactaacccaacctctaccgccatcttcaaatctctcatcagtctgaagacacgtaacgcaatcattttctccccgcatccacgtgcgaaggacgccaccaacaaagcagcagatatcgtgcttcaggctgctattgcggcgggtgcaccaaaagatctcatcggctggatcgaccaaccttctgttgaactgtccaacgccctgatgcatcacccggacattaacctgattctggcgaccggtggtcctggtatggttaaagcagcgtacagctccggtaaaccagccatcggcgtaggcgcaggtaatacccctgtggtgatcgacgaaacggctgatatcaagcgtgctgttgcctctgtgctgatgtctaaaaccttcgataacggcgttatctgtgcatctgaacagtctgttgtcgtggttgattcggtatacgacgccgttcgtgaacgtttcgccagccacggcggctacctgttgcaaggtaaagaactgaaagccgttcaggacgtgattctgaaaaatggtgcgctgaacgcggctatcgtaggtcagcctgcgtataaaatcgctgagctcgctggctttagcgtccctgctaccaccaagattctgattggtgaagtgaaagtcgttgatgaaagtgagccgtttgctcacgagaaactctccccgacgctggcaatgtaccgtgcgaaagatttcgatgacgcggtagataaagcagagaagctggtggcgatgggcggtatcggccacacctcttgcctgtacaccgaccaggataaccagcctgagcgtgttgcttacttcggtcagaagatgaagacggcacgtatcctgatcaacacccctgcttctcagggtggtatcggtgacctttacaacttcaaactcgcaccttccctgactctgggttgtggttcctggggtggtaactccatctctgaaaacgttggtccaaaacacctgatcaacaagaaaaccgttgctaagcgagctgaaaacatgttgtggcacaaacttccgaaatctatctacttccgccgcggctctctgccaatcgcgctggatgaagtgattactgatggccacaaacgtgcgctcatcgtgaccgaccgtttcctgttcaacaatggctatgcagaccagatcacctctgttctgaaagcggctggcgtcgaaactgaagtcttctttgaagttgaagctgacccaaccctgagcgttgtacgtaaaggcgctgaactggcgaactccttcaaacctgatgtgatcatcgcactgggtggcggttccccaatggacgccgcgaaaattatgtgggtgatgtacgaacatccggaaactcacttcgaagaactggcgctgcgctttatggatatccgtaaacgtatctacaagttcccgaaaatgggcgtgaaagcgaaaatgatcgccgtcaccaccacttccggtaccggttcagaagtgacgccatttgccgttgtgactgatgacgcaactggtcagaaatacccgctggctgactacgcactgacgccagatatggctatcgttgacgccaacctggtcatggaaatgccgaaatcactgtgtgcgttcggtggtctggatgcggtaactcacgctctggaagcttacgtttccgtactggcttctgagttctctgacggtcaggctttgcaggcgctgaaactgctgaaagaaaacctgccagcttcttacaacgaaggttcgaaaaaccctgttgcgcgtgaacgtgtacacagtgcggcaaccatcgcgggcattgcgtttgctaacgccttcctgggtgtctgtcactccatggcgcacaagctgggttcacagttccacattcctcacggtctggcgaacgccctgttgatcagcaacgttatccgctataacgccaacgacaacccaaccaagcagactgcattcagccagtacgaccgcccacaggcgcgccgtcgttatgctgaaatcgcagatcacctcggtctgagcgcaccgggcgaccgtactgccgcgaagatcgagaaactgctggcatggctggagagcctgaaggctgaactgggtattcctaaatctatccgcgaagcaggcgttcaggaagctgacttcctcgctcacgtagataagctgtctgaagatgcattcgatgaccagtgtactggtgctaacccgcgctacccactgatttccgaactgaaacagatcctgctggatacttattacggtcgtaacttcactgaaagcgatgtcgctgccgtaaaagttgaaatccccgcagttgtaaaggctgacaagaaagcgaagaaaaatgcttga

SEQ ID NO: 114512 - DNA, 648 bp, Enterobacter cloacae
gtgattcaaacgctctttgatttccctacatatttcaagttttttatcggcttttttgctctggttaacccggtagggatcatccctgtcttcattagtatgaccagctatcagacggctgcggcacgaaataaaaccaacctgacggcaaacctgtcggtggcgatcatcctacttacgtctctttatctcggggacgccattcttcaggtcttcggcatctcgattgattcgttccgtatagcaggcgggatcctggtggtgacgattgccatgtcgatgatcagcggcaagctgggggaggataaacagaacaagcaggaaaaatcagagacagctatccgcgagagcatcggggttgtgccactggcgctgccgctgatggcgggcccgggggcgatcagttccactattgtctggggaacgcgctaccacagcctgatgcacctgattggcttttccgtcgctattgcgctgttcgcgctgtgctgctggggtgtatttcgtatggcgccatggctggttcgcttgctgggacaaacgggcatcaacgtgattacccgtatcatgggtctgttgttaatggcgttgggcatcgaatttatcgttaccggtattaaaagtatattccccgggttagtacactga

SEQ ID NO: 114513 - DNA, 192 bp, Enterobacter cloacae
atgaaaatagttctcatcaacttgtttaatgctgcaaaatataaggccggaaagtaccaaatggtgccaactctcgccaatacattttgcaaatttgttaagcatttctcttttacgatggctggcataactgtggtgccaaccctggcttacgccgaaatcaaaaaaaagagaagtaattcatacagataa

SEQ ID NO: 114514 - DNA, 1632 bp, Enterobacter cloacae
atgtccatcatcacaaaaaaaagtctggtagcggcggggattttaactgcgctaatcgcgggcaacgctgcaatggctgcggacgttcctgctggtgttcagctggctgagaagcaaacgctggtacgtaataacggtgcggaagtgcagtctcttgatccgcacaaaattgaaggtgttccagagtctaacgttaaccgcgatctgtttgaaggtctgctggtgactgacgtagacggccacccggctccgggcgtggcggaaaaatgggacaacaaagattttaaagtctggaccttccatctgcgtaaagatgcgaaatggtccgacggtacgccggttaccgccgaagatttcgtctatagctggcagcgtctggcggatccgaataccgcctccccgtatgcgagttacctccagtatggccatattgccaatatcgatgacatcatcacgggtaaaaagccagtaaccgacctgggcgtaaaagccatcgatgccaacacctttgaagtgacgttgagcgaacctgttccgtacttctataagctgctggttcacccgtccgtctccccggtaccaaaatccgcagtagaaaaatttggtgaaaaatggacgcagcctgcgaatattgtgaccaacggtgcatataagctgaaggactgggtcgttaacgaacgtatggtgctggagcgcaacccgcagtattgggataatgcgaagaccgttatcaatcaggtcacctacctgccaatctcttctgaagtgacggacgtaaaccgctaccgcagcggtgaaatcgacatgacctataacaatatgccgattgaactgttccagaagctgaaaaaagagatccctaaagaagttcacgtcgatccgtatctgtgcacctactattacgaaattaacaaccagaaagcaccgttcaccgacgtacgtgttcgtaccgcactgaagctggctctggatcgcgacattatcgtgaataaagtgaagaatcagggcgacctgccggcttacagctacaccccgccttacaccgacggtatgaagctggttgaacctgaatggttcaaatggtcccaggaaaaacgtaacgaagaagcgaaaaaactgctggctgaagctggctataccgccgacaagccgctgacctttagcctgctgtacaacacctccgatctgcataaaaaactggctattgccgtcgcgtcaatctggaagaaaaacctcggcgtgaacgtgaagctggaaaaccaggaatggaaaaccttcctcgatacgcgccaccagggaacctttgacgtggcacgtgcaggatggtgtgcggactataacgaaccgacctcattcctgaacaccatgctgagcgacagttcgaacaataccgcacactataagagcccggcgtttgataagctgattggcgaaaccctgaaggtggcagatgacgcccagcgcgccgatctgtacgcgaaatcagaacaacagctcgataaagactctgcgatcgttccggtttactactacgttaacgcccgcctggtgaaaccatgggtagggggttataccggtaaagacccgttggataatatttccgttaagaatctttatattatcaagcattaa

SEQ ID NO: 114515 - DNA, 921 bp, Enterobacter cloacae
atgttgaaatttatcctgcgtcgctgtcttgaagcgattccaacgttatttattctaattacaatttccttcttcatgatgcgtcttgcaccgggcagtccttttaccggtgaacgcacgcttccgccagaagttatggccaacatcgaagcgaaataccatttaaacgatcctatcaccacgcagtacttcaactatctgaagcagcttgcacacggtgattttggtccgtcatttaaatataaagactattccgttaacgacctggtggcgtccagcttcccggtatcggctaaattaggggctgctgcatttatcctggccgttgttctcggtgtcactgcgggcgttatcgctgcgctaaaacaaaatacccgatgggattacgccgtaatgggggtcgcaatgaccggggtggttatccccagcttcgttgtcgcgccgttgctggtcatgatattcgccataaccctgaaatggcttcccgggggcggctggaacggcggggcgctgaagttcatgatattgccgatggtggcattatctctggcctacatcgccagcatcgcccgtattacccgcggttcaatgattgaagtcctgcactcgaacttcatccgtaccgcccgtgcgaaagggctgccgatgcgccggattattttccgtcatgccctcaagcctgcactgttaccggtactctcctatatgggtccggctttcgtcggcattatcacgggttcaatggtgattgaaaccatttatggtctgccgggcatcgggcagctgtttgttaacggggcgcttaaccgtgactattcgctggtgctgagcctgacgatcctcgtgggcgcgctgaccattctgtttaatgccgttgtcgatgtgctgtatgccgttatcgacccgaaaatccgttactaa

SEQ ID NO: 114516 - DNA, 909 bp, Enterobacter cloacae
atgatgttgagtaagaaaaacagcgaggcgctggaaaacttcagtgaaaagctggaggtcgaaggtcgtagcctttggcaggacgcccgccgtcgttttatgcataaccgtgccgccgttgccagcctggtcgtgctggtgcttatcgcgctgttcgtaaccctggcaccaatgctctctcagttcacctatttcgatacggattggggcatgatgtccagcgcgccggatatggaatccgggcactatttcggcaccgactcctccgggcgtgatttgctggtgcgtgtggcgattggcggccgtatctccctgatggttggcatcgcggcggcgctggtggcggtgattgtcggcacgctttacggctcgctttccggttacctcggcgggaaagtggactccgtgatgatgcgtctgctagaaatcctgaactccttcccgttcatgttcttcgtcattctgctggtgaccttctttggtcaaaatatcctgctgatcttcgtggcgatcgggatggtgtcctggctggatatggcgcgtattgtgcgcggccagacgctgagcctcaaacgtaaggagtttatcgaagccgcacaggttggcggcgtttctaccgccaatattgtggtgcgtcatatcgttcctaacgtgctgggcgtggtggtggtgtacgcctccctgctggtgccaagtatgatcctgtttgaatctttcctgagcttcctgggattaggtacgcaagagccgttgagtagctggggcgctctgttaagtgatggcgcaaactccatggaagtgtcaccgtggttactgctgtatccggcgggcttcctggtcgttaccctgttctgtttcaactttatcggcgatggcctgcgtgatgccctcgacccgaaagaccgttaa

SEQ ID NO: 114517 - DNA, 1014 bp, Enterobacter cloacae
atgaccattattgaaacggcaaccgcgccacaggcgcaacagcggaccagcgcactgctggacgttaaagacctccgcgtgacgtttaaaacccctgacggtgatgttactgccgttaacgatctcaacttcgacctgcgtgccggtgaaacgctgggcattgtgggcgaatccggttccggtaaatcccagaccgcattcgcgctgatgggcctgctggcgtcaaacggcgtgatcggcggttcggcgacgtttaacgggaaagagatcctgaatttgccggaacatgagctgaacaagctgcgcgccgagcagatttcaatgattttccaggatccgatgacgtccctgaacccctatatgcgggtgggtgaacagctgatggaagtgctgatgctccacaaggggctgggcaaagccgaagcgtttgaagagtccgtcaaaatgctggatgcggtgaaaatgcctgaagcacgcaagcgcatgcgcatgtatccacacgagttctccggcggtatgcgccagcgcgtcatgatcgcgatggcattgctttgccgaccaaaactgctgatcgctgatgaaccgaccaccgctctggacgtgaccgtccaggcgcagatcatgacgttgctgaacgagctgaagcgcgagttcaataccgccatcatcatgatcacccacgatttaggcgtcgttgccgggatctgcgacaaagtgttagtcatgtatgcaggccgcacgatggaatacggtaatgctcgcgatgtgttctaccagccagcccatccgtactctatcgggctgctgaatgccgttccgcgtcttgatgcggaaggggagtcgctgctgactatcccgggcaacccgccaaacctgctgcgtctgccaaaaggctgcccgttccagccgcgttgtccgcatgcgatggaaatctgtaacagcgcaccgccgctggaagcgtttgccccaggccgtctgcgcgcctgctttaagccgctggaggagctgatatga

SEQ ID NO: 114518 - DNA, 1005 bp, Enterobacter cloacae
atgaacgcgatcgacgaaaaaagaaatgtgctgctcgaaatcgctgacctgaaggtccatttcgatatcaaagacggtaaacagtggttctggcagcctgccaaaaccctgaaagcggtggatggcgtcacgctacgcctgtacgaaggcgagaccctgggcgtggtgggcgaatccggctgcggcaaatcgacgtttgcgcgggcgatcatcggcctggtgaaggccaccgacgggaaagtggcctggcttggcaaagatttgctggggatgaagccggatgaatggcgcgacgtgcgcagcgacatccagatgattttccaggatccacttgcgtccctgaacccgcgtatgaccattggcgaaatcattgccgagccgctgcgcacctatcatccgaagatgccgcgccaggaaattcgcgatcgggtgaaagcgatgatgctcaaggtgggtctgctgcctaacctcatcaaccgctacccacacgagttttccggcggtcagtgccagcgtatcggtatcgcacgcgcgttgatccttgaaccaaaactgattatctgtgatgagccagtttcggcgctggacgtttccatccaggcccaggtggttaacctgctacagaaactgcaacgggaaatggggctgtcgctgatcttcatcgcccacgatctggcggtggtaaaacacatttcggaccgtgtgctggtcatgtatctgggccacgccgtagagctgggcacgtatgatgaggtgtaccacaatcctctgcacccttataccaaagcgctgatgtctgcggttcccgttccggaccccgatctggaaaaaaataaaaccattcagcttctggaaggtgaactgccttcgccaatcaacccgccttcaggctgcgtattccgtactcgatgcccaatagccgggccggaatgtgcaaaaacacggccggttctggagggcagtttccgacatgcggtttcctgcctgaaagtagacccgttataa

SEQ ID NO: 114519 - DNA, 837 bp, Enterobacter cloacae
gtgtcgcgattattcacgtcggcccgccagcggctgtatcaccttttatttgatcctgaaacggtttccggtcgccgcttcgaaggtctgtgtggtttatttgcgctgattagcgtcattattatctttatcgaatccggcgccggaacgcagtaccacatgacgtatgaggagtggcacgttttcgtctggctggaattgattgtcacgctggtgtttactgcggaatatgtgctgagggtcattagctggccaaatccggcgaaatacgttttcagcttctggggatttattgatttagccaccatcctgccgctgtatgtcatgtggctgtggcctgagatcagcctgaattatgtgtttgcctggcgtgcaatgcgggcgattcgtgtgttacggattctcaaactgctgcgctttatgccgtcgctgcgggttttttgggttgccattgtcagcgcccgccaccagctgattctcttctattcgtttattgctatcgtgatgatcgtttttggctccctgatgtatttaatcgaagggccgaaatacgggtttaccacgcttaatgcgtctgtttactgggctatcgtcacggtgaccaccgtgggctatggcgatattaccccgcatacgccgctcggacgtattgtggcatcggttcttatcctgatcggctattcggtgatagcgattccgacggggttaattaccacccatatgagcagcgccttccagaacagcaagcagcaacgcaaatgtccgaattgtcagcaggggaatcatgaacccggcgcgcggttttgtcaccgctgtggaaatgccttaccggattaa

SEQ ID NO: 114520 - DNA, 330 bp, Enterobacter cloacae
atggaaatggatctgaacaatcgcctgaccgaagacgaaacgctcgaacaggcctacgatatttttctcgagctggcggtcgataatctcgaccctgctgacgtcattcttttcaagctgcaattcgaagagcgtggcggtgctgagctgttcgatccggctgaagactgggccgaacatgtcgattttgatctcaacccggacttcttcgccgaggtggtgattggccttgcagatgaagacggcggagaaattaacgacatctttgcccgcgtcctgctgtgccgcgagaaagatcacaaactgtgccatatcctctggcgcgaataa

SEQ ID NO: 114521 - DNA, 1461 bp, Enterobacter cloacae
atgacaaccttctacaccgtggtgagttggctggtcattttaggatactggctgttaattgccggggtgacgttgcgcattctgatgaaacgcagagcggtaccttccgccatggcctggcttctgattatctacattctgccgctggtgggcatcattgcctatctctctttcggtgaacttcatctgggtaaacgccgggccgaacgcgcccgcgccatgtggccctccacggcgaaatggcttgccgaccttaaagcctgcaagcatatcttcgctgaagagaacagcagcgtggccgcatctctgttcaagctgtgcgaacgccgccaggggattgctggggtaaaaggcaatcagctgcaactgatgacctcttctgatgatgtgatgcaggcgctgatccgtgatatccagctcgcccggcataatatcgagatggtgttttatatctggcagccgggcggcatggcggaccaggtcgccgaatcgctaatggccgctgcacgtcgcggtatccactgccgcctgatgctggactccgccggcagcgtggcctttttccgtagcccgtgggcaggcatgatgcgcaacgccggtatcgaggtggtcgaggcgctaaaagtgaatcttttccgcgtctttctgcgccgcatggatctccgccagcaccggaaaatggttctgatcgataactacatcgcctacaccggcagcatgaacatggttgacccccgcttcttcaagcaggattccggcgtggggcaatggatcgatctgatggcgcggatggagggaccgatcgcgacctcaatgggcatcgtctactcctgcgactgggaaattgaaaccggtaaacgcattcttcccccaccgccggatggcaatatcatgccgtttgaggaagccagcgggcacactatccacactatcgcctccggtcctggcttcccggaagatctgatccatcaggcactgctgaccgccgcgtactccgcgcgggaatatctgatcatgaccacgccctatttcgttcccagcgacgaccttctgcatgccatctgtacagcggcacagcgcggagtggatgtgagcattattatgccgcgcaagaacgattcgctgctggtgggatgggcaagccgcgcgttctttagtgagctgctggccgcaggcgttaaaatttatcagttcgaaggcggcctgttacacaccaagagcgtgctggtggacggagagctgagcctggtgggtaccgtcaacctcgatatgcgcagtctgtggctgaattttgaaattacgctggtcattgatgacgccgggttcggtggcgatctggcggcggttcaggacgattatatctcccgctcacgcctgctggacgccagactgtgggcgaaacgtccgctctggcagcgaattgccgaacgactgttttacttctttagtccgttgctgtaa

SEQ ID NO: 114522 - DNA, 174 bp, Enterobacter cloacae
atgaagcgcagtagaactgaagttgggcgctggcgcatgttgcgacaggtgagtcgtcgtaaggctcgttggctggaagcacaatcccgccgcaatatgcgtatccacgccatcagaaaatgtggcctgaacagacaccgtaacgcgctgttgttcgcggtccaggacatctga

SEQ ID NO: 114523 - DNA, 411 bp, Enterobacter cloacae
atgaacggaaaagtaatggcagtactctttgggattgcgatattaagcggttgtgccagcagcaaaacctcacccgaacggcacgcgttttatttcgtgtcgcatcagtccagctttactggcggcaattacacctccagcgtgcagaaaaattatcagttgaacgtggcgcagttccgcgagctttatgcccggggcaaagctgaccgcgcggaagggcggactgaggctgaagccagtgaatacgcgcaaagcattcgcgatcagctaaaagaaaatgcgaagtcgcaggaattgttcgcaggcaacgcgaaggataaatggtcttcggacatggacactaaagacgccatattatttggtaacgaactggccgcgacttatcttgatggctataacggcgtacaatag

SEQ ID NO: 114524 - DNA, 636 bp, Enterobacter cloacae
gtgtttgcggagtttggtgtactgaatttctggacctatgttgtcggcgcattttttatcgtgctggttccaggaccgaacaccttgtttgtgcttaaaacagggattggccacggcgttaagaaaggctatctggcagccaccggtgtgtttattggtgatgccgtgctgatgtttctggcctgggcgggcgtcgccgcgttgatccagaccactccggttttatttaatattgtccgctatctgggcgcgttttatctgctgtggctgggcggaaaaatgctctggtccgttatgacgcgtcaaaaaaatgcgcacgaaagtagcgccgaaccggcaagcgcaatccttaagcgttcgctggtgctgagcctgacgaacccgaaagcgattctcttttacgtgtcgttcttcgtgcagttcattgatgtcaatgcgaagaataccggcacgtcgttcctgatcctcgccacaacgcttgagctgatcagcttcatgtacatgagcttcctgattttctcaggcgcgtttgtcacgcgttacctcaaaaccaaaaagaaactggcgaagctggggaacgggctgataggtctgctgtttgtcggatttgcggcgaggctggcgtcgctgcactga

SEQ ID NO: 114525 - DNA, 297 bp, Enterobacter cloacae
gtgctttacgtgatttacgctgaagatgtacctgattctctggaaaaacgtctttccgttcgccctgctcatctggcgcgtttacagttgctacaggatgaaggtcggttgctgaccgcaggcccgatgcctgccgttgacagcaacgatccgggcgcggcgggttttaccggctccacggtgattgccgagtttgaatctctggaagccgcgcaggcctgggcagaagcagacccgtacgtcgcagccggcgtgtacgagaaagtcacggttcgtccgtataaaaaagtattctga

SEQ ID NO: 114526 - DNA, 738 bp, Enterobacter cloacae
atgattatgacttcgatgacccttgatttacctcgccgctttccatggccgacgctgctttccgtcgttattcacggtgctgtcgtggcgggtctgctctatacctcggttcatcaggttattgaaatgccggcgccagcgcagccaatttctgtgaccatggtatcgcctgcggatcttgagccgccgcaggttgcgccgccgccgccacagcccgttgttgaacccgagccagagcccgagccggttcctgaacagccgaaagaagcgccggtagtgatccataagccggagccgaaacctaagccgaagccaaaacccaagccggtcaaaaaggtggaagagcgtccgaaacgcgaagtgcgtccggttgagccacgcgccacgcagccggttgaaaatgccgccccgtcacgtccgctgatgaataacaccacgaccgcgacaaaaccgacggtaacggcgcccgcgggcccgcgggcgctgagccgtaaccagccgcagtacccggcacgtgcccaggcgttacgtattgaagggcgtgtacgggtgaaattcgacgttacggccgatggacgtgtcgataacgtggaaatcctgtccgcacagccggcgaatatgtttgaacgcgaagttaaatcggccatgcgcaggtggcgctatgaagccggtaaacccggcaatgggttgattgtgaacattgtcttccgcctgaacggcggggcacagatggaataa

SEQ ID NO: 114527 - DNA, 396 bp, Enterobacter cloacae
atgacaacaaatgacgccccacagggcgaactggttttacgcacactggcaatgcctgcggatacgaatgccaatggcgatatttttggcggctggttgatgtcgcagatggatatgggcggtgcaatcctggcaaaagagattgcacacgggcgcgtggtgacagtccgggtcgatggcatgacctttctgcgccctgtcgcggtgggggacgtggtgtgctgttacgcacgctgcgtaaaacgcggcaatacgtctgtctccatcaacattgaagtatgggtgaaaaaagtctcttctgagccgattggtcagcgctataaggcgacggaggcattatttatctatgtggcggtggatagcgacggtaagccccgccagctcccacggagctga

SEQ ID NO: 114528 - DNA, 2187 bp, Enterobacter cloacae
atgaataacataataagatttgccccggctacacttacgctcgccattctttcaacgctttatcagagcgcacacgcagcggaagatcctctagccgatggtgaaacaatggttgttcaggccaccgctgaagaggcgctgaagcaacagccgggggtttccatcatcacggcaaaggacatagaaaaggatccaccggtgaacgatctttctgaaattattcgcaaaatgcccggggttaacctcaccggaaacagcgcgacaggcagccgcggtaacaaccgccatatcgacatccgcggtatggggccggagaacacgctgattctgattgacggtgtgccggtgacgtcacgtaactcggtgcgctacagctggcgcggggagcgcgacacccgcggggataccaactgggttccgccagagatggttgagcgcattgaagtgctccggggacctgctgccgcccgctatggttcgggggcggccggcggcgtcgtcaacatcattaccaaacgcccgaccaacgactggcacggctcgctctccctgtacactaaccagcctgaaaatgataaagagggagcgacgaaacgcgctaattttgatctgagcggcccccttgcgggcgatgcgttaacgatgcgcctgtacgggaatatcaacagaactgacgcagatgctcaggacatcaacaccgcgcaaaacggctcttacgccgccgggcgtgaaggcgtgcgcaacaaggacattaatgccctgctctcctggaaactcacgccacagcagattatcgatttcgactacagctacagccgccagggcaatatctacgcgggtgatactcaatacagcaacagcaacgtcagccctgacggtctggtgtcgtccctgtatggacacgaaacgaaccgaatgtaccgccagtcttatggcattacgcacaacggcatctgggagtggggtcagtctaagttcggtgtttattatgaaaagaccaacaacacccgcctggaagaaggctctacgggcaaagttgaggggatgatcaatagcgataaatacgataccagccggctggagtcataccgttcaacgggtgaacttaacatgcctttcttctggctggtcgaacagacgctaaccgtgggtgcagaatggaaccgtgatgaactgaacgatccggcctcaatgcaggcgacaaatgtgtcgggagaagtgattaacggcgttcccggtacggcttctgagcgcaacagcaaaaacagcgctgacctcactggcatctatcttgaggacaatattgaagcgcgccagggcaccaacctgatcccagggctccgctttgattatcacaatcagtttggcagcaactggagtcctagcctgaacctctctcaggatttgggtgacatgttcaaggttaaagcgggtatcgctcgggtatttaaagcgccaaacctgtatcaatccagcgaaggctatctgctttccacccgcggtaatggctgcccgaacaacgtttccgaaggaagctgttacctgttaggtaacccggatctggatcctgaaatcagcgtgaacaaagagattggcctggcctttgcgctggaaggctacgaggctggcataacctggttccgcaacgattacaaaaacaagattgtttcaggaacggatgtactgggccagacaagcagcggcgcaaatatccttcagtggcagaacggaggaaaggctgttgttgaggggctggaaggcaacctcaccgtcccggttatccgcgacacgctaacctggcgtaccaatgcgacgtatatgattcagtctgaaagtaaggacaccggcaaccctctgtcgattatcccaaaatataccgtcaacacgatgctcgactggcaggttaacagcaaactttcagcgaaccttagctggacgacgtatggccgccagaagccaagagaaaatgctgaaatccgcaaagagcagaatgcgatgtcagataaagagattggcgcctattccatcgttgggatcggtagtaactatcaactgacaaaagatctccgcctgaatgccgggatcagcaacctctttgataagcaaatttaccgagaaaatgacggtgcatcgacctataacgaaccaggccgtgcgtattacgccggcgtgaccctgtccttctga

SEQ ID NO: 114529 - DNA, 540 bp, Enterobacter cloacae
atgaagcagtttcttgattttttaccgctgatcgtatttttcgctttttataagctgtacgacatttatgccggtacgctggcgctgattgtggcaacggctgtggtgctgatttacagctgggttcgctatcgcaaagttgaaaagatggcgctcatcaccttcctgatggtggcggtgtttggaggtctgacgttgttcttccacaatgatgaatttatcaaatggaaggtcacggtgatttacggcctgtttgcgggcgcactcctcatcagccagtgggtgatgaagaagccgctgatccagcgcatgctggggaaagaactgaccctgccgcaggctgtgtgggggcgtctgaatatcgcctgggcactattttttattctgtgtggtctggcgaatatctatatcgcattctggctgccgcagaatatctgggtcaacttcaaggtgtttggcctgacggcgctgactcttatcttcaccctgctcagcggcgtttatatttatcgccacatgccgcaggatgacaagcactga

SEQ ID NO: 114530 - DNA, 744 bp, Enterobacter cloacae
atgtctatcacggcgaagtctgtctaccgtgacacgggaaattttttccgcaatcagttcattacctttttactgatcgcgttgttgtgcgcctttattacggtggtgctgggtcatgcgttctcacccagtgatgaacagattgccacgctgagccagggggaaaatcttgcaggcagcgcagggttgtttgaccttgtgcagaatatgacgccagagcaacagcaaatcttgctgcgcgcatctgcggcatctaccttctcgggcctgattggcaacgccattctggcgggtggcgtgttgctgatgatccagctggtgtctgccggccaacgcgtcagcgcgttacgtgcaatcggggccagcgctccggtgctgccaaaactgtttatcctcatcttcctgaccacgctgctggtccagatggggataatgttggttgtcgttccgggcgtgctgctggctatcgtgctttcattcgcgccagtaatggttgtgcaggacaaaatgggcattttcaccgccatgcgcagcagcatcaggctcgcatgggccaatatgcgactggtcgccccggccgttatcagctggctgctggccaaaactctgctgttgctgtttgcgccgaattttgcggtgttaacgccaaacgtcggagcggttgtcgccaatacgctgagcaatctgatttcagccgtgctgctggtctatttgttccgcctgtacatgttaattcgtcagtaa

SEQ ID NO: 114531 - DNA, 405 bp, Enterobacter cloacae
atgagtgatcataacccgtgcatgacgtgcggagcctgttgtgcgtattttcgagtctctttctactgggctgaagccagcgatggcggcggcaccgttccggttgatctcactgaacccttaaccccttttctgcgctgtatgcgcggcaccaaccaaaaacagagccgctgtgtggcactgcaaggtgagcctggggtatccacccgctgttccatttacgcggatcgccccagcccgtgtcgcactttcgcgatgtcgggagaggatgggcaggtcaatgaggcatgcaatcgcgcccgcgcccgctatggattaccgccgctttacaaagatatgcttttccatacaagccttgatgctgccaccagcgtgttatccggtgtacaattgccggctaattaa

SEQ ID NO: 114532 - DNA, 633 bp, Enterobacter cloacae
atgaaaaaattagcggtggcagcccttatcttaagcagtctctctggcggcgcgtacgcgcatgaagcaggcgaattctttattcgtgccggttcggcaacggtacgtccaacggaagggtccgataatgtactgggtatgggcgggtttaacgtcagcaataacacccagttaggcctgacgtttacgtatatggcaacggataacgttggcgtcgagcttttagccgccacgccattccgtcaccgcgtcggtttaggaccgaccggggacattgccacggttcaccatttgccaccaacgctgatggcgcagtggtacttcggcgattccagcagcaaggtgcgcccttatattggtgcaggggttaactacaccaccttctttgatgagaaatttaacgataccggtaaaaaggccgggctctccgatctcagcctgaaagactcgtggggtatggcggggcaggttggtctggattatctgattaaccgtgactggctgatcaacgcctcggtctggtatatggacattgatacggacgtgcgctttaaagctggcgggcagcagcaaagtatcaatacccgactggatccgtgggtatttatgttctcagcaggctatcgtttctga

SEQ ID NO: 114533 - DNA, 159 bp, Enterobacter cloacae
atgtgctgggctgaacgtcgtgaactgaaactgtttacctgcacaaaccggacactcaaatttgatgttggggatatcccctccagccaggtgtatggaacaaccaccatacagcaatcaccggctgacaggggatatatcttctgtcagaaacgatag

SEQ ID NO: 114534 - DNA, 234 bp, Enterobacter cloacae
atgaaagagatcgtgcctgattatcgtctcgatatggtgggtgaaccttgcccttacccggccgtcgccacgcttgaagcgctaccgcagctaaagaaaggtgaaattctggaagtggtgagcgattgcccccagtcgatcaataacattcctcttgatgccaaaaatcacggctataccgtgctggatatccagcaggacggaccaaccattcgttatttaattcagaagtga

SEQ ID NO: 114535 - DNA, 1212 bp, Enterobacter cloacae
atgtcatggcattccttcaaacagacttacctggttaagttctggtcacctgttccggccgttatcgcggcaggcattctctctacttattatttcggtattaccggcaccttctgggctgttacgggcgagtttacccgctggggtgggcagctattacagctggcaggtgtccatgccgaagagtggggctacttcaaactgatccatcttgatggcacaccgctgacccgcatcgacgggatgatgatcattggcatgttcggcggctgttttgcggccgcgctgtgggccaacaacgttaagttgcgcatgccgaaaagccgcatccgcattatgcaggccgtggtcggcggcatcattgccgggtttggcgcccgcctggcgatgggctgtaatctggccgcgttctttaccggtattccgcagttctcgctgcatgcctggttctttgccgtcgccaccgccatcggctcctacttcggtgctaaattcaccctgctgccgctgttccgcattccggtgaaaatgacgaaagttagcgctgcctctccgttaacgcaaaaacccgatcaggcgcgtcgtcgcttccgcctcggtatgctggtcttttttgccatggttgcctgggcgatttgcacggcgatgaatcagccaaaacttggcctggccatgctgttcggcgtcggttttggtctgctgattgaacgcgcgcagatctgctttacctccgcgtttcgcgatatgtggatcaccggacgcaccatgatggcgaaggcgatcattgccggtatggccgtgagcgcgatcggcatcttcagctacgttcagctcggcgtggaaccgaaaatcatgtgggcgggcccaaatgccgtcattggcgggctgctgtttggttttggcatcgtgctggcgggcgggtgtgaaaccggctggatgtatcgcgctgtggaaggccaggtgcattactggtgggtgggtctgggtaacgtgattggcgctaccattctggcctactactgggatgacgtctctccggtactggcaacaaactgggacaaggtcaacctgctgaaaacctttggtccactcggaggactcctggtgaactacgccctgctgcttatcgccttcttactggttgttgcacaagagaagcgcttcttccgacgcgccaccgccaaaactgaaactcaggagaatgccgcatga

SEQ ID NO: 114536 - DNA, 810 bp, Enterobacter cloacae
atggaacgctacgacaacgcatttgcacaactgaaagctcgccaggaaggcgccttcgttcccttcgtgacgctgggcgaccccggcccggagcagtcgctgaagattatcgacaccctgattgatgccggtgccgacgcgctggagctcggtattccgttctccgatccgctggcggatggcccgaccattcagaacgcaacgctacgcgcgtttgccgcgggcgtgacgccgagccagtgctttgaaatgctggcggcgatccgtcagaagcacccgaccattccgatcggcctgctgatgtacgccaatctggtgttcagccgcggtattgatgcgttttacgcagagtgcgcccgcgtgggcgttgactccgtgctggtggctgacgtgcccgttgaagagtctgcgccattccgtcaggcggcaatgcgccacaacgtcgcgccgattttcatctgtccaccgaatgccgatgacgatctgttgcgccagattgcctcttacggacgaggttacacctacctgctctcccgtgcgggcgtcaccggtgcggaaaacaaagccgcgctgccgctgcatcatctggtggagaagctggcagaataccatgctgcaccgccgcttcagggctttggcatttcctcaccggatcaggttactgcggcaattgacgcgaaagccgccggagccatttccggttcggctatcgtgaaaatcatcgagaagaacgtggataagccagagcagatgctggctgagttacacgcattcgtcacatccatgaaagcggccacgcgcaaggcgtaa

SEQ ID NO: 114537 - DNA, 1194 bp, Enterobacter cloacae
atgacgacattacttaacccgtattttggtgagttcggtgggatgtatgtcccacaaatcctgatgcccgcgctgcgccagctggaagaagcgttcgtgagcgcacagaaagatccggcgtttcaggcggagtttaccgacctgctgaaaaactacgccggtcgtccgacggcgctgacaaagtgccgcaacctgaccgaaggcactaaaactacgctgtatcttaagcgtgaagatctgctgcacggtggcgcgcataaaactaaccaggtgcttggccaggcgctgctcgcgaagcggatgggtaaaaccgaaatcatcgccgaaaccggcgcgggacagcacggtgtggcctcagcgctcgccagcgccctgctcggtctgaaatgccgcatttacatgggggcgaaggacgttgagcgccagtcgccaaacgtgttccgtatgcgtcttatgggggcggaagtgatcccggtgcacagcggttctgccacgctgaaagatgcctgtaatgaagcgcttcgcgactggtctggcagctacgaaaccgcccactacatgctcggtaccgccgcgggcccgcacccgttcccgaccatcgtgcgtgaattccagcgcatgatcggcgaagagactaaagcgcagatcctcgaaaaagagggtcgcctgccggatgcggtgatcgcctgcgttggcggcggatctaacgccatcggcatgtttgccgattttatcgacgaaaccagcgttgggctgattggcgttgagcctgccggccacggtattgaaacgggcgagcatggtgcgccgctgaagcatggccgcgtggggatctacttcggcatgaaggccccgatgatgcagaccgatgaagggcagattgaggagtcttactcgatctctgccgggctggatttcccgtccgtagggccgcagcacgcgttcctgaacagcaccggccgcgcggattatgtctccatcaccgatgacgaagcgctggaggccttcaaaacgctgtgccgcaatgaagggatcatcccggcgctggagtcttcccacgcgctggcgcacgcgctgaaaatgatgaaggaaaacccggaaaaagagcagctgctggtggtaaacctttccggtcgcggtgacaaagatatcttcaccgttcacgatattctgaaagcacgaggggaaatctga

SEQ ID NO: 114538 - DNA, 1359 bp, Enterobacter cloacae
atgcagaccgttttagcgaaaatcgtcgccgataaggccatctgggtggaagcccgtaagcaacagcagccgctcgccagttttcagaatgacgtcgttccgagcagccgtcgtttttatgatgcgctccagggcgcgcgtaccgcgtttattctggagtgtaaaaaagcgtctccgtccaaaggcgtgatccgcgacgatttcgacccggcgcgtattgccggtatctacaagcatcatgcgtctgccatttctgtgctgacggatgagaaatatttccagggcagcttcgattttctgcccgttgtcagcggcatcgcgccgcagccgattctgtgcaaagactttattatcgacccgtatcagatctggctggcgcgcttttaccaggcagatgcctgcctgctgatgctctccgttctggatgacgagcagtatcgccagctctccgccgtcgcgcacagcctgaatatgggcgtgctgaccgaagtgagcaacgaagaggagctggagcgcgccatcgcgctggaagccaaagtggtcggcattaacaaccgcgacctgcgcgacctgtcgattgacctcaaccgtacgcgccagcttgcgccgcgtctgggcgcgggcgtcacggtgatcagcgaatccgggattaacagctacgctcaggtgcgcgaactcagccactttgccaacggtttcctgataggttccgcaatgatggaacacgaagaccttaacgcggccgtgcgccgcgtactgttgggtgagaacaaagtctgcggcctgacccgtgaacaggatgcgcaggccgcatatgaagcgggcgcaatctatggtggtctgatctttgttgagtcctctcctcgcgcagcaaatgaagaacaggcgcgcaaggtgatggcggctgcgccactgagctacgtgggcgtgttccgcaatgcggatattaacgaagttgcggcaaaagcggacgcgttatccctgagcgcgatccagctgcacggcgatgaagatcaggcgtacatcgatgctctgcgacatgttctggcgcctcaggttcagatctggaaagcgcaaagcgttggcgccaccctgcccgcgcgtaacctgaagcatgttgataaatacgtgctcgacaacggccagggcggcacggggcagcgttttgactggtcactgctgcgtggcgaagtgctggacaatgtcctgctggcggggggattaagccccgataactgtgtggaagcggccaaaaccggctgcgcaggcctcgatttcaattcaggcgtagagtcccaaccgggcattaaagacgccagcaagctggcatcggtatttaaaactctgcgtgcatattaa

SEQ ID NO: 114539 - DNA, 1596 bp, Enterobacter cloacae
atggctgacattctgctgctcgataatatcgactcctttacctacaacctggcagatcagctgcgtgcgaatggtcacaatgtcgttatctatcgcaaccacgttccggcccagacgctaattgaccgtctggcgaccatgcaaaacccggtgctgatgctctccccgggcccaggcgcaccgagcgaagcaggctgtatgcctgagctgttgacccgtatgcgcggcaagctgccgattatcggcatctgcctcggccaccaggcgattgtcgaagcctacggcggttacgtgggtcaggcgggggagatcctccatggtaaagcgtcaagtattgaacatgacggtcaggcgatgtttgccggtctgccgaacccgcttccggtagcgcgttaccactcgctggtcggcagcaacattccggccgggctgaccattaacgcctcgtttgaagggatggtgatggcggtgcgtcacgatgcggatcgcgtctgcgggatgcagttccacccggaatctatcctgacgtccaacggcgcgcgtctgctggagcaaacgctcgactgggcgctacaaaagctggagcagaccaacaccctgcaaccgattctggaaaaactgtatcaggctcagaccctgagccagcaggagagccatcagctgttctccgccgtcgtgcgcggcgagctgaagcctgagcagctggccgctgcgctggtgagcatgaaggtacgtggcgaaagcccgcaggagatcgccggcgcggcaaccgcgctgctggaaaatgccgccccgttcccgcgcccggactatccgtttgccgatattgtcgggaccggtggcgacggcagtaacagtatcaatatttccaccgccagcgcctttgtggccgcggcatgcggtctgaaggtggcgaaacacggcaaccgcagcgtgtccagccgttcaggatcgtccgacctgctggcggctttcggtatcaacctggacatgaacgccgagcgttcccgtgaagcgctggatgacctgggcgtctgtttcctgttcgcgccgaagtatcacaccggtttccgccacgcgatgccggttcgccagcagctcaaaacccgtacgctgtttaacgtgctcggtccactcattaacccggcgcacccgccgctggcgctgattggcgtttacagcccggaactggtcctgccgattgcggagacgctgcgcgtcctcggttaccaacgcgccgccgtggtacacagcggcgggatggatgaagtttccctgcatgcgcccacgctggtggcggaactgaataacggcgaagtgctgaactatcagcttgaggccgctgacttcgggttgaccccgtaccatcaggacgccctggcgggcggcacgccggaagaaaaccgtgacattctcacgcgcttattacaaggtaaaggtgaggccgcccatgaggccgccgtggcggccaacgtagccatgctgatgcgtttacatggcgaggaagatctgaaagccaacgcccaaaaagttctggacgtactgcgctccggtgcagcttacgatcgcgttaccgcacttgcggcaagagggtaa

SEQ ID NO: 114540 - DNA, 1563 bp, Enterobacter cloacae
atgcaaacagccaaacctcatctcgaactgctgacctgcgaggcggcctatcgccataaccctaccgcgctgtttcatcaggtgtgcggcgcacgtcccgcgacgctgctgctggagtcagctgatatcgacagtaaggacgacctcaaaagcctgctgctggttgacagcgcgctgcgcattaccgcgttaggtgacaccgtcactatcagggcgttgtctgacaatggcgcgtcgctcctgccgctgctggatgcggcgctgccttcaggcattgaaaatgaacgccacccggacctgcgtattctgcatttcccgccggtgagccagctgctggatgaggatgcccgcctctgctcgctctccgtttttgacgcctttcgcctgctgcaaaatctggtggccgtgccggaagttgagcgcgaagcaatgttttttggcgggctgtttgcttacgacctggttgctggctttgaagatttaccggaaaccgagcagggaaaccgctgcccggactactgtttctacctggccgaaaccctgctggtgatcgaccatcagaaaaaatatacccgcatccaggccagccttttcactccgtctgagtctgagaaaaatcgcctcgcgcagcgcatcgcccaactgcaacagcagatgtcagaagcaccgcccgcgctcccggtgcagcgtgttgaaaagatgacctgcgaggtgagtcagaccgacgatcagtacggcgcggtggtacgtcagatgcaaaaagcgattcgtgccggggagattttccaggtagtgccgtcccgtcgcttctcactgccctgcccgtcgccgctggcggcttacgatgtgctgaaaaagagcaacccaagcccgtacatgttctttatgcaggacaatgatttcaccctgtttggcgcgtcgccggaaagctccctcaagtacgacgccaccagccgccagattgagatctacccgatagcgggaacccgtccacgcggccgtcgtgccgatggctccctggaccgcgatctcgacagccgcatcgaactggaaatgcgtaccgaccataaagagctctccgaacacctgatgctggttgacctggcgcgtaacgatctggcacgtatttgcaccccaggcagccgctacgtggcggacctgaccaaagtcgaccgctactccttcgtcatgcacctggtatcccgcgtggtgggtgaactgcgccacgacctcgacgttctgcatgcctaccgcgcctgcatgaacatgggcaccctgagcggcgcgccgaaagtccgcgccatgcagctgatcgccgaagcggaaggacgccgtcgcggcagctacggtggtgccgtgggctatttcaccgctcacggtgaccttgatacctgcatcgtgatccgctccgcctacgttgaggacggcattgccaccgtccaggccggggccggaattgtgctggattctgttccgcagtcggaagccgacgaaacccgcagtaaagcgcgcgcggtactgcgcgccattgctaccgcacaccatgcacaggagattttctga

SEQ ID NO: 114541 - DNA, 894 bp, Enterobacter cloacae
atgggaagtgctttgagcgataccacctacgccgtaatttatgatttacacagccatacgcaggcttcagatggcctgctgacacccgaagctctggtccatcgcgccgttgaaatgcgtgtcggcacgctggcaataaccgatcacgataccactgacggcattcctgccgcgcgcgccgagattgcccgcagcggactggcgctggatctggtggccggggttgagatctcgacggtctgggaaaaccacgaaattcatatcgttggcctgaatatcgatacagaacatccggccatgcgtgcttttttgcaagaacaaaaaacacgccgcaatcaacgcgcggagatgattggcgaacgtctggaaaaagcgcatattcccggcgcgctggaaggcgcgcgaacgctggcgaacggtggggcggtgacgcgcggccatttcgcccgttttcttgtggacgccggtaaggcgacgaccatggcgaatgtctttaaaaagtatctggcgcgcgggaaaaccggatacgttcccccacagtggtgtacaataaaacaagctattgatgtgattcatcattctggcggtaaggccgtgctggcccatccggggcggtataatctttctgctaaatggctgaaaagactgctggcacactttgccgaatgcggcggtgaggcgatggaagttgcccagtgtcagcaggcacccaatgagcgttcgcagctcgcgacctacgcccgtcagtttggtctgcttgggtcacagggttcagatttccatcagccctgcgcgtggattgaattggggcgcaagctctggttacccgcgggcgttgagcctgtctggcagctctgggaacagccacagcaaattgaagagagggaagtatga

SEQ ID NO: 114542 - DNA, 621 bp, Enterobacter cloacae
atgagtcagtttttttatatccatccggataacccccagccacgtctgattaatcaggccgtggagatcgtccgcaaaggcggcgttattgtctacccaaccgattctggctacgcgctgggctgtaaaattgaggataaaggggcgatggagcgcatctgtcgcatccgccagctgccggatggccacaacttcaccctgatgtgtcgcgatctctctgagctgtcgacctatgcttatgttgataacgtggcctttcgtctgattaaaaacaacacgccgggtaactacaccttcattctgaaggggacaaaagaggtgccgcgtcgtctgttgcaggaaaaacgtaaaaccatcggcatgcgcgtgccgtcgaacccgattgcccaggcgctactggaaaccctcggcgagccgatgctctccacatcgctgatgctgccgggcagtgagtttaccgagtccgacccggaagagatcaaagatcgtctggagaaggtggtggagctgattattcatggcggctatcttggccagcagccgaccaccgtggtggatctcaccgaagacgcgccagaagtgattcgtgaaggcgtgggcgatgttaagcctttcttgtaa

SEQ ID NO: 114543 - DNA, 876 bp, Enterobacter cloacae
atgagcgagaagttacagaaagtgctggcgcgtgccggccacggttcgcgccgtgaaatcgaagccattattgaagcaggccgcgtgagtgtggacggtaaaatcgccacgctcggtgaccgcgttgaaatcgtaccggggctgaagatccgcattgacggccatcttatctccgtgaaagagtctgctgaacagatctgccgcgtactggcttactacaagccggaaggcgaactgtgtacccgcaacgacccggaaggtcgcccgacggtgtttgaccgtctgccaaaattgcgtggcgcccgctggattgccgtagggcgtctggacgtgaacacctgcggcctgctgctgttcaccaccgatggtgaactggcaaaccgtctgatgcacccgagtcgtgaagtggaacgtgaatatgccgttcgtgttttcggccaggttgatgagaacaaactgcgcgacctgtcgcgtggtgttcagctggaggacggccctgcggcgttcaaaaccatcaagtttaccggtggtgaaggcattaaccagtggtacaacgttaccctgacagagggacgtaaccgcgaggtgcgtcgactgtgggaagcggtcggtgtccaggtgagtcgcttgattcgcgtccgctatggcgacattttgctgccgaaaggcctgccacgtggcggctataccgaactggatctgacgcaaaccaactacctgcgcgatctggttggcctgacgccagaaaccacgtcgaaagtggcggtagagaaagatcgtcgtcgcatgaaggcgaatcaaatccgccgtgcggtgaaacgtcatagccaggtcagcagcaatcgccgctctggcagccgtaataacaacggttaa

SEQ ID NO: 114544 - DNA, 591 bp, Enterobacter cloacae
atgagtgatgatcgtcatcagcagcgccagcagcgtctgaaagaacaggttgatgcacgcgtggcggccgctcaggacgagcgcggtatcctaatcgtgttcaccggcaacggcaaaggcaaaaccaccgccgcatttgggaccgccacccgcgcagtcgggcatgggcagaaagtgggcgtgatccagtttatcaagggtgaatggcccaacggcgagcgtaatctgctcgagccgcatggcgttgagtttcaggtaatggcaaccggttttacctgggatacccagaaccgggaaaccgataccgcagcctgcctcgccgtctgggagcatgccaaaagaatgctttcagacccgtcgctgaacatggtgttgctggatgagatcacctatatggtggcgtatgactacctgccgctgcaagccgtgctggaggccctcaggaaccgccctgcacaccagacggcgatcgtcacggggcgcgggtgtcatcgggacattctggagctggccgataccgtcagcgagctgcgtccggttaagcatgcgttcgatgcgggtatcaaagcgcaaattgggattgattactga

SEQ ID NO: 114545 - DNA, 762 bp, Enterobacter cloacae
gtgcattatcagccacaaaaaaaccttctacagaaccgcatcattctggttaccggtgccagcgacgggattggtcgcgaagcggcgctgacctattctgaatacggtgcgagccttattctgcttggacgtaatgaagaaaagctcaaggccctcgcccgtgaaatcgaaaacgccggcggtacccccacgccctggtatacgctcgatctgctgacctgcacgccagcgtcatgtcaggcccttgcccagcggatcagcacacattatccgcgtctggacggcgtactgcacaacgcggggttactgggcgaagtgcgcccgatggatgaacaggatccggagatttggcagcaggtgatgcaggttaacgtcaacgggacgtttttcctgacccaggccttgcttcctttattactcaactccgattccggctcgctggtatttacctcctccagcgtggggcgtcaggggcgtgcgaactggggggcttacgccgtctcaaaatttgccaccgaaggaatgatgcaggtgctggccgaagagtaccaaagccgccacctgcgggttaactgtattaatccaggcggtacgcgcaccaaaatgcgcgccagcgccttcccgacagaagatccgcagaagcttaaaaccccggccgatatcatgcccctttacctgtggctgatgggtgacgacagccgtcgcaaaaccggaatgaccttcgatgcccagccaggccgcaaaccggggatatcgcaatga

SEQ ID NO: 114546 - DNA, 1047 bp, Enterobacter cloacae
gtggaattactttctcagtatgggttgtttttggccaaaatcgcgacggtggttattgctgtcgcggtgattgccgtcctgattgtcaacctgacgcagcgtaagcgtcagcgtggtgagttacgcattacccgcctgagcgagcagtataaagagatgcaggaggagatgtctctggcgctgcttgacgatcatcaacagaagttgtggctaaaagcccagaagaaaaaacataagcaggacgccaaagccgcgaaggcgaaagctaagctcgccacgccacaggctgacgcaaaaccgcgcgtctatgtgctcgattttaaaggtagcatggatgcgcatgaagtctcctctctgcgtgaagaagtgacggcggtgctggccgtggcgacagcccaggatcaggtggtggtacgccttgaaagcccgggcggcgtagtgcatgggtatggactggcggcttcgcagttacaacgtctgcgggataaacagatcccactcaccgttgcggtagataaggtcgcggcgagtggcggctatatgatggcgtgcgtggcggataaaatcgtcgcggcaccgttctccattatcggctcgattggggtggtcgcgcagatccctaacttcaatcgtttcctgaaaaataaagagatcgacatcgaactgcatacggcgggtcagtacaaacgtacgctgacgctgctcggcgaaaataccgaagagggacggcagaaattccgggaagatctgaacgaaacccaccatctgttcaaagatttcgtgcaccgcatgcgcccaacgctggacattgagcaggtggctacgggcgagcactggtacggcacgcaggcgcaggagaaagggctggtggatgaggtgggtaccagcgacgacctcctgctcaacctgatggaaggccgtgagctggtgggggtgcgcttcacccgacgtaagcgcctgctcgaccgttttaccaatagcgcggcagaaagcgcggatcgcctgctgctacgctggtttcagcgcggacaaaagccgctgctgtaa

SEQ ID NO: 114547 - DNA, 252 bp, Enterobacter cloacae
atgcagaatacgacccaacccattgaccgagcttcattgcttatcgaagcaaacaaactcattcgcgaccatgaagacaccctggcgggaattgaagcgactggcgtggaacaacgtaatggcgtgctggtgttcagcggtgaatacttccttgatgaacaagggctacccaccccgaaaagcaccgccgtgtttaacatgtttaaatacctggcgcataccctctcagagaagtaccacctggtcgattaa

SEQ ID NO: 114548 - DNA, 2598 bp, Enterobacter cloacae
atgggtaaagctctcgtcatcgttgagtccccggcaaaagccaaaacgatcaataaatatctgggcaatgactacgtggttaagtccagcgttggtcacattcgcgacttgccgaccagtggctcagccagcaaaaagagcgcagactctacctccaccaaaggggctaaaaagcctaaaaaggatgaacgtagcgcgcttgtcaaccgcatgggtgttaacccatggcacaactgggatgcacattacgaagtgctgccaggcaaagaaaaagtcgttaacgagctgaaacagcttgctgaaaaagcagaccacatttatctcgcaaccgaccttgaccgcgaaggggaggccatcgcatggcacctgcgggaagtgatcgggggtgatgacaaacgctacagccgtgtagtgttcaacgaaattacaaagaatgcgattcgccaggcgtttgaaaagccgggtgaactgaatatcgaccgtgttaacgctcagcaggcgcgtcgctttatggaccgcgttgtaggctacatggtctcgccgttgctgtggaaaaaggtcgctcgcggcctgtctgcggggcgtgtgcagtctgtggctgttcgtcttgttgttgagcgtgaacgcgagatcaaagcgttcgtcccggaagagttctgggaagtggatgcgaatgtcaccacgccgggcggcgatgcgctgccgttgcaggtgagccatcacaacgacaaaccgttccgtcctgaaaatcgcgatcagaccatggccgccgtggcgctgctggaaaaagcgcgttatcaggttctggatcgtgaagataaaccaaccagcagcaagcctggcgcaccgtttatcacgtcaactctccagcaggcggcaagtacccgtctgggttacggcgtgaagaaaaccatgatgatggcccagcgcttgtatgaagcgggttacatcacctacatgcgtactgactccaccaacctgagccaggacgctgtcaacatggtgcgtggctatatcgaggacaacttcggtaagaaatacctgccggacgggcctaatcagtacgccagcaaagagaattctcaggaagcgcacgaagcgattcgtccttctgacgtttccgttctggctgaatcgctgaaagatatggaagcggacgcccagaagctgtatcagctgatctggcgccagttcgtagcctgccagatgacgccagcgaaatacgactccaccacgctgacggtcggcgcgggtgatttccgcctgaaagcgcgcggccgcattctgcgcttcgacggctggacaaaagtgatgccagcgttgcgtaaaggtgatgaagacagaacgctgccttcagtcaacaaaggtgacgagctgtcgctggttgatctggtcccggctcagcacttcaccaagccacctgcgcgcttcagcgaagcatcgctggtgaaagagctggaaaaacgcggcatcggtcgcccgtccacctatgcgtcaatcatttcgaccattcaggatcgtggatacgttcgcgtcgagaaccgtcgtttctatgctgaaaaaatgggtgagattgtcaccgaccgtctggaagcgaacttccgcgagttgatgaactatgacttcaccgcgcagatggaagacagcctcgatgaggttgccagccataaggcagagtggaagaaagttctcgacagcttcttcagcgattttaccaatcagcttgagaaagccgagaaagatcctgaagagggcggcatgctgcctaaccagatggtactgacgagcatcgactgcccaacctgcggccgtaaaatggggatccgtaccgcgaccacgggcgtgttcctcggttgctctggctatgcgctgtcgccgaaagagcgttgcaaaaccaccatcaacctcgtgccggagaacgaagttctcaacgtgctggaaggtgacgatgcggagaccaacgcactgcgcgccaaacgccgctgtaagaaatgcggcacggcgatggacagctacctgatcgatccaaaacgcaaactgcacgtttgtggcaataacccgacctgcgatggttatgagatcgaagaaggtgagttccgtattaagggctatgacggtccaatcgttgagtgtgagaaatgtggttccgaaatgcacctgaaaatgggacgcttcggtaagtacatggcatgcaccaacgacgactgtaaaaacacgcgtaagatcctgcgtaacggtgaagttgcgccgccgaaggaagacccggttccgcttcctgagctaccgtgcgagaagtcagacgcgtatttcgttctgcgtgacggtgctgccggggtattcctggcggccaacaccttcccgaaatcgcgcgaaacccgtgcgccgctggtagaagagctgtaccgcttccgcgaccgtctgccggagaaactgcgttacctggccgatgcgccacagcaggatccggaaggcaacaaaaccgtggtgcgcttcagccgtaaaacgaagcagcagtacgtggcggcagagaaagagggcaaagcgaccggatggtcagccttctttgtcgacgggaaatgggttgaaggcaagaaataa

SEQ ID NO: 114549 - DNA, 975 bp, Enterobacter cloacae
atgaaattacagcagcttcgctatatcgttgaggtcgtcaatcataacctcaatgtctcttccaccgcagaaggtctttatacctctcagcccggcatcagtaagcaggtgcgtatgctggaggatgagttaggtattcagatatttgcccgcagcggtaagcacctgactcaggtcaccccggcaggacaggaaatcatacgcatcgcacgggaagtgctctccaaagtcgacgccattaaatccgtcgccggggaacatacctggccggataaaggctctctgtatattgccaccacgcatacacaggcgcgttatgcgcttcccggggtgatcaaaggcttcatagaacgctatccccgcgtttccctgcatatgcatcagggatcaccgacgcaaatcgcagaggccgtgtctaaaggcaatgcagacttcgctatcgcgacggaagcgctccatctgtacgatgatctggtcatgctcccgtgctaccactggaaccgctctattgtcgtgaccccggatcacccgctggcggggaagggcgaagtgacaatcgaagaactggcgcaatacccgctggtgacctatacgttcggctttacgggccggtctgaactggacaccgcgtttaaccgcgccggattaacgccacggattgtctttacggcgacggatgcggacgtcataaaaacgtatgtacgtctgggcctgggcgttggggttattgccagcatggcggtggatcctgtctcagacccggatctggtgcgtctggatgcgcatgatattttcagccacagcaccaccaagataggttttcgtcgcagcacgttcctgcgcagctatatgtatgattttattcaacgctttgcgccacatttaacgcgcgatgtggtggatacagctgtggcgttacgctccaatgaagacatcgaagagatgtttaaagacattaaacttcccgccaaataa

SEQ ID NO: 114550 - DNA, 129 bp, Enterobacter cloacae
atgccgtcaggaagtgaagaaccgcaaagggatcccgcgcttaagcgtaaagcctggctggcggtctttcttggctctgccctgttctgggtggtggttgctcttcttgtctggaattactggggttga

SEQ ID NO: 114551 - DNA, 2676 bp, Enterobacter cloacae
atgtcgttaaccctacgcgaagccagtaaggacacattacaggcggaaaataaaacctggcgctactacagcttaccgctggctgccagaacgcttggggacatttcgcggttacccaagtcgttgaaagtcttactggaaaacctcttgcgctggcaggatggcgactcggttaccgaggaggatatccaggctctggcagggtggctgaaaaatgctcatgcagacagagaaattgcctatcgcccggccagagtgctgatgcaggatttcaccggcgtgccagcggtggtggatttggcagctatgcgtgaagccgttaagcgtctcgggggcgatacagctaaggttaaccccttgtccccggtagacctcgtcattgaccactccgtcaccgtcgatcactttggtgacgacgatgctttcggcgaaaacgtccgtctggagatggaacgtaaccatgaacgctacgtatttctgaaatggggtcagcaggcgttcagccgcttcagcgttgttccaccgggcactggcatttgtcaccaggtcaacctggaatatcttggcaaagccgtctggagtgaattgcaggataaagagtgggtggcttaccctgatacgctggtgggcaccgattcacacaccaccatgattaacggccttggcgttctgggctggggcgtcggtggtattgaagcggaagcggccatgctcggccagccggtatcaatgctcattcccgatgtggtgggctttaagctgaccggtaagttgtccgaaggcattaccgccacggatctggttctgacggtcacccagatgctgcgtaagcatggcgtggtgggtaaattcgttgaattttatggcgatggtctggattcactgccgctggcggaccgggccaccatcgccaacatggcgccggaatatggcgcgacctgcggctttttcccgattgatagcgttacgctggagtatatgcgcctcagtggtcgcagcgaggagcaggtggctctcgttgaggcctacaccaaagcgcagggcatgtggcgtaacccgggtgacgagccggtatttaccagtacgctggagctggatatgggcacagttgaggcaagcctcgcagggccaaaacgtccgcaggaccgcgtcgccctgagcaacgttccgaaagcctttgccgccagcaatgagctggaagttaacgccgcacaaaaagatcaccgtccggtggactatgttctgaacgggcatcagtatcagctccctgacggcgccgtggtgatcgccgctatcacttcctgtaccaacacgtccaacccgagtgtgttaatggctgccgggctgctggcaaaaaaagcggtagagctggggctcaagccacagccttgggttaaagcctccctggcgcctggttcgaaagtggtatccgattacctggcacaggccagactcacgccttacctcgacgagctgggctttaacctggtgggctacggctgtacgacctgcatcggtaactctggtccactgcctgaacctattgaaatggcgatcaagcagggggatttgaccgttggcgcggtactttccggtaaccgaaactttgaagggcgtattcatccgctagtgaaaaccaactggctggcctcgccgccgctggttgtagcctatgcgctggccggaaacatgaacattaacctggcgaccgatccgattggtcacgatcgcaaaaatgaaccggtctatctgaaagacatctggccatcatcgcgcgaaattgcgcgcgcggtagagaaagtttccaccgagatgttccgcaaagagtatgcggaagtgttcgaaggcacagcggaatggaaagcgatcgacgtggtgggttccgatacctatgactggcaggatgattccacctatattcgcctgtcgccattcttcgacgaaatgctggcggagcctgcaccgctgaaagatattcacggcgcgcgcattctggcgatgctgggcgattccgtcaccaccgaccatatctcccctgcgggtagcatcaaggcggacagtccggcaggtcggtatctgcaaagtcgtggcgtggaacgtcgcgatttcaactcctacggttcgcgccgcggtaaccacgaagtgatgatgcgcgggacctttgccaacatccgcattcgcaatgaaatggtcccaggcgtggaagggggtatgacgcgccacctgccggatacagaggtcatttcaatttatgacgcagccatgaagtatcagcagcagggtacgccgctggccgttattgccggtaaagagtacggctccggttccagtcgcgactgggcggcaaaaggtccgcgtctgctcggggttcgcgtggtgattgccgaatcctttgaacgtatccaccgctcaaacctgatcgggatggggatcctgccgctggagtttccgcagggcgtaacgcgtaaaacgctgggtttgaccggggaagagcagattgatatcagcggtctgcaaaatctgcaaccgggtaaaaccgttccggtgaagttaacgcgcgcagatggaacgacagaagtgctggattgccggtgtcgtattgatacggcaacagagctgacctattatcagaacgacggcattttacattatgtgattcgtaagatgttggactga

SEQ ID NO: 114552 - DNA, 591 bp, Enterobacter cloacae
atgcagcttaaacgtgtggcagaagccaaactgccaaccccatggggcgatttcctgatggtgggttttgaagaactggcaaccgggcaagatcacgtcgccctggtgttcggcgacatttcggggcaaacgccggtgctgtcccgcgttcattcagagtgtctgaccggtgacgcgctgttcagtctgcggtgcgactgcggttttcagcttgaagccgccctttctcatatcgcagaggaaggacgtggcgttctgctgtatcaccgtcaggaaggtcgcaatattggcctgctgaataaaatccgcgcctatgcgttgcaggatcagggctacgataccgtcgaagcgaaccatcagctcggctttgctgctgacgagcgcgatttcaccctgtgcgcggatatgttcaagctgctgggcgtggacgaagtgcgtctgttgaccaataacccgaaaaaagtggaaatcctcactgaagcgggcatcaatattgtggaacgcgtaccgctgattgtcggccgcaacccgaaaaacgcgcactacctcgataccaaagctgccaaaatggggcatctgctgagcgagtaa

SEQ ID NO: 114553 - DNA, 768 bp, Enterobacter cloacae
atgctttcaattgccagacgaacggccgcaggagccgccgtattgctcgttatacccctggtcgtttggttctccggctggatgtggcagcccggacaaaacgagacgtggctgaaagccttatactggataaccgagacggtcacccagccgtgggggattattacgcacgtgctgctctgtggctggttcctgtggtgcctgcgctttcgccttcgcgcggcgctggtactgttcgctattctcggcggcgccatacttatcgggcagggggtgaagtcgtgggtcaaggatcgcgtgcaggaaccccgtcctttcgtcgtctggctggaaaaaacgcatcatgttccggtggatgagttctacaatttaaagcgtaaagatcgcggtgcgttggtaaaggagcagcttgcagaacagcaggatatcccgacctttttacgcaaacactggcaaaaagagaccggctttgcgtttccttccgggcatacgatgtttgctgccagctgggcgctacttggcgtgggactgctgtggccgcgtcggcgtaccctcacgattgcgattttgctggtctgggcgacaggcgtaatgggcagccggatgctgctggggatgcactggccgcgtgatttggtggtggcaacgctgatctcgtgggtactggtgacgctggcgacctggcttgcacaacgtttttgtggaccattgacgccgccgccggaagagaaggaagaaatagccgaaagggagtctggcggaacctga

SEQ ID NO: 114554 - DNA, 309 bp, Enterobacter cloacae
gtgaaatatttactcattttcttactggtgttggcgatttttgtcatttcagtcacattgggcgcgcaaaacgatcaacaggtaagttttaactatctgctggcgcagggcgagtaccgggtgtcgagcctgctggcggtgttattcgcggcgggttttgtcatcggctggcttgtatgcggcctgttctggcttaaggttcgtgtttctcttgttcgcgctgaacgtaaaattaaacgacttgaacatcaacttacgcctgcgtctgacattccggcgagctctggtgtgccggtagtcaaggaataa

SEQ ID NO: 114555 - DNA, 1170 bp, Enterobacter cloacae
atgctggagttgttgtttctgcttttgcctgtcgccgcagcctatggctggtatatgggccgcagaagcgcgcaacaaacaaaacaggatgaagcaaaccgactctcccgtgactacgtagcgggggtgaacttcctgctgagcaatcagcaggacaaagcggtggatctgttcctcgacatgcttaaagaggataccggcaccgttgaggcgcatctcaccctgggaaacctgttccgctcgcgcggagaggttgaccgtgccattcgtatccaccagaccctgatggaaagcgcttcgttgacctatgagcaacggttgctggccgtgcagcaacttgggcgggattacatggccgcggggctttacgatcgcgccgaggatatgttctctcagctggtggatgagacggacttccgtatcggtgcgcttcagcagcttctgcaaatctatcaggccaccagcgactggcaaaaagcgattgataccgccgaacggctggtcaaactcggtaaagacaaacaacgcgtcgaaattgcccacttctattgcgagctggctctccagcagatgggtagcgatgacatggataaagccatggcattgttaaagaaaggcgctgcggccgatcgcaacagcgcgcgcatctcgatcatgatggggcgggtctttatggctaacggtgattacgccaaagccgtggagagcctgcttcgcgttatcgaccaggacaaagagctggtcagcgaaacgctggaaatgctgcaaacctgctatcagcagttaggtaagcaggacgagtgggttgcgtttctgcgtcgctgcgttgaagaaaacaccggcgccacagccgaactgatgctgtcagatgtcgtcgaagagcacgaagggagtgataccgcccaggtatacattacccgtcagttgcagcgtcatcctaccatgcgggtattccataagctgatggattaccaccttaatgacgcagaagaagggcgcgctaaagagagcctgatggtgctgcgagacatggtgggtgaacaggtgcgcagcaaaccgcgctatcgctgccagaaatgcggcttcaccgcctattcgctttactggcattgcccttcctgccgggcgtggtccaccattaagccaatccgaggtctggacgggcagtga

SEQ ID NO: 114556 - DNA, 738 bp, Enterobacter cloacae
atgacgtctgttacatcctccacttcccgcgtagttaccgattctcccgtagttgtcgctctggattacaataaccgtgacgccgcactggcctttgttgatggcattgatccccgcgattgccgtctgaaagtaggcaaagagatgtttacgctgttcggcccgtcaatcgtccgcgatctgcaccagcgtggcttcgacgttttcctcgacctgaaattccatgatattccaaataccactgcgcacgccgttgctgcggcggctgaactgggcgtgtggatggttaacgttcatgcatccggcggggcacgcatgatgacggctgcgcgcgaagcgctggtgccgtttggtaatgacgctccgcttctgatcgccgtcaccgtgctgaccagtatggatgaatccgacctgcgcgatctgggtgtgacgttgtcacctgccgaacacgcggagcgtctggcgcgcctcacgcaacagagtggtctcgatggcgtggtctgttcggctcaggaggcggttcgcttcaaagctgagctaggccgcgactttaaactggtaacgccgggcatccgtccggcaggcaccgagtctggggatcagcgacgcatcatgacgccagagcaggcgctgagcgcgggtgtagactatatggtgattggtcgcccggtgacgcaatccgctcatccggcagagaccctgaaagcgattaatgcatcactgaaaaagggggcataa

SEQ ID NO: 114557 - DNA, 327 bp, Enterobacter cloacae
atgcgtgacgccaacagtcgtctggtctattcaacggataccgggcgcattgaagagccaaaagagaaagctgaacgtccgaaaggcgatggtatcgtgcgaattcagcgccagaccagcggcaggaaaggtaaaggggtttgccttgtcactggcattgatctggatgatgcagacctggtaaagctcgccgctgaacttaaaaagaagtgcggatgcggtggggcagtaaaagacggcattattgagattcagggtgataaacgggatttaattaaaacgctgctggaagccaaaggaatgaaagttaaactggcgggcggctaa

SEQ ID NO: 114558 - DNA, 219 bp, Enterobacter cloacae
atgacctttaccagcaaaaaattagccgccgctgttctggcaatcactgtagcaatgtccctgagcgcttgctctaactggtctaaacgtgaccgtaataccgcgattggtgccggtgctggtgcgcttggtggtgcagtattaacggatggtagtacgctgggtacattaggtggtgctgccgtaggtggtgttatcggtcaccaggtgggcaaataa

SEQ ID NO: 114559 - DNA, 753 bp, Enterobacter cloacae
atgaattcccgacaacaaatcattttgcagatggtgatcgatcagggacgcgtaagcgtggtcgatctcgctaaagccaccggcgtttctgaagtcaccattcgtcaggatctgaatctgctggaaaaacagagctacctgcggcgtgcgcacggatatgccgttccactggacagcgacgacgtcgaaacccgcatgatgaacaattatgcgctcaagcgggagttggcggagtttgctgcatccttagtgaataacggtgagaccgtctttattgaaaatggcagcagtaacgcccttctggcgcgcacgctcgccgatcaaaaagacgttaccatcatcaccgtaagcagctatatcgcccatctgttgaaggaaactcagtgcgaggtgatactgctgggcggcatttaccagaagaaaagcgaaagcatggtggggccattaacgcgtcaatatgttcagcaggttcacttcagtaaagcattcattggtattgacggctggcagcccgacaccggctttactggtcgcgacatgatgcgttcagacgtggttaacgcagtactcgccaaagagtgtgaagcgatagtgctgaccgacagctctaagtttggcgccgtacacccttatacgatgggtccggcttcgcgcttcagccgcgtgatcacggatgagcgtttgcgcgatgaatatcgccagcaattagaacaagacggcctgactgtcgatattgtgaaaaaaacggcctga

SEQ ID NO: 114560 - DNA, 183 bp, Enterobacter cloacae
atgtctaacattgatgcaaaagccgtggcacagcgtattgatactgtgctggatattcttgtcgcaggcgattatcactctgctatccgtaaccttgaaatcctcaagtctgaactgctggctgagaacggcgctgataacgctccagaatccactcaacctaaagccccgtgggaagtgtag

SEQ ID NO: 114561 - DNA, 870 bp, Enterobacter cloacae
atgacagttatcaaccagacaacctgcacattgtttactgatgctgaacgattcactcaactggcggcttattatgaggccgaacggcgtacggtgtggatgatgttacgtgccacgccacggccttgcttcaatcatgcgctgatcgaggagatcatgaatctctcctggctggttcgacagtccggatttgtcgttgatttttgggtcaccggatcgctggtccccgacatctacaataccggcggtgatttacagttcttcgttgagtgcatcaaaaacaaccgacgcgaagcgttacgcgcctatgcccgggcctgtgtggactgcgttcatgccgcctcgcgagggtttgataccggtgctgtcacgctggctatggtggaaggaagcgcgttagggggcgggtttgaagccgcgctggcgcatcatttcattctggcccagcgcgatgcccgattaggctttccggaaatcgcgttcaatctgttcccgggcatgggcggctattcactggtggcgcgtcgcgccggcatgaaaatggcggaggcgctgatctacaaaggtgagacgcatacggcggaatggtatgagcagcatggtcttgtggatctcttattcgagccgttacagagctatgtttcggtgcggacgtttatcgacacgctacagccgaagctgaacggcgtaagggccatgctgcgtgcgcgtacgcgcgtgctgccacttccgcgaagcgagctgatggacattaccgaggattgggttgatgccgccttctgccttgaaccgaaggatatcgcctacatggagcggctggttatgctgcaaaatcgccatcaggcgacgggcttacgcaaagccaactaa

SEQ ID NO: 114562 - DNA, 1989 bp, Enterobacter cloacae
atggacgatctggagcagaatttgctgtttcgttacatgggtacgcatagcccctggtggcgactgacagcagacagcaatgctctgcatcttgctgccagtgaaagcgctgacatcattcaggtggtggcgctggatgatgagcaggccgcgctgatccgccagctcaccgtgataacctccagcattgccatgaccctgcccttgtacggtgtggacgttcccgttcatcttgtcggccgtaaaattaacaaaaatgagtgggcaggaacggcatcagcctggaacgataccccttccgtggcgcgcgacctggcgcaggggctctccttcgccgaacaggtggtttccgaggctaactccgtgattgtgatcctcgaccagaacgggaatattcagcgcttcaaccgtttaagtgaagaatatacgggcctgaaggaacaggaagttatcgggcaaaacgtgttcaaactgtttatgagccgtagcgaagccgcggcctccaaacgcaacatcaccggtttttttcgtaacggcagctcgtacgaagttgaacgctggatcaagacccgcaaagggcagcgcctgtttctcttcagaaataaatttgttcacagcggcagcgggaaaaatgaaattttcctcatctgttcaggtaccgacataaccgaagagcgtcgggcccaggagcgcctgcgcgtactcgccaatacggatacgattaccggtttgcctaaccgaaacgccatccatgagctgatctctgatgccatcaccgctcggggtgacacccaggtaggcgtggtttatctcgatctggataactttaaaaaagtgaacgatgcctatgggcatatgtttggcgaccagctgctacaggccgttgcgctggcgatcctgagctgcctggacgaaggacaaaccctggcgcgcctgggtggggatgagtttatcgtgctagccaccgatacctcgcagggcgcgctggaagccatggcatcgcgcatactgacccgacttcgtcagcctttccgcatcgggctgatagaggtttacaccggctgctcgctgggcatcgcgcttgcgccccagcacggtaacgatcgcgaaagcgtcattcgtaatgccgacaccgccatgtacaccgccaaagaaaatggccggggcaaattctgcgtcttctcgccagagatgaaccagcgcgtatttgaatacctgtggctggataccaacctgcgtaaagcgctggataacgatcagctgttaatccactaccaacccaaaataacctggcgcggcgaagtcagaagtctggaggcgctggtgcgctggcagtcgccagagcgtggcctgatcccgccgatggaatttatctcctatgctgaggagtcagggctgattgtgcccctgggccgctgggttatgcttgatgtggtgcgccaggtggcgaaatggcgcgacaaggggatcaaccttcgcgtcgcggtcaacgtctccgcccgtcagctggcggaccagaccatcttcagcgacctgaagcaggcgctgaaagacctgagttttgaatactgcccgattgacgtggaattgaccgaaagctgtctcattgaaaatgaagagctggccctgtcagtgatccagcaatttagccgcctgggagcgcaaattcacctggatgactttggtacggggtactcttccctgtcgcagctggcgcgcttccctatcgatgccattaagcttgaccaggctttcgtgcgggacatccataagcagtccatttcacagtcgctggtgcgtgcgatagtcgccgtggcgcaggcgttaaatttgcaggtcattgctgaaggggtggaaagtgcaaaagaagacgcctttctgacgaagaatggcgtcaacgaacggcagggttatctttttgctaagcccatgcccgctgccgcattcgagcgatggctaaagcgctatcaggccagaaatgtccgttag

SEQ ID NO: 114563 - DNA, 1935 bp, Enterobacter cloacae
atgtttcaggacaacccgctgctagcgcagcttaaacagcaactgcattcccagacgccgcgtgcagaaggggtcgtaaaagccacggaaaagggctttggctttcttgaagttgacgggcagaagagctacttcattccgcctcctcagatgaagaaagtgatgcatggcgaccgcatttcggccgttattcataccgaaaaggaacgagagtctgccgagccggaagcactgatcgaacctttcctgacccgctttgtcgggaaagtgcataaaaaagacgatcgtctttctgtcgtgccggaccatcctctcctgaaagatgctattccgtgccgcgccgcgcgtggcgttgagcatgattttgttgagggtgactgggcggttgctgagatgcgccgtcatcctttaaaaggcgatcgcggtttttacgccgagcttactcaatacattaccttcggcgacgaccatttcgtcccatggtgggtgacgctggcgcgccacaacctcgaaaaagaagcgcctgagggcgtggcgactgaaatgcagaacgaaggtctggaacgtcgcgatctgacggcgctggactttgtcaccattgacagcgccagcaccgaggatatggacgatgcgttgtatgccgaagatacagccgatggcaaactgcatctgaccgtcgccattgccgaccctaccgcatggattgtcgaaggcagcaagctggacgagatggccaaagtgcgctcgttcaccaactacctgccgggctttaacattccgatgctgccgcgtgaactctccgacgatctttgctcgctgcgtgcgcatgaagtgcgtccggtgctggcctgtcggatgaccattgcggctgatggtaccattgaagaagatattgaattcttcgccgccaccatcgaatccaaagccaagctggcctatgacgacgtgtccgactggctggagaacacgggtagctggaaacctgagtccgacaacattgccgcacaaattcgtctgctgcaccgcgtctgcctgagccgcagcgaatggcgtcaaactcacgcgctggtcttcaaagatcgtccggactaccgttttgtgctgggtgaaaaaggtgaagtgctgaatattgtcgctgagccgcgccgtattgccaaccgcatcgttgaagaagcgatgatatccgccaacatttgtgccgcccgcgtgctgcgcgacaaattaggctttggcatttacaacgtgcacaccgggtttgatccagcgaacaccgaagcgctggctgccctgctgaaaacccatgacgtacacgtcgatcctgaggaagtgctgaccctgcaaggtttctgcaaactgcgccgcgagctggacgcgcagccttcagggttccttgacagccgtattcgccgcttccagtcctttgcggaaatcagcaccgagccaggcccgcacttcggccttggccttgaggcttacgcgacctggacctccccgatccgtaagtacggcgatatggttaaccatcgtctgctgaaagcgatcatcaaaggggaatctgttgcccgcccacaggatgatacgacgttgcagatggcagaacgtcgccgtcttaaccgtatggcggagcgtgatgtcggcgactggttatacgcgcgcttcctgaatgataaggcagggactgacacccgtttcccggctgaaatcattgacatcagccgcggcggtatgcgcgttcgtctggtggataatggcgccgttgcctttattcctgccccgttcctgcatgccgttcgcgacgaactggtttgtagccaggaaaacgggaccgtgcaaattaaaggcgaaacggtttacaaggtcactgacgtgattgatgtcaccatcgctgaagtgcgcatggaaacccgcagtattatcgcgcgccctgtcgcctga

SEQ ID NO: 114564 - DNA, 987 bp, Enterobacter cloacae
atggaacaacgccgtttttccggcaaaggccactggtatcatgaaacccagtcgaatcattcgcagacggacgttctgccgctggtgcccgaagccgctaacgtcgacgaccgttttttgctcgatttagccctgcccgatgacattctcgcaagctgtgctggttggcttacgcctgcccgaaccctctgtcatcttttgttcccacttgatactcccgtgaaccgtctgcatacgctcagcgcctacgacaggctgagcacggcattaacggttgcccaggcgtgtggcgttcagcggctctgtaaccactacgctgctctgctcgcccctcttccggggccggactcctcccgggaaagcaatcgacgccttgcagaaattacccagtatgcccgccagttagccagctcacccgatgtcatcgatgataaagcccaaaaccagcttgatgaggttggactcacaacgtatgacattgtgcttatcaaccagatcatcggctttgtcggttttcaggcgcgagtggtcgcggtatttcaggcattgcttggccatccggtacgctggctgcccgggcatcacattcagccccatacgctgccggtcagcttcagcagatggaccgccacgctacccgcggttgagctaaaatatgccagtgcgcttcagcttgaggcgctctcacgctggcaggcggaaccggcactcgaagcgcttactcctgtgctgtgtcatgagccgatgctgcttgatctgacgggcgaaattctgcttaaccatccgcgaagtgaaggtcccgcctcttcgatgctctcagccgctcgtgcgctgcttgtcgcctctccggatcgctttagcgccgcccagttaacgcccctgaccgggtcaggtctctcgccagagaaggccatcaacctgcttacgcgagatgcattttatggctggctggaccgtctgcgcgtggcgctcggtaaagaggaataa

SEQ ID NO: 114565 - DNA, 789 bp, Enterobacter cloacae
atgggttttctttccggtaagcgcattctggtgactggcgttgccagcaaactgtccatcgcatacggcatcgcacaggcaatgcatcgcgaaggcgctgagctggcgttcacctaccagaacgacaagctgaaaggccgtgttgaagaatttgccgcgcagctgggttccagcattgttctggaatgtgacgttgcacaagacgaaagcattgatggcatgtttgctgaactggcaaaagcatggccgaaattcgacggttttgttcactccatcggcttcgctcctggcgaccagctggacggcgactacgtgaacgcggttacccgtgatggcttcaaaatcgcccacgacatcagctcctacagcttcgttgcaatggcaaaatcctgccgcgcgatgctgaacccgggcgcagccctgctgactctgtcctacctcggcgcagaacgtgctatccctaactacaacgttatgggtctggcgaaagcatctctggaagccaacgtgcgctacatggcgaacgcgatgggtcctgaaggcgtgcgtgttaacgctatttctgcgggtccaatccgtaccctggccgcttccggtatcaaagatttccgtaaaatgctggcacactgcgaagcggttaccccgattcgtcgtaccgttaccatcgaagatgtgggtaactctgcggcattcctgtgctctgacctttccgcgggcatctccggcgaagtggttcacgttgacggcggcttcaacatcgctgcaatgaacgagctggaaatcaaataa

SEQ ID NO: 114566 - DNA, 1347 bp, Enterobacter cloacae
atgaaaaatattacgttggccgaaaaactgatcatgctgtcaggtgcggtgcttttcgcacttatgatcgcggtgaactccttttgcgtgaatgataatcctggtttcagggtgcctatgaccacctatttgatcgtcatgattgcgctgttctttctggataccattatctttatttttatccagatgctgtatgcctccgaccgaacgcgtttttcattattcattctgagcctggcatttcttagtgggctggtttattttattgagacgatcattgttattcagcttccggagcatgctggttttacccaggcggcaaaaaccaacgatacggcggtattccattttttccggcagctgagctttatcgtattactggcgctggcggtccgtgtggagaaaatcacgatacgatccacgctcagattccgaaataagatcagcatgacgttagcattaatgatgtcactggttatgtttccgatgctggcccattatctcagcagctaccatccggcctggacattaacgattgcagcatacgaagatgaacatcatcatcctgtctgggatatcaggtacgtaaacgttctgatcctgctctggtcggctttactttgttatatgatttcagtgacacgcctggcgtccgggatctggaacagtattattgtggtctgcctttccgccatcgtttacaattttttcctcttactgcttgatacctacaatctgtcgctctggtatatcagccgggcagtagaggtcctcagtaaattatttgtgatttgtaccttaatgttccatgtctttaacctgttgaaaattttcggcgatcgggttgatcgcgatccgcttactcagatctacaaccgtaaatatttttacgaggcacttccgcggatccgctcgctcaggacagaaaagggggccagcatcatgatgctggacatcgacaactttaagtcgattaacgataactggggccatcttgtgggggatcgcgtgattctggcggtcgtggatattatcaaagacagcattcgcgataacgacatctttgcccgactgggaggcgaggaatttggtcttctgctgccggatacggacagtaggcaggctattgccgtcgcggaacgtattcgccagaacgttcaacagcgcaccgggccgggctaccattatgctctccctgtaaaggtcacattaagtatcggcgtgtgctcagccattcagaataacgtcaacagcaatgatattatgcgtgacgtggacgaggcgttgtatgaggctaagcacaacggtaaaaacagaatcgttaccagacaggcggaatgcagctga

SEQ ID NO: 114567 - DNA, 822 bp, Enterobacter cloacae
atgaaagacagcatcagtaactatattctctcctgggtagaagaaaataactttactattttacacattgatgatttggttgcagatattggatacagcagaagaaccatcgaaacatggtttaaagagaagtatcggctctctctaggtgagtatattctccgacggaggttaagccgtgccgccattatgctgagaatgacgtcgattccggtgacggatattgcgtatttattccattaccagagcagccagggattctccagagcctttaaaaaaatgatggggctgacaccctctgagtacagatgtgccagagggtggaattttgacatcttacagccctcttttttattaagcgaactggaaacgcctgagctcgaggtctgctttctagatgaaacgtttgtctatacgcatgaaattatcgagcacgatcatctttttgatacctcggtgcatgatattactaaaaaaatcaaaaagctcctgacagaaaaccgccatgatatcgataaaattattctgatgccccgccgccccgagttaggcaaaagccgatcgtatctggtcgaggtattaatatcgtacgctttacaaagcgacacggtgacaaataaaaaatcccgcgttgtgcgtgggagatacgcaagaatgccctttagcggtagctgggaaagctacagcgcgtttaacaagattggcttcgttaaggcgatggtaaataaacgcctgacgttgcgcgacggtatttacctgatgaaagttaatgcgtacagcgatgagcgtgtcgattttgatgttttcatccccatcctgtaa

SEQ ID NO: 114568 - DNA, 402 bp, Enterobacter cloacae
atgccttcacgtgatcccgtcttcccggctaaccgacatgccctctatgaagagcatggctattcagctgcaatccgctctggcgatctgttatttgtttccggtcaggttggcagccgcagcgatggcacacctgaacccgactttcccgctcaggtgcagctggcgttcgataatttacgggcgatcctggcagccgcgggatgtacttttgacgatctgattgatgtcacgacgtttcataccgatcctgaaaaccagtttcccgtcatcatggaggcgaaaaaactggcatttccgcacgctccttacccaaactggacagcaataggcgttaactggcttgcgggttttgatttcgaaattaaggttatcgccaggatccctacgcccgcgaattaa

SEQ ID NO: 114569 - DNA, 591 bp, Enterobacter cloacae
atggctacaaaacgtcgcgctgaaacggcccaggaaaatcgcgagaaaatgattcaggcggcgcggaaggcgtttgctgaaaaaggctatgccgcagcgtcaatggatgaactcacggcaagcgtggggttaacacgcggcgcgctatatcataatttcaacgataaaaagggattactggcggcggtggtcgcgcagatagacagcgaaatggcagcaaacgcaaaagcgattgccgccgccgccgaagatgactgggagcgactgctggcggagggcatcgcctatatcaaaatggcgctcgttcctgaagttcagcgtatcgtccttcttgacggtccggctgttctgggcgacccggcgcaatggcccagccagaacagctgccttgagtcgacccgtcagaccatcgaaaaaatgatggagtgcaacgtaatcaaaaagatggatgccagagtcgcagcccatctgctgaatggcgctgctctgaatgcggctctgctgattgccgcgagtgatgaaccgcagaagactctcccgcatgccatagaggtgtttactctgctggcaagcgggttacgcagcggctaa

SEQ ID NO: 114570 - DNA, 807 bp, Enterobacter cloacae
atggtcgaaaccttactggaagtacgtaacctgagtaagacctttcgctatcgcaccggcctgtttcaccgtcagaccgtcgaggctgttaaaccgctgagctttacgctgcgcgaaaagcagacgctggcgattatcggtgaaaacggctcgggcaaatcgaccctggcaaaaatgctcgcgggtatggtcgagccgagcggcggtgaaatactgattgacgatcatcctctggaatttggggactactcttttcgcagtcagcgcatccggatgatttttcaggatccgtcgacgtccctgaacccgcgtcagcgtatttcccagatcctggatttcccgctgcggttgaataccgacctggagccggaagcgcgtcgcaaacggattgtcgaaaccctgcgtctggtaggcctcctgcccgaccatgtcagctattatccgcacatgctggccccgggccaaaaacagcgtctcggtctggcccgcgcgctgatcctgcgcccgaaggtcatcatcgccgacgaagcgctggcgtcgctggatatgtcgatgcgttcgcagctcattaacctgatgctggagttacaggaaaagcaggggatctcgtatatttacgtgactcagcatctgggcatgatgaagcacataagcgaccaggtgctggtgatgcaccagggagaagttgtcgagcgcggcagtaccgctgacgtactggcctccccgctccatgacctgacgaaacgcctgattgccggacactttggtgaagcgttgacggcggacgcgtggcgtaaagatcgttag

SEQ ID NO: 114571 - DNA, 993 bp, Enterobacter cloacae
atgccgttactcgatatccgcaacctcacgatcgaaattaaaacgggcgaaggctgggtcaaggccgtggatcgcatcagtattacgctcgcagagggcgaaatccgcgggctggtgggcgaatcgggttcagggaaaagtctgatcgccaaggccatttgcggcgtggcgaaggacaactggcgggtgaccgccgatcgtatgcgcttcgacgacatcgatctgttgcgtctctccccgcgcgaacgccgtaaactggtgggccataacgtctcgatgattttccaggagcctcaatcctgtctcgatccgtccgagcgcgtcgggaaacagctgatgcagaacatccccgggtggacctataaaggccgctggtggcagcgtttcggctggcgtaaacgccgtgccattgagctgttgcaccgtgtcgggatcaaagaccataaagacgcgatgcgcagtttcccctacgaactgaccgacggtgaatgccagaaagtgatgattgccatcgccctggcgaatcagccgcgtctgctgattgcggacgaaccaacgaacgcgatggagccaaccacccaggcccagattttccgcctgctcacgcgtctgaaccagaataacaacaccaccattttgctgatcagccacgacctgcaaatgctgagcaaatgggcggataaaattgatgtaatgtattgcggccagacggtagaaaccgcgccaagcgaagacctggtgacgacgccgcatcatccctacacgcaggcgctgatcagggcgatcccggactttggcagcgcgatgccgcacaaaagccggctgaatacactgcctggcgcgataccgctgctggaatcgctgcccattggctgccgtctgggtccgcgttgcccgtatgctcagcgcaaatgcattgaaacaccgcgcctgacagggccgaaaaaccatctgtttgcctgtcatttcccgctgaacatggagagagagtga

SEQ ID NO: 114572 - DNA, 891 bp, Enterobacter cloacae
atgccttacgataacgtctacagcgaaaagcgcacgcccggtgcgctacgcaccgtgtggcgtaatttttacggcgacaccacggcgatgatcggcttttacggctgcattggcctcgtgttgctgtgcgttttgggttcgtggtttgcgccgtatggcatcgatcagcagttccttggctatcagcttttaccgccgtcgtggtcgcgctacggggaggtttcgttcttcctggggactgacgatctcggacgcgacgtgctaagtcgtttgctgagcggcgccgcacctacggtgggcggcgcgttcgtggtcaccctggctgccgcgatctgcggcctggcgctgggcatttttgccggctcaacccacgggctgcggtcggccgtgcttaaccatattcttgataccctgctctctattccttcgctgctgctggcgattatcgtcgtggccttcgcggggccgcacctcacccatgcgatgttcgccgtctggctggccattctgccgcgcatggtgcgctcggtttacagcctggttcacgacgagctggagaaagagtatgtcgtcgccgcccgtctggatggcgccaccacgtttaatattttgtggtttgccgtgctgcctaacattgccgccgggctggtgacggagatcacccgcgccctgtcgatggcgattctggatatcgcagcgctgggcttcctggaccttggcgcgcagctcccttccccggaatggggcgctatgcttggcgatgcgctggagctgatttacgttgcgccgtggacggtcatgctgccgggcgcggccatcatggtgagcgtgctgctcgttaacctgctgggcgacgggatccgccgcgcaatcaatgcgggggtgcaataa

SEQ ID NO: 114573 - DNA, 966 bp, Enterobacter cloacae
atgattatatttaccttgcgtcggctactgttactgctggtgaccctgttcttcctgacctttgtcggctttagcctgagctactttacgccgcacgccccgcttcagggctcatctctctgggacgcctggctgttctggtttaatggcctgctgcactgggattttggcgtgtccagcatcaacggacagctcatctccgaacagctgaaagtggttttcccggccaccatggagctgtgtatactcgcctttggctttgccctcatggtggggatcccggtgggaatgctggcgggaatttatcgtaataaatggcaggataaatttattagcgcgcttgccttaattggcttttccatccctgttttctggctggcgctgctgcttaccctcttcttctcactgacgttaggctggctgccggtatctggccgttttgacctgctgtataacgtgcaaacggttagcggcttcgccatcgttgacgcctggctttctgattcagtctggcgcgacgaaatgatcgtgagtgcgctgcgccacatggtgctgccggtgcttacgctggccgtcgcgccgacgaccgaggtgatccgcctgatgcgcatcagcactatcgacgtcttcgatcaaaactatgtgaaagccgccgccacgcgcggactgtctcgcctgacgattttacgtcgccatgtgctgcacaatgcgttgccccccgtaatcccacgtcttgggctgcaattctcaaccatgctgacgctggcgatgatcaccgagatggttttcagctggccgggccttgggcgctggatgatcaatgccattcgccagcaggattatgcggcgatctccgccggcgtgatggtgattggctcgctggtcattattgttaacgttatttccgatattttgggtgccatggccaacccattgaagcataaggaatggtatgccttacgataa

SEQ ID NO: 114574 - DNA, 1641 bp, Enterobacter cloacae
atgcgcctggttttatcgtccctgtttgcactcggtctgttcagcaatctggcctttgctgcgcccgatcgagctgtgcctcctgatatccgtgatagtggtttcgtctactgcgtcagcgggcaagttgatatttttaatccgcaaaaagcggggagcggcctgattgtcgatacgctggccgcacagctctacgatcgcctgctcgacgtcgatccttatacctatcggctggttccggagcttgctgaaagttgggaagtgcttgataacggtgccacataccgctttcgtctacgcgatgatgtcgcatttcagcacaccccgtggtttaccccaacccgtaagctcaacgcggatgacgtggttttcaccttccagcgcatattcaaccgcaatcatccgtggcataacgttaatggcgggaacttcccctatttcgacagtctgcaattcgcggactcggtcaaaagcgttcgcaaactggataaccgtacggttgagtttcgtctgaatcgcccggatgcctccttcctctggcatctggcgacgcactacgcctcggtcatgtcagccgaatacgcggatcagctgacgaaaaaggatcgtcaggaacgtctcgatcgtgagcctgtaggcaccggtccgttccagttagcagagtaccgcgccggacaatacattcgcctgcaacgccacgatcgtttctggcgcggcaagccgctgatgccgcaggttattgttgatctgggttcaggtggaacaggccgactctccaaactgctgaccggcgagtgcgacgtgcttgcctggcctgcggccagccagttgaccattttgcgcgacgacccacgcctgcgcctgaccctgcgcccgggcatgaacatcgcttatctggcgtttaacaccgataagccgccgctaaataatccggccgtgcgccatgcgctggcgttagcgatcaacaaccagcgtctgatgcagtcgatttactacggtaccgcggaaaccgccgcctctattcttccgcgcgcctcctgggcctatgacggcgaggcgaagattacggaatataatccggcgaaagcgcgcgaacagcttaaagcgctgggggcagaaaacctgacgctacagctgtgggtgcccaccagctctcaggcgtggaaccccagcccgctgaaaacggctgagctgttgcaggctgatatggcgcaggtgggcgttaaggtgatcatcgtgcctgtcgaaggccgtttccaggaggcgcgtctgatggacatgaatcacgacttaacgctggctggctggtccaccgacagtaacgacccggacagcttcttccgtccgctgctgagctgtgcggcaatcaactcccagaccaactacgcccactggtgtaaccgggaatttgatgccgtgctgcaaaaagcgctggcgtctcaacagcttgcctcacgcattgaggcctacgatgaagcgcaaaatattctggccagagaacttcccgtgttgccgcttgcctcttccctgcgcctccaggcctaccgttacgatattaaagggctggtactcagcccgtttggtaacgcctccttcgcgggcgtgacccgtgagaaagaacaagaggtgaagaaaccatga

SEQ ID NO: 114575 - DNA, 978 bp, Enterobacter cloacae
atggctgaatataaagataatttgcttggcgaggccaacagcttcctggaagtgcttgaacaggtatcgcgcctcgcgccactgaataaaccggtgctgattatcggtgagcgcggaacgggtaaagaacttatcgctaaccgcctgcactttctgtctggccgctgggacggcccttttatttcccttaactgcgcggcgctgaatgaaaacctgctcgacaccgagctgtttggtcatgaagctggcgccttcaccggcgcacaaaaacgccatcccggacgctttgagcgcgccgatggcggaacgctctttctcgacgagctggcgaccgcgccgatgctggtgcaggaaaaactgctgcgcgtcattgagtacggtgaactggaacgcgttggcggcagtcagcccctccaggtcaacgttcgcctggtatgcgccaccaacgccgacctgcccgcgatggtggctgaggacaaattccgcgccgacctgctggacaggctggctttcgatgttgtacagctgccgccgctgcgggagcggcgcagcgatatcatgctgctggccgatcagtttgccattcagatgtgccgggaactgggtctgcctctctttccgggcttcagcgaacgggccaccgggaccctgctcggttaccactggccgggcaatattcgtgaactgaaaaacgtggtggaacggtccgtttaccggcatggcagcagcgagaccgaactggacaacattattctcgatccttttcggcgcgaggagaaacagctccctgctccggcgacgcgccagcaggctccggcgttgccgctcgatttacgccacttccagcatcagcaggagcaacagttgcttgagcagagcctgaaagaggcgaaatataatcagaaacgggcagctgaactgctgggcctgacctaccatcagttaagggcattgctcaaaaaacatcaaatgcgctga

SEQ ID NO: 114576 - DNA, 669 bp, Enterobacter cloacae
atgggtattttttctcgttttgccgacatcgtgaacgccaacatcaactcgctgctggagaaagcggaagatccgcagaagctggtgcgcctgatgattcaggagatggaagacacgctggttgaagtacgctccacctccgcccgcgcgctggcagagaaaaagcagttaacgcgtcgtatcgagcaggcaactgcccagcttaacgaatggcaggaaaaagcggaactggcgctgcgtaaagataaagaagatctggctcgcgctgcgctgattgagaagcagaagctgaccgacatggttgccacgctggaacacgaagtgacgctggtggatgatactctggcgcgtatgaagaaagagattggtgagcttgaaaacaaactcagcgaaacccgtgcacgtcaacaggcgctggcgctgcgccaccaggctgcaagctcgtctcgcgacgtgcgtcgccagctggacagcggcaagctggatgaagcgatggcccgtttcgaatcgtttgaacgtcgtatcgaccacatggaagctgaagccgagagccacagcatcggtaaacagaaaaccctcgatcagcagtttgctgacctgaaggccgatgatgaaattagcgagcaactggctgcgctgaaagccaaaatgaaacaagacaaccaataa

SEQ ID NO: 114577 - DNA, 225 bp, Enterobacter cloacae
atgagcgcgctttttctggctatacccctgaccattttcgtgctgtttgttctgcccatctggttatggctgcactacagcaaccgctcttcacgcggtgagctgtcgcagagtgaacaacagcggctggcgcagctctctgccgaggcaaataaaatgcgcgaacgtattcaggcgctggaagcgatcctggacgcggaacacccgaactggagggaacggtaa

SEQ ID NO: 114578 - DNA, 360 bp, Enterobacter cloacae
atggctggactgaatctgaataaaaaactgtggcggatcccacagcagggcatggttcggggcgtttgcgccgggctggcgcactatctggatgttccggtaaaactggtgcgtgtggtcaccgtattgtcgattttcttcggcctggcctttattacactggtggcatacatcatcctgtcgtttgtactcgatcctatgccggaaggtgagctggatgcggagaacacgccaaccagcagcgatctcctgaacgcggtggatgaacagctgagcgcaggggagaagcgattgcgcgagatggaacgttatgtcacctccgatacctttacgctgagaagtcgttttcgtcagctttaa

SEQ ID NO: 114579 - DNA, 225 bp, Enterobacter cloacae
atgaaacaaaactggcaacaggccggtcagaaggtaaaacccggcctgaaaatcgcaggtaaactggttctgatgacggcgttacgttatggcccggccggtgtggcgggttgggcgatcaagtctgttgcccgcaagccggtcagaatgatgctggcggtcgctctggagccgctgttacagaagctggcaaaacgcgtttcccggcgctacctgtcacgctag

SEQ ID NO: 114580 - DNA, 1686 bp, Enterobacter cloacae
gtgaacgcaaaaattaaaaaacttatcaatcatatttacggtgaatcattttcagatgcacaccttaacgtgttattaactaagcttgaaaaggcggcggttaatattacggaaaagcgtaagtcaggctgggatgaaaaagacgttgtgctgattacctatgccgatcagttttccgcgaaaggggagaaagcgttgccggtatttacccgtttctataatgaatggctttctcgcacgttttctcatgtccatctgttaccgttttatccgtggtcgtcggatgatggattttccgttattgattatcacgaagttgcacctgaaaccggaacctggcgagatgtcgcggaattaaaacagtctgccagcttaatgtttgacttcgtttgcaaccatatgtcagcgaaaagcgaatggtttgctaattatctggcgcagaagccgggctacgaagatttctttatttctgtcgatcccgaaaccgatttatcggcggtgacgcgtccccgcgcattaccgctgctgacgccgtttacgcttaatgatggcagcgttcgtcatctgtggaccacattcagcgatgaccagatcgatctcaatttcgcctcgccgcaggtgctgattgccatggttgacgttctgctccattacctcatggaaggggcgcgttatatccgtctggatgcggtcgggtttatgtggaagatcccgggaaccacctgtatccatctggaacaaacccattgccttatccagctgttccgcgccattacggacgccgtggcgcctggaacggtgatcatcactgagacaaatgttccccacaaagacaatatctcttacttcggtgatggtgaaaatgaagcccagatggtctatcagttttccttaccgccgctggtgctgcacgccgttcatcgtcaggatgttaaagccctgtgccggtgggcgggctcgctggcgctgccttcaacttacaccacctggtttaatttcctggcttcacatgatggtatcggattgaacccattacgcggcatccttccggaatcagagatcctttcgctggtcgaaaagcttcagcaggaaggcgcgctggtcaactggaaaaataatcctgacggaacgcgaagcccctatgaaattaatgtcacctatcttgatgcgttgagtttgcgagacagctcagatgatgagcgcattgcgcggttcatcctggcgcatgctgtgttgttaagttttcctggcgtaccggctgtatatattcaaagcattcttggttcgcgtaacgattatgaaggtgtcgaacgtctcggatataatcgcgcgataaacaggaagaaatacaccgcaggtcaggttgatcgggagcttaataataataagagtatacgttatcagatttattctcatttgagtgagcttattgctattcgtcgcggcgagcgtgcgttccatccggatagtcaggctatttttgacgcaatcggtgaaaatattcttaaaattgttcgtgttgctgaaaatggcgagcgaatgacagcattatttaattttagcaataaaatgcagaccgtttatggacaaacgctctttggtagggaattactctcaggacaagatattagcggtacggaactgaccctcaatccatggcaggtaatgtggattaaagaaaactaa

SEQ ID NO: 114581 - DNA, 1293 bp, Enterobacter cloacae
atgaaaatgcccaaaattgtgctgttatcagcactggtttcgtgcgccctgttatcaggctgtaaggacgataaagcatctcaggtcaccattgagtttatgcactcgtcggtagaacaggagcgtcaggcagttattacgaaactgatcgaaaaattcgagaaagaaaacccgactattacggtgaaacaggtccccgttgaggaagatgcctataacaccaaggtcattacgttggcccgtaccggcgcgctgccggaagtgattgaagtcagccatgactacgccaaagtcatggataaagagcaactgctggaccgtgacgcgatcggcaacgcgattaacgccgtcggcgaagataccttttacgacggcattttacgcgttgttcgcaccgaagacggcaaggcatggacgggggtgccggttagcgcgtggctgtccggcgtctggtatcacaaagacgcgctcgcggcagcgggaatcgaagaaccgcacaactgggagcaactgctgaaagccagtcaggcgctcaacgatccggcgaaaaaacattacggtatcgcgcttccaaccgcagaaagcgtcatgacggagcaggccttctcgcagtttgcgttgtcaggcggagccaacgtctttgatgcaaacggcaacgtgaaaatcgatacccctgaaatgtcgaaagcgctggcgttttatcgggcactggccgcgaacaccatgccgggctcgaatgatgtcatggagatcaaagacgcctttatgaacggctctgcgccgatggccgtttactccacctatatcctgcccgcggtctacaaagatggcaatccggccaacctggggttcgtggtcccgacggaaaaatcatcagccgtgtacggcatgatcacctcgttgacgatcacgaccggccagaccgaagaggaaacgcaggcggcagaaaaatttgtgacctggatggagcaggctcaaaacgcgtctgactgggtgatgatgtcccctggtgcggcgctgccggtgaacaaactcgtggtgggcactgaaagctggaaaaacaacgacgtgatcaaagcctttggccaactgccttacgagctgattgcccagttcccgaacgtccaggtatttggcgccgtaggcgacaaaaactttaccagcatgggagatgttaccggctccggcattatcagttccatggtgcataacgtgacggtgggacaaaaagatctcaatgcgacgttaagcaacagccagaagaaactgactgacctgataacacaacgatag

SEQ ID NO: 114582 - DNA, 882 bp, Enterobacter cloacae
atgaagacgttgttttctggtcgttcagatatgcctttcgccatgctgctgttggcccccagcctgattttgctggggggcctggtggcctggccaatgatttccaacattgaaatcagttttttacgtttaccgctgaacccgcgtattgatgcggtgtttgtcggcctggataactacattcgcattctgggcgatgctgcgttctggcactccctgtggatgacgttctggtatacggcgctggtcgtcctcggcagcaccgggttgggactggccgtagcgatcttctttaaccgtgaattccgcatgcggaaaacggcacgttcactggtgatcctgtcatacgtgacgccgtctatttcactggtatttgcctggaaatacatgttcaacaacggctacgggattgtgaactacctgggcgtggatctgctgcatctctacgatcaggcgccgctgtggttcgataatcctggcagcagttttgtcctggttgtgctgttcgccatctggcgttacttcccgtatgcctttatctcgttcctcgcgattttgcagaccattgataaatcgttgtacgaagcggcagagatggacggagcgaatgcctggcagcgttttcgtatcgtgacgttgcccgccatcatgccggtgctggccacggtggtcacgctgcgaaccatctggatgttctacatgtttgcggatgtgtatctgctcaccaccaaggtcgacattctgggcgtatatctctacaaaaccgcctttgcgttcaatgacctgggtaaagcagccgccatttccgttgtgctgtttgtgatcatcttcgctgtcattctgctgaccagaaaaagggtaaacctcaatggcaacaaataa

SEQ ID NO: 114583 - DNA, 843 bp, Enterobacter cloacae
atggcaacaaataaacgcgttctgggccgtatcggtttttatctgggactggcgctatttctgattatcacgctgtttccgttttttgtgatgttgatgacgtcgttcaaaagcgcgaaagaggcgatctcgctgcacccgaccattctgccgcaggagtggacgctacagcactacatcgacatctttaacccgctgattttcccgtttgtggattacttccgtaacagcatggtggtgtcgctgacctcctcggtcattgcggtgtttctcggcacgctgggcgcgtatgcgttatccaaactgcgctttaaagggcgcacgacgatcaatgcgagcttctacaccgtctatatgttctccgggatcctgctggtggtgccgctgttcaaaatcatcaccgcgctcggcatttatgacaccgaactggcgctgatcatcaccatggtcacgcagacgttgcctaccgcggtctttatgctgcgcagctatttcgacaccatcccggacgaaatcgaagaagccgcgatgatggacggcctgaaccgcctgcaaatcatcttccgcatcaccgtgccgctggcgatctcgggtctggtgtcggtctttgtctactgcttcatggtggcgtggaatgactatctgttcgcctccattttcctgtccagcgccagcaacttcacgttgccggtcgggctgaacacgctcttcagtacgccagattacatctggggtcgcatgatggcggcatcgctggtcacggcacttccggtcgtcattatgtatgccctgtctgaacgtttcattaaaagtggtttgaccgccggcggcgtgaagggctga

SEQ ID NO: 114584 - DNA, 1053 bp, Enterobacter cloacae
atgaaaaaattagttgcgacagcgcctcgtgtagcggcgctggtggaatacgaagatcgtcctgttgcagcacatgaggtgaagattcgtgcccgttatggcgccccgaaacacggcactgaagtcgtggatttccgcgcggcaagcccgttcatcgatgaagagttcaacgcggagtggcagatgtttaccccgcgtgaagaaggtgcagcgcgcggcatcgaatttggtaaattccagctggggaacataattgtcggcgacatcatcgaatgtggtgcggacgtgaccgaataccagatcggcgacagcgtctgctgctacggcccgttgcaggaaacggtcatcgttaacgcggtgaacaactataagctgcgcaaaatgccgcagggtgcatcctggaaaaatgccgtttgttacgatccggcgcagttcgccatgagcggcgtgcgtgatgctaacgtccgcgtaggggatttcgtcgtggttgtggggctgggcgcgattggccagattgcgattcagctggcgaaaaaagccggcgcgtcagtggttattggtgtcgatcctatcgaacatcgctgtgagatcgcccgccgtcacggtgcagaccactgcctgaacccaatcggtaccgatgttggtctggaaattaagaaactgaccggcaagcagggcgcagatgtgatcatcgaaaccagcggattcgcagatgcgctgcaatctgcgctgcgcggtctcgcctacggcggcaccatctcctatgtggctttcgccaagccgttcgcggcgggcttcaaccttggtcgcgaagcacacttcaataacgccaaaattgtcttctcccgcgcatgcagtgaacccaacccggattatccgcgctggagccgcaagcgtattgaagagacctgctgggaattgctgatgaacggttatctcaattgcgaagatctgatcgacccggtcgtcaccttcaccaccagcccggaaagctatatgaagtatgtcgatcagcacccggaactcagtatcaaaatgggcgtcactttttaa

SEQ ID NO: 114585 - DNA, 789 bp, Enterobacter cloacae
atgaaaatcgcaacacaaaagcaggcctttttcccgaccgctatcatggaaaaattcgaatacatcaaagggatgggatttgatggctacgaaatcgatggccgactgctggtggaaaatctcgacgaagtaaaagcggctatcaaagccaccggcctgccggtcacgacggcctgtggcggatacgatggctggatcggggatttcatcgaagaacgccgcctgaacggtctacagcagattgaacgcattctggaagcgctggcagaagtgggcgaaaaggggattatcgttccggctgcctgggggatgtttaccttccgtctgccgccaatgacttcgccacgtagcctggacggcgatcgcaaagcggtcagcgcttccctgcgctggctggatgaggtggcagcgcgcaccggtactaccgtctacctggagccgctgaaccgctatcaggatcatatgatcaacaccctggccgacgcgcgtcgttatatcgtagagaacggcctgaagcacgtgcagatcatcggtgatttctaccacatgaatattgaagaagactccctgacggaagcgctgcatcacaaccgcgacctgctgggtcatgtgcacattgctgataaccaccgctatcagccgggcagcggcagcctcgatttcgccagcctgttcgatcagctgcgtgccgataactatcagggttacgtcgtgtacgagtgccgggtgcgtgccgacgatccggctcaggcctataaggactctctcacttacttgcgtgaatgctaa

SEQ ID NO: 114586 - DNA, 1056 bp, Enterobacter cloacae
atgagtgcttctacacctttgcctctgcgcgtcgccattattggcgccgggcaggttgcagacaaagtgcatgcctcgtattacgccacgcgcagtgatgttcaaatggtggctgtcatggacagccgccttgagcaggcacaggcgttcgcggaacgttatgctattccatcggcatggcaggacgctcacgagatgttgcaggaagtaaaaccggatgtggtgagcgtctgttcgcctaaccggttccattttgaacatgtgatggcggctctcgaagcaggctgtcatgtgatgtgtgaaaagccgccggcgatgacgccgcaccaggcagatgagatgcgtctcgcggcgcgcaaggccggaaaagtcctcgcgtacgattttcaccatcgctttgccctggataccctgctcctgcgcgaggcggtaatgaacggaacgctcggtgaaatttacttcacctccgcgcaggccctgcgtcgctgcggtgtgccggggtggggcgtgttcaccaataaatcgctccagggcggcgggccgctgatcgatatcggcattcacatgctggatgccgcgatgtatgtgctcggcttcccgaccgtgaaacgggtaaccgcgcacagcttccagagactggggaaccggaaacacaccggccagtttggcgaatgggatcctgcgcagtttaccgtggaagatgccctgtttggcacgattgagttctgcaacggtggcattctgcgtctggacacctcttttgcgcttaatatccgcgagctgtcgatcatgaacgtttctttctgcggtgagaaggcgggtgcaacgctgttcccggcacacatttataacgacgaagccggtgttttgcagacgctgatccagcgtgaagaagctgacgatcggagacatctgcgcagtatggacgcgtttgttcgccacgtattgggcgagccggtcatgattgccgatgcggagcaggggctggtgatccagcaattagtcgcggcgttatatgaagccgcggaaacaggggaaagcgtgacgttatgctga

SEQ ID NO: 114587 - DNA, 2280 bp, Enterobacter cloacae
atgctgaaccagtctgtattaaccgatccgggcttttgcccgcatagtctgaataagtacgcgtccattatggcctgcggcaatggctacatgggcatgcgcgccacgcatgaagaagattacacccagcagaccagaggcatgtatctcgcggggctgtatcatcgcgcgggacgcaacgaaaccactgagctgatcaatctgccggatgtcaccgggattgaagttgagctggacggcgtcaatttcacgctcctttcaggcgaaattcttgagtggcaacgcgagctggcctttgctaacggcgaactgcatcgtaacgttgtctggcgttcgccggacggaaaacgctatcgcctcgagagccgtcgttttgtttcgctggaccagttgcccttagtggtaatgcagctctcgatcacaccgcttgacggcgccgctcaggccgtgctgaaaaccggcatagatgcgacacaaacgaacagcggcaggcagcacctggatgaaatctcggtcagggtctttgaccagcactacatgcagggtgtgtatgaaacgcaggaccgggcgtctgaagttgttgtttcggcgttttgtcagctctccgctaagagcgacagttgtttcaccgccaaaaatcgtcgcctcagcgttcatcattctctgactatctcgcaaggtgacactgtcacgcttgaaaaaatcgtctggctgacgcatcgctgcgataaatcgctctctcaggagtctttcgcccgcaacgcgctggccgatctcaaagtctgcgccgcaagaggctacgatgcgttgcttgaaagctcagcgtacgcctggaaagcggtatggcgtgacgctcgggtggaagtgacgtgtgcagaacagcaggatcagctggcgctggattacgccgtctggcatctgacgacaatgacgcctgctcatgatgagcgaagcagtattgcggcgaaagggctgacgggtgaggggtataagggacacgtcttctgggataccgaaattttcctgctgccgttccatctgtttacccgtccacagattgcccgcagtctgctgcgctatcgctggctcaatctttcgggcgcgcgtgaaaaagcacgccgtaacggttggccgggcgcgttgttcccgtgggaaagcgccgccagcggacaggaagagacgccagaatttgcggccattaacatccgcaccggggttcgccagaaggtcgcctccgcactcgctgaacaccacatcgtggctgatattgcctgggccgttgtcgcttactggcaggcaacacacgacgatgcctttatgcgcaatgagggcctgacgctgctgatggaaaccgcttcgttctggatgggacgcgcggcggaaattaatggtcgtcttgagatccatgacgtaatcggaccggatgaatacaccgagcatgtcaacaacaacgcctacaccaactatctggcctggcacaacgttgcctgcgcgcgtcagtttatggcgatgtttgggcgtgaagatgcgcgttttacggagaatgccgggacgtttctggcgcgcctgtggctgccagaggccgacgcagagggtgtgatcccgcaggatgataccttcatggcaaaacctgccatcgatctgagccgctataaagccaaagcgggtaagcaaaccattctgcttgattactctcgcgcggaagtgaacgagatgcagatcctgaagcaggccgacgtggtgatgcttaactacctgctgccggaacggtttacgccgcagcaatgtgccgccaatctggcgttctacgagccacgcacgatccatgattcatccctgagtaaagccattcacggcattgtgctcgcacgctgcggtgacaccgacggggcgtatgccttctggcgtgatgggattgccatcgacctgggggacgacccgcacagcagcgatgatggtattcatgccgccgccaccggtgcgatctggttgggcgccattcagggatttgctggcctgcacattagcgaaggggagctgcatcttgcgccgaagctgcctgctcactggcagaaactcgcctttccgctgcggtggcgggacgcaacgatgcacattacctgtgaagatgaccagttaaccattgaaaccaccgcacctgtcacgttgacgctgtggggtaaaacgctgcacgtatcagggcgaaaggtctgtgagcgtaaggactttcttgcatctgttaatgggaccgctaccacggaggggcgccatgacacttaa

SEQ ID NO: 114588 - DNA, 666 bp, Enterobacter cloacae
atgacacttaacgctgttgtattcgatctggacggggtgatcaccgataccgcgcatcttcactttctggcctggcgcgccgtggcggaggagattggtatcaccttcgatgaagtatttaacgaacagctgaagggaataagccgtatggactccctccagcgcattctgaaacatggcgggaaagaggggatgttcagtgacgagcagcgcctggcgctggcgacgaaaaaaaacgcgctttacgtccagtcgctggcatcactgacgcaggattcgctgctgccgggtattcgcgacgtgctggcggatattcgcgccgcgaaggtcaaaattggcctggcatccgtatcgcttaatgctcctgggattttgcacgcgttgggtattcatcaggctttcgatttttgcgccgatgcttcgcgcatttgccgctcaaagccggacccggaaatcttccttgcggcctgtaaaggactgaacgtgcgtcctgaagaggccattggtatcgaagatgccgccgcaggagtagatgcgattaacgccgcaggaatgctgtcggtcgggattgggcctggcctgaaccatgcgggattacaacttcattcaacgcaggaactgacctgggaacgcctgacggcgttctgggcatcccgggcgtattga

SEQ ID NO: 114589 - DNA, 1083 bp, Enterobacter cloacae
atggctcaactgtctctgaaacacattcagaaaatctatgataaccaggtccacgtggtgaaggatttcaacctcgaaattgaagacaaagaatttattgtcttcgtcggtccatcgggctgtgggaaatccacgacgctgcgaatgattgccggcctcgaggagatcagcgcgggtgaactgattattgacggggtttgcatgaatgatgttcccgccaagtcccgtgatattgcgatggtcttccagaactatgcgctctatccgcatatgacggtctacgacaacatggcgtttggcctgaaaatgcaaaaaattgcgccctccgtcattgaagaacgcgttacctgggcggcacagatcctgggcttgcgcgactatctccagcgtaaacctggtgcgttgtccggcggtcagcgccagcgcgtggcgttaggcagggcgatagtgcgcgaagcgggggtcttcctgatggatgagcctttatccaatctcgatgccaaacttcgtgtgcagatgcgcgctgaaatcagcaagctgcaccagaagcttaataccaccatgatttacgtgacgcacgatcagacggaagccatgacgatggcgacccgcatcgtgattttaaaggacggcatcattcagcaggtgggcgcgccgaagcaggtatacaacgagccggcgaatatgttcgttgcagggtttattggttcgcctgcgatgaacttcattcgtggcgcgatcgacgaccgctactttgtgacggaaacgctgcgcctggagatcccggaggacaagctggccgtactgaatgcgcaaggttaccagcgtaaagcggttgtctttgggatccgtccggaagacattctcaccgcacagcgaagcggtgaaaacatcacggcgaagatcagcgttgctgagctgaccggggctgaatttatgctttatgccaccgtgggtgggcatgaactggttgtccgtgcgggagcggcggatgattacgttgccggagataatatcggcatccagttcgatatgaataagtgccatttcttcgatgctgatactgaaacagctattagataa

SEQ ID NO: 114590 - DNA, 915 bp, Enterobacter cloacae
atgagtactctactaagaagtgctgcgctcgtcctgtgcgcaggggtgagctgcgcgcaagcaacagaatcagccaaacagtgggaatttaatattggcgccatgtatgaaattgaaaacgtcgaaggtcaggccgacgataaagatggattatatgaaccctccgtgtggtttaatgccacatgggatgcctggaccatttcgctggctatgtatcaggaagggccggtcgattacagtagcatgacgcgcggcacctatttcgatcgtcctgaagtagaattacgctatcgttttatcggcaccgatgattttacgttcggcctgaccggtggcttccgtaattatggctatcactttaaggatgagcatggtgctaaagacggtagtgctaatatgcagcgctataaagttcagcctgactgggatattaaactaaccgacgactggcgttttggcggctggtttgccatgtatcagtttgccaacgatctggaaaaaaccggctattctgacagccgcgtcgagaccgaaaccggttttacctggacaattaacgaaacggtctcggcaaaagttaattactatttagagcgcggttttaatatggacggctcacgaaataacggtgaattctccactcaggaaattcgcgcttatctgccgatttcattgggtcagacgacgctaacgccttatacccgtctgggactcgatcgctggtcaaactgggactggcaagacgatcctgagcgtgaaggacatgatttcaaccgtttgggtatgctgtacgcctatgattttaacaatggtttatccatgacgctggaatatgcctacgaatgggaaaaccatgacgaaggggaaagtgaccgcttccactatgccggtatcggcgtgaattacgcgttttga

SEQ ID NO: 114591 - DNA, 1011 bp, Enterobacter cloacae
atgtcacccaccatctatgatattgcccgcgttgctggcgtttcgaaatcaaccgtgtcgcgcgttctgaataaacaaacgaatatttctcctgaagcgcgcgaaaaggtgttgaaggcgatagaagaattaaattatcaaccgaataaacttgcccgcgcactcacctcttctggcttcgacgccattatggttatttcgacccgttcaaccaaaaccaccgcaggcaatccgtttttctctgatgtactacatgccattacggcaaaagcagaagaagagggttttgatgttattttacaaacgtccaaaagcagcgaagatgatctgcaaaaatgcgtgggtaaaataaagcagaagatgatcaaggggatcatcatgctaagctcgccggcgaacgagtcttttttcgcgacgctggacgaatatggcgtgcccgtggtcgttattggtaaagtggaaggtaattaccagaatatctattctgtcgacacggataatttccgcgacagcgccatattaaccgactcatttatcaaacatggtcgcactaaaattgcctgcctgcatgccccgctcgattatcacgtttctatcgatcgcctggcgggctataaatcgagtcttgagaagcagggtattgcagttaacccggactgggttattgatggcggatatacccatgaaagcgcgcttcaggcggcctgtcagctactctcttcagacaacccgcccgatgcggtttttgcgacagacagtatgaaattgctgagtctttatcgtgccgcggatgcgctaaacctgacgatccccgaacaggtcgcaatggcaggatacagcgacccaatgctatctctcattttaacccctgcgcctggcggctttgatatccccaccagaaagctgggcgaagagagctgcgatgtgttgttcaggtgcatagcgggtaaacctgccccgcataagatattggttgaaacgcatttttcagatgcggcttcattacgctaa

SEQ ID NO: 114592 - DNA, 1398 bp, Enterobacter cloacae
atgaagcgacttaaaaacgaattcaattctctggtgaaccgtggcgttgatcgccatctgcgtcttgccgtgacggggctgagccgcagcggtaagacagcattcattacggcgatggtcaatcagctgttgaacctgcatgcaggggcgcgcctgccactgcttagcgcagtgcgcgaggagcggttgcttggggtgaaacgcgtaccgcaacgtgattttggcataccccgtttcacctatgatgaaggtctggcgcagttatacggggagcctcccgcctggcccaccccgacgcgtggcgtgagcgaaatccggcttgcgcttcgtttccgctcgaatgaatccctgatgcgtcacttcaaagaaacgtccacgctctatctcgaaattgtggattacccgggagaatggctgctcgatttaccgatgctggcgcaggattacctgagctggtcccgacagatgaccggtctgttgcaggggcagcgggcagagtggtcgaccaaatggcgccagctttgcgaaggactggatccgctggcaccggcggatgaaaaccgtctggccgtcatagccgaagcctggacggattacctgcatcagtgcaagcaggaggggttgcattttattcagccgggccgctttgttctgccgggtgatttagccggtgctcccgcgctacagtttttcccgtggccggacgttgacagcatcggtgaatcgaaactggcgcaggcggacaagaccaccaacgccggtatgctccgcgagcgatacaattattactgtgagaaggtggttaagggcttttataaaaatcactttttacgctttgaccgccagatcgtgctggtggactgcctgcaaccgctcaacagcgggccgcaggcgttcaatgatatgcggctggcgctgacgcagctgatgcaaagctttcattatggccagcgtacgctgtttcgccgtttgttctcgccggtcatcgacaagctgctgtttgccgccacaaaagctgaccatgtgacggtcgatcagcacgccaacatggtatccctgctgcaacagctggtgcaggatgcctggcagaatgcggccttcgaagggatcagcatggactgtctggggctggcgtccgtacaggcaacgcagagtgggttgattgacctgaatggcgagaaaattccggccctgcggggcaaccgtctcagcgacggtgagccgctcacggtctatccgggggaagttccggcgcgtctgccgggccaggctttctggcaaagccagggttttcagttcgaagccttccgtccgcagagcatgaacgttgaccagccattgccgcatatccgtctggatgccgcgctggaatttttaattggagataaattgcgatga

SEQ ID NO: 114593 - DNA, 1053 bp, Enterobacter cloacae
atgacggaaccgttaaaaccacgcattgattttaccggccagcttgagcagtccccgcatgaggcgtttaaaacggcgcaaaccttcagcggctcgcaggccgacaactttgctcccgtgctggcagacgagccgttggttgaagaggggcaggcggaagcggttgttgatgcggcactgcgcccgaaacgcagcctgtggcgcaagatggtgaccgccgggttagccctttttggtgtgagcgtaatcggccagggcgtgcagtggggcatcaatgcctggcaaacgcaggactgggtggcgctggggggatgcgccgccggggcgttgattgttggtgcgggcgttggctcggtcgtcaccgagtggcgtcgcctctggcgtttgcgtcagcgtgcccacgaacgcgatgaggcgcgggatctgctgcacagtcacggcacaggaaaagggcgtgctttttgtgaaaagcttggggctcaggccgggattgatcactctcacccggcgcttcagcgctggtatgcggcgatccacgaaacccagaatgaccaggaagtggtcacgctctatgcccacattgttcagccggtgctggatgcgcaggctcgtcgtgagatcagccgctcggcggcggaatctaccctgatgatcgccgtcagtccgctggcgatggtggacatggcctttatcgcctggcgcaacctgcgcctgatcaaccgcatcgccagactgtatggcattgagcttggctattacagtcggctgcgcctgttcaaactggtattgctgaatatcgccttcgccggggcaagcgaactggtgcgggaggtcgggatggactggatgtcgcaggatcttgcggcccgtctctctgcccgggcggcgcaggggattggtgccggtctgcttacggcacgcctgggcatcaaagcgatggaggtttgtcgtccactcccctggatcgatggcgataagccgcggctgggggatttccgtcgcgaattgattggccagcttaaagagacgctcaataaaaaacctgctcagtga

SEQ ID NO: 114594 - DNA, 1542 bp, Enterobacter cloacae
atgcgtctggaagtcttttgtgaggaccgtctcggtctgacccgcgagttactcgatcttcttgttttacgtagcattgatttacgtggcatagagatcgaccctgtcgggcgaatttacctcaattttgccgaaattgaatttaataccttcagtagcctgatggcggaaatccgccgtatcgctggcgttacggatgtacgcaccatcccctggatgccgtccgagcgggaacatcttgcgctgagcgcgctgctggaagcaatgccggagccgtttctctctctcgatctgaaaaataaagtcgagcgcgttaaccaggccagctgccagctgtttgcgcagactcaggaaaaacttatcgggcaccacgccacgcaactgattaccggttttaatttccagcgctggctggacagcaacccgcaaaatacccatagcgagcatgtcgttatcaacggacagaatttcctgatggagatcacgccggtctacctgaaaggggaaaatgccgcgcgggtgctcaccggcgcggtgatcatgctgcgctccacggtgcgcatgggacgccagttacagaatctttccagccaggacgtcggcgcattcagccagattattgcggtgagcccgaagatgcgtcatgtaatcgaccaggcgcgcaagctggcaaatcttacggcgccgctgctgattaccggggataccggtacggggaaagatctgctggcgcatgctgtgcacatggccagcccgcgtgcggcaaaaccgtatctggcgctgaactgcgcgtctattcctgaagatgcggtggaaagtgagctgttcgggcatgcgccggaaggcaaaaaaggcttctttgaacaggcgaacggcggctcggtgctgctggacgagattggcgaaatgtcgccacgcatgcaggcgaaactgcttcgttttctcaatgacggcacgtttcgccgcgtgggggaagatcatgaagtacacgtggatgtgcgcgtcatctgcgccacccagaaaaacctggtggagctggtgcagaaaggggtattccgcgaagatctctactatcgtctcaacgttctgacgctcaatattccgccgctgcgcgattgcccgcaggacatcatgccgttgacagaactgttcgtggcccgttttgccgacgagcagggcgtgccgcgtccgaagctctctgccgacctgggcaccgtgctgacgcgttacggctggccgggcaatattcgtcagcttaaaaatgcggtctatcgcgcattaactcagcttgaagggtatgaactgcgccctcaggatattcttttgccggattacgatgccgggacggtctcggtaggcgaagaggcaatggaaggctcgctggatgacatcaccagccgtttcgagcgttcggtgttaacgcagctttatcgcagctatccgagcacgcgcaagctggctaaacgtcttggggtgtcacataccgcgattgcgaataagctgcgcgagtatgggttaaatcagaagaagggtgacgaataa

SEQ ID NO: 114595 - DNA, 507 bp, Enterobacter cloacae
atgtcacaactcgttcatttccagggcaacccggttgctgttgcaggttccatcccacagtctggcagcaaagcacagccttttactctggtggctaaagatctgtctgacgtcacgctgagccagtttgctggcaaacgtaaagtcctgaacattttcccaagcatcgatactggcgtttgcgctgcatcagtgcgtaaattcaaccagctggcgaccgaaatggacaacaccgtagtgctgtgcatttctgctgacctgccgtttgcccagtcccgcttctgcggcgctgaaggcctgagcaacgtcatcaccctttccactctgcgcagcccggatttcctggaaaaatacggtgttgccatttccgaaggcgcgctgaaaggtctggctgctcgtgcggtactggtgatcgacgaaaacgacaacgttgttttcagtgagctggttaacgaaatcactaccgaaccggattacaccgctgcacttgaggcgcttaaagcctaa

SEQ ID NO: 114596 - DNA, 966 bp, Enterobacter cloacae
atgagaagcgttaaggtctatgaagaagcctggccattgcacaccccgtttgtgatctcgcgcggcagccgtaatgaggcctgtgtggtcgtggttgaatgtgaagaggacggcgtaaaaggcgtcggggaatgtaccccttatcctcgctacggagaaagcctggcgtcagtcatggcgcaaattatgacggtggtgcccgagttgcaggcgggtctgacgcgcgaggctcttcagcttcggttgccggccggcgcggcacgcaacgcgattgactgcgcactctggagtctggaagcggcgaaacaacaaaaaccgctgcctgcgctgctggacgttacgctgccgcaatcgatcgtcaccgcgcaaacggtggtcatcggtgaaccagagcaaatggccgccagcgctcaggcgttgtatgccaccggtgcaacattattaaaggtgaagctcgacgatcgtctgattagcgaacgcatggtcgccattcgtgcggcggtgcctgatgccactcttatcgtcgatgcgaacgaatcatggcatagtgaagggctggcagctcgttgtcagctgcttgccgatctgggcgttgccatgctggagcaacccctcccggcagaagacgatgccgccctggcgaattttattcatccgcttcccgtctgtgcagatgaaagctgtcatacccgtgagagcctgtcagctctcgagggacgctacgaaatggtgaacattaagctggataaaacaggtggattaaccgaagccctggcactggcacaagatgcgcaggcgcaaggctttgctctgatgctgggctgcatgttgtgcacgtccagagcgatcggcgctgcgctcccgctggtgaacagcgtgcgttttgccgatcttgacggcccaacctggctggcggttgacgtatcacccgccctgaattttacctccggtgtacttcatctttga

SEQ ID NO: 114597 - DNA, 714 bp, Enterobacter cloacae
atggcaactacccgaccaagaacggaacgcggcgccttcccgcccggtactgaacattatggacgctcatttttaggcgcgcctctgatctggtttccggcccccgaggccgatcgcaatagcggcttaatcattgcaggcacgcatggcgatgaaaactcgtctgtcgtgacgctctcgtgcgcgctacgtacgctgacccccgatttacgacgtcatcatgtgattttgaccgtcaacccggacggttgtcagcttggattacgggcgaatgcacgcggcgttgacctgaacaggaacttcccggcggcaaactggcgcgccggtgaaacggtgtatcgctggaacagttcggcgcaggagcgagatgtggtcctgctcacgggagacaaacccggttccgaaccggagactcaggcgctgtgccagcttattcataagatccacccggcctgggttgtctctttccacgatcccctcgcctgtattgaagatcctcgtcatacggcgctcgggcagtggctggcggatgcgtttgctctgcctctggtgagcagcgttggctatgaaacacccgggtcgtttggcagctggtgcgcggaccttagccttcactgtatcaccgcagagtttccgcccatctcctcggatgaagcgagcgaaaaatacctgcgggcgatgacagagctcctgcgctggcagcctcaaagatga

SEQ ID NO: 114598 - DNA, 1617 bp, Enterobacter cloacae
atgaagcatcctgtttcgcttctttgtactgcgctgtggctgtgcgggctttcttcactttcatatgctgcggaggttcccgaaggaacggttctggcgcaaaagcaggagctggttcgacatattaaagatgagcccgcttcgctcgatccggcaaaagcggtggggttgcccgagatacaggtgatccgcgacctctatgaagggctggtaaatcagaacgaaaaaggggagttagttcccggcgtggcgacgcgctggcagagcaatgacaaccgcgtctggacgttcacgttgcgggataacgctaagtggtctgacggaaccccggtgacggcacaagattttgtctatagctggcgtcgtctggttgatcctaaaacaacgtcacctttcgcctggtttgcggcgctggcgggcattaacaatgcccaggccattatcgacggcaaagctgctccggataccctcggcgtgacggcggtggatgctaaaacgttgcgcgtgcagctggacaaaccgctgccctggttcagcaatctgacggctaatttcgcgttttatcctgttcaaaaggccaatgtggaaagcggtaaggaatggacgcgccctggcgcgctcattggcaacggtgcgtatgtgctgaaagatcgcgtggtgaatgaaaaactggtggttgagccgaattctcattactgggataacgccaggaccgtgcttaaaaaagtcacctttgtgccaatcaatcaggagtcctcagcgaccaaacgctatctggcgggcgatatcgatattacagaatcgtttccgaaaaacatgtaccagaagctgcttaaagatattccgggtcaggtatatacacccccacagcttgggacctattactacgcgtttaacacgcaaaaaggcccaaccgcggatgcccgcgtacgtctcgcgctcagcatgactatcgacagacgtattatggcggaaaaagtcctggggaccggtgagaaaccggcctggcattttactcccgatgtcactgcgggttttacgccggaagcctcgccatttgagcagatgacgcagcaggagctgaatgcgcaggcgaaaacgttgttgcaggcggcaggctatggccctcagcggccgctaaaattaacgctgctgtacaacacgtctgaaaaccatcagaaaattgcgattgccgtcgcatccatgtggaagaaaaatctgggtgttgacgttaagttgcagaatcaggagtggaaaacctacatcgacagccgcaataccgggaattttgacgtcatccgtgcatcgtgggtaggggactacaatgagccgtcaacattcctgtcgctgctgacatcctcccatagcgggaatatctcacgattcaacgatcctgcttacgataagattattcatcaggcgacgctcgaaactactgaaaaagcgcgtaatgccgactacaacatggccgagaagatcctcaccgagaaagcaccgattgcccctatttatcaatacaccaatggccgtctcatcaagccctgggttaaaggttatccgataaataacccagaggatgttgcatacagccgaacaatgtatattgaaaatcattaa

SEQ ID NO: 114599 - DNA, 492 bp, Enterobacter cloacae
atggccgattcattccagaatgaggtgcccaaggcacgcataaacttaaagctggctctgcatacaggtggcgcgcagaagaaaatcgaactgccgcttaaactcctcaccgtcggtgatttcagtaatggaaaagagaatcgcccattatcggaaagggagaaaattaacgtcaataaaaataacttcaacagcgtactttcggaatttaacccggaagtgaatctgacggttcctaacacaatggccggggatggttcggaagaaagcataaaactgaatttctccgatattaaggatttcgaacctgaacaggttgcccgccagatcccccagctccgcgccatgctggccatgcgtaatttattacgcgacctcaaatccaatctccttgataacgccactttcagaaaagaactcgagaaaattcttaaagacccggcgctgtctcaggaattacgcgacgaaatgagtgcactggccccgaaataa

SEQ ID NO: 114600 - DNA, 798 bp, Enterobacter cloacae
atgtctgtgaatactgaaaccgcctccgcgcaggggcagaccaccgtactggaaaaagagggcgtttacgcctccctgtttgaaaaaatcaacctgaccccggcctccagcctgggggatatcaatgcgtttctggatgacgccgcgctttctgacgctccggcgggtgaacgcctgacggcggcgatgcaggtgtttatggactgcatccgcaaatccggtcagccggtggagaagctcgacaaaacgctgattgaccaccatatcgctgagctggatttccagatcagccgtcagctggatgccgtaatgcatcaccaggagttccagaaggtggagtccctgtggcgcggcctgaagcagctggtggacagcaccgactaccgccagaacgtgaaaaccgaaattctggatgtgtcgaaagaagatctgcgtcaggactttgaagacgcgccggaacttatccagagcggcctctactggcacacctataccgccgaatacgacaccccgggcggcgagccgattggctccgtgatttcatcctatgaatttgacgccagcccgcaggatgtggcgctgctgcgcaacatctctaaagtgtcagctgccgcacatatgccgtttattggctctgtcggtccgaaattcttcctgaaagattcgatggaagaggtcgctgcaattaaggatatcggcaaccggcgctgtacgacaccgcagatgccacggccaacagccgcatcaacgcacgtctgccgtacatcttcctgctgtcgcgtattgcgcactacctga

SEQ ID NO: 114601 - DNA, 462 bp, Enterobacter cloacae
atgagttgcaggcttctcatccgctgcgtgacgcgaaggtggtggtggaagatatcgaagacaagctacggcgaccgtctggtgcagcaggcgctgacgctgtggcctgaagaggccaaacccctggcgcaacagtggcacaagcagattagcgttgccggacttgcagagtcagagctgaatggctggcatcagggaatgacgcagttacagcagttgacgaacaggctaaacgcgctggatgaacagaaggggaagtacatgacggtcagcgaactgaaatcagccgtgtttgccatgtcgcagtccttcagccataccgttccgcttgaggagcagcttcgtctgctttccattttacctgccgggcaacccgtgtcagcagcgcagctaaaccaggccgaacagcatcttcagcagttgattgccagctatgccttgctgaagcaccaaaaagaataa

SEQ ID NO: 114602 - DNA, 489 bp, Enterobacter cloacae
atgtcagcaagagagcgtttttttaagaaagtgcaacagaatatcggggacaaaccaatctatgttaatacggctgaggccgaagtcagggcgttttgtgagaggatggaggatcttgcgcagcaaatcatcacatggtttgaaggttctggtattgaaatatttttatctaaaaaacatatcaccgatttaagtacggttggctacagcctcagtagcggtatatgtcgttatgccattgcgacgatcattttgcaaaatggggatcgcagcgtcaccattatgccagaacaggtgatcagggggccggagaaggggtgtgtgacgatgagtattaatgtccccgatagtctgtcgggggcgaggatattccatttaagcatggcgcctgaaacaggctggtatattcgtcgcgggcatcaaagtccaaaagagaatatcctcatgacagaggaccgttttttccagactatcgactgtctggcctga

SEQ ID NO: 114603 - DNA, 1131 bp, Enterobacter cloacae
atgctaagaaatattagtgtcagaacgttcattgtctatttccttttatgtgtatttttggtaagtgatggagttatagcgctattttcacggaattcttcgctttttattgcagtcataattgtacaattcatcgccttatttttgctttgggcgtacatgacaaaatatcttgtgacgccgatcaatacggtgaaaaaaagtattgaagaagtgacgtcaggcaaacttggcgtgtcgatacctgaatttggcaacaactgtgcgggacgactgatcccggggattaacagtctctccagcaacattgcaacgctggtccgtgagatccgcgcctcctcgcaaaccgcgatgaccctgtcagatcaactctcttcacgcagcgcgcagctttccgtcaaaacagaacagcagtcagcttcgctggtgcaaacggcagcaagcatggaagagatggctgcaagtacaaaaaataatgccgacaatacccgtttagccagcgagcaggcgaatatcgcgacgttacaggcgcgtaaaggcggagaattaatggggcaggtcgcgaacaatatgcagtcgattaccgactgcgcccagcaaatgacagagattatctcgctgattgacggtatcgcttttcagaccaatattctggcgcttaacgccgccgttgaagcggcaagagcgggcgaccatggtaaagggttttctgtggtcgcgggtgaggtgagaagcctggcgcatcgtagcgccgaagcggcaaaaaatattaagtcactgattgaagttaccagccataacgtgacgcagggcgttaacgtggtctctgaagccgaaaaaaacatgcatgacattgttaccggttcgggcaatgtcagcagactgatggatgaaatatccgcctcaacatcagaacaggaaaaaggtatttcacaaattacgcaggcattgtcagagcttgaacgcgtaacgcagagcaacgtgtcaatggttgaagaactcaatggatcgtcagatgtgctgcgcaatcaggtgattgagcttcagacacgaacacgtaatttccgtctggaaaatgagttccagactgataatgcattaaaaagccgcgaatgggcggtgaattcctga

SEQ ID NO: 114604 - DNA, 984 bp, Enterobacter cloacae
gtggagagcattaaagggtctgaggttaacgtacctgacgcagtttttgcatgggtgtttgatggacaaggcggcgcaaggccgcttgaagatcaggatcacatcgacagcgaacatccatgctggctgcacctcaactacacgcacccggacagcgccgagtggctcgcgtccacgccgctattgcccaacaacgttcgggatgcgctggcgggagaaagtctcagaccccgcgtcagccggatgggtgaggggacgctaattacgctgcgttgtataaacggcagtacggatgagcgtccggatcagttggtggcaatgcgtgtttatatggatgaacggctgattgtttccacccgccagagaaaagtgctggcgctggatgacgtcattaacgatctgaaagagggcaccggacctacggattgcggcagctggctggtggatgtgtgtgatgcgctgaccgatcatgccagcgagtttatagaagaacttcacgataaaatcatcgatctggaagataacctgctcgatcagcaaatccccccacgtggttttctggcgctgctgcgtaagcagctcatcgtgatgcgccgctatatgacccctcagcgcgacgtttatgcgcggctggccagcgaacgcatgagctggatgaacgacgatcaacgccgcagaatgcaggatatcgctgaccggctcggacgtggactggacgagattgactcatgtattgccagaacggcagtcatggcggatgagatagcccaggtgatgcaggagtcgttagccaggagaacgtacaccatgtcgctgatggcgatggtctttttaccgagtaccttcctgacggggttgtttggcgtaaacctcggaggaatccccggcggtgaatatcactatggcttcaccacgttttgcgtcatgttagtggttttgattgggggtgttgcatggtggttgcatcgtagtaaatggctgtaa

SEQ ID NO: 114605 - DNA, 324 bp, Enterobacter cloacae
atgcaacgtcaagcgatgggcgttgcgctccatattgtcttacttcctttttttgaattactgcatagcacaattgattcgtacgacgccgacttcatagtcggcttttttttgcctcctgtttatctgcgtctaccctttaggagtaagcaccctaatctggaggaaaagatgagtatgctacttgccctgcaacgccttaacacctggcagtccgatccggtgcccatcgatccgacgccgatacccgatcctgtcccacgtccgcagccgatgccggatccgccgcccgatgaagaaccgattaaattgtcgcatcgttag

SEQ ID NO: 114606 - DNA, 1374 bp, Enterobacter cloacae
gtgaccgctttttccacgctgaacgttctgcctgaagcccaactgactaacctgaatgagttgggctatctcactatgacccctgtccaggccgccgcgttgccggctatccttgaaggccgtgacgtgcgcgtgcaggcgaaaaccggcagtggaaaaacggctgcatttgggctaggcctgttacaacacattgatgcaaccctgtttcagacccagtccctgatactctgcccgacgcgcgagctggccgaccaggtcgcgggtgagctgcgtcgtctggcgcgttttttgcctaacactaaaattttaacgatctgcggcgggcaaccgttcggtgcgcagcgcgattcccttcagcacgcgccgcatatcattgtggcaacgccgggccgtctgctcgatcacctgcaaaaaggcaccgtttcactcgatgcactgcaaacgctggtgatggatgaagctgaccgcatgctggatatgggcttcagcgatgcgattgacgaagtgatccgctttgccccagccacacgccagacgctgctcttttctgccacctggccagaggcgatagcggcgatcagcgggcgcgtgcagaagaacccgctgaccattgaaatcgatactgtcgatgcgttaccggcgattgagcagcagttcttcgagacatcgcagcacggcaaaattccactgctacaaaaattgctgagccaacaccagccagcgtcctgcgtggtgttctgtaataccaaaaaagattgtcaggcggtgtgcgatgctctgaatgatgccggacagagcgcattatcgctgcatggcgatctggaacagcgcgagcgcgatcagacgctggtgcgtttcgctaacggcagcgctcgcgtgctggttgcaacggatgtggcggcccgtggcctggatattaaatcgcttgagctggtggtgaatttcgaactggcatgggatccggaagtgcatgtccaccgcatcgggcgtaccgcgcgcgcaggtaacagtggtctcgccatcagcttctgcgcacctgaagaggcgcagcgcgccaatattcttgcggaaatgctgcaactaaaactcaactgggtgaatgccccaggtaatatcagcatcgctccgctggcggcggagatggccaccctgtgcatcgacggcggtaaaaaggccaaaatgcgtcccggtgacgttctgggggcgttaactggggatatcggtctcgacggggcagatattggcaagatcacggtccatcctgcgcatgtctacgtagcggttcgccagtcggttgcacataaggcctggaaacagttgcagggcgggaagattaaagggaagacctgccgcgttcgactgctgaaataa

SEQ ID NO: 114607 - DNA, 936 bp, Enterobacter cloacae
atgcaacaaaatcaagaaattaacaagaaagaacagtacaacctgaataaactgcaaaagcgactgcgccgtaacgtgggcgaagccattgcagacttcaacatgattgaagaaggcgatcgcatcatggtctgcctgtcgggcggtaaagacagctacaccatgctggagatcctgcgcaatctacagcaaagcgcaccggtgaacttttccctggtcgcggttaacctcgatcagaaacagccgggcttcccggagcatatcctgccggagtaccttgagaacctgggcgttgagtacaaaatcgtagaagagaatacctacggcattgttaaagagaagatcccagagggcaaaacgacctgctcgctctgctcacgtttgcgtcgcggcattctgtaccgcaccgcaaccgaactgggcgccaccaagattgcgcttggtcatcaccgggacgacattctgcaaacgctgtttctgaatatgttctatggcggcaaaatgaagggaatgccaccgaagctgatgagcgacgacggcaaacacatcgtgatccgcccactcgcctactgccgcgagaaagacattgagcgtttctcccaggccaaagccttccctatcattccgtgcaatctgtgcggctcacagccgaacctgcaacgtcaggtcattggcgacatgctgcgtgactgggataaacgctatccgggccgcatcgaaaccatgttcagcgccatgcagaacgtggtgccttcgcacctcgccgacgttgaactgttcgatttcaaagggattaaccacggttcagaggtggtgaatggcggggatctggcgtttgaccgcgaagagatcccgatgcagcctgctggctggcagccagaggaagaggatgcgcaattcgatgaactgcgcctgaacgtggtagaagtcaagtaa

SEQ ID NO: 114608 - DNA, 183 bp, Enterobacter cloacae
atgaatagcggtgcgcatagagaggccgaatgggtgttaaaaccgccttcgaaaaggcggcaggtcattactctggatctttatcgcctgattcaggcgctgagccaggatcatctttcggtttttttccatccttgtccgggttatccgggctgggattataatcaggatggtcaccattaa

SEQ ID NO: 114609 - DNA, 198 bp, Enterobacter cloacae
atgaaaaataaagacgagcagacaggattagttgggctggcgattggtgccgccgttatcgggctggtttcatcccagaagatcatcaaccgtgaaagtattgtcgctgagctggtaaggctcggcaggcagaagggggatggtgtcgaagatgaggtctttttaaaagcggctgagttagtgagaaaaggagtataa

SEQ ID NO: 114610 - DNA, 423 bp, Enterobacter cloacae
atggctgacattcgtcatgcacagtgtcattgtggggcggtgaaatttacggttgagctgtcggacggcctgaataccgctcgtcgatgtagctgctcgttttgcaggatgcgtggggcggtcgtggtttccgcacctttgacgggcattaaggtgacgcagggcgcggacacgctcacagagtaccgtttcaacaccggcacggcgcgccatttcttctgttcgatttgcggtatttacacgttccatcaacgacgttccaatcccaatgaatatggtgtgaatgtcgcctgtctggaaaatgtcacgccattcgacttctcggaagtggcggtaatggatggagtaaatcaccctatggatggcgacagcggggtaattggttatctctcttttcgcaaagaacaggcgaaacagcgataa

SEQ ID NO: 114611 - DNA, 1161 bp, Enterobacter cloacae
atgcaaagaaaagtactggcactgatgatccccgctttgttaatggctggcgccgctcacgcagctgaaatttataataaagacggcaataaactggatctgtatggcaaagtagatggtctgcattatttctctgacgacgcgtctaaagatggcgatcaaacctatatgcgactgggcttcaaaggtgaaacccaaatcaacgacatgatgaccggcttcgcacaatgggaatacaacattcaggcaaacaacaccgaagggtctgacaatcagtcctggacgcgtctggccttcgcgggtgtgaaggtgggcgattacggctccttcgattacggccgtaactatggcgtcctgtacgacgttgaaggctggaccgatatgctgccagaatttggtggcgactcttatacttatgccgataactttatgaccggtcgtgcaaacggcgtggcgacctaccgtaacaccgacttctttggtctggtgcagggtctgaactttgcggtgcagtatcagggtaataatgaaggcagcaactgtgacgagtatggctgctctcaggaaggcactaataaccgttcagataacaacattcgtaatcaaaacggtgatggcttcggtatctccaccacctatgactttggcatgggcttcagcgcaggcgcggcatatacgtcatctgaccgtaccaacgatcaggttagtgctggcactggcgcagcatctcagtatgcaggtggcgataaggcggatgcatggactgctggcctgaaatatgacgctaacaatatttacctggcggcaatgtattccgaaacccgcaatatgaccccttatggttcaaccgatagccaagatggcggcggtattgcaaacaaaacccagaacttcgaagtcaccgcacaatatcagttcgatttcggtctgcgtccggctatttcctatttacagtccaaaggtaaagacctgggcaatggccaggacgataaagatctggtgaaatacgctgacgtcggtgctacctactatttcaacaaaaacatgtccacctatgttgattataaaatcaacctgctgggtgaagatgattcgttctacaaaaacaatggcatcggtacggatgacattgtagcgttaggtctggtttaccagttctaa

SEQ ID NO: 114612 - DNA, 3525 bp, Enterobacter cloacae
atgcaaactattgacggcaatggtgcagtcgcgtctgttgcgtttcgtaccagcgaagtgatcgccatctaccccatcactcccagctccacgatggctgaacaggctgacgcctgggctggtaatgggataaaaaacgtctggggcgatgtcccgcgggttgtagagatgcagtccgaagccggtgccattgccaccgtgcatggtgcgttgcagaccggtgccctgtcgacctcgttcacgtcgtctcaggggctgctgttgatgatccccacgctttacaagctggcagggcaattaacgccgtttgtgttgcacgttgccgcacgcaccgtagccactcacgcgctctctatttttggcgaccactcagacgtgatggccgtgcgtcagaccggctgcgctatgctctgcgccagcagcgtgcaggaagcgcaggacttcgcactgatttcgcatatcgccacgctgaaaagccgagtgccatttattcatttcttcgatggttttcgcacgtcccacgagatcaataaaatcgttccgctgccggacgacacccttctgaatctgctgccgcaggctgacatcgatgcgcatcgcgctcgcgccctcaatccggaacatccggtgatccggggtacctctgcgaacccggatacctatttccagtcccgcgaggcgacaaacccgtggtacaacgcggtctatgagcacgttgaacaggcgatggacgattttgccgctgcgacgggccgcgcatataagccgtttgaatattacggtcatccgcaggccgagcgcgtgatcgtcctgatgggctctgccatcggcacctgtgaagaggtggttgatgagctattgacgcgtggtgaaaaagttggcgtgctcaaagttcgcctctaccgtcccttctcagcgaaacacctgctcgcagccctgccggacagcgcgcgtgcagtggcggtactggaccgcaccaaagagcctggcgcacaggctgagccactttatctggatgtgatgaccgctctggctgaggcgtttaaccgcggtgagcgcaaaacgctgccgcgcgtcattggcgggcgttatggattgtcttccaaagagttcggaccggagtgcgtcctggcggtatttgctgaactccgcgaggcaaaaccgaagccgcgctttacggtcggcatttatgatgacgtgactaacctttctctgcccttgccggaaaacaccctgccctcgattgcgaaactggaagcgctgttctacggtctgggtagcgacggcagcgtctcggcgaccaagaacaacatcaaaattatcggcaactctacgccgtggtatgcgcaaggatatttcgtctacgactccaaaaaagcgggcggactgaccgtctcccatctgcgcgtcagcgaacacccgatccgctcggcatacctgatttctcaggcggattttgttggctgtcaccagctccagttcattgataaatatcagatggccgagcgcctgaagcccggcggtattttcctgatcaacaccccttacagcgccgacgaggtctgggcacgcctgccccaggaagtgcaggcggtgcttaaccagaaacaggcgcgcctgtatgtcattaacgccgcgaagatcgcccgcgaatgcggcctggcggcgcgcatcaatacggttatgcagatggcgttcttccacctgaccaatattctgccgggcgacagcgcgctgatggagcttcagggtgcaatcgccaaaagctacagcagcaaaggtcaggaactggttgagcgcaactggcaggcgctggcgctggcccgcgaatcgctgttcgcggtgccgttgcagccggtcaatgccagcagtccgaaccggccgccagtggtgtctgacgccgccccggatttcgtcaaaaccgtcacggcggcgatgcttgccggactgggcgacacccttcccgtctctgcgcttccgcctgacggcacctggccgatgggcacgacccgctgggaaaaacgcaacattgccgaagcgattcctatctggaaagaagagctgtgcacccagtgcaaccactgcgtggcggcctgcccgcactcggccattcgcgccaaagtggtgtcgccagaagcgttagatggcgcaccggaaagtctgcacgcgctggatgtaaaatcccgcgatatgcgtggtcagaaatatgtcctacaggtggcgccggaagactgtaccggctgtaacctgtgcgtcgaggtgtgcccggcgaaagatcgtcaggacccgtcaatcaaagccatcaatatgatgtcgcgtcttgaacatgttgaagaagagaaagtgaattatgatttcttcctcgacctgcccgaaatcgatcgcaacaagctggaacgcattgacattcgtacctcgcagctcatcaccccgctcttcgagtactccggggcgtgctccggctgcggcgaaacaccgtatatcaaactgctcactcagctttacggtgaccgaatgctgattgccaacgcgacgggctgctcgtcaatctatgggggtaacctgccgtctacgccatacaccaccgacgcgaacggtcgcggcccggcgtgggcaaactcgcttttcgaggacaacgcagaatttggtctgggattccgtctgacggtcgatcagcaccgcgcccgcgtaatgcgtctgctggcacagtttgccgataagatcccgacagaactgaatgatgccctgcatgcgaaggccacacctgacgttcgtcgcgcgcaggttgctgaactgcgcaacgcgcttcagggtgttgaaggggctgaacaactcctgactgatgctgacgcgctggttgaaaaatctatctggctgatcggcggcgacgggtgggcctacgatattggtttcggcggtcttgatcatgtcctgagcctgaccgaaaacgtcaatattctggtgcttgatactcagtgctattccaacaccggcggacaggcctcgaaagcaacgccattgggggcggtcacgaaatttggtgagcacggcaagcgcaaggcgcgtaaagatttgggcgtcagcatgatgatgtatggacacgtctacgtcgcgcagatttcgctgggggcgcagctcaaccagacggtgaaagccattcaggaagcggaagcgtatccagggccgtcgctgattatcgcctacagtccgtgtgaggagcatggctacgatctggcgctcagccacgaccagatgcgtcagctcaccgcaaccggcttctggccactgtaccgctttgacccgcgccgtgccgatgaagggaaattgccgctggcgctggattcgcgtccgccgtcagacgcccttgccgaaaccttacttcaggagcagcgtttccgcaggctgaacgctcaacagccagaagtggcagagcagctatggaaggatgcggcagcggatctacagaagcgttatgacttcctggcgcaactggcggggaaagccgaaaaatcgaccagtgaataa

SEQ ID NO: 114613 - DNA, 267 bp, Enterobacter cloacae
atgcgttcagcattttgggtcggatgtgccgcgttactgttgtcggcatgcagcaatgaacctgtacagcaggcgacagcggcacacgttacgccgggtatgcgagcggcgatgtccagttcaggtcaggccaactgcgcaatgatcggcggttcactctccgttgcccgtcagctcgacggctccgccatcggcatgtgcgcattgccaaatggcaaacgctgtagtgagcggtcgcttgccgtaggttcgtgcggaagttactga

SEQ ID NO: 114614 - DNA, 438 bp, Enterobacter cloacae
atgaaaaagctcgcggcagtaagtttaatcagcctcgcactggctggatgcgttaatcctggtaaagcctccgttcagaccgaacagctagagaatcatcgtttcgttctggaaaatgtggatggcaaagcggttaaaggcgggaaaacgcagcctgaaattcgcttcagtgcgcaacccaatatcagcctgattaacaacattgtcgtctccggcacaatgtgcaacggcttcaatggccaggggaaactgtccgaaggcgagttgacggtcaaaacgctggcaatgacgcggaaactctgcaccgagccgcagctaaatgaactggatcagaccatcgccgatatgctacgcgcaggcgcacaggtagacctgaccgaagaccagttaacgctggcgacagccaataaaacattgatgtttaagcgagtcgaataa

SEQ ID NO: 114615 - DNA, 129 bp, Enterobacter cloacae
atgcaacaacctgtatggaaacgtttgatgtggcttgccatcatctggggcggcagcgttctggcgctggcctgcgtaagtatgctctttaaaatgctgatggccgcagccggatttaaatcgcactaa

SEQ ID NO: 114616 - DNA, 1011 bp, Enterobacter cloacae
atgggtatcgatctttccattatctggttcgtgattatcgttttcgccacgttgatgtatatcgtgatggacggttttgatttggggataggcatcctgtttccggcaacgccgaatgcggaagaccgcgacgtgatggtcaatagcgtggctcccgtctgggatggcaacgaaacctggctggtgcttggcggtgcggccctgtttggcgcctttcctctcgcctatgcggttatcatcgacgcgctaaccattccactgacaataatgctgatcgggcttatatttcgtggcgtcgccttcgaatttcgcttcaaggccactccggcgcaccgcccgttctgggataaggcctttattggtggatcaattgtggcgacctttagccagggcatcaccgtcggcgcggtcatccatgggttcagcgtcactggtcgcgcttacagcggtggtccgtttgactggtttaccgcgttcaattttttctgcggtgcgggtcttgtagtggcttacgcactgctaggttcaacgtggctggtaatgaaaagcgaaaatgccctgcaacagcggatgcgtcaggtatcgaaagtgcttctgctcctgcttctggtattcattgcagtaatcagtatctggacccctctcgcccaaccagctattgctgcgcgctggtttacgctgccgaatctgttttatctgctgcccgttcctgcgctggttgcgatcctgagtctgtgccagtggcgctgcctgaacgatcctgcgagccatactctgccgtttattatgacattagggctggtttttcttggctttagcgggcttgggatcagcatctggccgcatattatcccgccggacattaccctgtggcaggccgctgcgccagtccaaagccagggctttatgttagtgggtgcactgttgatcattcccgtgattctggtctacaccttctggagttattacgtttttcgcggaaaagtacagcatggggagggttatcactga

SEQ ID NO: 114617 - DNA, 1395 bp, Enterobacter cloacae
atgtttggtttagatgcgtttcatcttgcgcgaatacagttcgcctttaccgtatcctttcatattatttttccggcgataaccattggcctggcgagctatctcgccgtgctggaagggctgtggctgaaaacaaaaaatcccgtctggcgctcgctgtaccatttctggtcgaagatcttcgccgtcaactttgggatgggcgtggtctctggcctggtgatggcttatcagtttggcactaactggagtgggttttcccagttcgcgggcagtattaccggccccctgctgacctatgaagtgcttaccgcgttcttccttgaggcggggtttctcggagtaatgttgtttggctggaataaggtcgggccggggctgcacttcttttcgacctgcatggtcgcactggggaccctcatgtctacgttctggatcctctcgtcaaacagctggatgcagacaccgcaagggtatgaaatcatcaacggtcaggtcgttccggtggactggtttgccgtggtgtttaacccctccttcccttaccgccttctgcacatgtcgatagcggcatttctcagcagcgcgctgtttgtcggtgcctccgcggcctggcatttgctgcgcggaaacaatacgcccgctattcgcaccatgttctccatggcgttgtggatgacgttgatcgtggcccccgtccaggcgctggtgggggatatgcacgggcttaataccttaaaacaccagccagcgaaaatagccgccattgaaggccactgggagaatccgccgggtgagcctaccccactgctgctatttggctggccggatatggagcaggaacggacccgttttggcctggaaattcccgctctcggcagcctgatcctgacccacagtctcgataaacaggttccggcattgaaggagttcccaaaagaagatcgcccgaacgccaccattgtcttctggtctttccgcatcatggccggcctgggaatgttgatgctgctcctgggcgtgacggcaatctggctgcgttataaacagcgcctttatacctcacgttccttcctgtggtttgccctgctgatggggccgtccgggctgatcgcgatcctcgccggatgggtaacaacggaggtcggccgccagccctgggtcgtctatggtctacagcgtacaaaggatgcggtttccgcgcatggcgatctgcacatgagcgtcagtttgctggccttcttcgtggtttataccgcggtattcggcgtgggttacagctatatggtgcgtctgattaaaaaagggccgcagccccatgaatccttcgcgactgaatccgatggccgccctgctcgtccgctttctgccgtcaccactgaatttaaggagtaa

SEQ ID NO: 114618 - DNA, 189 bp, Enterobacter cloacae
atgacttcttatatccatttccgctgcccatgctgtcatggctcgcagtaccgcacctcagcttttgatgtgtctgacaaaaatccgttcggcgcgaaatgcattttctgcaaatcgtcgatgatcacgctcgaccacctggccgcagcgcgttctgctcagaatcacattacagagtaccgcaagtaa

SEQ ID NO: 114619 - DNA, 1425 bp, Enterobacter cloacae
atgaaaaaataccagcgtctggcgcaacaaattatctcgcagattgagcttggcgtatggttgccgggcgataagctgccttctctgcgagagcaggtggcaagcagcggcatgagttttatgaccgtgggccacgcgtatcagatgctggaaagtcaggggcgcattgttgccagaccgcagtcaggctattacgttgccgcccgcccgaccacacaccagcctgcaccgcccgcgcaggtgatgcgcgatgaagtggtcgacatcaacacctatattttcgacgtgctacaggccagccgcgacccctccgttgtcccttttgcctcggcatttcccgatccgcgccttttcccgcttcagcaactcaaccgatcgctggctaacgtcagcaaaacggctaccgccatgagcgtgatcgaaaacctgccgccgggtaacgtcgacttacgtcatgccattgcccgtcgctacgctcagcagggaatgaatatctccccggatgaaattgtgatcaccgcgggcgcgcttgaggcgctcaacctcagtttgcaggctgtgactgaaccaggggactgggttatcgttgaaaacccctgtttttatggcgcactccaggcgcttgaacgtctgaaactgaaagcgctgtcggttgccactgacgtgcgtgagggcatcgatctcagtgcccttgagcaggcgttaaatgattatccggtgaaagcctgctggctgatgaccaacagtcagaacccgctcggcttcacgctgagtgcagagaagaaagctcagctggtggccttactcacccggcataacgtcacgctgattgaagacgatgtttacagcgaactctactttggccgcgaaaagccgcttccggcaaaggcctgggataagcaggatatgacgttgcactgctcctcattctccaagtgtctggtggccggtttccgtattggctgggtggcggcgggaaaacatgcgcgccgtattcagcagttgcagctgatgagtacgttgtccaccagctctcccatgcaactggcgctggtggattacctggcgaccaaacgttacgacgcccaccttcgccgtctgcgacgcacgcttgctgaacgcaaacagcaggcctggcaatcgcttttgcgtcatatgcctgccggcgtcaaaatccatcataacgacagcggctattttttatggctggaactgcctgaacagctggatgcggggcggttgagtgagaaggcgttaacccatcaaatcagcattgcgcccggcaagatgttttccacctccaatatctggacaccgtttttccgtttcaatacctcatggggctggggcgagcgggaagagcaggcggtcatccagctggcggggttaatccgcgaaatgatgctgcacccagtcacaccttga

SEQ ID NO: 114620 - DNA, 1425 bp, Enterobacter cloacae
atgcaaaatcaattgctgattaatggtgaactggtgaccggcgaaggtgagaagcaggcggtttataatcctgccacgggtgaagtgctgctggagattgctgaagcgtcggcagcacaggtggacgctgccgtccaggctgccgatcgcgcgttcacagagtggggacaaacgacgccgaaaacgcgcgccgaatgtctgttgaaactggctgatgtgatagaagccaacgctgacgcgttcgcaaaagtggagtcccttaactgcgggaaaccgctgcactgtgttcagggagatgagatcccggccgtggtcgatgtgtttcgcttctttgccggggccgcccgctgcctgaacgggctggctgccggagaatacctcgaaggacatacctcaatgatccgccgcgacccggttggcgttgtcgcctctattgcgccctggaactaccctctgatgatggcggcgtggaagctggcgcccgcgctggcggcgggaaactgtgtcgtcatcaagccgtctgaaattaccccgttgacggcgctgaagctggcggaactggcgaaagatatcttcccgccaggcgtgctgaacgtgctgtttggtcgcggaaaaaccgtaggagatccgctgaccggccacgaaaaagtccgtatggtttctctcaccggctctattgctaccggagaacatattatcgggcataccgcatcttcagttaaacgtacccatatggaattgggcggaaaagccccggtcattgtctttgacgatgcagatttggatgccgtggttgaaggcgtgcgtacgtttggtttctacaatgctggtcaggattgtaccgcagcctgtcgtatctatgcccagaaggggatttaccccgcgctggtcgaaaagctgggcgcagccgttgccagcctgaaaatgggcgcgccggacgatgcgtcaaccgagctgggaccgctcagctccgcagcgcatctttcccgcgtttgcgctgccgtggacgaagccaaaacccttggacatatccgcgtcgtcaccggtggcagtaaaagtgagggggcaggatattacttccagccaacgctgctggccggggcgaagcaggaagatgcgatcgtccagcgagaagtgtttggcccggtggtcagtgtgacagaatttgaggatgaagcgcaggtgctgaactgggctaacgattcgcaatacggcctggcctcgtccgtctggacaaaagacgtcggacgcgcccatcgcctcagcgcacggttgcagtatggctgcacctgggtcaatacccattttatgctggtgagcgaaatgccgcacggcgggatgaagttatccggttatggcaaagatatgtcggtctacggacttgaggattacacggtagtccggcatgtcatgataaaacactaa

SEQ ID NO: 114621 - DNA, 1287 bp, Enterobacter cloacae
atgtctaaatatccaaccggggtagagaatcacgggggctcattgcgcctgtggtttatgtaccagggggagcgggttcgtgaaagtcttggcgttcccgatacacccaaaaacagaaaaatagctggagagttgaggacttcgatttgctacgccatcaggaccggcacattcgactataccgcccagttccctaactcaccacgagctcaagtgattgacgatcgcaaactaaagacgtccgtttcggaaatggcttacaaatggctggccctgaagcaaacggttttggcgaagaacacccatatgcggtatacgtcgtacgtgaaaatgtgccttcgcattctggacgatgagatgcccatttcagcacttacccacgaggatctcatgtctctcaggcatgaacttctaactggctatcagctcatcggtaaaactcttgagcgctcccacaaaaaagggagaactgtacgaacggtgaacggctatatggctgtgatgctcgagatgcttaagtttgcggagcgcaacggttacacaaatggctcggtcatatctgatattcgtccactcaggaaatcaaaatcagagcctgacccgctcaccaaagaagagtttatgcgcttgcttcaggctactaatcaccagcagatcagaaatctttgggttctggccgtaagtaccggcatgcgtcatggtgaaatttgtgctttagcctgggaggatgtagacatcgtgaaatggacgataaaagttaacagaaacctggcgatctctgatcacttctcaccacctaaaacagaaagcggtataaggacaatcaacctgactcagccagctatcgaggctcttaaaagtcagatgcaattcacacgaatgaaggagcagcatgaaattgttgttcatctcagggagtacggaaaacaaagaacagacctatgcacctttgtattcaatccgaatgtctcggcgcgttacccatcaaaaagcatttgctacataccagggtcgatagcctcttcatggaatcacctgttgaaaagagcaggcatcaggcacaggaaagcttatgaatctcgtcatacattcgcttgctgggcattaagtgccggggcgaacccgagtttcattgcaaaccagatgggacacactaatgcacagatggttttcaacgtatatggtaaatggatgtctgaacaaaacggcgaccaggtagctctgctgaacacaaattttgacttcaatgccccacagatgccccacaataaagtggccggaatataa

SEQ ID NO: 114622 - DNA, 249 bp, Enterobacter cloacae
atgagcgatacgatccaactggtacccaataaatgggtatcagaagaactactgattgcattaaccgggctgacaaagcatgcaatcaagtcggcccgtgaaaaaagctggcttgagggtcgcgagtataagcactattccggagaccttcagcctaaagacaactcacctatcctttacaaccgtttcgaagtcgataactgggttgaaaagcaacgcccggcgatcccacgccagaaatctgcttaa

SEQ ID NO: 114623 - DNA, 375 bp, Enterobacter cloacae
atgtcaaatttagcaatgaaggttttgcagtggcaggcgacaggcgatgtcggcgttagcagtgcgacgatggcatccattgctttgggtttggataagccattttacggaagccatttcggcgcaccgcatgacccatccgatatgttgcgttgcatgaagttactggaagccatccaggagattcgggatcacttccctgctatcgccaaacgagttccaaccttcaaagggattattgagcagtgggatgatctggtcgaggtgatgaaccgtgagtgcgttggtgaaagatggcgcgctcctgatgcatacaacctgattaaaaaactgcgaggcgacgacaagcagcgcagaacaatcagattcgcctga

SEQ ID NO: 114624 - DNA, 240 bp, Enterobacter cloacae
atgttccagctaattcaacggggtcagatttacgctgaccagcacggctggccagtcatcatccaaagctgcacttctcagatagtccgctactggcgacagggccggatcaacaccgcgtcaatcgacagatttacccaagacttcgaaccgctcgatcaccgtgagtcggcgcagatacgttccgaactggagacgagcgagcatattaaatcgctgcgtgcccggcgcgcggcatga

SEQ ID NO: 114625 - DNA, 534 bp, Enterobacter cloacae
atgataagtaagctgaaggaactatattcctacaatcctgataccggtgaatttactagaaagaataaattgaacggaactgggagaggagtgattggtgaacaggttggttcgcttggtgttaaaggctatctgagcattttccataacaacaagcactatagtttgcacaggcttgcctgggctttcacatatggatactacccatcatctcttatcgatcacatcaatgggaatcgcgccgataacaggataagcaacctgagggaaaccaatagaaaaggaaactcttataactccaaacttttctcaaacaacaccaccggttacaaaggggtgacgaaacttaaaggcggaaaattcagagcacaggcgaggctgaatgggaaaaaaatccatatcggtacattcttgacggctgagtctgctgctgaggcttaccgtgaattctctatcaaaaaccacggagagttctcacctttccaggagtcagccaatgttccagctaattcaacggggtcagatttacgctga

SEQ ID NO: 114626 - DNA, 366 bp, Enterobacter cloacae
atggattacagcaagctaggcgattttgagataaacaaactggtcggcgatgtcgttttcaaaggactatggtcatgcaggccgggcactgcgggaaataaaagtgactcatggtattacggtaacgcggatgcttcgctcaacccgctatcaccgcttcccgactactgcaacgatgcggctgccgcatggccgataatcaccgcaaataaaatcagcatttacgcaatgagcgacgcggacaaaagaggcggttggggggctgaggcttttcatcccaacgatgcatatagctttaacgataacccacttcgtgccgcaatgattgtcttcctcatggtgcagggagggaaagatgataagtaa

SEQ ID NO: 114627 - DNA, 219 bp, Enterobacter cloacae
atggccgatatcatcgataccgcagcagagattgaagagcttcagcgtaacgctgccctttccgctcaccgcatcgaccgcaatgccgtatcggctgagcgttgtgaagaatgcgacgaaccaattcccgagccgcggcgcgctgccgttcccggttgcaagacgtgcgccagttgccagggtgttatcgaattgaggaataagcagagggggatgtga

SEQ ID NO: 114628 - DNA, 192 bp, Enterobacter cloacae
atgaacagggcctcaccagttgatttgaggaaaagcctcgaaattgcaaaccacctggcgcatatcgggattcgctttgtgccgatcccggtggcgacagaagaagaattccagacactggccgccgagctatcgcgacggcttgaaaatatggctctcgaagccgagaagaatgaaggcggtgccgcatga

SEQ ID NO: 114629 - DNA, 567 bp, Enterobacter cloacae
atgagcaattcgatagcagacggagcgaaattaactccggaaacattcgcagatttcattgagcgcttgaggtatcaccatcgcggcgatggtgttaatcgtcacgccaccgccgatccgattttcatggttcagaagcaggcaaccatttatggcctggcagaagagtacggcgaatcgaagatagtccatttcgaggaatgcgaatgggacagcccgcaggagtattgggatgatcttgatgaacagcagcaggaagagttaaacgccttctgcattgaccagtgcgacacagcctttacggatctcgatgaagacgctcagtgggaagtgctgactgaccttgatggccacactgtctgcggtacacgcaaagagtggcagaacatcaacgctcattttacccgtgaagcagcggaggctttcattcgccgcaaacagcatgattatcctcctctgcgagtctacgtcgaaagcatgtacttcggctgggagtatcaggaaatcgtccgcgctctatgcgacggaaggttggtgctaactgaaaaaaatggcagtacggaatga

SEQ ID NO: 114630 - DNA, 219 bp, Enterobacter cloacae
atgacgccagaaacagacaacgccatccgctcagcctgccgacgctgcacagaggaaatccagcaggccatgcgcaagaagccaaagcctaactggaacgaaacggtgcctcccatcatcaacaagcatcacaagaaaattgaagatctgggagttagcctcctggagttcgttgtatacacaggtcggcttaatcgccgcttcggagtggattcatga

SEQ ID NO: 114631 - DNA, 660 bp, Enterobacter cloacae
atgacagcgaaatactcacttctgtatgtcgatccaccctggtcttacggcaacaccatcagcaacggcgctgccgcagaccactacaccacaatgaagttaatcgacatcaagcgtctgccagtgtgggagcttgccgccgaaaatgcggtgctggcgatgtggtacaccggcacgcataaccaggaggctatcgagctggccgaggcttggggttttaccgttcgcacgatgaagggctttacctgggtgaagctgaaccagaacgcggaactgcgcatcaacaaggcgctggccgagggtgaagtcaccgacttttacgacttcctcgatctgcttaacgccgagacgcgcatgaacggtggcaaccacacccgggccaataccgaagacctgctgattgctacccgcggcgccgggctggaacgaaagcacgccgggattaagcaggtggtctacagcccactcggcgcgcacagcgaaaagccatgggaagtgcgccaccggctggagctgctttacggtgatgttccgcgcattgagttgtttagccgctgcgcggcgccgggctgggatcattggggaaatcagtgcgacaccgccgcggtagaactgctgcccggttgtgccatcgttgttgtgaaaacggaggccgcatga

SEQ ID NO: 114632 - DNA, 153 bp, Enterobacter cloacae
atgactcacgctcacgacgacatcagggttggcactatgtgccttcccttcattggtaacggctggctaatgccatggggtgaagtggtcagcaatccattaaaggcccagcggctcgctgaggaatatcgggaaaggcaggaggcggcatga

SEQ ID NO: 114633 - DNA, 165 bp, Enterobacter cloacae
atgaaagcgtggtcactcgaagagcttgcgctgctttggcggcactcaaacgctgaagtcgcagagattaccggccgcagcattgaagaggccggagataagcggctgcaaaccaatattgagcgtaatggctgggatgttaacgatccggagcgtgcatcatga

SEQ ID NO: 114634 - DNA, 525 bp, Enterobacter cloacae
atgaaatacggaagcgtgtgcagcggtatcgaagctgccagcaaagcgtgggaacctctcggctggaaacctgcctggttctctgaaatcgaaccattcccatccgcagtcctcgcccatcactggccggaagtaaccaatcttggcgacatgaccaaaatcgccgatgcggtgcgcgctggtgatgtcgaagcgcctgatgttcttgtcggtggcacgccctgccaggcattcagtatcgcaggcttacgtgaaggcctgtctgacgaccgcggccagttaaccctctcttacgtggaattagccaatgcaatcgacgcaaagcgccgcgaacgcggtgaaccagaagcaattatcgtctgggaaaacgtccccggcgtgctcagcagcaaagacaatgccttcgggtgctttctggcagggcttgccggagaaagcagtgagttgcagccagcaggggggaaaatggacgcacgcaggttgtgtgtctggaccacaaagggttatcgcctggcgtgtccttga

SEQ ID NO: 114635 - DNA, 1362 bp, Enterobacter cloacae
gtgcgccgggattctgcgccgcgccgagaatcgcaaccggaaattgccagaaatgctagagaacgctctaaagtcggtagtcactgggataacccagcaaaccctcacccaaccctcaaccagtcacacaacatcggaggaataggccagagcaatcaggaactgttcagccagcgaggatgcgggattatagcgcagtcggttaatggcgacatttcccacaccctgaaagcagaaggatttgacggcagcgaagacggcactggtcgcggaacgccgattatcgctatggctcacgggcagggcggtgccgagattaaaacggacaattccgcgcctacgctcacctgcaaccacgaagcaccgatcgcagcttacggcatccctggcaactggataggccgggcaccggagaacggaggaaacgcaacagaacctatgcacgatgttgcgccgtgcctcaccgtttccgaccgtcacggcgttgcccacactgtatcgctgcgcggtagggagggtggcgctaccgctgaattaggcgatgaggttgctgcctgtctgcgcgccagcactgggggtggagataaacctcacgttctgcatcaaatggctgttcgccgcctcacgccagtagagtgcgagcgcctgcagggctttcctgataatcacactctgatcggatggcgcggaaaggatgctgatgaattcccggacgggccgcgctacaaagctatcggcaacagcatggcagtacctgttatgcgatggataggagagcgcatcgccgcagcgctgccagccgagaagctgaatggtgattatggcggaagtaaaacaccgctcgaccagcgcgacctatggcgcactccgccagcccttttcgcttcccttgatgctgagttttgcttccaactggatgccgccgcagcgccgcataacgcactgcgccggaagttcatcaccgccgagcagaacacgctggaaacgccctggactgattacctgaacgtacccggctacgtctggctgaatccgccatacagcgacatcacgccgttcgttaagaaggccgctgccgagagcgccaatcagatcgggacggtcatgctggtaccggcagacacttcggttggctggttcaaagaggccatccagaccgccagcgaggttcgcttcatcacctcctggcggctggcatttatcaacccggtcaccggtaagccggtaagcggcaacaacaaagggtcgatgctcatcatctggcgaccgtatccgcgtacacactgccacttcgcaactgtggaccgggacgagctgatggctttcggggcgaaacttctcgcccgccgggaggccgcatga

SEQ ID NO: 114636 - DNA, 219 bp, Enterobacter cloacae
atgacgccagaaaaagacaacgccatccgcgccgcctgccgccgctgcaccgaggaaatccagcaggccatgcgcaagaagccaaagccaaactggaacgaaacggtgcctcccatcatcaacaagcatcacaagaaaattgaagctcttggagttagcctcctggagttcgtcgtatacacagggcggcttaatcgccgcttcggagttgaatcgtga

SEQ ID NO: 114637 - DNA, 222 bp, Enterobacter cloacae
gtgaaaagatttctttttaccactgaggtcaagagagcagaaggttcgcagaccttcagagtggatgctgaaagtctggaagaagccatggagattcttgaaagtggcggaggggatatttacgaacacgaagttgaggttgtcgatataggcgagtttaagttcgatcgcgaaactgaccttactgacttcggtgattttcctgaaggcggtgcagcatga

SEQ ID NO: 114638 - DNA, 300 bp, Enterobacter cloacae
atggaaaattttaaaggcaccaaaggtaattggtcatatagcaaagagaccggaacaattcgcggtgatggcggccttctcgctgaattactgattaatggttccgaagaccataacggcacgctcatggctgccgctcctgaattgctggaagcgctgcaattatcacttaccgccatgaatgaaatgggtgacatcctcaattttcacgacatggcagatgcagaatcagtagagaagctcactccagcatttgaaatggctagaactgctatcaacaaagccctcggtaaggagtaa

SEQ ID NO: 114639 - DNA, 219 bp, Enterobacter cloacae
atgccggacatcatcgacacagcatcagagattgaagagcttcagcgtaacgctgccctttccgctcaccgagtaagccgcaaggccgtatcagctgagcgttgtgaagaatgcgacgaaccaattcccgagccgcggcgcgctgccgttcccggttgcaagacgtgcgccagttgccagggtgttatcgaattgaggaataagcagagggggatgtga

SEQ ID NO: 114640 - DNA, 393 bp, Enterobacter cloacae
atggattacagcaagctaggcgattttgagataaacaaactggtcggcgatgtcgttttcaaaggactatggtcatgcaggccgggcactgcgggaaataaaagtgactcatggtattacggtaacgcggatgcttcgctcaacccgctatcaccgcttcccgactactgcaacgatgcggctgccgcatggccgataatcaccgcaaataaaatcagcatttacgcaatgagcgacgcggacaaaagaggcggttggggggccgaggcttttcatcccaacgatgcatatagctttaacgataacccacttcgtgccgcaatgattgtcttcctcatgatgcagaagccagccaatgttccagctaattcaacgaggtcagatttacgctga

SEQ ID NO: 114641 - DNA, 240 bp, Enterobacter cloacae
atgttccagctaattcaacgaggtcagatttacgctgaccagcacggttggcccgtcatcatccacagctgcacatcacagatagtccgctactggcgacagggacggatcaacaccgcgtcgatcgaccgatttaaccaagactttgaaccactcgaccaccgggaggcggagcagatccgcgccgaactggagacgagcgagcacattaagcacctgcgcgctatgcgtgcggcatga

SEQ ID NO: 114642 - DNA, 375 bp, Enterobacter cloacae
atgtcagatttggaaatgaaggttttgcagtggcagacgacaggaaatgtcggcgttagcagtgcgacgatggcatccattgctttagggctggaaaagccgttctacggccgtggatttggcgcaccgcatgacccatccgacatgttgcgctgcatgaaattgctggaagccattccagagattcgtgaccacttccctgccatcgctaagcgggtgccaacattcaaagggattattgagcattgggatgagttggttgaagtgatgaaccgtgagtgtgttggtgataactggcgagcgccggatgcatacaacctgattaagaaactgagaggcgatgacgatccgcaccgaacaatcagattcgcctga

SEQ ID NO: 114643 - DNA, 249 bp, Enterobacter cloacae
atgagcgacattattcagttggtaccgaataaatgggtcacagaggaacttttaactgcgacaaccggcatgtcaaagcacatgattcagcatgcccgccggtctacctggatggagggaaagcattatcgccatgttgcccctgatatggcacctaagcaaaacagcccaatcatgtataaccgcgatgagataaaccactggatcgagcaccaaagcccagcgaaacgccggagaatatctgcttaa

SEQ ID NO: 114644 - DNA, 1281 bp, Enterobacter cloacae
atggcagcatacccaacaggcgtagaggttcatggcgaatcgttacgcatatggttcatatatcaggggaagcgtgtcagggaaaatctcggcgttcctgacacgccaaaaaataggaaaatggcaggcgaacttcgggcttcagtctgctttgcgataaagacaggcacattcaattatgcctcgcaattccctgattcatcgaacgcagagaaattcagcactgttagaaagcaaatctcactacttgaactgaaatcgaaatggcttgggcttaaagagatggagcttagcctcgggacgttgaggcgttacgattgccacctcacaaccactatcgaaacaattggtgagcagaggtatatcggcagcctgaacactgaagatatccttagtgccaggaaggagctactgaacggctggcagaagaccagacatggcctaaatcatccacccaaaaagggaagaagcgttcctacagtcaatagctatatggcatgccttggcgggatgctgagctttgctttcaaaagtggctacctgaaaaccgatctgatggcaggtattacccctctcgcaaaagaaagacccattccagatcctcttacttctgatgagtatcagagagtggttgcggcctgcccaacgctacagtttcagaatatggttatctttgcggtaaatacaggcgtcaggcatggcgaactaagcgcgttatcctgggaggatgtggatactgtcaactggactgttacagtgtcacggaactattccctgaagggaaacttcaccctgccaaaaaccaacgccgggattcgaacaatacagctgacccagccagcaattgatgcactcaaggcgcaaatgccactgaccagaatgatggcatcccacaaggtaagcgtcagcctacgggaatacaaaaaaaagagaaccgatgaatgcacctttatattctcgccgtccattacttcaatgaacggcaagaagacaatgtgctacgttcccgggtctattaattcggcctggcgcactgccctgcgtcgtgcaggcgtccgacaaagacggtcttatgaaaccaggaacacatatgcgtgctgggcactggtcgccggagcgaacccaaatttcgttgcgcaccagatgggccattcgtcagcgcaaatgctattcacggtttacggtaaatggatgaccgagaataaccatgaccaggtgggcattttgaacgcatcatttactcaaaatgccccaccgatgccccatagaaaaaccgcataa

SEQ ID NO: 114645 - DNA, 1398 bp, Enterobacter cloacae
atgagcaaggtcggctcttttgcctttagcttcctgccggtaatgttctgtatcgccattcctctgggtctggcgcgcgaaaataaaggcgtggcggcgtttgcgggcttcgttggctatgcggtcatgaaccttgcggttaacttctggctgactgccaaagggatcctgcccacgaccgacgcggcggtactgaaagccaataacattcagagcgtgattggtattcagtccatcgataccgggatccttggagccgtgatcgcgggggtgattatctggatgctgcacgagcgcttccacaacatccgcctgcccgatgcgctggccttcttcggcgggacccgctttgtgccaatcattacgctggttgtgatgggtctgtttggtctgatcatccctctgatttggccgatttttgccatggggatcaccggtatcggccgcattatcaacggcgcgggtgatttcggcccgatgattttcggtacgggtgaacgtctgctgctgccatttggtttacagcatatcctggttgccctaatccgctttaccgaagctggcggtaccatggacgtttgcggtcattacgttagcggtgcgctgaccatcttccaggcccagctgagctgcccgaccactcacggcttctctgaaagtgcgacgcgtttcctctctcagggtaaaatgcctgccttcctcggcggcctgccgggcgcagcgctggcgatgtaccactgtgcccgtccggaaaatcgtcataaaattaaaggtctgctgatctccggcgttattgcctgcgtggtgggcggtacgacagaacctatcgagttcctgttcctgttcgtagcgccggtactgtacctcatccacgccgtactgacgggcctgggctttaccgtgatggctgtgctcggtgtgaccatcggtaacaccgacggtaacgtgattgacttcgtggtcttcggtatcctgcacggtctgtccaccaagtggtatctggtgccggttgtggccgccatctggttcgcggtttactacgggatcttccgcttcgccatcacccgctttaacctgaaaacgcctggccgcgataccgatacggccaccagcgttgaacaggcggtagctggtaccgttgggaaatccggatataacacgccggctattctggcggcgctgggcggtgcggataacattacctctctggataactgcatcacccgcctgcgtttgtcggtggcggacatgtccaaagtggataccaacgcacttaaagctaaccgggctatcggcgtggtacagttaaatcaacacaatttgcaggtcgtcattggcccgcaggtacagtcagtgaaggatgagctggcaaccctgatgcgaaccgtcgaagcctga

SEQ ID NO: 114646 - DNA, 1173 bp, Enterobacter cloacae
atgtttgatttttcaaccgtcgtggatcgacacggcacctggtgtacccagtgggattatgtcgctgaccgttttggcgctgccgacctgctgcccttcaccatctctgatatggatttcgccaccgccccctgcattaccgatgcgctgcaccagcgaataaaccacggggtgtttggctacagtcgctggaaaaatgacgaatttctggccgccgtggcgcactggttccggcaacgctttaacagtcagattgataccgaaaccgtggtgtatgggccgtcggtcatttatatggtctcggagctgatccgcctctggtcctcgcctggcgacggcgtggtggtccataccccggcttacgatgccttttataaagccatcgaaggcaaccggcgtaccgttgtttccgtgccgatgcagaaaacagcgcatggctgggagggcaatatggccgggctggaagcggcgctgtcaaaaccggaaaacaaggtgctgctgctgtgtagcccgcaaaacccaaccggcaaagtctggacgcgggaagagctgaccacaatagcggccctgtgtgaacgttatgacgtagcggtgatcagcgacgaaattcatatggacatggcatggggcacgcatcgtcataccccgtggaatgaggttgcgcgcggtaaatgggcgctgctgacctcgggttccaaaagcttcaacattccggcgctgacgggtgcctgggggcttatcgccgatgacgccagccgtagcgcctatctgaatgcattaaaaggtcgggacggactctcttccccttccgtgctggcgctgaccgcgcacattgctgcctaccgacagggagaaccctggctggacgcgctgcggacctatctcgaagaaaacctgcgctacattgctgacgaactgaatactgcatttccgacactcaactggcaaccgcccgaggccacctatctggcatggatcgatctcagcccgcttggcattgatgacaatacgctgcaaaacgtgctgattgatcagcaaaaagtggccatcatgccgggatatacctatggggatgaaggtaaaggctatgtgcgtctgaacgctggctgtccgcgtagtaagcttgaacagggcgttcaacgccttatcgccggcatcaacactctgctgtaa

SEQ ID NO: 114647 - DNA, 999 bp, Enterobacter cloacae
atgattgatacacgcctgcctttaactgatattcaccgccacctcgacggaaacattcgtgcccaaaccattctcgatcttggtcgccagttcaatttaaccctccctgccgaaacgcttgaaaccctgatcccgcatgttcaggtcacgtcgaacgaaccggatctggtgagttttctgagcaagctcgactggggcgtgaagatgctggcctcggtcgatgcctgtcgccgtgtcgcctttgaaaacatcgaagatgccgcgcgtaacggcctgcactatgttgaactgcgtttctccccaggctatatggcgatgacccacaacctccccgtagcgggcgtggttgaagcggtcattgaaggcgtgcgtgaaggctgcaaaacctttgacgttcaggcgcgtttgatcggcattatgagccgtaccttcggtgaagcggcctgtcttcaggaactggaagcattactggcgcatcgcgaccagatcaccgccatcgacctggccggtgacgagctgggcttcccgggcagtctgttcctgtctcatttcaaccgcgcacgtgatgcaggatggcatattaccgttcatgcgggggaagccgcggggccggaaagcatctggcaggccattcgtgagctgggtgcggaacgtataggtcatggcgtgaaagccattgaagatcgcgcgctgatggatttcctcgccgaacaacgtattggaatcgaatcctgcctgacctccaatattcagaccagtacagtggcgtcgctggcgcaacacccgctgaaaaccttcctcgaacacggggtgctggcttcgctgaacacggacgatccggcggttcagggcgtggatattattcacgaatacaacatcgccgcaccacaggccgggctgagccgcgagcagatccgtcaggcgcaaatcaacgggctggagatcgccttcctgacgcctgaagagaaacaggcgctgcgcgataaagttgctcagtag

SEQ ID NO: 114648 - DNA, 1041 bp, Enterobacter cloacae
atgagtgaaaacatccgcgtcggtcttattggctacgggtacgcaagcaaaacctttcatgcaccgctggttgccggcacgccgggaatggaactggcggctatcacaagcagcgatgagactaaggtccgcgccgactggccagccgtgccggtggtaacggagcctaagcatctgtttaacgatcctaatattgaccttattgtcattcctactcctaacgacactcatttccccctggcgaaagcggcgctggaggcagggaaacatgttgttgtcgataagcccttcaccgtgacgttgtcacaggcgcgcgagctggatgcgctggcgcgaagtctgggtcggttattatcggtctttcacaatcggcgctgggacagcgatttcctgacggttaaggcgctgataaacgaaggtacgctcggcgaaattgccttttttgagtcgcatttcgatcgttatcgtccgcaggtgcgagatcgctggcgcgagcaggcgggaccgggtagcggcatctggtatgacttagcgccgcatcttctcgatcaggccgttcatctgtttggtttgcccgtgagcatgacggtcgatttagcgcagctcaggccgggggcgcagaccaccgactatttccatgccattttgagttatccgcagcggcgcattgtgctgcacgggacaatgcttgcggcggcggaatcggcccgctatatcattcacggggcgcgcggcagctatgtgaagttcggcctggatccgcaggaagagcgcctcaaaaatggcgaacgcttaccgcaggaggactggggctacgacatgcgcgacggggtggtgacgcgtgcggagggtgaggtactggttgaagagacggtattgaccctgccggggaactatccagcgtattacgccgccattcgtgacgcgctgaacggttcaggtgaaaatccggttcccgcaagccaggcaatccagattatggagctcatcgagctcgggatcgaatctgccaaacatcgcgcaacgctctgtctggcataa

SEQ ID NO: 114649 - DNA, 216 bp, Enterobacter cloacae
atgacagttcaggactatttattaaaatttcgcaagatcaattcccttgaaagcctggaaaaactgtttgaccatctgaactacacgctgtcggataatcaggacatcatcaatatgtaccgcgctgctgaccatcgtcgcgccgaactggtctctggcggtcgtctgttcaatgtgggggaagtgcctaaatccgtatggcgttacgttgtataa

SEQ ID NO: 114650 - DNA, 441 bp, Enterobacter cloacae
atgaccgcattgcctggagagagaattgggggctggttaatcgccccgctggcatggctgctggtggcattattaagcgcttcgctggcgctgttgctatacaccaccgcactggttacgcctcatgctatccagacactgatgtcccagagtgcgctcaatattgcaacgtggtttgtgtcgttcgttttcgcgatcgcgatgtggtactacacgctgtggctgactatcgccttcttcaaacgccgcaaaaacgtgccaaaacattacattatctggctgctggtctccgtgctgctggctgtcaaagcattcgctttctcgccagtgtctgacgcgctggcggttcgccagttactgtttccgctactggcgacggcgcttctggtcccttatttcaagcgttcgacgcgcgttaagaagacctttgtcaacccgtaa

SEQ ID NO: 114651 - DNA, 582 bp, Enterobacter cloacae
atgaccgattacttactgctctttgtcggaactgtgctggttaataacttcgtactggtgaagttccttggcctgtgcccgtttatgggcgtctccaaaaagctggagacggcaatgggcatggggctggcgaccaccttcgtgatgacgatggcctccatttgcgcatggctgattgatacctggatcctgatcccgctcgacatgctctacctgcgcaccttgtcctttattctggtcattgcggttgtggtgcaatttaccgagatggtggtgcggaaaaccagccctgccctgtatcgcctgctgggcattttcctgcctctcatcaccaccaactgcgcggtgctgggcgtggcgctgctcaatatcaaccttgggcataatttcctgcaatcggcgctgtacggtttttccgcggcggtcggtttctcttttgttatggtcctgttcgcctcgattcgcgagcgtctggccgcggcggatattcccgcgccgtttcgcggtaacgccatcgctcttgtgaccgcaggtttaatgtctctggcctttatgggctttagtggtctggtgaagttgtaa

SEQ ID NO: 114652 - DNA, 579 bp, Enterobacter cloacae
atgagtgctatctggattgccatcgcgtccatcagcgtactgggactcgtctttggcatcattctgggttatgcctcccgccggtttgcggtggaggacgatccggtggttgaaaaaattgatgaacttttaccgcagagccagtgcgggcagtgcggctaccctggctgccgcccttacgctgaggcggtgggcgtgcagggcgaaaagatcaaccgctgcgcaccgggtggcgaagcggtcatgcttaaaatagctgccctgctgaacgtcgatccccagcctgtcgacggcgatgaacaggcccaggagcccgttcgtgcccttgctgtcatcgacgaagccaactgcattggctgcaccaaatgtattcaggcgtgtcctgttgacgccattgtgggcgcaacgcgcgcgatgcacaccgttgtggcggatctgtgcaccggctgtaatctctgcgtggcgccctgcccgacgcagtgtatagaactacgcccggttgaaacgactactgaaagctggaagtgggaccttcagaccattccggttcgcaatattcctgtggaacaacatgcttaa

SEQ ID NO: 114653 - DNA, 2022 bp, Enterobacter cloacae
atgcttaagttattttctgccttcagaaaagagaagatctgggatttcgacggcggcattcatccgcctgagatgaaatcgcagtctaacggcacgccgctgcgccagatcccgctggcgacccgttacgttatgcccctaaaacagcatatcggcgcggaaggtgaactgtgcgtgaaagaaggcgatagcgttcttcgcggccagccgctgacctttggtcgcggacggatgttgccgatacatgccccgacttccggtaaggtggtggctgttgccccccataccgttgcccatccgtcggcgttgtctgagctgagcgtgatcattgaagccgatggtgaagaccgctggatcgatcgtgacggctggagcgactaccgttcccacagtcgtgaagcgctgattgaacgcattcatcagttcggcgtggcgggtctggggggcgcaggcttcccgaccggcgctaagcttcacggcggcggcgataaaatcgaaacgctgatcatcaacgccgccgagtgcgaaccgtacatcaccgccgatgaccgtctgatgcaggactgtgccgcgcaggtggtggaagggattcgcattcttgcgcatattctgcaaccccgcgaagtgctgatcggtattgaggacaataaaccgcaggccatttcgatgctgcgagcggtactggcggacagccacgatatcgccctgcgagtgatcccgaccaaatacccgtccggcggggcaaaacagctgacgcagatcctgaccggcaaacaggtcccccacgggggccgttcgtccgacatcggcgtgctgatgcaaaacgtgggaaccgcctacgcggtgaaacgtgcggtgattgacggcgagccattgaccgagcgcgtcgtcacgctgaccggcgagtccgtctcccgtcccggcaacgtctgggcgcgtctgggtacgccggtgcgtcatctgctggaacaggctggcttctgcccgggtagcgatcaactggtcattatgggtggcccgctgatgggctttaccctgccgtggctggatgtgccggtggtgaagattaccaactgcctgctcgccccttccccaacggagatgggcgaaacgcaggaagagaaaggctgcatacgctgtagcgcctgtgcggacgcatgcccggcagatttactgccgcagcagttgtactggtacagcaaaggccagttgcacgataaagcccaggcgcataacctggctgactgtattgaatgcggtgcctgcgcctgggtctgcccaagcaatattccgctggtgcaatacttccgtcaggagaaagccgaaatctacgccatctccatggaagaaaaacgtgccgctgaagcgaaggcccgctttgaagcgcgtcaggcacgactggagcgcgagaaacaagcccgtcaggaacgccataagcaggctgccgtccagcctgcggcgaaagatcaggatgccattaacgcagccctggcccgcgtgcgcgagaagaaagccaccgccgcccagacggttgtgatcgctccgggagaaaaaccggacaacagcgaagcgattgcggcccgcgaagcgcgtaaagccgaagctcgcgcgcgtcaggcggagaaagcgcaacacgccaaaccggaagccgatatcgacccgcgtaaagcggcagtggaagcggctatcgccagggcaaaagcccgtaaggccggtcagcagacagtggtggttgaacaggaagcgacggatccgcgcaaggcggccgttgaagccgctatcgcccgtgccaaagcacgaaaagcggcacaggttcagccagccgaagagagtgaagcgcctgtcgacccgcgtaaagccgccgttgaagcggccatcgcccgtgccaaagcacgaaaagcggcacagcaggacgaacggcctgcggccgccaacgacgatccacgcaaagccgcagtcgccgccgcgattgcgcgcgttcaggcaaagaaagccgcgcagcaagccgttaacgaggattaa

SEQ ID NO: 114654 - DNA, 1053 bp, Enterobacter cloacae
atggttttcagaattgcaagttccccttatacccataaccagcgccagacatcgcgtattatgatgctggtgtgcctggccgcgctgccaggtattgccgtacagtgttggtttttcggctggggtacgcttttccagttagttctgggttgcgccagtgccgtcgcagcggaagcagcgatcctgaagctgcgcaaaatggaagtgactcgcatcctgagcgataactccgccctgttgaccggcctgttgctggccatcagcattcccccgttcgccccgtggtggatggtggtattgggaacggtgtttgcggtgatcatcgccaagcagctgtacggcgggctgggccataacccgtttaacccggcgatgattggctacgtggtactgctgatctccttcccggtacagatgaccagctggctgccgccgcatgagatcgccgccaccgtccccggctttatggatgccctgcacgttatctttaccggccacaccgcgctgggcgcagatatgaacgcgcttcgcatgggcgtggacggcatcagccaggccaccccgctcgataccttcaaaacctccctgcgtgccggacacagcgtggagcaggtgatgaaatcgtctatttacagcggcgtactggcgggtgctggctggcagtgggtcaatctggcctatctgttgggcggcgcgttcctgctgcaacagaaggcaatccgctggcatattccggtgagcttcctggtgacgctggccgtctgctcgacgctcggctgggtcatctcacctgagtcactggccagcccgcagctccatctgctctccggcgcgaccatgctcggggcattttttattctgaccgatccggtcaccgcgtctaccaccaaccgaggacgtctgattttcggcgcgctggcgggcttgctggtctggcttattcgcagctttggcggttatccggacggtgtggcatttgccgtgctgctggctaacatcaccgttccgctcatcgactactacacgcggccacgcgtgtacggtcatcgctaa

SEQ ID NO: 114655 - DNA, 621 bp, Enterobacter cloacae
atgctaaaaacaatgcaaaaacacggcgttacgctggcgatcttcgctgccgccctcaccgggctgaccgcgctggtaaatgaactgacgaaaacaaccattgcagagcaggcaatgaagcagcaaaaggcgctgttcgatcaggtgatcccatccgacttctacgataatgacctgcaaaaaagctgctttgtcgtgcaggctccgcagctcggtaaaggaccccatcgcatttatattgcccgcaagggcgataatcccgtgggtgccgtcatggaagccaccgcgccggacggttactccggtgcgattcagctgctggttggcagcgatttttccggcaccgtgctgggcacgcgcgtgacggaacatcacgaaacgccgggccttggcgacaaaattgaaacacgcttaagtgactggatcttacacttctccggaaagatgattcatggcgaagacgatcctgctttcgcggtgaaaaaagatggcggcgagtttgaccagttcacgggtgccacgattaccccgcgcgcggtggtcaacgccgtcaagcgcgccgggctgtatgccgaaacgctgcccgcgcagatcaatcatctttccacctgtgaggagtga

SEQ ID NO: 114656 - DNA, 687 bp, Enterobacter cloacae
atgagccaggttaaagaggttatcgtccagggtctctggaagaacaactccgcgctggtacagctgctggggctgtgtccgctgctggcggtgacgtctaccgccaccaacgcgctcgggctggggctggcgaccacgctggtgctgaccctgactaacttttccatttcagttttgcgccgctggacgccgtcggaaatccgtattccgatctatgtcatgatcattgcgtcggtggtcagcgtggtgcaaatgctgattaacgcctacgcatttggcctgtaccagtcgctcgggattttcattccgcttatcgtgactaactgtattgtcgtaggccgcgctgaagcctttgcggtgaaaaacaatccggccatatccgcgctggatggtttttccatcggcatgggcgcgactgccgccatgttcgtcctcggctctctgcgtgaaattttgggcaacggtacgctcttcgacggtgcggacgcgctgcttggcggctgggcgaagtcgctgcgtattgaggtgttccatacggacactccgttcctgctggccatgctgccgcctggcgccttcattggccttgggatgatgctggcgttaaaatacctgattgatgaaaaacgtaaacgccgcgccgctgagcgcagcgtacaggaagggatccccgagaaagcagtatga

SEQ ID NO: 114657 - DNA, 636 bp, Enterobacter cloacae
atgaataaagagaaacgcattgcgatcctgacgcgcctgcgcgatgagaatcctcatccaacgacagagctgaattttaactcgccgtttgaactgttgatcgcggtgctgctctctgcacaggcgacggacgtgagcgtcaacaaagccacggccctgctctaccctgtcgccaatacgccgcaggccatgctggagctgggcgttgaaggtgtgaaatcctatatcaagaccattggcctgtttaacagcaaggccgaaaacgtcattaagacctgccggatcctgctggagcagcacggcggcgaagtcccggaagaccgcgctgcgctggaagcgttgccgggcgtcgggcgtaaaacggcaaatgtggtgctgaacacggcgtttggctggccgaccatcgccgtggatacccatatctttcgcgtctctaaccgcacccggttcgcgccgggtaaaaacgtggaagaggtggaagagaagctgttaaaagtggtccctgcggaatttaaggtggactgccaccactggctgatcctgcacggacggtatacctgtattgcccgtaagccacgctgcggttcctgcattatcgaagatctctgcgaatacaaagaaaaagtctatccctga

SEQ ID NO: 114658 - DNA, 1509 bp, Enterobacter cloacae
gtgtctactgcaaacaataaaccaacagatgagagcgtaagtcttaacgctttcaaacagcctaaagcgttctatctcattttctcgatcgaattatgggaacgttttggctactacggcctgcaagggatcatggcggtttacctggttaaacagctgggtatgtctgaagctgattccatcacgctgttctcttccttcagcgccctggtgtatggcctggtcgctatcggcggctggttaggcgataaagttctcggtactaaacgagtcattatgctgggcgccgttgttctggcgattggctatgggctggttgcctggtccgggcacgatgcaggtgtggtttacatgggcatggctaccatcgcggtaggtaacggcctcttcaaggcgaacccgtcttccctgctctctacctgctacagcaaagatgacccacgtctggacggtgcatttaccatgtactacatgtccatcaacatcggttccttcttctctatgctggcaaccccatggctggccgcaaaattcggctggagcgtagcgtttgcgctgagcttcgtgggtatgctgatcaccgttgtgaacttcctgttctgccgtagctgggttaaagactatggttcaaaaccagacttcgaacccgtgcacatgggcaaactgctggcaaccatcgtcggcatcgtgatccttgccgctgtcgccacctggctgctgcacaaccagggcgttgcacgtgccgtactgggcgtggttgcgctgggtatcgtgtttatcttcgcgaaagaagcctttgcgatgcagggtgcggcacgtcgtaagatgattgtggcgttcatcctgatgctggaagcgatcatcttcttcgttctgtacagccagatgccaacgtctctgaacttcttcgctatccgcaacgttgagcactccatccttggtatcgcgttcgagccggagcaatatcaggccctgaacccgttctggatcatgattggtagcccgattctggccgctatctataacaagatgggcgaccgtctgcctatgccgcacaagttcgctatcggtatggtgctgtgctctggcgcgttcctggtgctgccgctggggacgaaattcgcgaccgacgcgggtatcgtgtctgttaactggctgatcctgagctatgcgctgcaatccatcggtgaactgatgatctccggtctgggcctggcgatggttgcgcagctggtccctcagcgtctgatgggcttcatcatgggtagctggttcctgaccaccgctggcgcggctatcatcgcaggtaagattgcgaacctgatggcggtaccagacaacgttaccgacccgctggtttccctgaatgtctacggcaccgtgttcatgcaaattggtatcgcgaccgccgtgattgccgtgctgatgctgctgaccgcacctaaactgaatcgtatgacgcaggacgacgacaaatccgctaaagcgatcaaaaccgcgaacgcgtaa

SEQ ID NO: 114659 - DNA, 606 bp, Enterobacter cloacae
atgaaactgttctataaaccgggcgcctgctctcttgcttcccatattacgcttcgcgagagcggtaaagatttcacgctggacggcgttgacctgatgaaaaagcgtctggaaaacggggatgacttttttgcgattaacccaaaaggccaggttccggccctgctgctggatgatggcaccctgctgaccgaaggggtggcgattatgcaattcctggcggacaacgtaccggatcgtcagctccttgcccccaccggcagcattgcgcgttataaaacgctggagtggctgaactatattgccaccgaactgcacaaaggctttacgcccctgttccgcccggacacgccggaagagtacaaacctaccgtgcgcgcgctgctggagaaaaagttgcagtacgttaacgacgcgctgaaagacgaccagtggatctgtggctcgcgtttcaccatcgccgatgcctatctgtttaccgttctgcgctgggcgcgcgcggttaagctgaacatggaaggattagaccatgtcgcatcgtatatgacgcgcgtggcggagcgtcctgcggtggcagcggcgctgaaagcggaagggttgaattaa

SEQ ID NO: 114660 - DNA, 861 bp, Enterobacter cloacae
atgaagaacatcctcgccattcagtcccacgttgtgtttggacatgctggcaacagcgctgcggaattcccgatgcgccgcctcggcgttaacgtctggcccctcaataccgtccagttctcgaatcacacccagtacggtaaatggaccggctgcgtaatgccgccgtcgcatctgacggaaatcgttcaggggattgcggatatcgaccagcttaaacgctgcgatgccgtactgagcggctatctgggttcggcggagcagggggaacatatcctcggcattgtgcgccaggtgaaagcggcaaaccccgcggcgaaatatttctgcgatccggtgatgggacatccggaaaaaggctgcatcgtagcgccgggcgttgcggagtttcatgtccgtcatgcattgcccgccagcgatattattgcccccaacctgattgaacttgagatcctgtgcgagcatccggtcaacagcgtagaagaggctgtaagcgcctctcgtgagctgatcgcccaggggccagagattgtgctggttaagcacctggcacgcgcagggttgagccaggaccgttttgaaatgctgctggtgacgaaggatgaagcctggcatatcagtcgaccgctggtggatttcggtgcacgtcagcctgtcggggtcggggatgtgaccagcggtttgctgctggtgaagctattgcagggcgcgagcctgcgcgatgcgctggagcacgtcaccgcagccgtttatgaaatcatgattgcgacgaagacgatgcaggaatatgagctccaggtcgtcgcggcgcaggatcgcatcgcgaagccggagcactattttagcgcaacgcagctttag

SEQ ID NO: 114661 - DNA, 1275 bp, Enterobacter cloacae
atggcaagcagtaacttgattaaacaattgcaagagcggggcctcgtggcccaggtgacggacgaggaagcgttagcagagcgactggcgcaaggcccgatcgcgctctattgcggcttcgatcccaccgctgacagcttgcatttggggcatcttgttccattgttatgcctgaaacgcttccagatggccggccataagcctgtcgcactggttggcggcgcgaccggtctgattggcgacccaagtttcaaagccgctgagcgtaagctgaacaccgaagacaccgtgcaggagtgggtggataagatccgtaaacaggttgcaccgttcctggatttcgactgcggtgacaactctgcgattgcggcgaacaactacgactggtttggtggcatgaacgtgctgacgttcctgcgtgacatcggcaaacacttctctgttaaccagatgattaacaaagaagcagtaaagcagcgtcttaaccgtgacgatcagggtatctctttcacggagttctcctataacctgttgcaggggtatgacttcgcctgcctgaacaaactgcacggcgtctctctgcaaattggcggttccgaccagtggggtaacatcacctccggtatcgatctgacccgtcgcctccaccagaatcaggtgtttggtctgaccgtgccgttgatcaccaaagccgacggtaccaagttcggtaagaccgaaggcggcgcggtatggctggatccgaagaaaaccagcccgtacaagttctaccagttctggatcaacacggcggatgccgacgtttatcgcttcctgaagttcttcacctttatggatatcgaagaaatcaatgcgctggaagaagaagacaagaacagcggtaaagcaccacgcgcccagtacgtgctggcggacgaagtgactaaactggttcacggcgaagaaggtctggcggcggcgaagcgcattacggctagcctgttcaacggaaccctgagcgatttaagcgaagcggatttcgaacagctggcgcaggatggcgtgccgatggttgagatggaaaaaggcgccgatctgatgcaggcgctggtggactccgagctccagccgtctcgcggtcaggcgcgtaaaaccatcgcctctaacgcgatcaccattaatggcgaaaaacaggccgatccggaatacacctttaccgagaacgaccgtctctatggtcgctacacgctgctgcgtcgcggtaagaaaaattactgcctggtctgctggaagtaa

SEQ ID NO: 114662 - DNA, 657 bp, Enterobacter cloacae
atgtcagataacgacgaactacagcaaattgcgcatctgcgccgtgaatacaccaaaggcggtctgcgccgccaggatcttcccgccgaaccgctggtgctttttgaacgctggctgaagcaggcctgcgaagcgaaactggctgacccgacggcaatggtcgttgccacggttgatgaaaatggtcagccgtatcaacgcatcgttcttctcaagcattatgacgagaaagggctggtgttctacaccaatcttggcagtcgtaaagcgcatcaccttgaaaataatccgcgtattagcctgctcttcccgtggcatatgctggagcgccaggtgatggtcaccggcaaggcggagcgcctctctacgctcgaagtggtaaaatatttccacagtcgcccgcgcgacagtcagatcggcgcctgggtctctaaacagtccagccgaatctcagcccgcggtgtgctggaaagtaaattcctcgaactcaaacagaagtttcagcagggtgaagtaccgctgccgagtttctggggcgggttccgcatccccattgagcagatggaattctggcagggcggtgaacaccgcctgcacgaccgctttttataccagcgcgacaacggtggctggaaaatcgacagactggccccgtaa

SEQ ID NO: 114663 - DNA, 324 bp, Enterobacter cloacae
atgaaaaaacttcttctcattgctgtaccttttcttatgaccggatgcagcgtctataaccagttcgttgagcgtatgcaaaccgatacgctggaatatcgttgtgatgaaaaaccgctgacggtgaagctgaacaacccgcatcaggaagccagctttgtttatgacaataagttgttaacgctgaagcagggaatgtcggcctccggtgcgcgctactcagacgggatctacgtcttctggtcgaaaggcgacagcgccaccgtctacaagcgtgaccgcattgtgctgaacaattgtcagcttgaaaatccgaagcgttga

SEQ ID NO: 114664 - DNA, 1125 bp, Enterobacter cloacae
atgaaatcgggtcgctatatcggtgtgatgtctggtaccagtcttgacggtgtggatgtcgttctggccgccattgatgaaaacatggtggcgcagcaggcaagcctgacctggcctattcctgtctcgttaaaagaagagatcctgaacatctgccagggacaacagctgacgctttcccaactgggccaactggatgtgcgtctgggggcgctgtttgctgaggcggtactggccctgatgcagcaggaaagactccacccgcaggatatcgtggcaataggttgccatgggcagaccgtctggcatgaacctgtcggcgaggcgccgcacacgatgcaaattggcgataacaaccagattgtggcaaaaaccggcgtgacggtggtgggtgatttccgtcgtcgcgatatggccctcggcgggcagggggcgccgctggttccggcatttcatcaggcgctgctggcgcacccggtagagcgcaggatggtcctgaacatcggcgggatcgccaacctgtcgatgcttattcccgggcagcccgtgcgggggtacgataccggacccggtaatatgctgatggatgcctggatctggcgtcagagcggcaaagcctacgacaaagacgcgcagtgggccagccaggggaaagtgatccttcccttgctgcaaaccctgttaagcgatcctttctttgctctgcccgcgccgaaaagcacggggcgggaatatttcaactacggctggcttgaacgtcagctggcgcgcttccccggccttgcgcctcaggatgtgcaggctacgctgacggagctcaccgcggtatcgatttctgaacaggtgttgctgagcggcggatgtgagcgcttgctggtatgcggaggcggaagccgcaacccgctggtgatggcacgcctcgccgccttgctgccaggcaccgaagtcacgaccactgatgaagccgggatcagcggagacgatatggaagcgctggccttcgcctggcttgcctggcgtacggttgccggtctgccggggaatttaccctccgtaaccggtgcgcgggaggcgagcgtccttggggccattttccccgcaaacccgcgccataatcagagttaa

SEQ ID NO: 114665 - DNA, 468 bp, Enterobacter cloacae
atgattttacgtgtactgggcgtttcgctgattggtttaacactggcgggttgtgtgaatgacagttcactctccggcgacgtatatagtgcttctgaagctaaacaggtacagaacgtgacatacggtactatcgttaatgcccgtcctgttcagattcagggtggcgatgacacgaacgtggtgggcgcaatcggtggtgctgtgctgggtggtttcctgggtaataccattggcggcggcaccggacgttctctggctaccgcagcgggcgcagttgcaggcggcgtagcgggtcagggcgttcagggcgcgatgaacaaaactcagggcgttgagctggaaatccgtaaagacgatggcagcaccattatggttgtgcagaaacagggtaacacccgcttctctgctggccagcgtgttgtactggcaagcaacggcagccaggttaccgtctccccgcgctaa

SEQ ID NO: 114666 - DNA, 1365 bp, Enterobacter cloacae
atgcttgcgatctgtcgatttgtaaagaaccgctttgtggccttcgcgcttggatgcattgttatcattgccgtattacaagctttttttataaaacttgttgaatgggttccttcgttttcacctttgtttttccctacgctgacgatatttcttctggtgtttcatctgtttattgcctgttttatggcaatgaaatactggtgcgacagaaggcgattatatcttgttcccattgccctggcctttgccggctcagcgttattgatggtggggactctgtccagcttcccggcctggcttgatctctatcagttcaacgtggcgaactataatgacgccatgattttctatatgttccgccactttttaatggcggtgctgataatcatctcggcattgctgtataccctgcgtacgtccgctctctcacgaagcacccacatcggtatcgttgtcggcgcctcgctctttacgggcagtatgcttgggctggcattgttctattccagccattcaaccctgctcacactggacctggtagacaatgaaacccgacagtttatggttctctggagccaggcgattaatatcattttgatcgtcctgtgggtagtaacgttaatcaccctgatggccattacccgcgtgaggaatttgttttgggtcggcggcaattttttatgcgtctgttatatcgtcaccctgctcatgctattgttaggcggacacgctgaagatatttcatggtaccgggcacggttattcgaaactgtcgctacattaatcattatcttcatcttactttccgatgtatttaatttgtatcgtgactcgcatgtaaaatatcaggagtcttatcaaaactcgatccgcgatcccctcacccgtctgtataatcgtagctatttctatgattcattaaaccacgcgctgagtacagcaaccctggcgcacccggtatcggtgatcgtgagcgatcttgaccgtttcaaacgcattaacgactgctacggccatttgcagggggataaggttttacagtttgtctcaaacctgttgaccgattcagtgcgaccgcaggatatcgcagcgcggatcggcggcgaagaatttgtgctcatgctgacaaataccccttccgatcttgcgcaacaggttgccgaacgcatacgtctcaaattgagcggtttcgacaacgttagcagcggcggttatctcccggaaccgataactatcagtatgggggtattcaccgccacctcgccggagaccagcgctgaaacctgtgtggaaagcgcggataaagccatgtacgaggcaaaagagacgggccgcaaccgggtggtggtgttcagaacatga

SEQ ID NO: 114667 - DNA, 435 bp, Enterobacter cloacae
ttggaatcgccattaggttctgatctggcaaggttggtacgcatctggcgtgctctgattgaccatcgcctgaaacctctggaacttacgcagacgcactgggttacgctgcataacattcatcagctcccgcccgatcagtcacagatccaactggcaaaagcgattggaattgagcagccgtctctggtgcgtacccttgaccagctggaagagaagggactcatctcccgacaaacctgcgccagcgaccgtcgcgccaagcggatcaaattgacggaaaaagcggccccgattatcactgagatggaaaccgtcatcagtaaaacgcgaggggagatcctggccggtatttcccccgctgagctggaaatgctgatcggactcatcgcccgtcttgagcaaaacatccacgatttacagtcgcgcgactga

SEQ ID NO: 114668 - DNA, 237 bp, Enterobacter cloacae
gtgacgttgttttccttctccgcagggttgcccctccaggatttgattgttggcgcatcggtctactttccgccactgtttaaagccgtgatggtcggttttgtaatctggctcattgcgcatcgtctgctgcgcgactggatgtattctggtgaaatctggcacccgatgttaatggatctctccctatttaccctctccgtctgtcttggccttgccgtgttaaccgtgtggtga

SEQ ID NO: 114669 - DNA, 804 bp, Enterobacter cloacae
atggccggctggtggctctggaattattacatgcagtcgccctggacgcgtgacggcaagatccgcgcggaacaggtcagcatcacgccacaggtgtccggcagtatcagcgcgcttctggtgaaggacaaccagtacgttcatgcgggcgatgtgctattccgtatcgatgagacccctttccacattgcggtgcttaatgcccaggcgcagctcgcaaaagctcaatcagatctggcaaaagccaataacgaagccgaacgccgccgccatctatcgagaaattacatctctgcggaggatctcgataccgccaatatcaatgtaaaagccatgcaggccagcctgaaggttgcagaggcaacgctgaaacaggccgagtggcaactgacccagaccatggtcaaagccccggtggatggatggatcacgagcctgtctacccgtgtgggtgattacgccaccacaggccagccggtcttcgccctggtcgatagccactctttctatgttgtaggttattttgaagagaccaagctgcgccatatccgcgagggcgcgcctgcccggatcacgctttacagcggtgcagaaacgttacagggtcacgttagcagcataggtcgggcaatatacgatcagagcgtggaaaccgattctggcctggtgcctgacatcaaacccaacgtcccgtgggtgcgcctggctcagcgggtgcctgttcgcgtcgagtttgatcaactgccgaaagacattaccctggtctctggcacaacctgcaccgtcgccatcggatcgcgatga

SEQ ID NO: 114670 - DNA, 2037 bp, Enterobacter cloacae
atgatgaacctgggggctttctcctggcgcaatacgccgtggataaaagcgacacggccgcagtggcgttacgcgctgcgcaacggcatcgccatgtgccttgcgcttacggttgcctattatctgaatctggatgagccttactgggcgatgacctctgcggcggtcgtcagcttccctaccgtcgggggcgttatcagtaaaagcctcgggcgcgtggcgggtagcctgctgggggcaaccgccgcactgcttcttgccggccataccctgaacgatccctggctctttctgttaagcatgtcggcatggctggggctgtgtacctgggcctgcgcccattttaccaataacgttgcctatgcgtttcagctggcgggttacaccgcggccattatcgcctttccggtcgtcaacgtgctggataccaccgagctgtgggatatcgcccaggcacgcgtgtgtgaagtgatggtcggcattctgtgcgggggcgtcatgatgatgatcctgcccagtacctcagatggcactacgcttatcaccgcccttaaaacgatgcacgcacgtttgctggaacatgccagcctgctctggcagcctgacagcagcgatgacatccgcctcgcgcacgaaaaggtcatcggccagatcctgaccatgaacctgttgcgcatccaggctttctggagccactaccgttttcgtcgccagaacacgcttctgaactatttactgcaccagcaattgcggatgacgagcgcgatctcgagccttcgccggatgttgctgaactggcctgcaccgccagcccatacccgggagattatcgaggcgctgctcgccgctcttgcgcgtccggatgccgatatctataccgtggcccgcattatcgcgccgctcgccccaacggatgaatatgactacaggcaccgtgccttctggcagcgtctgaactatttctgccgcctgtatctgcgtagcagccgctggttaaaagccgtcgaaaatgccacgcccgtcaccgaattttccgttcccggtagtcctgctctggcgcgccataccgacgcaatggaggcgctgtggagcggttttcgtacgttttgtgcgttgacggccgtgggcgcatgggccatcaccacgcaatgggatgcgggcagtgcggccctgacgcttgcggcaatcagctgcgtgctctattccgtcgccgcttccccctttaattcccttacgcttctgctgcgtacgctggtactgctgtcgctattcagcttcgtggtgaaatttggtttgatggtgcagataaccgacctctggcaatttctgctgtttctcttcccgctattaaccaccatgcagttgctcaaactgcaaatgcctaaactggccggtctgtggggtcagttgattgtttttatgggctcatttatctctgtaacgaatccaccggtttacgattacgctgattttctcaacgacaacctggcgaagatcctcggcgtggggctggcgtggctggctttcgctgtgctacgcccgggctcggacgcgcgtaaaagccgcaggcatattcgggagttgcgcaggggttttgtcgatcagctgagccgcaggccacatctgcgcgaaagcgagtatgaatcgctggtttaccatcatgtcagccagctgaacaacagccaggattcactctcccgtcgctggctgctgcgctggggcgtggtgctgttaaactgttcgcacgtggtgtggcaactgcgcgcctgggagacgcgttccgatccgctgtcgcaggtccgtgataactgtatttccatgctccgagatgtgatgagcgagcgcggggtgcagcagcgccccctgagcgtcacgctcgccgagcttcagcgtatttgcgacgcgctggcgcaccatcatcagcctgcggcccgcgatctggcgtccattatctggcggctgcactgctccctgtcacagctggaacaggcgccgccacccggaacgattggcgatcagatcaccccgcaggcatag

SEQ ID NO: 114671 - DNA, 519 bp, Enterobacter cloacae
atgaagcgttttgctctggcaatggtcacgctggttgtttgtgcaggtgcgcaggcagccagcgaggacgttgaaatgaatctcgtcacttctcagggggtaggccagtccatcgggacggtgaaaatcaccgaaaccgataaagggctggaatttgctcccgatctcaaggctcttccacccggcgaacatggttttcacgttcatgccaaaggcagctgtcaacccgcaatgaaagaggggaaaccaacagctgcggaagccgcaggggggcatctcgacccgcacaactccggtaagcatgaaggcccggaagggatggggcacctcggcgatctgccggtgctggtggtaaataacgatggtaaagccaccgatccggttgtggcgccacgactcaaaaagcttgacgaggtcaaaggcaaggcgctaatggtccacgtgggcggcgataacatgtccgatcagcctaaaccgcttggcggcggcggggcgcgctatgcctgcggggtgatctga

SEQ ID NO: 114672 - DNA, 897 bp, Enterobacter cloacae
atggttcagcgtattacccttgccccgcagggcccggaattctcccgatttgttatgggctactggcgccttatggactggaatatgtctccggtccagctggcggactttatagaagagcatctcgatctcgggatcaccaccgtcgatcacgctgatatttatggcggctatcagtgcgaggctgcctttggcgaagcgctgaagcgtgcgccggcgctgcgtgaacgtatggagattgtgaccaaatgcggtattgccaccacagcaaaaccggagcatgcgcttgggcattacatcactgacagcgcgcatatcgttaaaagcgccgagcagtcactgattaacctggccaccgatcgtatcgacctgctgctgatccaccgacccgatccgttgatggatgcggatgaggtcgcggaagccttcctgacgctgcaccagagcggcaaagtgcgccattttggcgtgtctaacttcaccccggcacagtttgcgctattgcagtctcgcctgccgtttacgctggcgacgaatcaggtggagatctcgcctgttcatcagccgctgctgctggatggcacgctcgaccaactgcaacagctgcgcatccgtccaatggcatggtcctgtctgggaggcggccgcctgtttaacgatgaggcattccagccgctgcgtaacgagcttgaaacggtggcgcgcgaactgaatgcggagagtatcgagcaggtggtttacgcctggatcctgtgcctgccgtctaaaccgctgccaattattggctccggcaaaattgagcgcgtccgcgctgcgcttgtggctgaggagctggatatgacgcgtcagcagtggttccgcatccgcaaggcggcgctgggctacgacgtaccctga

SEQ ID NO: 114673 - DNA, 1785 bp, Enterobacter cloacae
ttgctctgccacacctacctccagaacgtcattattccctacagtgaagaccctaaatggcttgcatgcaaggatgtccgccacaaacagagcattaaggtttcgctaatcttcccttcttatactcgccgcattgatataacgaatggtctggtcatcatgtggttcactaaaaagttacactgtaacgatataaaatttactctgggctgtgcacttttcttcaccgtactgaatgcactgtttatccagcgcagctggtcaatcattgcgcctgcgcatctgcacgatctcctgtttgctgccagcgtgccgctggtgctgttctgcggctgggtgattgtcttcagcctgctgaatattccctttattcgcaagccgctcatgattgtcctgaccctgggatgcgccgccgcaacctggtttatgtatacctatggcacggttatcgatcagaacatgattgtgaacgtgttcgaaactaattcccaggaagcgactgctctggtgacgccgcagatgatcctgtggctggtcgttgcaggtctggttccatcgattattttagccctgacgcgcattcgcaccggaaaatggtggtatgccctcctgacgcgtgtcgccgctatgctgggtgcgctgctggtaatcatcctggtcgcggcggtgttttataaagactatgcttctctgttccgcaataacaaaagcatcgtcaaaatggttaccccggcgaattacgtgagcgccgtggtgaaatacagcaaaatgcgctggtttgccggcgaccagacgctggtccgcattggcgaggatgctcataaaggcgcgctgatttccagccaacgcaagaaaaccgtgctgattgtggtggtgggcgaagcctcccgcgccgcaaactactcgttaaatggttacccgcgtgaaaccaaccccgagctgaaaaagcaggatgtcatcaacttcccccaggcctcctcctgtggcacggaaaccgccgtttccgtcccctgcatgttctccggcatgacgcggaaaaaatatgacgcggacctcgcccatcaccaggaaggtctgctcgatgtacttaaccatgccggtttcaacctgctgtggcgcgacaacgacggcgggtgtaaaggcgcctgcgaccgcgtgccgcacacggacatgacccagtggaaactggatcagttctgtaaggacaaatcctgtatcgacgacgtcaacctctaccgtctggacaacgtactggatggaataaagcaggatacggttctggttattcatctgatgggcagccacggtccggcctactacaaccgttatccggacagctttcgcaagttcaccccaacctgcgataccaatgaaattcaggattgcgatcatcagtcgctgatcaatacctatgacaactcgattttgtataccgacagcgtggtcagccgaaccatcgacgcgctaaaagcccggcaggccaacatgaacacggcgctcatttacctctccgatcacggtgaatcgctgggcgaaagcggaatttacctgcacggtacgccgtatatgctggccccggagcagcaaacgcatattccgtttatgttctggctctccccggattatgcgaaaaacttcggcgtaaacacggattgcctgcgtgaccatgccgcaaaagaggcggtttcacaggacaatttattcgccaccgttctgggcatgatggacgtgaaatcagcggtttatcaaccgcagctggatattctgtcgcaatgtcgtcgctaa

SEQ ID NO: 114674 - DNA, 600 bp, Enterobacter cloacae
atgagcagacacactgaacacgatacacgagaacatttgctggctaccggcgagcgcctttgcatgcatcgcgggtttaccggtatggggctgagcgaattgttaaaaaccgctgaagtacctaagggatcgttttatcactattttcgatccaaagaggcgtttggcgttgccatgctggagcggcactacgccagctaccatcagcgcctggcaacccacttcgccagcagtgaaggtgactaccgggatcgtgttctgaactactatcaggaaacgctgacgcagttctgtcagcagggcatcatcagcggctgcctgacggtaaaactgtctgccgaagtgtgcgatctctccgaagatatgcgcaccgccatggataaaggagccagcggcgtgattgccctgctggctcaggcgctggagagcgggcgcaatgaaaaaacgctctccttctccggcgatccgctcacgcaggcacaggtgctctattccctctggttaggcgccaacctgcaagcaaaaatgtctcgcagcgccgtgccgctcgaaagcgcgctggcgcatgtgaaaaactgtattaccgcgcctggcgtgtag

SEQ ID NO: 114675 - DNA, 1098 bp, Enterobacter cloacae
atgtccgctgaaaagctgtttaccccactgaaagtgggtgccgttactgccccaaaccgcgtgtttatggccccacttacccgtctgcgcagcatcgagccgggcgatatcccaacgccattgatgggtgagtattaccgtcagcgcgccagctcgggcctgattatctccgaagccacgcagatttctgctcaggcaaaaggctacgccggtgcaccgggtctgcacagcccggaacagatcgccgcgtggaaaaaaatcaccgcaggcgtgcatgctgaggatggccgtattgcggttcagctgtggcacaccggtcgtatctcacacagcagcatccagcctggcggtcaggcgccggtttctgcctctgccctgaacgccaatacccgcacttccctgcgcgatgaaaacggtaatgcgatccgcgtcgacaccaccacgccacgcgcgctggagctggacgagatcccgggtatcgtgaatgatttccgtcaggccgtcgccaacgcccgtgaagcgggcttcgacctggttgagctgcactctgcgcacggttacctgctgcatcagttcctgtccccgtcttccaaccagcgtaccgaccagtacggcggcagcgttgaaaaccgcgcgcgtctggtgcttgaagtggtggatgctgtctgtaatgagtggagcgcagaccgcattggtattcgtgtctccccgatcggtactttccagaacgtcgacaacggtccgaacgaagaagcagacgcgctgtatctgattgaagagctggcgaaacgcggtatcgcctatctgcacatgtccgagccggactgggcaggtggcaagccttacagtgaagccttccgtcagaaagtgcgcgagcgcttccacggcgtgattatcggggcgggtgcgtatacggcagagaaagccgaggatttgataggtaaaggcctgatcgacgccgtggcctttggccgtgactacattgctaacccggatctggttgcccgtttgcagaaaaaagccgaactgaacccgcagcgtcctgaaagcttctatggcggcggcgcggaaggttataccgactacccttcactgtaa

SEQ ID NO: 114676 - DNA, 408 bp, Enterobacter cloacae
atgcgcctacttcacaccatgctgcgcgttggcgacctgcaacgttccatcgatttctacactaacgttctgggcatgaagctgctgcgcaccagcgaaaatccggaatataaatactccctggcgtttgtcggttacggcccggaatctgatgaagcggtcatcgagctgacctacaactggggcgtggacagctacgagctgggtacagcttacggccacatcgcgctggaagtggataacgccgccgaagcctgcgaacgtatccgcagcaatggcggtaacgtcacccgtgaagccggtccggttaaaggcggtaccaccgtaattgcgtttgtggaagatccggacggttataaaatcgaactgatcgaagccaaagacgctggtcgcggactgggcaattga

SEQ ID NO: 114677 - DNA, 660 bp, Enterobacter cloacae
atgtccgataacgctcaatttaccggtctgtgcgaccgttttcgtggtttttatcccgttgtcattgatgttgaaacagccggatttaacgctaaaaccgatgcgctgcttgagattgccgccatcacgctgaagatggatgaacagggctggcttgtaccggacaccacgctgcatttccacgttgaaccctttgaaggggcaaacttacagccagaggcgctggcctttaacggtatcgatccgacaaacccgctgcgcggggcggtaagcgaatacgaggcgctgcacgccattttcaaaatggtgcgcaaaggcatgaaagagaatgactgtagccgcgccatcatggtggcccacaatgccacctttgatcacagcttcactatggctgccgccgagcgtgcctcgctcaagcgtaatccattccatccgtttgtgaccttcgacaccgccgcgctgagcggcctggcgctggggcaaaccgtgctctctaaagcctgcatcacggcgggtattgcgtttgacggcacccaggcgcattccgcgttatacgacaccgagcgtacggcggagctgttctgtgagatcgtcaaccgctggaaacgtctcggcggctggccgctgccgatgggcgacgaggccgatcttcaatcgtag

SEQ ID NO: 114678 - DNA, 348 bp, Enterobacter cloacae
atgagcaccactattgaaaaaattcagcgccagatcgctgaaaacccgattctcctgtacatgaaaggttctccgaagctgccaagctgcggcttctccgcgcaagcggttcaggcgctgtccgcctgtggtgagcgttttgcttacgttgatatcctgcaaaacccggacattcgtgctgaactgccaaaatacgccaactggccgaccttcccacagctgtgggttgatggtgaactggtcggcggatgcgacatcctgattgaaatgtatcagcgcggcgaactgcaacagctgatcaaagagactgcggcgaagtataaaaccgaagagccggacgcagagtaa

SEQ ID NO: 114679 - DNA, 759 bp, Enterobacter cloacae
gtggcgcggataactaaaatctcgatgacgctctgtgctttactgtttaccacactctcatttacgccagcggcgaacgcctctgaacaggcgcggcattctgctgtacaaaaatcgcatctggcaaaaaccacagaacgtaagaaaaaaaccaccagtaaaacagtaaagaagaaaaccaccgctcagaccaaaaagaccgcctccagtaaacccaaaactctccgttccggcacgcacaaaaccacccgcacgaccgccagcctggtgaatgaaaaatgcaccgtgcgcaaaggccataaaacgaaatgcgcaaaagtgacgaagctggctgacgtgcataaagcgcgtatgcagaaagcgcaaaaaacggcgatgaacaaactgatggggcaaataggtaaaccgtatcgctggggtggcacctctccgcgcaccggttttgactgtagtgggctggtttattatgcctataaagatctggtgaagtttcgcattccacgcaccgccaatgagatgtaccatctgcgcgacgccgcgcctgtaaaccgtggcgaactgcaaaatggcgacctggtgttcttccgcacccagggacgcggtacggccgatcacgttggggtgtatgtgggtaacggtaaatttatccagtcaccgcgcagcggtcaggacattcagatcacctctctcagcgaagattattgggtgcgccactatgtgggtgcgcgccgcgtgatgacgccaaaaaccattcgctaa

SEQ ID NO: 114680 - DNA, 582 bp, Enterobacter cloacae
atgtcgttcgaattacctgcactaccgtatgcaaaagacgccctggccccgcacatttccgcggaaaccctggagtaccattacggcaagcatcaccagacctatgtcaccaacctgaacaatctgatcaagggcaccgattttgaaggcaaaacgctggaagagatcgtgcgcagttcagacggcggcgtattcaacaacgccgcacaggtgtggaaccacaccttctactggcactgcctggcccccaatgcaggcggagaacctaccggtgagctggcggcagcgattaacgccgcgttcggcagtttcgcggattttaaagcgaagtttactgacgcagccgttaaaaactttggctccggctggacctggctggtaaaagaggctgatggcaaactggctatcgtttccacttctaatgcgggtacccctctgaccaccagcgccacgccgctgatgaccgtggacgtatgggaacacgcctattacattgattaccgtaatgcgcgcccgaactacctggaacacttctgggcactggttaactgggaatttgttgcgaagaacttcgccgcgtaa

SEQ ID NO: 114681 - DNA, 1167 bp, Enterobacter cloacae
atgaaaatcaattttcccctgctggccctggcgattggcgcctttgggattggcaccactgaattctcccctatggggttattgcctgttatcgcccggggtgtggacgtctctatccctgcggctggtatgttaattagcgcttacgcgattggcgtgatggtgggcgcgccgctgatgacgctgctgctttcgcaccgcgctcgccgcaatgcgctgattttcctgatggcgattttcaccctcggaaatgtgctttccgcgatttcgcccgattataccactctgatgctttcgcgcattctgaccagcctcaatcatggcgccttcttcggactgggctcggttgtcgccgccagtgtggtgccaaaacataagcaggccagcgcggtagccactatgtttatgggcctcaccatcgctaatatcggcggcgttcccgctgccacctggctgggagaagccatcggctggcgtatgtctttcctcgtaaccgccggactgggcgtggtcgcgatggttgcgctgttcttctcactgccgaaaggaagtgcgggagaacgtccggaagtacgtaaagagctggcggtgctgatgcgtcctcaggtgttgtccgcgctgctcaccacggtactgggggcgggggcgatgtttacgctctacacctatatctccccggtgctgcacgacattacccacgcaacgccactctttgttaccgcgatgctggtgctgattggtgtcgggttctcgattggcaactatctcggcgggaaatttgccgaccgctccgtcagcgggacgctgaaaggttttttaacgctgctgattgtcatcatggtggcgatcccgtggctggcgcgtaacgaagtgggtgccgcgattgccatggtggtgtggggcgccgcaacctttgccgtggtgccaccgttgcagatgcgcgtaatgcgcgttgcgcacgaagcgccggggctctcttcgtcggtgaatatcggtgcgtttaacctgggcaatgcgctgggggccgcagcgggcggggcggtgatctccggtggtttgggttacagctttgtgccggtgatgggggcgatcattgccgcactcggcctgctgctggtgatgatgtctggtcgtaaacagcctgaagcggtgtgtacggcggaataa

SEQ ID NO: 114682 - DNA, 1026 bp, Enterobacter cloacae
atggcaacaattaaagacgtagcaaaacgcgcaaacgtttccactacaaccgtatcacatgttattaacaaaacgcgtttcgtcgctgaagagacgcgtaatgccgtctgggcggcaatcaaagagctgcactactcgccaagtgcggtcgcccgcagcctgaaggttaatcacaccaaatcgattggtctgctggccaccagcagtgaagcggcctactttgctgaaatcatcgaagccgttgaaaaaaactgcttccagaaaggctataccctgattctgggcaacgcgtggaacaacattgaaaaacagcgcgcttacctgtcaatgatggcgcaaaagcgcgtcgacggcctgctggtaatgtgttctgaataccccgagtcggtcctttccatgctggaagagtatcgccacattccgatggtggtcatggactggggcgaagcgcgcgcagactttaccgactccgttattgataacgcctttgaaggcggctacatggcggggcgttatctggtagaacgcggtcatcgtgaaattggcgtgatcccgggtccgctggagcgtaacaccggggctggccgtctggccggtttcatgaaagcgatggaagaggcgctgatcaccgtgccggaaaactggattgttcagggcgacttcgagccggagtcgggctatcgcgccatgcagcagatcgtcacccagccgcatcgccctaccgcggtgttctgcggcggcgacatcatggcgatgggcgcgctctgcgcggcggatgaactcggcctgcgcgtcccgcaggatatctcggtgatcggctatgacaacgtgcgcaacgcccgcttctttaccccggcgctgaccaccattcaccagccgaaagattcgctgggtgaaacggccttcaatatgctgctggacaggatcgtcaacaagcgtgaacagtcccagtccattgaagttcacccgcgcctgattgaacgccgttccgttgcggacggtccgttccgcgactaccgtcgttaa

SEQ ID NO: 114683 - DNA, 912 bp, Enterobacter cloacae
atgtggtcagattattcccttgaagtggttgatgccgtggcgcgtaacggcagctttaccggtgccgcccaggagctgcatcgcgttccctcggctatcagctatacggtgcgccagctggaagcgtggctggcggtcccgctgttcgagcggcgccatcgcgacgtggagctcacgcctgccggagcgtggtttttgaaggaagggcggtctgttatcaaaaaaatgcagatcacccgtgagcagtgccagcagatcgccaacggctggcgcgggcatctcgctatcgcggtggataacatcgttaagccggagcggacccggcagatgatcgtcgatttctatcgtcatttttccgacgtcgaactgcgtgtttcgcaggaagtgttcaacggcgtctgggatgcgctggcggacggcagggcggagatggcgattggtgcaacccaggcgatcccggttggggggcgctacgcgtttcgcgacatgggcatgctgagctggacctgcgtggtcgcgcgcgatcacccgctggcggcgctggaaggtccgctgagcgatgacaccttacgcaactggccctcgctggtgctggaagatacctcccgctcgttgcccaagcgcattacctggctgctggataatcagcgccgcgtggtcgcaccggactgggagtcgtcggccacctgtctgagcgcggggctgtgcgttggcatggtgccggtgcattttgcgcgcccgcgcatcgacgcgggagagtgggtggctctgacgctggaaaaccccttcccggatgccgcgtgctgtctgacgtggcagcaaaacgacgtctcgcccgccatggcctggctgctggattatctgggcgacagcgaaacgctgaaccgggagtggttgcgggaaccagcatag

SEQ ID NO: 114684 - DNA, 1200 bp, Enterobacter cloacae
gtgcaacccaggaaaggatttttagtctggctcggcggcttaagcgtgctgggctttttggcgaccgatatgtatctgcccgcgttcgccgcgatgcaggaagatttgcaaacccctgccgccgccatcagcgccagtttaagtttgttcctcgccggctttgcttttgcgcaattgctgtgggggccgctctcggatcgttttggccgtaagcccgtcctgttgttggggctggcgatttttgccgtaggctgtctgggcatgctgtgggtccgcgatgccgcctggttgctggcgctgcgctttattcaggcggtcggtgtttgcgccgcagcggtgacctggcaggcgctggtgaccgattactaccccgcctcgcgcactaaccgcatattcgccactattatgccgctggtcggcctgtcgccggcgcttgccccgttactgggcagctggatcctggcgcatttcgactggcaggccattttcgccacgctctttgctattacgctggtcctgatgctgcctgctttcgggcttaaacctgcgcataaaaaagagacgcatccggacgcaaagcccatcacctttacctctttactgcggtcgaaagcctatcgcggtaacgtgctgatttatgctgcctgctctgccagcttctttgcctggctaaccggttcgccgttcattctgcatgacatgggctacagcccggcggctatcggcctgagctatgtaccacagaccatcgccttcctggtgggtggctatggctgtcgcgccgcgctgcaaaaatgggaaggccaacagatgctgccctggctgctggttttgtatgcgctaagcgtgattgcgacctgggctgtcggctttattcccggcgccgggcttgcagaaattttgattccgttctgcgtcatggcgatcgctaacggggccatctaccctattgttgtagcccaggcgttgcgtccatttccgcaggcgacaggccgcgctgccgcgctgcaaaataccctgcaacttggcctgtgcttcctggcaagtctcgtggtctctgcgttgattgcaaccccgctgctcaccactaccagcgtgatgctggtcaccgttgcgctgtcgggtttgggctatcgcatgcagtcctcagcccatcgcgagcagagtgaaaacgcgcagacagaaacgtcgcacgcctga

SEQ ID NO: 114685 - DNA, 1149 bp, Enterobacter cloacae
atgagttcatcgtgtatagaagaagtcagcgttccggacgataactggtcccggatcgtcagtgaactgttgggacgtgcgggcattacgattaatggctcatccccctccgatccccagataaagcatcccgattttttcaaacgcgtgttacaggaggggtcgttagggctgggtgaaagctatatggacggctggtgggagtgtgagcggctggatatgttcttctccagcgtattacgcgccggtcttgaaaaacagctccctcgtcatttcaaagataccttacgtattgcctccgcccgcctgttcaatctgcaaagtaaaaaacgggcgtggatcgtcggtaaagagcattacgacctgggcaacgatctgttcagccgtatgctcgatcctttaatgcagtactcctgcggatactggaaaaaagcgacgaccctggaagaggcgcagcaggacaagctgcaactgatctgcgataaattgcagttacagcccggtatgcgtgtgctggacatcggctgtggctggggtggtcttgcctggtttatggctaaaaattacggcgtcaacgtagtcggcgtcacgatttcggctgaacagcagaagatggcgcaggaacgctgtctgggtctggatgttgatattcggcttcaggactaccgcgacctgaacgagcagttcgatcgcattgtttccgtaggtatgttcgagcacgtggggccgaagaactacaagacttacttcgaggtcgccgatcgtaacctgaagcctgagggaattttcctgctacacaccatcggctctaaacgcaccgataacaatgtggatccctggatcaacaaatatatcttcccgaatggctgtttaccctctgttcgccagattgcgaacgccagcgaaccgcattttattgtggaagactggcataacttcggcgcagattacgacaccaccctgatggcctggcatgaacgtttccaggctgcatggcctgaaatcgccgacaactattcggaacgattcaaacggatgtttagctattatctgaatgcctgtgcgggcgcgttccgtgcgcgggatatacagctttggcaggtggtgtttagtcgtgggattgagcacggtttgcgtgtggctcgctga

SEQ ID NO: 114686 - DNA, 642 bp, Enterobacter cloacae
atgtttactggtattgtgcagggcactgccaaagtggtgtccattgatgaaaaaccgaatttccgcactcacgtagttgagctgcctgaatatatgctcgacggcattgaaaccggggcgtcgatagcgcataacggctgctgcctgacggtgaccgaaattaacggtaaccagataagctttgatttaatgaaagagacgctgcgtatcactaacctgggtgagctggtggtgggagatatcgttaacgttgaacgcgcggcgaaattcagcgatgagattggcgggcatctgatgtcgggccatattatgaccaccgcagaagtggcgaaaatcgtgacctcggaaaataaccgtcaaatctggtttaaggtgcaggatccgtcattaatgaaatacatcctttataaaggatttattggcatcgatgggattagtctgaccgtcggtgaagtgacgccaacgcgtttttgcgtgcatttaattcctgaaacgctgcaacgtactacgcttggcgcaaaaaaactggggcagcgcgtaaatatcgaaattgatccccagacccaggcggtcgtggataccgttgagcgcgtactggcggcgaaagaggcggcgataattaaaaccatggaagaagaataa

SEQ ID NO: 114687 - DNA, 1374 bp, Enterobacter cloacae
gtgcagaagtatatgatcgaagcgcgtcagttattggcactggccataccggtgatcgtcgcgcaggtagcccaaaccgcaatgggatttgtggatacggtaatggccggtggttacagcgccaccgatatggccgccgtggcgatcggaacctcaatctggcttccggccattctttttggtcacggcctgctgctggcgctgacgcccgttatcgcgcagcttaacggctccggtcgacgcgaccgcgtggcccatcaggtgcgccagggcttctggctggccgggggtgtctccgtcctgattatgatcgtcctgtggaacgccgggtatattattcgcgccatgcataatatcgacccggcgctggcggataaggcggtcggttatctgcgcgccctgctctggggcgcgcccggctatctgttcttccaggtggcacgtaaccagtgtgaagggctggcaaaaaccaagccgggcatggtgatgggctttatcggcttgctggtgaacattcccgtgaactatatcttcatttacggtcattttggcatgccggaactcggcggcgtgggctgcggcgtggcaacggctgcggtgtactgggtgatgttcggctgtatgctcacctacattaaacatgcgcgatccatgcgtgacattcgtaacgacacctcgttcagcgcacctgactggacgctcatgacccgtctcattcagctggggttacccattgcgctggcgctgttcttcgaagtgacgctgtttgccgtcgtcgccctgctggtctcgccgttagggattattgatgtcgcaggacaccagatcgccctgaacttcagctctttgatgttcgtcctgccgatgtccctggctgctgcggtgacgattcgcgtgggcttccgtctggggcaaggctcgacgctggacgcgcaaacggcagcccgcaccggcctcggcgtcggcgtctgcatggcagtctgtaccgcgctctttaccgtgctgttgcgtgagcaaattgccctgctctataacgacaacccggaggtagtgaccctggcctcgcatctgatgctgctggcggccatttatcagatctctgactccatccaggtgattggcagcggcgtgctgcgtgggtataaagatacgcgttccatcttcttcatcacctttatcgcttactgggtgctgggtctgccgtgcgggtacattctggcgctcacggatctggtggtggatcgcatggggccagccggattctggatgggctttatcatcggcttaacgtctgcggccattatgatgatgctacgtatgcgcttcctgcaacgtcagccgtctgcggtaattttgcagcgcgctgcacgttaa

SEQ ID NO: 114688 - DNA, 468 bp, Enterobacter cloacae
atgactctgagagcttttcccatgttgaacgatctctccgactctctgtttgcggaccgttttaaccgtatcgatcgcctttttagccagctaaccggcagtacgccgttgccctccacgccttcttacaatatccggcgggtgggtgataaccgctatgaactgacgctgagcgtgccgggctggaaagagagcgaactggaaattgaaaccgttggcggtcagctgaatatcagcggtaaacgtgaagaagagaaaaccgaaaacggcgaagaagggtggatccatcggggtatcagccgcagcgacttccgggccagctatagtctgccggagcatgtgaaagtaaccggcgcttcgctggaaaacggcttgctggcgattgaattacatcaggatatcccggaagaagagaaaccgcagcgcatcgccatcaacaacaacccggcgattgaacataagccgtaa

SEQ ID NO: 114689 - DNA, 201 bp, Enterobacter cloacae
atgaagcgacaagatataaacgcattaaagaattttgattttctggcacgcagttttgcccgtatgtacgccctgggccagccagttgatgtcgatgccgtgaccggcaatatgagttatgaacagcaggcatggttccgggagcgatatgaccactaccgaaagcaggctgagcgggcgagagtgatagaactgcgatga

SEQ ID NO: 114690 - DNA, 1596 bp, Enterobacter cloacae
atgaaaaaaatcgccattatcggctcaggtccaacagggatttataccttttactcacttcttaacaacgcagcaccgctttcgatcaccgtgttcgaaaaggcagaccaacccggtgtcgggatgccctacagcgacgaggataattcccggctgatgctggcgaacatcgccagtatcgaaatcccgcccatttttattacctatctcgactggctcaaacagcagagtgcggcccatcttaaccgctatcacgtcgacagtgagaaactgcacgaccggcaattcctgccgcgtattctgttgggtgaatattttcacgatcggtttcttgccgtcgttgctgaggcgaaaaagtcgggctttcatgtcgaggtgcaccccaacgcagaagtcacggatattaaggctgatgcagacggtgtggccctttcagtgaacgatgcccctttctcaaggcggtttgatcttgcggttgttgccaccggccacgtctggcctgatgaagatgaaaccacccgcgcatatttcccaagcccatggtcagggctgatggacgcggaggtccgagcctgtgaggtggggatcatgggtacttccctcagcggcctggacgctgcaatggcggttgtgatgcagcatggccggtttagcggggagcagttcgttgtcaataaaggcagcgaagggctaaaaatcacgctgatgtcccgcacgggcgttctgccggaggccgacttttactgccctatcccttatgaaccgctgtccgtgttaacggagtctgtggcggaaagtgaaatcgccaaaggcccggacgggctgcttgaccgcatctttgcgctgatggtgaaagagctcgagctggccgatccgcgctggtgccaggcgatatcgctcgttacgctgaatgccgacacgcttcgtgatgtctggtttgaggatcgtaaaaagcatggccctttcacctgggccgaagcgaatctgaaagaagtggagcgcaacaagcgcgaaaaacgcaccgttgcctggcgctataccgtgcttcgtctgcatgaagtggttcaggccatcgtcccttcactcaatgagcgtgacagagagcggtttaaatccgggctggagcgtgtgtttatcgataattatgccgccattccaccgcagtctatccgccgtttactggcgctgcgcgaggcagggatcattagcgtggtcgcactcggtgataattacgacctggatatcggcagcgatcagaccgtcatcaccacggcagaaaagcgttaccgcttcgacgtgtttattgatgcgcgcgggcaaaagccactcagaaacaaggacattcccttccccaccctgcgtaaacagcttgcggaaaccggcgatgacgtcccggacgtgggggaagactatacgttgctggcgcctgcatcactgagggggcgcatcgcttttggggcgatcccctggctgatgcacgatcatccctttgttcagggtttgtctgagtgcgctgaaattggtaaagcgatggcgaaagcggctggaaaacctgcgtcgggcgtgcgaaggaagttaccattcatggaattttaa

SEQ ID NO: 114691 - DNA, 636 bp, Enterobacter cloacae
atgcaacatatcattgaaggttttctcagctttcaaaaagagattttcccgcaacgtaaagagctttttcgtagtttagcgtccagtcagaatcccaaagcgctgttcatctcctgctccgacagccgtctggttccggaactggttacgcaacaggagccaggacagctctttgtcattcgaaacgcgggcaacattgtgccaccgttcgggccggagcctggcggtgtctctgcgaccatcgaatatgctgttgttgccctgggcgtgaccgatatcgttatttgcggccactccaactgcggcgcaatgaaggcgattgctgacaacgccgatctggagccgatgccggccgtttcccactggctgcgctattctgatgcggcaaaagcggtggttgagaagaaaacatgggataagccaatcgataaggtgaatgcgatggtgcaggagaacgtctttgcgcagctgagcaatatcaagacccatccgtcggtggcggtaggcctgcgcaacaacgccattcgcctgcacggctgggtatatgacatcgaaagcggcaaaatccttgccctggacaagaacactaaatcgttcgtgtcgctgtcggaaaacccggacgtcttcttcgagtaa

SEQ ID NO: 114692 - DNA, 783 bp, Enterobacter cloacae
atgattacactctgtaaaacctgcggtaccgcttacgatgaacagcccaaaaactgcccgatttgcgacgatgagcgccagtatgtcccggtgacgggccaggcatggacggacttcgacagccttacgaccacgcacaccaacaaatggcaacagctggagccgcagctgttcagcatcaaaactgttccctcttttgccatcaaccagcgggcgcttctgctgcgtacgccacagggcaatgttctgtgggactgcatcgccaatcttgacccggcgaccagagcgttagttgacgcgctcggggggatcagcgcgatcgcgatttcgcacccgcattactacaccaccatgcaggagtgggccgcggcgtttaacgcaccgatctacctgcacgccagcgatcggcagtgggtgatgcgtgacagcccggcgatacgcttctgggaggaggacgccctggagattatgcctttggtgactcttctgcggctgggcgggcattttgcaggcggcacggtgctgcactggcagtcaggcgacggcgtgctgctggccggtgatattttgcaggttacgcccggtcaggacgccgtgtcgtttatgtggagttatccgaatatgctgccgctgcctgcccgcaccgttgagtcgatgatcggtcgactgacagggaaaacgtaccagcgcctgtacggggcctttgaagggcagaacatcccggcgaacgcggatgagatcgtgcagcggtcgggccagaaatatattgcttgtctccgctaa

SEQ ID NO: 114693 - DNA, 141 bp, Enterobacter cloacae
atggaaattgatctcgataacttagtcttcaacgggctggatgaagcagaagagcgcaacgcggaacgtctcgacgatgcggataaaaaagcccaggcgattgtcgccgatgacgactgcggcgatgcctgcaagatctga

SEQ ID NO: 114694 - DNA, 1407 bp, Enterobacter cloacae
atgaaacggacagtattaacccccgcgctttctgcctctgcacttctgcttaccatgcaggcggtacacgctggtccacaggcgcatgttgtatgcagttattcccacaccctcggcgatgatgccattatgatgttcggcatgcccaatgaggctatgctgcacgatttttttggtaacgtgcacgcggatgcttactccagccgtgaatctctgcgtacccaggaaaagaccacctgcgataacaaagcagacagctcggcctactgggctccgtcgctaaaattgccggacggaacggtagtcaaacccgcctatcaaaaaacctattctcaggcatcgaacgttgacgcctggccgcttcatccgtttccgccggggctgtcgctgctggcgggcgatcatcatggcaccgcgccaaatccgcatatcacctttttatgcgccaatggcaagggctacaccaccagaacgggtgaagtctgcggcttacgcaaggcgaaggatgccgtgcagtttaatatcggcattcagttcccgaactgctgggacggggtcaacctgaagcccgcccacggcctggctaacgccacctacgatacgaaaggacagtgtccgtccgccttcccggtgaagatcccgacggtgaacatgaatattgcgtacgtgctcccgacaattagctctctggataccagtaaagtccagctttccctcgaccccatcatgcatggtagtgagcgtgaagagcggtgggggagcctgtatacggcgcatgctgacttcatgaacggctggacggaagatgccgcgcgatttatgaccgacctgtgcatgaaccggggaatggattgcggcaccaccgtgccgtatggttattcaaaagcgaaggctaacgtctggctcagcagcatggaaccggcactttcacagcccgatccccaggtcttactggtgcaggataactggaagaacggtggacgcacgaaaaacagcgaaacattgtcgctggtgaagttcaatatccctccgctgcctgtcggacaggatcctgcccagtttaaataccgcgtgagaatttatggcgggaaagtggaaactgacggcgcggatcaaatcttcttctatccggcgagtaacgactgggaaccggccaccgtgagctggcagtcacgaccgtcctgcaactatcgctcggatgcggtgctgtacctgaaccactcccgcgaataccggatggtggacgtggataaagcggtgcgcaaggcgctggcagaagggaaaaccgacatttcgtggtatatcggcggcgatcgtcagggaaatcactatcagtttgagacggggtcatctccccaaagcctgatcctgatgctgaccgggtttagcaaaacgccggagatctga

SEQ ID NO: 114695 - DNA, 174 bp, Enterobacter cloacae
atgacgatgaaaaaatggataagcacgttacggcggttatttgcgccccgaccaatgaatgcggagaacagcgcgcaacgtgttcttgagtcaatactacctgtcgccagcctgtatggcgtggacgtagccaacatcgacccggagtggttccatgataaaacgtcacgctga

SEQ ID NO: 114696 - DNA, 837 bp, Enterobacter cloacae
atgactatggctgcaaaaatgaaagggtttaaaaaacgggcgcaggttctgggattagtggcagcctggggcctggtttcagcgcaggcgcaggccgatcggctggcggatatcaaggcagcaggcgtggtgaaagtggccacgtttgatgccaatccaccctttggctcgattgatgccaaaacgcatgagatcgtgggttacgacgtggacttcgccaaagcgctggcgaaatcgctcggcgtcaagcttgaactggtcgccactaatccggctaaccgtataccgctgctacagtccggaaaagcggatctcatcgtggcggatatcacgatcactccggaacgcgcacaggtcattgatttctcaacgccttactttgtcaccggccagcagttcctggttccggcaaaatcaccggacaagcttgatgactatagccgggcacgcattggcgccgtaaaaggtacgacgggtgaacaggcgctgcaccagcgttttccgcagtcccgcgtcctctcttacgatgatatcccgctggcgctgacggcactgcgcaatggcaacgtgcaggccattacccaggacagcaccattctggccggtctgctggcgcaggcgccggataaagccgacttcaaaatcctgcccgacctgctcagtaaagaagagattggcgtgggggtgaaaaagggtgaaacggcgctgctgaaagccgttaacgatgagctggtaaccctggagaaaaacggccaggcggcaaaaatctatgacgtctggttcggtccaggcaccccagctccacagcctcgtaactttaaaatagaagcccggtaa

SEQ ID NO: 114697 - DNA, 816 bp, Enterobacter cloacae
atgctctcaggtttattttcacgctccgcggccaatgccgcggatttttcacgtctggaacaggccagcgttgagtttcgccatgtggacaaacgctacggcgaccatccggttttaaccgacattaacctcaccatcatgccgggtgaagtggttgccattctcggcccttcgggttccggaaaatcgaccctgattcggcttatcaaccagcttgagagcctgagcggcggggagattctgatcgaccacaagccgaccggacagctttccggcagcaggctacgtcagttacgcagccgcgtcgggtttgtgttccagcagttcaatctctatgcccaccttaccgccagtcagaacatcaccctggcactggagcacgttcacggctggaaacccctgcccgcccaggagcgcgcgctggcgctgctggagaaggtcggcatgctggagaaggcgcaccgcttccccgctgaactttccggcggacagcagcagcgcgtggcgattgcccgtgctctggcctcgtcgccgcaaatcattctctttgacgagccgacgtcggcactcgacccggaaatgattggcgaagtgctgtttgtgatgaaaaccctcgcccacagcgggatcactatgattgtcgttacccatgagatgcagttcgcccgggaaattgccgatcgaatcgtctttatcgacggcggaaaaattctggaaaccgcgcccccggcgcaatttttcaatcaaccgtcgcatccccgtgcgaggcgtttcctgcaaaaagtgctggatccgctgcatcaggagcaactgtaa

SEQ ID NO: 114698 - DNA, 747 bp, Enterobacter cloacae
atgcccgctctggactggcagggggtgctggccggacagcccctgcactggatcctttccggatttctcaccactctgtgggtgacgctggcggggattatgctggccagcctgctcgccttgttctttatgcttttgcggctttccgggggacgtttcgggacattgatcgtcagctgctgggtatcgctgtttcgcaatacgccgctgctggtacagctgctgttctggtatttcgccgcctggaacgggttgccgcaggggctgcgtgacgcggtgaacgcagaccacagctggtccattttgcccggtgacgtctggtggtttacgcccgagtttttatgctccgcctgggggttaggcgtctttacctcggcgtttttaatcgaagaagtggaatcggggctgcgttccgtgcctgccgggcaacgggaggcggcgctcgcccagggattttcctcatggcgtctgtttcgctacattcttctgcctcaggggcttgctaacgcctggcagcccgtcgttggccagtaccttaacctgatgaagctctcctcgctcgcgagcgggattggcttcgccgaactgacctaccaggtccgccagatagaaagttacaacgcccatgcactggaagccttcaccttcggtacggtgctctacttgcttaccgggatggtgacgggaagcgtgctggtgcgcctcggcccccattcagggaggaaaaatcatgatccccggatttaa

SEQ ID NO: 114699 - DNA, 687 bp, Enterobacter cloacae
atgatccccggatttaacgttattgtcgaaaacctggattatctgctttggggacgtgcggctgcgggagaacccggcggcgtactgctctcactgctgatggccgcaggcgccgccgcgcttgccctgcccggcgggattgtgctggcttgcgtcgcctggcgctatcccggcgtggtgcgcagtgcgctgtttgcatgggcagagttgattcgcgggatccccctgatcttcgtgatattctggatgtggtatctgctgccactgataaccggcagggatctcccgggcgcgacgaccgtcacgctggcgctggcctggtttaccgcggctgcggtgatgcattcggtgttagccggactgagagccctgccgtcgggccagaatgaggccgcgctttctcaagggttcagtacgcagcaaacgctgtggcgcgtgctgctgccgcaggcgctgagaaatattctgccgtcgctggtggggatttttatcagcctgctgaaggatacgtcgctggcgtttatcgtgaacgttcctgaactgaccacggtggcgggacagatcaacaaccgggtgcaaatttacccggcggccatttttatcttcacgggtgtgatctattacctgctctgctgctcgcttgagctgctcgcgaagcgctggcgagttagccggccagcgctttaa

SEQ ID NO: 114700 - DNA, 210 bp, Enterobacter cloacae
atgggcaatgtgaccaaagacgaagcgctgtaccaggagatgtgtcgggtggtaggcaaggtcgttctcgaaatgcgtgatttagggcaggagccgaaacatattgtcattgcgggcgttctgcgtaccgcgctggcgaaccagcgcgttaagcgcagtgagttgaccaccaaagcgatggaaacggtggttaaagcgctggccggctaa

SEQ ID NO: 114701 - DNA, 813 bp, Enterobacter cloacae
atgaaaaagacactgacactgatcgccgccgcaaccctgagtgccctgagctttgcctcctgggcggacacgctcaccgtgggggcgtccaacaccccgcacgcggaaattctggagcaggctaagccgattctggcgaagcaggggatcgatctggagattaaaccattccaggactacattctgccaaacacggcgctggcggggcatgacattgacgccaactatttccagcacatcccttacctgaacagcgtcctgaaagatcacgcgggcgataaggattatgattttgtcagtgcgggcgcaatccacattgagccgatcggtatctattcgaaaaaatacaaatcgctgaaggatctgccggaaggcggcaaaatcatcatgcgtgatgcggtgtccgaggaagggcgtattctctccatcttcgaaaaagagggcgtgatcaagctgaagccaggcatcgataaagtgaccgcgcgcatcagcgatatcgtggagaacccgaaaaagctgcaattcacccctaacgttgaggcatctctgctaccgcagatgtacaacaacgacgaaggtgctgcggtggtgatcaacgccaactacgcaattgatgccggtctggatccggtgcacgatcccattgcggttgaaagcggtgagaataacccgtacgccaacatcattaccgttcatcgcggtgacgagaagaagaaggatatcgtcgcgctggtgaacgtgctgcactccaaagagattcaggactggatccgcaccaaatacaaaggcgcagtcatcccggtaaacaactaa

SEQ ID NO: 114702 - DNA, 669 bp, Enterobacter cloacae
atggctgaagaactctttccgcacctgaagtgggatcagctttgggctgcaacccaggagacgctttacatgaccgcgctttccggcgtggcgacgtttgtcctggggatcgcgctcggtctggcgctgtttttaaccgcccgcggcgggttattccacaaccgcacggtctacagcgtgatgtcgattgtggtgaacgtgttccgctcgattccgttcatcattctcatcgttctgctgatcccgttcaccaagaccgttgtggggaccattctcggcgctaacgctgcgctgcccgccctgattgtgggcgcagcgccgttctacgcccgtctggtcgagattgccttgcgagaagtagacaaaggagtcattgaggccacgcgttcgatgggcgcgcagctgagcacgttagtgtttcgggttttattgccggaatcttcacccgcactggtttcaggtatgacggtgacgctgattgcgctggtgagctacagcgcaatggcaggggtgataggtgccggcggtttgggaaatctggcttatctggaaggattccagcgcaaccatggtgacgtcacgctggtggcaacggtgaccattctgatcatcgtgttcattatccagttctgcggcgatgccattacttcactgttagataaacgctaa

SEQ ID NO: 114703 - DNA, 1023 bp, Enterobacter cloacae
atgattgtactcagcaatatttcgaaggtttttgacaacgggaaacaggcgctgacagccgtagataacgtcaacctgacgatagaacagggacagatttacgggatcatcggttacagcggggccgggaaaagtacgctgatccgtctgctgaacggtctggaaaagcccagcgccggcagcgtcaccattaacggtcaggatatctccgccgcgaagggagaagcgctgcgtcaggcacgcctgaaaatcagcatggtgttccagcactttaacctgctttggtcgcgcacggtgaaggaaaatatcgccttttcaatgcaaattgccggtgtgccaaaagcgcaaattcaggctcgcgttgccgagctggtggagctggtcggcctgaaggggcgcgagaatgcctacccatcccagctgagcggcgggcaaaaacaacgtgtgggcattgcccgcgcgctggccaatcatccggacgtactgctgtgtgacgaagccacctcggcgctggatccgcagaccaccgatcagatcctcgatctgctcctggacattaaccgtcgctttaacctgaccatcgtactcattacgcatgagatgcacgtggtgcgcaaaatctgcgaccgcgtggcggtgatggaaaacggcaaggtggtggaagagggggacgtgctgagcgtgtttacgcatccgcagcagccgatcacccggcagtttgtccgccaggtgagccagtacgcggaggaagagaccttcaataccgaactggcaaacgatctggaaggcacggtgatcaggctgaccttcaccgggcacagcacgcacaggccgatcgtcggtgaactgaccctgcgctacggcctgccgtttaacatcctgcacggcaaaatgacgcaaaccgcccacggtgttttcgggcagctctgggtgcacgtggtggcatcggacgaacaactgaacaatatcctcgccgacctgaagcaaagcgatattgaaggcgaggtaatcaagcatggctga

SEQ ID NO: 114704 - DNA, 1371 bp, Enterobacter cloacae
atgacgctttaccactccgtcaccgaactgattggccgtacgccgctcatccagctgcacaagctggacaccggcccctgctcgctgtttctgaagctggaaaaccagaatcccggcggctcgattaaagaccgcgtcgcgctgtcgatgattaatgaagccgagcgtacgggccagctacggcccggcggcaccattattgaagccacggcggggaacaccggcctggggctggcgttgattgcggcgcagaagggctactcgctgatcctggtggtgccggacaaaatgagccgcgagaagattttccacctgcgcgcgttaggggcgcaggtcgtgctgacccgttcagatgtgaataaagggcatccggcctactaccaggattatgcccggcggctggcgaacgaactgccaggcgcgttttatattgatcagttcaataacgcggccaatccgctggcgcaccgcaccactaccgcaccggaactgtttgaacagcttgacggccagatcgatgccatcgtcgtcggcgtggggtccggcggtacgctgggtggcttacaggcgtggtttgcagaacattcgccgcagacggaatttgtgcttgccgatccggccgggtcggtgctggcggaccaggttgaaaacggacgccatcacgatgccggatcgtggctggttgaagggattggcgaagactttatccctccgctggcgcacatcgaaggggttaaccgcgcctggcgcattaccgatcgcgaggcgttcaccaccgcccgcgatctgctaaaaacggaagggatcctggcaggctcctccaccggcacgctgctggcggcggcgctgaaatattgccaggcgcagactacgccaaaacgtgtggtcaccttcgcctgcgacagcggcaataaatacctctcgaagatgttcaacgacgactggatgcgccagcaggggctgatttcgcgtccgcaggcaggcgatctctcggactatattgccctgcgccacgatgaaggcgcgacggtgactgccgccccggacgacacgctttccaccgtgctggcccgcatgcgcctgtacgacatctcccagctgccggtgctcgataacgacaaggtcgtcggcatcatcgacgagtgggacctgctgcgacacatcgggggagatgccgatcgcttctctctccccgtgacggcggccatgacgcgtcaggtcgaatatctggataagcaggccccggagagcgccctgtacgccatctttgaccgtggcctggtggcgattatttatgacgaagatcgctttctgggtctgatcacacgcagtgacgtactcaccgcctggcgtaaccgcctgacaaaataa

SEQ ID NO: 114705 - DNA, 1146 bp, Enterobacter cloacae
atgaaaaacctggccaccctcagcgttcacagcggtgagtatcacgacccgcacggcgccgtgatgccgccaatttacgccacctcgacgtttgcgcaaccggcaccgggtgaacataccggctacgaatactcccggagcggcaatccaacccgccacgcgctggagaccgccatcgccgaactggaaggcggcacgcgcgggtacgctttcgcgtcagggctggcagccatttccaccgtgctcgaactgctggataaagacagccatatcgtcgccattgacgacgtgtatggcggtacgtatcgcctgatcgaaaacgtgcgcaagcacagcagcgggttacaggtgagctgggttaagccggacgatgtagccgggcttgaggccgccattcgcccggacacccgcatgatctgggtggaaacgccaacgaacccgctgctgaaactggccgacctggaggccatcgcggacattgcccggcgccataatgcgatcagcgtggcggataataccttcgcctccccggtcattcaccggccgctggaggcggggttcgatatagtggtccactccgccactaaatatctaaacggtcattcagacgtggttgccgggctggctgttgtcggggcaaataaggatctcgcggagcgtctgggctatctgcaaaacgcggttggcggcgttctggatccgttcagcagtttcctgacgctgcgggggattcgcaccctctctctgcgcgttgagaagcacagcgccaacgcgctggcaattgcgcaatggctggagcagcatccgcaggtagaccgcgtgttctatcccgggctggcgtcacatccccagtatgcgctggcccgcagacaaatggcgctggcgggcggcatgatctccgttgtgattaaaggcgatgcgcaacgcgcgacagaggtgatccgtcatcttacgctctttaccctggcggaaagtctgggcggtgtggagagtctggtgagccagccctacagcatgacccacgcctccataccactggcgcagcgtcttgcaaacggcattgtgccgcagcttatccgcctgtcggtggggattgaggatgcgaaggatctgatcgccgaccttcagcaggcgctggaaaagtga

SEQ ID NO: 114706 - DNA, 1422 bp, Enterobacter cloacae
atgaaaaagacgaaaattgtttgtactatcggcccgaaaaccgaatccgaagagatgctgagcaaaatgctggatgccggcatgaacgtgatgcgtctgaacttctcccacggcgactatgctgaacacggtcagcgtatccagaacttgcgcaacgtgatgagcaagaccgggaaaaaagcggcaatcctgctcgacaccaaaggtcctgaaatccgcaccatcaaactggaaggcggtaacgacgtttccctgaaagcgggccagaccttcaccttcaccaccgacaaatccgttgtgggtaacaacgaaatcgttgccgtgacctacgaaggcttcaccagcgatctgtctgttggcaacaccgtgctggtagatgacggcctgatcggcatggaagtgacggcgatcgaaggtaacaaggttatctgtaaagtgctgaacaacggcgatctgggcgaaaacaaaggcgttaacctgccgggtgtgtccattgctctgccagcgctggctgaaaaagacaaacaagacctgatcttcggctgcgaacaaggcgtggacttcgttgctgcctcctttatccgtaaacgttctgacgtggttgagatccgtgagcacctgaaagcgcacggcggcgagaacattcagatcatctccaagatcgaaaaccaggaaggcctgaacaacttcgacgaaatcctcgaagcgtctgacggtatcatggtagcgcgtggcgacctgggcgtagaaatcccggttgaagaagtgatcttcgcgcagaagatgatgatcgagaaatgtgttcgcgcgcgtaaagtggttatcaccgcaacgcagatgctggactccatgatcaaaaacccacgccctacccgcgctgaagcaggcgacgtagcaaacgccatcctcgacggtaccgatgccgttatgctgtctggcgaatctgcaaaagggaaataccctctggaagcggtcggtatcatggcgaccatctgtgagcgtaccgaccgcgtgatgaaaagccgtctggattacaacaacgacagccgtaaactgcgcatcaccgaagccgtgtgccgtggtgcggtagaaaccgctgagaaactggaagccccactgattgtcgtggcgacccagggcggtaaatctgcgcgtgccgtgcgtaaatacttcccggatgcgaccattctggcgctgaccaccaacgaaactaccgcgcgtcagctggtgctgagcaaaggtgtgatcccacacctggtgaaagagattgcctctaccgatgatttctatcgtctgggtaaagaagtggcgctggaactggttgattgtggcctggctcagaaaggcgacgtggtggttatggtttctggtgcactggttccaagcggcaccaccaacacggcatctgtccacgtgctgtaa

SEQ ID NO: 114707 - DNA, 237 bp, Enterobacter cloacae
atgaatcgtactaaactggtactgggcgcggtaatcctgggttctactctgctggcaggttgctccagcaacgctaaaatcgatcagctgtcttctgacgttcagactctgaacgctaaagttgaccagctgagcaacgacgtgaacgcaatgcgttccgacgttcaggctgctaaagacgacgcagctcgcgctaaccagcgtctggacaaccaggctactaaataccgtaagtaa

SEQ ID NO: 114708 - DNA, 1014 bp, Enterobacter cloacae
atgaagcgcgcgtctctaataactctattactccttggttcgctcagtgctgttaatttagcctgggcggttgattatcctttaccgcccgcaggcagccgtctgattgggcaaaaccagacatacaccattcaggaaggtgacaataaacttcagtctatcgctcgtcgctttaataccgccgcacagctcatccttgaaaccaataataccattgcaccggtgaaccctgcgccaggaacggtcattacgatcccttcccagatgctactgccagacaccgagcgcgagggcattgtggtgaatctggcggagctgcgtctttacttctatccgccaggcgaaaatatcgtgcaggtctatccgctgggtattggtcagcttgggctggaaacaccggtcagcaccacccgtgtgagtcagaaaatccctaaccctacctggacccccactgcgggcatcagagcgcgctcactggcccagggcattaaactgccgcctgtggtacccgcagggccaaataacccgctggggcgctttgcgctgcgtctgggcatcgggaatggggaatatcttattcacggcaccagcgcgccggacagcgtagggctgcgggtcagctcgggttgtatgcgaatgaacgcgccggatatcaaagcgctgtttgagcaagtgcgcgtcggcacgcgggtgcagatcatcaatgagccggtgaagttctccgtcgagccggacggcaaacgttatatcgaggtgcacaggccgctggcgcaggctgagggcgaaaacccacagacggtgccgttcacgcactcggcggcgtttaccgcctttgcagcggagtcaggtagcgataaaacgcttatcgataaagccctggcgcgcagagcggggatcccggtggccgtttcagcaggcaatggttcgtcagccagcaattctgtcctgtcggtgcagaacagtcgtgtctcagcggcggtggcggaaggcgagggagagaaagcgcttcagtag

SEQ ID NO: 114709 - DNA, 417 bp, Enterobacter cloacae
atggcagatttgccggacagagataaattgctgcgcaactttgggcgttgcgcgaactgggaagagaaatacctttatattatcgagctgggccagcgcctgccgccgctcagcgaagaggcgcataacccggacaacatcattcagggctgccagagccaggtctggatcctgatgcagcagacggatgaaggcgtaattgaattacagggtgacagcgatgccgccattgtgaaggggcttattgccgtcgtatttattctttatcaccagatgtcggcgcaggatattgtcgcctttgacgttcgcccgtggtttgaaaaaatggccttaacccagcacctcaccccgtcccgatcccagggactggaagcgatgatccgcgccatacgcgccaaagccgcaatccttagctaa

SEQ ID NO: 114710 - DNA, 1221 bp, Enterobacter cloacae
atgacatttcccgtagagaaagtccgggcagattttccggtactgacccgtgaagtgaacggtctgccgctggcctatctcgacagtgcggccagcgcgcaaaaaccaaatcaggtggtggatgcggaagccgagttttatcgccacggttatgcggcggtacatcgcgggatccacaccctgagcgccgaggcgacccagcgcatggaaaacgtgcgcacgcaggttgcggccttcctcaacgcgcgttcgccggaagagctggtgtttgtgcgtggcaccaccgaagggatcaacctggtggctaacagctggggcaatgcgcaggtgcacgcgggggataacatcatcatcacccagatggagcaccacgccaacatcgtgccctggcagatgctctgtgagcgtgtgggggcgcaactgcgggtgatccccctgaatgaagacggcacgctccagctggaaaagctggacgccctgctggacgacagaacgcggctggtggcggtgacccacgtttcaaacgtgctggggacggaaaatccggtggcgctgatcgtcgacaaagcccatcaggttggtgcgaaagtgttgattgatggcgcccaggcggtgatgcaccatgcggttgacgttcaggctctggactgcgatttctacgtcttctccgggcacaagctgtatggcccgacgggcatcggcgtgttgtatgtgaaagaggacattctccaggccatgccgccgtgggaagggggcgggtcaatgatcgccaccgtcagcctgacggacggcacaacctacgcccgtgcgccctggcgcttcgaggcgggtacgcccaacacgggcgggatcatcgggctgggcgcggccattagctacgtcactgaaacggggctggcggcgattcaggagtacgaacagcagctgatgcattatgccttgcaggagctggccagcgtcccggaactgaccttatatggccctgctgaccgtctgggtgtgatagccttcaacctcggcaagcatcacgcctatgatgtgggcagtttccttgataattacggcgtcgccgtgcgtaccgggcatcactgcgcgatgccgctgatggcgtattatcaggtaccggctatgtgccgcgcatcgctggtgatgtacaacacaacggaagaggtcgacagactggtggcgggactaaaacgtattcaccagctgcttggctaa

SEQ ID NO: 114711 - DNA, 1272 bp, Enterobacter cloacae
atggctggcttaccgaacagcagtaatgcacttcagcagtggcaccggctgtttgaagcgcagggtcgagcgcgctctgaacaggctcagcaccatctccagcagatgctgcgtctcggtttaccgacgcgtaaacatgagaactggaaatataccccgctggatggcctgctgaacggcgagtttgtcacccgtctggcgcaggtcagccccgatcagcgcgacatgctggcgctgagcgtggatgccgtgcgtctggtatttgtcgacggtctgttccgtgcggagctgagcgacagcgtgcaggagagcgggttcgatatcgtcattaacgatgaacgtcagtcgctgaacgcgcccgttcagcctgaagtcttcctgcacctgacagagagcctgtcgcaatctgtcacccatattcgcgttaagcgtaaccagcgtccggcgaaaccgctgctgctgatgcatatcacccagggcgttgagggtgatgagattaacaccgcccactatcgccaccatcttgagctggcagaaggggcagaggcgacggtgatcgagcattacgtcagccttaacgacacccgtcattttaccggttcgcgtctgacgatgaacgtggcggccaatgctcagctgcaccacatcaagctggcgtttgagaatccgctcagtcaccacttcgcccacaacgatattctgctgggccaggatgccgcggcgtacagccacagcttcctgcttggcggcgcggtgctgcgccacaataccagcacccagctgaacggtgaaaacactacgctacgtattaacagcctggcgatgccagtgaagtcagaagtgtgcgacacgcgcacctggcttgagcataacaaaggctactgcaacagccgtcagctgcacaaaaccatcgtcagcgacaaaggacgtgcggtgtttaacggcctgataaacgtggcgcagcacgccatcaaaactgacgggcagatgaccaacaacaacctcttgctgggacgtctggcagaggtggacaccaaaccacagctggaaatttatgcggacgacgtgaaatgcagccacggggcgacggtcgggcgtattgacgatgagcagatgttctacctgcgctcgcgcgggatagaccagcaggccgcgcaaaagatgattatttacgcctttgcggctgagctgacggaagcgctgcccgatggcggacttaaacagcaggtgctggcccgtatcggtcagcggctgcctggaggcgaagcatga

SEQ ID NO: 114712 - DNA, 747 bp, Enterobacter cloacae
atgttaagcattaaagatttacaggttagcgtggaagagaaagagatcctgcgtggcctcaattttgacgtcaaaccgggtgaagttcacgccatcatggggccaaacggctccgggaaaagtacgctttcagcgacgctggcaggacgcgaagattatgaagttaccagcggctccgttgagtttaacggcaaagatctgctggagatgtcgccggaagagcgtgccggcgagggcatctttatggccttccagtatccggtggaaattccgggcgtcagcaaccagttcttcctgcaaaccgcgctgaacgcggtgcgcaagtatcgcggccttgaggcgctggatcgctttgacttccaggatctgatggaagaaaagattaagctgctgaaaatgccggaaaatctgttgacccgctcggtaaacgtgggtttctccggcggtgagaagaaacgtaacgatattctgcaaatggcggttctggaaccggcgctgtgcattctcgatgagaccgattcagggctggatatcgatgccctgaagatcgttgccgacggggtgaactccctgcgtgacggcaaccgctcatttatcatcgtgactcactatcagcgaattctggattacatcaaaccggactatgtccacgtgctttaccagggacgcattgtgaaatccggtgactttacgctggttaaacaactggaggagcagggttatggctggcttaccgaacagcagtaa

SEQ ID NO: 114713 - DNA, 1491 bp, Enterobacter cloacae
atgtctcgtaatactgaagcaacgagtgatgtaaacacctggagcggcggacacctcaactataaagagggtttctttacgcagctgcaaaccgatgagctggcgaaaggcatcaacgaagaggtcgtgcgcgccatttcggcgaaacgtaacgagccggagtggatgctggagtttcgcctgagcgcattccgcgcgtggctggagatggaagaaccccactggctgaaagcgcattacgataagctgaactatcaggattatagctactactctgcgccctcctgcggcagctgtgatgacacctgcgcctcgcaacccggcgcggttcagcaaaccggcgcggagaacagtttcctgagcaaagaagttgaagaagcgtttaatcagctcggcgtgcccgtgcgcgaaggcaaagaggtggcggtagacgccatttttgactccgtctcggtggcaaccacctaccgtgaaaaactggcggagcaggggatcattttctgttcctttggtgaagccattcacgatcaccccgagctggtgaaaaagtatattggtaccgtggtgccgagtaacgataacttcttcgcggcactgaatgcggcggtggcgtcagacggtacttttatctacgtgccgaaaggcgtgcgctgcccgatggagctctcgacctatttccgcatcaacgcggaaaaaaccggccagtttgaacgcaccatcctggtggccgatgaaggcagctacgtaagctacatcgaagggtgctccgctcctgtgcgcgacagctaccagctgcacgcggcggtggtagaggtgatcatccataaagatgcggaagtgaagtactctacggtacagaactggttcccgggcgacggcaacaccggtggtattctgaacttcgtcaccaaacgcgcgctgtgcgaaggcgaaaacagcaaaatgtcctggacgcagtcagaaaccggctccgccattacctggaaatacccgagctgtattctgcgcggcgacaactccatcggtgagttttactccgtggcgctgaccagcggtcatcagcaggccgataccggcaccaagatgatccacatcggtaaaaacaccaaatcgaccatcatctccaaagggatctctgccggtcacagccagaacagctatcgcgggctggtgaaaatcatgccgacggcaaccaacgcgcgtaacttcacccagtgtgactccatgctgattggcgcggactgcggggcgcataccttcccgtatgtcgaatgccgcaataacagcgcccagcttgagcatgaggcaactacgtcacgtattggtgaagatcagcttttctactgcctgcaacgcgggatcagtgaagaagatgcgatttcaatgatcgttaacggcttctgtaaggacgtgttctctgaactgccgctggaatttgccgttgaagcccagaaactcctcgccattagtcttgaacacagcgtcggttaa

SEQ ID NO: 114714 - DNA, 369 bp, Enterobacter cloacae
atggaactgcattcagaaaccttcaatccggccgattttgcctggcgtggcttaacgctgacgcccgcggcggcggagcatattcatgagctggtggcaaaaaatcccgacatccttggcgtacgcttaggcgtaaagcagactggctgcgcgggatttggctacgtgctggataccgtaaccgaacctgaaaaggacgatctggtctttgaaaccgacggtgcaaagttatacgtcgcgctacaggcgatgccgtttatcgatggaaccgaagtcgactacgttcgggaaggtttaaaccagttattcaaatttcataacccgaaagcccagaacgaatgcggctgcggcgaaagctttggggtatag

SEQ ID NO: 114715 - DNA, 729 bp, Enterobacter cloacae
atggcctattacagtatcggcgaagtggccgaacgatgcggtatcaaccccgttacgctgcgtgcctggcagcgccgttatggattgttgaagccgcagcgaagcgaagggggtcatcgtcagtttgacgatgaagatatcctgcgtatcgaagagatcaaacgcctgatgaaaacgggtgtttcggtcggtaaagtaaaagcgcttcttgaaaatacagaagtaatgactcaggggaactgggcatcttttcaggaagagatgttaaccgttctgcgctatgccagtccggcaaaactgcgcgccaaaatcggcgagttccgccgtgaccatgcgatggatgttctgatagataacatcatcacccctgtgcggcagcgaatgaaccaggaccagaatacggtgcgccacatggcgagcctgctggacggtgtcctgattgagtttgccgttgcaagcctgggtgagtcgcgaaaaaaagcaggtaaggatgcgctgctgattgggtgggattgcgacgaccgtacgcatttgtggctggaagcggcccgtcttgcctataaaggctggcatatcgacgtgctggctgagccgattgattctccacgtcctgaactcttccccgggcaaaaaatcttcgtctggaccggtaaagcgcctacgcctcgtcaacaggagcagctcgaccactggcgtgaacagggtttcgccgtttcgttccatcactga

SEQ ID NO: 114716 - DNA, 1221 bp, Enterobacter cloacae
atgctcacaaccatcatttaccgcagtcatatctgcgaggacgttccagtgaaagcgctggaagacatggtcgctgctgcaaattgtagaaatcgccagttcgatgtgacggggattttgctgtttaacggcacacacttttttcagttacttgaagggcccgctgataacgttaaggagatctatgagctcatctgccgtgacccacggcatcacaacgtggtcgaattgttaagcgatcacgggccttcaagacgttttggcaacgtgggtatggagctctttgaccttcgtcagtacgataccgacgaagtgctgcaacaggtactcgataaaggcacaacgcgctatcagctgacctataacgatcgcgccctgcaatttttccgcaccttcgttgaggccactgaaaaagccaactactttgagctgcctccggctgacgcctgggagtttgtcaccgaaaatacgccgttatcctcccagccgacagtagtggcaaagggcgcggactgtagtttcgcatttcaacctatcgtcgatccgtttatgcagcaggtagtttcctgggaagccctgatccgcacgccgtccggtgagtccccggaaagctattttgccaacctgtcgcgtgaggcgctgtacgaatcggatctgaagagtaaacaggtggctttgtcgatggccagcgcactgggcctacagactcaaacgttgtccattaatctgctgccgatgacgctggtcaatgttcctggcgccgtcgattttttactgacggcaattgaggcgaacggttttgtgccggagcaaattgtggtcgagttcaccgagagcgaggcgatctcgcgcttcgaagagttcaccagcgcggtcagacagcttaaaagcgccgggatcagcgtggccatcgatcactttggcgcgggattcgccggtctgcaactgctggcccagtttcagccggacagaatcaagattaaccgtgacttgattgccaacgtgcacaagagcggccctcgtcaggcgatcattcagtcaattattaaatgctgcgcctccctggaaattctgttctgtgcggtaggcgtagagctggctgaagagtggatgtggctggaatctgccgggatttctcagttccagggacaccttttcgccagcccgcgcctggggggcataccggcgattgcctggcccgagaaaaagtacgatttataa

SEQ ID NO: 114717 - DNA, 240 bp, Enterobacter cloacae
atgcagcagaacggacacctcgcagactcggcaacagcgattgcgcagtatttcgaaaaagccgcgcttccaacccaacaggaaacattgggtcaggttgttgttgaaatccttagcgacgggcgaaatctgaatcgcaaatcgctctgcacaaaactgttgagtcgccttgaaaaggccaatggcccggaagaggaacatcattatcacatgcttcttggcctgctcttcgaacgttaa

SEQ ID NO: 114718 - DNA, 279 bp, Enterobacter cloacae
atgagacaaaatattcagcttcaacccgaataccactccgcctttttagatagcgcgttgtcggagtatttccgtcacgcaggcgatcgctttgctgaagagtctgccattttttcgactgcggttcgttgtgttcttgcttccgaaggtcatttgaccaacaaagcgatcattctctggttaatccagacgttggaatccaccgacgatgtcgttaaggcggatgtgatccgcaagacgctggaaattgtcgtcggttacaccatggacgatctttaa

SEQ ID NO: 114719 - DNA, 213 bp, Enterobacter cloacae
atgccacattcagcgttcttgattaacagggcgtttgtggagagagggtgtgtcatcgtcagtctgttcgtcagaattgacgatgacacgctatccgtagggatgggggaggcgttaaagatcgtccatggtgtaaccgacgacaatttccagcgtcttgcggatcacatccgccttaacgacatcgtcggtggattccaacgtctggattaa

SEQ ID NO: 114720 - DNA, 2151 bp, Enterobacter cloacae
atgaaaaaaatcgccagcgtctgcccctactgcggtgcaggctgcaaactaaacctcgtcgtaaaaaataaccgcattatccgtgccgaagccgctgatggcgtaaccaatcagggcacgctttgcctgaaaggtttctacggctgggactttcttaacgacacacggctgcttaccccccgtctgacgcagcccatgatccgctacagcaaaggcgaggcctttacccctgttacctgggaagaggccattcgttataccgctcacaggcttaaaagcatcaaagaacagtatggccctcggtccattatgaccacgggttcctcacggggaacgggcaatgagaccaactatgtgatgcaaaaatttgcccgtgcggtgctgaatactaacaacgtcgactgctgcgcccgcgtctgtcacggtccgtccgttgccggtttacaggagaccctcggcaacggcgccatgagcaattccattaacgatattgaaaactcaaaatgcctgctggtattcggctataactgcgccgactctcaccccatcgtcgcccgacgcgtgcttaaagcacgtgaaaatggcgctaaaatcatcgtctgcgatccgcgtcatattgaaacggcacgcattgccgatcttcatcttcagctaaaaaatggcagtaacatggcgctggtcaatgcctttggctatgtcctgctggaagaggaactgtacgacaaaaactacgttgcccgctttacagaagggcttgaggcgtaccggctgacggtaaaagattacgcccccgagcaggttgaacatctgacggggatccgcgcgcgggatgttcgtcaggcaatgcgcatgttcgcagcggcgccttcagcaacggtgatgtgggggatgggcgtcacgcagtttggtcaggcggtcgatgtggtgaaaggtctctccagcctggcgctactgaccggcaacctgggccgccctgccgtcggcgtgggtccggttcgcgggcaaaataacgttcagggtgcctgcgatatgggcgttctgcccaatatgttccccggctaccaggacgtcactgacccggcggtcagactgaaatttgccgatgcgtggaaaatcaatgtcaaccggatggacgatcgcgtcgggacgcgtatcaccgaagtgccacatctcgcgctggaaggaaagattaaagcgtattacatcatgggggaagatccgcttcagacagaagccgatctgggactggtccgccgcggctttgaggcgctcgattttgtggtggttcaggacatctttatgaccaaaacggcagaggtggctgacgtgctgctccctgccacctcatggggagaacacgccggcgtgttcacctgtgccgatcgcggcttccagcgtttcggcaaagccattgaggccagcggcaacgtgaagcgcgactgggagatcatcagcctgctggccacggagatgggctatcccatgcattacgaggataaccagcagatctgggacgaaatgcgcgagctgtgccccctcttctacggcgtgacctacgaaaaaatgggcgagatgggccatgtgcagtggccttgcccatccctcgatcatcccggcaccccctacctgtacaaggataatcagttcgacacccctactggcaaaggacagctatttgccgccccctggcgcgccccggcggagacaccggatgcggattacccgctggtactgtgcacggtgcgcgaagtgggtcactactcctgtcgctcaatgaccgggaactgcgcggcgctgcaaagcctggccgacgagccgggccgggtgcaaatgaacccggccgatgcggatgaacgggggattgccgagggccagctggtctgggtacgttcacgccggggtaaagtgatcacgcgcgccagcatcagcgagcgcatcaatgcgggagcaatctatatgacctaccagtggtggattggcgcctgtaatgagctgacgcaggataatctcgacccgatctccagaacgccggaaacgaaatattgcgccgtgcagctggaggcgatcgaggaccagcgctgggcggaggattttgcggcttccgcgtaccagaccatgaagacgcgtttgatcgctgcggttaacgtttaa

SEQ ID NO: 114721 - DNA, 654 bp, Enterobacter cloacae
atgttaaatattctgattcaggaaacggatctgttttttcaggctgggctacagagctttttcgacgatttttttaagcataactttcatcgctccatcacatttcacctggcgctgaccaatgaaaacgtcagccaggctgatattattgttctttcattatgtcagggggaaacgctgacctgttttccggagttactggcccggcaaaaaggaattgtgataggtctcgtcgacgatgagctgcgcttttcggcgctgccttcctgctttcaggacatcatttttctcccgcgccgggcgtcgcttgaccgtattagcggcgttctgtttatcgcgtggttcaggacgcaattaccaggttacacgttgaataaaaagacctgtttcgactgccagcataaaggtttatcccggcaacagattcgtattatggtcaatttttaccgggggctgtcggtggtgcagaccgcgaacgcgttgaagatgagcgaaaaaacggtctttacccataaatatatgatgatgcagaaatttaatctgcgaagcgattacgagctgatcgtactgttgagaaggctgatggagaaaaagagccgtccgaacctgcttcgcgattacctggaaaataattatgcacaacagataacgtaa

SEQ ID NO: 114722 - DNA, 513 bp, Enterobacter cloacae
atgaaaataagatgcaggacactgcttttacttgccttactcagcgggaaggtatgctccgctgatagcgtcaacatcggtgtgacgggaaatatcgtggcgtcgccgtgcatatttaatggcggcagtaacagcctcgatgtcaacctgggcaatattcaggcaaccaatatggcgacgccgggctcaacatcggatccggtgcctttcagtctgctgtttacccagtgcccaacgggaacgcagagtgtgaccgtcgctttcaccggcagccccgatcccgaggcgggagcggactatttcatgaacagcggttcggccacgcacgtggcgatagccatgcgcgatgcccaaaccggcgcgcttaaaggaacaggcaccagtatgacccagaccattgccgcggacagaaccgcgacattggctatgctggcctcggtaaaatccatgccgggaggcgccacgccgggaagcatcagcgcggttgtggtaatgacgatgcagtacaactaa

SEQ ID NO: 114723 - DNA, 948 bp, Enterobacter cloacae
atgaaatgtcttaacgcgatgctgctgctctgtttgctcgcggcggcaaatatggctcctgccggtacctgcaccaccatcaccccgcagctttccaccctgtccgtggggacgatcaacgtgcagcgcgatgcgcctgtcggcacggtggtattttccggcgcggcgtcagccacaggctcctattttaccgggtgtactaatccgctgatgctgggattcagcctgcgctacaacggcgccacgttgagcagctacggcaaccatgtttacaacacgaacgtcagcgggatagggatacgcttttcttccaacggctattttgaaaacccgagcaatacattttcctacaatgcgcagacctcctatgtggactggtacggcgggaggattgagctggtggtgacggggccggtctcatcgggggcattaacgccggggacgatcggcgtcgtgacgctacagggaagcgatggcctctaccgtgacggtctgaccacgcagctcacctccggcaccatcaatgcgctggcgtgcacggtgaatacggcccagctgacgtttccgataggggatattcccgcctcggcgttcggctccacggtgggcaccacgccagcgggagcacagaacacgcaaaacctgggcctgacctgcgccgccggaaccaatattacggtctcgctcagtggaatacagaacccggacagcgccaataccagcgtgatggccttaaccgggcagggaaatgccggcactgcgaaaggggtgggggtgcagcttatctataacggtgcaccgctggtgatgaacagccgactattcttgcggcagtctgccggggggcaagagacgttgccattaacggcccggtattaccagacgttaacccgcgtggagtcaggttcagcgaatgcctccgccacccttaatttgacctaccagtag

SEQ ID NO: 114724 - DNA, 2544 bp, Enterobacter cloacae
atgacaacggcattgaatacaatgcagcctgcgcgcctggcaatatttattgccctcgcgcttgctggtgtctctcccacactgtatgccagtgagacgtttaatacggaactggtagagctggataatcccggaatgggaaaagcggatttatctgcctttgaatccggctcgcaggcgcccgggatataccacgttgatattattcttgacgatcggctgctggaaacgcgggatattcgttttatggcagtgaaggatgctaacggcagtgaaacgttgcagccttgcctgagtatcgggcagttaaaagcgtggggcgtgaaaacggcgcttttcccacagcttgccgccggggaaggtgaatgcgccgatctcagggcgattccacaggccagcgcggatttccagtttggcgcccagcgtctggcgattagcattccacaggcggctatagacctgccagcgagaggttacgttccgccggatatgtgggatgaaggcattaccgcggccatgctcaactacagcctgagcggggcaaacagccgggcaagaagcggggcaggcacccgcagcgacagccagtatgcaaacctgcggccggggatcaacgtcggtccctggcggttacgcaactacaccacctggtcccgcgatgcgtccggccaggataagtgggacaacgtctataccttgatgcagcgcgcgattattcccctgcaagcccagcttacgctcggagacagttccgcgtctgccgatgtctttgacagcatgccgtttcgcggcgtccagctggcgtccgacgacgatatgctgccggattccctgaaaggctatgcgccggtggtgcgcggtattgcgcgaactaacgcgcaggtcgtggtgcgtcagaatggctatcaaatctaccaaagctatgtggcaccgggcgcgtttgagatcgcggatatgtatcccaccggcggcgcgggagaccttgatgtcacgatcgtcgaagctgatggtagtgagcaacatttctccctgccgtacgcttcgctgccggtcctgcaacgggaggggcgcctgaaatatgcccttaccgccgggcagtatcgctcgtataaccgtagcgtggagaaaacccccttcgggcaactgaccggaatttacggcctccctcacggtattacgctctatggcggcgtccagggggcagataagtaccagtcggcggctctgggggtgggcaagaatatgggcgatctcggggctgtatccgcagacgtcactcagggctggtcaacgccggagcatgccgcgaaaacaaacggtcagtcgtggcgggcccgatacagcaagaattttatcaataccgggaccaacttttcgattgccgggtatcgctactcgacccgcggctattacgggatgcaggacgtcctcgattcgtacggcgacagccgcgcgcttcaggacaggcgacgtaaccgtgccgagctgacgatgagccagacgctgggggacaacctgggcgcgcttaccctcagtgcggcgcgggaagattactggaatgacggtaagtcgatggcttcgtggagcgtcggctatagcaactactggcacaacatcagctatggcctgacatggacttacagcaaaaatgtccgctcagcgtcagaaacccgtgacagccaaaaaaacgctgatcacgaccagcttctggcgttcaacgtcagcattccgctggataaatttttgccgcagacatgggctaactatggcatgaacgccagcgggaataacgggacgacgcataacttcggcctgaacggggtagcgctcgagaaccgtgccctgagctggaacgtacagcagggatacggcacagagggcgtgggctataccggcaatgttaacgcggactacaaaggcgcctatggcgaagtcacggcaggttatggttatgacaaaaacagtgaacgcctgaattacgggctgcaaggcggcattctcgcccatgctgatggcatcacgctttcccagccgctgggggagaccagcgtcttaatcaaagcccctggcgcccacgacgtggatatccgcaatcagcccggtgtacggacagattttcgcggatatacggtcgtgagcaacctttctgtctaccggaaaaatgatctcaccctcgacccggaaacgatgccggacgatgtcgagctggagatcaacacccgcacggtgacgccgacgcggggagcggtggtgagagccgattatctgccgaagtcaggtcgccgggtgctgatgaccttgaccgacagcgaccgcgccgttccgtttggggcggtggtcacccttgtgggtgatgacagcggcagttttattgtcggcgatcgcggtcaggtctatttaaccgggatgcgcgagcagggaacgttagtcgctacatggggaagtcaatccagtcagcaatgccgcgctgatttcacgctgccgaatcactcaacgtacggtgggatcgctgatatgcacgccacctgccgtcaggaacgctaa

SEQ ID NO: 114725 - DNA, 678 bp, Enterobacter cloacae
atgcgttttatcacgacaatgggcctggctatggcgctgttaccgctgacgttaacatccgtcagtgcgggagtaattattggcggcacccgtattatttttgatgggactaaaaaagaggcgtcaataggtattactaatcctgataatgttccttatttaatccagtcgtggatagatgttcaggatgaacaatcgggtaaagcgccttttattattacgccaccactgtatcggctggacggcgggcaaaagaaccttgagcgtattgtcatgaccggctcactgcctcaggggcgggagagtttattctggctgaacattaaagctattccttcagcctcaaagcagatgaactcgctgcaaattgccgtcaaaacgcgcatcaaattaatttatcgaccagagactcttcgtgcgtctacccccgaggagcaagccaataaattaacctggcgtcgtgcgggaaatacccttcaggttaataaccctacgccgtacgttatcaatttcaatgaaattacgttgggtaataagaaacttgacgatgtcacgtacgtgatgccttcaggcacagcccgttttccgttaccgaacggaaccagtggcaatacgctgacgtttaaagtcattaacgattatggcagccctggcgaattacaccgggccagtttgtga

SEQ ID NO: 114726 - DNA, 531 bp, Enterobacter cloacae
atgaatacaaaattgatgatggcaatgttagcggcaggttctgtactcaccatgaccaatgcattcgcagcggccggtaccgttaattttaacgggaatattctggattctgcctgcgacgttgatgtggcatcccagaatcaggtggtggtattaggcgattattataaaacggaattcccgacaaccggggcgagaacggctgcgacgcaattcaatattattttgaaaaactgtccggtaacggtcaccaatgcaaaagtccgttttgacggcacgccggatttaaccaacgccagcctgctggcgattgatacgtccgtggcgggggcggccaccggggtggcgattaacctgatgacggcagataaagccgatctgccgctgcacggcagcaacagctatatttacccgctcagcagtacggctgataatacactgaacttctacgcgcagtatatctccaccgcggcatccgtgaccgcgggcccggctaactcggtcgcaaacttctcagtggtatacaactaa

SEQ ID NO: 114727 - DNA, 660 bp, Enterobacter cloacae
atgaatacccgtttcgcgcctgagtcagatattgataagtcaacagtgctcggcgctaagccttttaagcacattgaaaaaataatcgataatgttttgccgcatgcggagagaagcattattgccagaggagaaattatccattattgctccggcgatacccgtcaatgctttttactgttgcatggcagcgtggcgttgcaccgtcgcggggacggtatcgtcttaaattctgaatccgcgccatttatactcggcgtgagcagccagttatcgtctgaacacctgtacgtcagagcgctggaaacctcagaggtggccagcgtttcgctggcgtgtttcaatcatgttgtcgcacaacagaatttatgggagcacttctcaaacctgctgatctataccgcatcgcgcgtctacgaacattgtgcccagatatcgcaaatgtcggcttatgacattatccgctttcaactggttgagttgatgcaggagccggaagccataagacaaaacattaccgccgcggcctatatcaaaagccgcacctatctttcacgcagcggcattatgcggatcctcgcggagttgcggacggggaaatacatcaccatggagcgtggcgtactagtagagatccatcacttaccccgtaagtactga

SEQ ID NO: 114728 - DNA, 630 bp, Enterobacter cloacae
atgtcttctgacaaaccatcgcatcgcggctctccctatgctcaggaactgatttctcatttacagccgcactgcgccacgcataaaaccgatcccggcgagcaacttgatctccaggttgacgggcagagcatgtgttatttaattcttgatggcacggtcgccatatacagaagaagcgacgacatgatgctttcaacggcgcgcagtcccgccctgtttggcctcgctaacctgacggacatttattttaatgactacctccgaacggtaacgccttgcctgattggtgtgctcacgaccgatcgggtggctcaaattatcaaagagaaggcgctgtgggggctgctttctaatcatctgatgtttgtctataaccgcctctatcacaacgtcatgccgaaaggcgcgccaaccgcgtacgagatgattcgccagcagctcgtgctgctgatgcaggaagatgacagctaccgacgcagcgtgacggcggaaaggtatatcagggataaaacccatctttcccgcagtggcgtaatgcggatcctggctgatctgaaaacgggtgggttcatcgaaatggaagaaggccggctgattaaaattaacaaactgcctgccagatactga

SEQ ID NO: 114729 - DNA, 195 bp, Enterobacter cloacae
atggatactgaaataaccccaacacagctggcaattgaatatttacgtcgcgataaaagcaatctgtctcccgcccagtacctgaaaaagctgaaacagcttgagctggaatttacggatttgctggcgctctcttcaaacgaactgaaagaagagatctactttgcctggcggttgggcgttcacgtccattaa

SEQ ID NO: 114730 - DNA, 411 bp, Enterobacter cloacae
atgatctggaaacgtgcggtcacgctggaggccttaaatgccatgggcgcggagaacatggtcggtttgctggatatccagttcacgcgcattggcgacaacgaactggaagcgacgatgccggtagacaaccgtactcatcaaccgtttggcctgttgcacggcggcgcgtccgtcgtgctggccgaaacgctggggtcggtggcgggctacctgtgtacggaaggagagcagaaggtggtgggtctggaggtcaatgccaaccacatccgctccgttcgcagcgggcgcgtgcgcggcgtctgccgggcgctgcatgccggaagccgtcatcaggtgtggcagattgatattctggacgagcaggatcgcctgtgttgttcatccaggctgacgacggccgttgtgtaa

SEQ ID NO: 114731 - DNA, 3057 bp, Enterobacter cloacae
atgatcccacagatttctcaggcaccgggcgtcgttcagctggtgcttaattttttgcaggcactggagcaacagggttttacaggtgacaccgccaccgattatgccgacaggctgacgatggcgaccgataacagtatttaccagcttcttcccgatgccgtcgttttcccgcgctctaccgccgatgtggcgctcatcgcccgtctggcgtcgcaggagcgtttcagcaccctggtctttaccccacgcggcggcgggacgggtaccaacgggcaggcgctgaaccagggcatcatcattgatatgtcccgctatatgaaccgcatcattgagatcaacccggaagaggggtgggtgcgagtggaagcgggggtgatcaaagatcagctgaatcagtttttgaaaccttacggctatttttttgcgccagagctttccaccagtaaccgcgcgaccattggcgggatgatcaacaccgatgcctcggggcagggctcgctggtctacggcaaaacctccgatcacgttatgggtgtgcgggcggtgctgctggggggcgatatcctcgatacccaaccgatgccgatcgagctggccgaaacgctggcaaaagagagcaccaccagcggacggatttatcgtaccgtgctggagcgctgccgcgaaaatcgcgaactgatcctcaacaaattcccgaagcttaaccgcttcctgacgggctacgatctgcgccatgtctttaatgacgatctgagccagttcgatcttacccgcgtactgaccgggtcagaagggacgctggccttcatcaccgaagcgcgtctggatatcacccggttgccaaaggtgcgccgtctggtgaatgtcaaatacaactcctttgactccgcgctgcgtaatgcaccgtttatggtggaggcgcgggcgctgtcggtggaaaccgtcgattcaaaagttctgaacctggcccgggaagatatcgtctggcattcggtgagcgaactgattaccgacgtgccggataaagagatgctcggcctgaacatcgtcgagttcgccggggatgacgcagagctgattgagagccaggtaagcacgctctgccagcgtctggacgagctgattgcccagggggaaggcggcgtcattggctggcagctgtgtaacgatctctccggcatcgagcgaatctacgcgatgcgtaaaaaagcggtggggctgctcggcaacgcgaaaggggcggcgaagcctattccgtttgcggaagatacctgcgtgccgccggaacaccttgctgattatattgtggagtttcgcgcgctgctcgacagccatggtctgagctatggcatgttcgggcacgtggacgcgggtgtgctgcacgtgcgcccggcgctggacatgtgcgacccgcagcaggagatcctgatgaaggagatctccgacgaggtcgtggccctcacggccaaatacggcggcttgttatggggcgagcacggcaaaggattccgcgccgagtacagcccggcgttttttggcgaacaactttacgccgagctgcgtaaggtgaaagccgcttttgatcccgataaccgccttaacccgggaaaaatctgcccgccggagggcgttgatgcgccgatgttgcaggtggacgccgtcaagcgcggtacctatgaccgacaaattccgattgcggtacgcgcttcatggcgcggcgcgatggagtgcaacggcaacgggctgtgcttcaacttcgatgtgaaaagcccgatgtgtccgtcgatgaaaatcaccagcaaccgcattcattccccgaaagggcgtgccacgctggtgcgcgaatggctgcgcctgctggccgaccgcggcgttgacccgctcaagctggaacaggaactgccggaaaaacgcgccagcctgcgcgggcttatcgaacgcacccgcaacagctggcatgcgaacaaaggtgaatacgatttctcgcatgaggtgaaagaggcgatgtccggctgcctggcgtgcaaggcgtgttcaacccagtgcccgattaaaattgacgtaccggaattccgttcccgcttcctccagctgtaccacacgcgttatctgcgcccgatgcgcgatcatctggtggcgacggtggagagttacgcgccgctgatggcccgtgcgccaaaaacctttaacttctttatcaaccagccgctggtgcgcaaactgtcagaaaaacatatcggcatggtggatctgccgctgctgtcggtgccatcactccagcgtcggctggtggggcaccgctcggcgaacatgaccctggaacaactggaagcattaagccctgagcagaaagcgaaggtggtgctggtagtgcaggatccgtttaccagctattacgatgcgcaggtggtggccgattttgtccgactggccgagaaaatcggctaccagccggtggtgctgccgttctccccgaacggcaaggcgcagcacataaaaggtttcctcacccgctttgcgaaaaccgcgcagaaaacttcagatttcctgaatcgcgtggcgcagctcggcatgccgatggtgggcgtcgatccggcgctggtgctctgttaccgggatgaatataagcagacgctcggcgataagcgcggtgattttcaggtcttactggtgcacgagtggctgcctgcggtgctgacgcaaacgcccactcaggaggtgagtggagaagcctggtatctgtttgggcactgcaccgaagtgacggcgctgccgacggcgcctgcccagtgggcttctatctttgcccggtttggcgcgaagctggaaagcgttaacgtgggctgctgcggtatggccggaacctacggccatgaagtcaaaaaccacgctaattcgctcggcatttacgagctgtcatggcatcaggcgatgcagcgcctgccacgcaaccgctgtctggcgacgggctactcctgccgcagccaggtgaaacgggtggaaggtaacggcgtccgccatccattgcaggctttactggagattatcggatga

SEQ ID NO: 114732 - DNA, 1116 bp, Enterobacter cloacae
atggtcaatcttcgtcagcccagggatgtcgcgcagatactgctgtcggtgctgttcttagccattatgattattgcgtgtctgtggattgttcgtcctttcgtgctcggatttgcctgggccgcgaccgtcgtcgtcgccacctggcctttactcttacgtttgcagaaactgctgtttggtcgccgcggcctggccgtgctggtgatgacgctgctgttgttcctgctgtttattattcccattgcactgctggttaacagcctggttgacagtagcggcccggttattcgcgcggtcaccagcggtgatatgacgctgccggatctcgcgtggctgaacagcattcctgttgtgggcgcaaaactgtacagcggctggcacagcctgctggagatgggcggtagcgcgctgatggccaaagtgcgtccgtacatcggcacaaccaccacctggtttgtggggcaggctgcgcacattggtcgcttcatgatgcactgtacgttgatgctggtcttcagcgccctgctgtactggcgcggtgagcaggttgcgctgggggtacgtcatttcgccacccgactggcaggtaaacgcggcgatgcggccgtgctgctggcagcccaggccgtccgcgcggtagcgctcggcgtggtggtcacagcgctggtgcaggctgtacttggcggaatcgggctggcaatttccggcgtaccttatgccaccattttcaccgtcgtcatgctgatgacctgtctggctcagctcggtccgctgctggtgctggttccctgcattatctggctttactggacgggggacacgacctggggcacggtgctactggtctggagttgcgtggtgggcaccatggataacgtgatccgtcccctcctcatccgcatgggcgctgacctgccgctgattctgatcctgtccggggtgatcggggggttaattgccttcggcatgattggcctgttcatcggtccggtgctgcttgcggtaacctggcgtctcttctccgcctgggtgcatgaagtgccgccgccgggaaccgaccctgacgtcatcttaagcgaacttgaagaactggaagataagaacgcgcagtaa

SEQ ID NO: 114733 - DNA, 2376 bp, Enterobacter cloacae
atgactgcgatctacaaggacgcgggacgttccgtacacgagcgtgtcgctgatttactggcgcgtatgacgccggaagagaaatttgcccagatgcacgcgtactggctgatccttgatgaacacggcaaccaccgcgagcgcagcgatctgagcgatgaattcgccggcgtgagcgaacaagcgtccctcagcgaaagactgaagctcggcgtcgggcagatcacccgcccgctcggcacgcacattgttgatgcaaaaaccggcgtgcgtgccgccaaccgcctgcaacgcatgatgatggaggagacccggctcggcattccggcgctgtttcatgaagagtgtctggtagggctgctgtgcaaagatgcaacgctgttcccgtcgtcgctgaactacggttctacctgggacccggcgctggtgcagcgcgcggcggagcagattggcaaagaggcccgatccgtcgggtgccagcaggggctggccccggtgctggatgtctcgcgcgatatgcgctggggacggacggaagagacctttggggaagatccgtggctggtaggggtgatggcgacggcgtacgtgaaggggttgcagggcgataagcgcgatctgctggcgaccctgaaacattacgtcggccactccttcagcgaaggggcgcgcaaccatgcgccggtccatctcggtttcagcgagcttaacgataccttcctgctgccgtttgagatggcggtaaagctggccaacgccggttcggtgatgccagcctatcacgacattgataatcagccagggcacagcgaccattttctgctcaccaccgtgctgcgtgaacagtggggcttcgacggcattatcgtggcggattacggcggcgtcagcctgctgcaccagcaccacgggatttctcacgatccagcacaatcggcggcgctggcgtttaacgccgggctggacgtggaattgccgaaggatgactgcgcgcgtcatctggctgaagcggtagagcgtgggctcatctcaatggcgaaagtggatgagattgtggcgcgcgtgctaagtgaaaaattccgtctcgggctgtttgaaaaaccgtacgccgacgaagacggtatcgatttgcagaatgaggcgacccggcaggtggcgcgcgaggtggcaacaaaatcgatcacgctgctggaaaataacggcattttgcccctcggcggaaaaccccgtgtagcggtagtggggccgacggcggacgatccactggcgttactgagcggctacagcttcccggttcacctgattatcagcgatatggttgaagagacttcgcaggtgaccaccccgcgcgcggcgctggaacagtaccttggtgcatcgcagatacgttacgccaaagggtgccacattatcgaaaaacggatggcgggcgcgccggtgttcccgggcgacagcggcggtaaaccgatgcagcaatcgccggtttcacaacgcacggatctgatccccgacgccgtgagcgcggcaaaagagagtcacgtggtggtggcctgcgtgggcgacctcgccggactattccagagcggcaccgtgggggaaggttcggataccgattcgctggatctgccgggcgtgcagcaacagctgctggaggcgctggtggcaaccggtaagccggtgattgtcgtcatgacgggtgggcgtccttataaccttcaggggctggaagagaaggtggccgcgctgatgatggcctgggcgccggggcaggaagggggctgggcgattgccgatgtcttaaccggccgcgcggagccgcagggcaggctggtagtgagcgtgccgaaaaacgccggggcgatgccgtactactataaccacaagctgaaaagcggcggcacgccgtttgcgttccatttcggcgcactttacccgttcggttacggtctcggctggacgcagtttcgctggggcgcggcccgcctggcggaaagccgcgtcccgatcgacggagaggtggcgttaagcgtcgatatcaccaacaccggcgagcgcagcggcagcgaagtggtacaggtgtacgtacgcgataaggtcgccacgcaggtgcgtccgcttcaggagctgaaagcgttccagcgcgttacgctttcaccgggagaaaccgccacgctgacctttaccctgccggtggagatgtttaatttcacccgccgggacgggaagcggattgtcgagccaggggaatttgagctacaggttggcgcgtcctcggcggatatacgcgaggtggtgaacgtgctggtaaccggggagacgcaggagctggcgggggaatggcgcatgctcagccgctgtgacattacacgggcgtaa

SEQ ID NO: 114734 - DNA, 1401 bp, Enterobacter cloacae
atgacaatctcctctgtattacgtaccaaagataaaataggttacggcctcggcgatatggccagcgcgctggtctggcaaacggcaacgttatttctcgcttatttctatacggacgtattcggtttgcctgcggccattatgggcaccatgtttttagtggtgcgcgtggtcgatgcgtttgtcgacccgtgcattggcgcgctggtggaccgcactcagacccgccacggtcgttttcgtccctggctgctctggtttgccattccgtttggcgtgagctgcctgattaccttctacgtaccggatgccggggcgacggcaaaaattgtctatgcctgcgtaacctatgccatcctgagcctgatctattccgcgattaacgtcccttactgcgccatgcccggcgcgctgacgctcgacccgcgcgaacgccactcgctgcaatcctggcgctttggcctgtcgtttatcggcgggttgattgtaacggtcatcgcgctgccgctggtctcattattaggccaggggaatgtgcaaaaaggctatttctatgccatgagcctgatggggctgctgggtattgttttattcttctgctgcttctttatgacccgggagcgttactcgccgcgcaatgacacctccggctcgatgctgacggatttaaaactgctggccgccaatagccagtggcgaattgtttttctgtttaatattttactgttaaccgccgtcgtgacgcgtggctctgcgaccatgtattacgttaactatgttctgttacgtccggaactggtttttgcctttattgtttccggcatggtggcctccttaagcggcgcattattatctgaacgtctgctggggaaatttgaccgggtgcgtgcctatcagtggaccattatttctttcgttatttttggcgcgctgattttcttcattccgccttcgcaggtgtggctgatattcggtctgaatattgtgtttagttttattcagaacctgaccacgccgctgcaatggaccatgttctccgatgtggtggactacgaagaacaccgtagcggccgccgcctggacgggctggtcttttctaccgccctgtttgccatcaagtttgggctggcgctgggtggggcggtggtcggttgggtgcttggcatggtggattacgcgccgggtcaggcaaaccaggcgcctcacgttcttgcaaccatcaatgccctgttcaccctgatcccctgcgtgctgttcctctgcatggtggcgctccttgccatctacaaacttaacagccggctggtggacaacatcgcccgcgagctggccagcaaacgcgatagtcgaaacgatgcggggcagctcagcccggcaacccaatccgcactacaggagtaa

SEQ ID NO: 114735 - DNA, 2379 bp, Enterobacter cloacae
atgtccaacaatggctcgtcaccgctggtgctttggtataaccaactcggcatgaatgatgtagacagagttgggggcaaaaatgcctccctgggtgaaatgattacaaatctgtccggtatgggtgtttccgtacctaacgggtttgccacaaccgccgatgcgtttaacctgtttttagaccagagcggtgtaaaccagcgcatttacgacctgctggataaaacggatattgatgatgtcaccgagcttgccaaagccggcgcgcaaatccgccagtggattatcgacacacctttccagccggaactggaaaaagccattcacgacgcgtacaaccagctctccgctgacgacgcgcaggcctcctttgccgtgcgctcttccgccaccgcggaagatatgcctgacgcctctttcgccgggcagcaggaaaccttcctcaacgtccagggttacgaggcggtgctggtggcggtgaagcacgtgtttgcttccctgttcaacgaccgcgccatctcctatcgcgtccatcagggctatgaccaccgcggcgtggcgctctccgcgggcgtacagcgcatggtgcgttccgacgtgggctcttccggcgtgatgttctctatcgacactgaatccggcttcgaccaggtggtatttatcacctccgcatggggtctgggcgagatggtggtgcagggggcagtgaaccctgacgaattctacgtgcacaagccaacgctggcggctaaccgtccggcagtggtacgccgcaccatgggctcgaaaaaaatccgcatgatctatgctccgacgcaagagcatggcaagcaggtcaccattgaagatgtgctgcaggagcagcgggatcgcttctcgctgactgacgccgaagtggaagagctggcgaagcaggcggtgcagattgaaaaacactatggccgtccaatggacatcgagtgggcgaaagacggacacaccggcaagctgtttatcgttcaggcgcgtccggaaaccgtccgttcacgcggtcaggtcatggagcgctacaccctgcacgcgcagggcaaaattgtcgcggaaggccgcgcaattggtcaccgcatcggtgccggtccggtgaaagtgatccacgacatcagcgaaatgaaccgcattcagcccggcgacgtgctggtgaccgacatgaccgacccggactgggaaccgatcatgaaaaaagcggctgccatcgtcaccaaccgcggtggccgtacctgtcacgcggctattatcgcccgtgagctggggatcccggcggtagtcggctgcggtgacgcgaccgaacgcatgaaggatgaccagaaggtgacggtctcctgcgctgaaggcgataccggctacgtgtatgccgatatcctcgacttcagcgtgaaaagctccagcgtggataccatgccggacctgccgctgaagatcatgatgaacgtcggtaacccggaccgcgcgtttgacttcgcctgcctgccgaacgaaggcgtgggcctggcgcgtctggaatttattattaaccgtatgatcggggtgcacccgcgtgcgctgctggagttcgacgaccaggacgcaaaactgcaaaacgaaatccgcgagatgatgaagggttacgactcgccgagagagttctatgtggggcgtctgacggaagggatcgccaccctcggcgcggccttctacccgaaacgcgtgatcgtgcgtctgtcggactttaagtccaacgaatacgccaacctggtgggcggcgaacgctacgagccggaagaagagaacccgatgctgggcttccgcggtgccggacgctacgtgtcggaaagcttccgcgactgcttcgcgctggagtgcgaggcggtaaaacgcgtgcgcaatgacatggggctggccaacgtggaaatcatgatcccgttcgtccgtaccgtggatcaggcgaaagcggtggtggatgagctggcgcgtcaggggctgaagcgcggtgagaacgggctgaagatcatcatgatgtgtgaaattccgtccaacgccctgctggccgagcagttcctggaacacttcgacggcttctccattggctcgaatgacatgacgcagctggcgctcggcctggaccgcgactccggcgtcgtctctgagctgttcgatgagcgtaacgaggcggtgaaagcgctgctctccatggccatccgcgcggcgaagaaacagggtaaatatgtcgggatttgcggccagggtccttctgaccatgaagactttgcggcctggctgatggatgaggggattgatagcctctccctgaacccggacaccgtggtgcagacctggctgagcctggcagagctgaacaagtaa

SEQ ID NO: 114736 - DNA, 834 bp, Enterobacter cloacae
atggataatgctgtcgatcgccacgttttttatatttctgatgggacggcgataaccgccgaggtgctgggacacgcggtgatgtcgcagtttccggtatcgataaacagcatcacgttgccgttcgtggaaaatgagagccgggccaaagcggtcaaggaccagatcgacgccatttaccagcagaccggcgttcgtccgctggtgttctattccattgtgatccctgagatccgcaacatcattttgcaaagcgagggcttctgtcaggacatcgtgcaggcgctggttgctcccttgcaaagcgagctgaagctcgacccgacgccgatcgcccaccgtacccacgggctgaaccccggtaacctgaccaaatacgatgcgcgtattgccgccattgactacaccctggcgcacgacgacgggatctccctgcgcaatctcgaccaggcgcaggtgattttgctcggcgtgtcgcgctgcggtaaaacccccaccagcctttacctggccatgcagtttggcattcgtgccgccaactacccctttattgccgatgatatggataacctggtgctgcccgccgcgctcaagccgctccagcataagctgtttgggctgaccatcaacccggaacgactggcagcgatccgcgaagaacgtcgcgagaacagccgctacgcctcgatgcgccagtgccgaatggaagtctccgaagtcgaagcgctgtaccggaaaaatcaaattccctggctgaacagtaccaactattcagtagaagaaattgccaccaaaatcctcgatatcatggggctgaatcgccgcatgtactaa

SEQ ID NO: 114737 - DNA, 1047 bp, Enterobacter cloacae
atgaacaaaaccgacgaactgcgcaccgcgcgcattgatagcctggtcacaccggctgaactggccctgctgcatcccgtatccgccgaggtggcggaccatgtgacggcctcccgtcgccgcatcgaaaaaattctcaatggtgaagacaaacgtcttctggtggtgattggcccctgctccatccacgacctcgacgcggcaatggattatgcacaacgccttcagacgctgcgcggcacgtatcaggatcgcctggagatcgtgatgcgtacctactttgaaaagccgcgtaccgtcgtgggctggaaaggattgatttccgatcccgatctgaacggtagctaccgggtgaatcacggtattacgctggcgcgcaagctgctgttacaggttaacgagctgggcgtgccaactgccaccgaatttctggatatggtgaccggacagtttattgccgacctcattagctggggcgcgattggcgcacgtaccaccgaaagccagatccaccgtgaaatggcgtcggcgctctcctgtccggtgggcttcaaaaacggaacggacggcaatacccgaattgccgtagatgccatccgcgcgtcacgccccagccatatgttcctctccccggataaaaacggccagatgaccatctaccagaccagcggcaacccgttcggacatatcattatgcgtggcggtaaaaaaccgaattaccatgcagaagatattgccgccgcctgcgaaacgctggcggaatttgacctgccggagcatctggtggtggatttcagccacggcaactgtcagaaacagcaccgccgccagctggacgtctgcgaggaagtttgccagcagatccgcagcggctcgaccgccattgcaggaattatggcggagagttttatcaaagaaggcacgcagaaaatcgtcgccggacagcaaatggtctacggccagtcaatcaccgacccgtgcctgagctgggaagacagcgagctgctgctggagatgctggcttcagccgtggacacacgcttttaa

SEQ ID NO: 114738 - DNA, 1983 bp, Enterobacter cloacae
atgccacacctgcaatccgcgtctttacgcccgtctcttctggcgctggcgattgtcagcaccctgccgggcgttacgtttgccgccgcagacgagatcaccgtcaccgccaccggcaatgcccgcagcgcctttgaagcccccatgatggtgagcgtgattgacgccaccgcgccggaaaaccagaccgccagctccgccgccgacctgctgcgcaaggtgcccggtctgacgctggatggcaccgggcgcaccaacggtcaggacgttaacctccggggctatgaccgccgtggcgtgctgatactggtggatggcgtgcgccagggcactgataccggacacctgaacagcacgttcctcgatccggcgctgatcaaacgtattgaagtagtacgtggtccttccgccttgctgtacggcagcggcgcgctgggcggcgtaatttcgtatgacaccgtcgacgccaacgatctgctggatgcaggtaaaaacagcggctatcgcgtatttgctaccggtgcaacgggcgatcacagcatcgggatgggtgccagcgcctatggccgcaccgataccctggacggtctggtctcctggtccagccgcgatcgcggcgacattcgccagagtgacggcgcgagggcgccaaatgacgaatccatcaacaatatgctggcgaaaggcagctggaaaatcgatccggcgcagacgctgagtggctccctgcgctactacaacaacgacgcgcaggagccgaaaaatccgcagaccacggatgccagcagcagtaacccgatgaccgatcgttccaccattcagcgcgatgcacagcttggctaccgcattgcgccagccggaaacgactggctgaacgccgatgcgaaaatttactggtccgaagcgcggatcaacgcccagaacatcgacgccagcggcgagttccgtaagcagactaccaaaggcggcaaagtggaaaaccgcacccgcctgttcagcgactccttcgcctcgcacctgctgacctacggcggggaatactatcgtcaggagcaacaccctggcggcgcgaccaccggcttcccggacgcgaaaatcgacttcagctccggctggttgcaggatgagatcaccctgcgcgacctgccggtaacgcttctcggcgggacgcgttacgacaactaccgcggcagcagcgacggttacgacgacgtggatgcggataagtggtcatcacgcgccgggttaaccgtgagtccagccgactggctgatgctgttcggctcttacgcccaggccttccgtgcgccaacgatgggcgagatgtataacgactcgaagcacttctctatcggcagcttctacaccaactactgggtgccgaacccgaacctgcgtccggaaactaacgaaacccaggagttcggttttgggctacgttttgacgatctgctgctcgccaacgacgcgctggagttcaaagccagctacttcgacaccaaagcgaaagattacatctccactaccgtcgattttgcggcggccaccaccatgtcctataacgtaccaaatgccaaaatctggggctgggacatgatggcgacctacgcgaccagtctgttcaacctggacgtggcctacaaccgcacacgcgggaaagataccgacacgggcgaatacatctccagcatcaacccggacaccgtcaccagcaagctggatatccccgtggcgcaaagcggcttctccgtgggctggatcggcaccttcgtcgaacgttcaacgcacatcagcagcagctacagcgagcagcctggctacgcagtgaatgatttctacgtcagctataaaggtcagcagcagttcaaaggcatcaccaccaccctcgtgctggggaacgccttcgacaaagcctactggtcaccacaaggcatcccgcaggatggccgcaacggcaagatcttcgtcagttatcaatggtaa

SEQ ID NO: 114739 - DNA, 1029 bp, Enterobacter cloacae
atgggtcactacacacgctggcttgagcttaaagaagaacatccgggtaagtacgcccgtgatatcgccggattaatgcacatcagcgaagcagagctggcatttgcgcgcgttggacacgacgcctggcggctgcgcggtgaaatccgtgagattctggcagcgctggagtcggtgggggaaaccaaatgcatctgccgtaacgaatacgccgttcacgagcaggtcggggcgtttactaaccagcacctcggcggccacgccgggctggtgctgaatccgcgcgcgctggatctgcgtttgttcctcaaccagtgggcgagcgcgttccacataagtgaaacgacttcccgcggcgaacgtcagagcattcagttcttcgatcatcagggcgacgctttactgaaggtctacaccacggatcacaccgacgttgccgcctggggcaacgtgctgacccgttttatcattgccgataacaccactctggcactgaaggctgtcgatgcccctgcgcattccgacggtgctgatgcaggcccggtggagaaagagtggcgcgccatgaccgatgtgcatcagttctttagcttactgaagcgccataaactgagccgccagcaggcgtttcgtctggtgagtgacgatctggcctgtaaggtggataacagcgcgctggcacagctgctggagacggcgcgacaggacggaaacgaaatcatgatcttcgtcggcaaccgcggctgcgtgcagatcttcaccggtgtggtggaaaaactgacgcccatgaagggctggctgaacatcttcaacccaacctttaccctgcatctgctggaggagactatcgccgagacgtgggtaacgcgtaagcctacggcggacggacacgttaccagcctggagctgtttgctgcggacggcactcagatcgcccagctctacgggcagcgtaccgaaggcgagcctgagcagagccagtggcgccgccagattgacgccctgacgccagaagggctggccgcatga

SEQ ID NO: 114740 - DNA, 819 bp, Enterobacter cloacae
atgaaaaactggttcgccctgctctgcgccctgccgctggtcgccgtcgccgcgccggagagaattgtcgccctcggcggcgacgtgacggagatcgtctacgccctcggcgcggagtcttctctggttgcgcgcgacagtaccagccagtggccgcaggcgacaaacgcgctgcctgacgtggggtatcttcgccagctgaatgcggaggggattttatccgtacgcccgacgctggtgctggcaagcgaccaggcgcagccctctctggcgctgaaacaggttgaacagagccacgtccgggtggttaccgttcccggcacgcctgacctgcgcgcgattgacgaaaaagtacgggtgatagctcaggcgacgcatcatgaggcgcaaggggaaaccctgcgcaactcgctgcgtcaggcgctggcggcactgccctcaacaccgctcaacaagcgggtgctgtttatcctcagccacggcggaatgaccgcaatggcggccgggcaacagaccggcgcggatgcggcaatacgcgccgccgggttgcagaacgccatgcagggctttacccgctatcagccgctttcccaggagggggtgatggccagccagccggatctggtggtgatttcgcaggacggtcttaacgcgctgggcggcgaagaaaatctgtggaaactgcccggtctggcgcaaacgccagcgggacgaagcaaacaggtgctggctattgatgatatggccctgctgggcttcagcgtccgcacgccgaaagccatacaacagctgcgtgccagagcggagcaactgccctga

SEQ ID NO: 114741 - DNA, 993 bp, Enterobacter cloacae
atgtcccggcgcatcacgttatcgttatggcttctggcggggttgcttaccgtcatgacgttcatggccaccggttttggggcgttacgcctgccggtgaacgtgctgtggagcggcagcgatgagacgctacgccagatctggcttaccatccgtctgccccgcgtactgctggcgctggtgattggcggatcgctggcgctcgccggctgcgtcatgcaggggctgttccgcaatccactggccgacccgggcctgctcgggatcagcagcggtgcggcgctggccgtcgccctgtgggtggtgctcccgctctcgctgcccgcgctggtgatgctttacgcccctatgctggcggcatttcttggggcgctggcagccactggcgtgatcttcctgctcagcaagcagcgtgacccctctctgtcacgtctgttgctggtgggtatcgccatcaatgccctgtgcggtgcggcagtgggtgtgctttcgtgggtcagcaatgacgcccagctgcgtcagctttcactctggggaatgggaagtcttggtcaggcacagtggtcaacgctgctcgccgtgacctcgctgatggtgcctgccgttctggcgatctggcgttgtgccagcgcattaaatttactgcaactgggtgaagaggaagcgcattaccttggcgtggacgttgcctttgtacagcgaatattactgttatgcagcgccctgctggtcgctgcggctgtcgccgtcagcggcgtgattggctttgtcggactcgtggtgccgcacctgatgcgcatgtggctgggcgccgatcaccgggcaaccctccccggcacggtactcgcgggcgctttactgctgctggtggcggatacggtcgcgcgcaccctggtcgctccggcagaaatgccggtcggcctgctcaccagtatccttggtgctccctggttcttatggctcatttttcgtcgtggagaacagcatggctga

SEQ ID NO: 114742 - DNA, 780 bp, Enterobacter cloacae
atggctgaacgttatacggctgaaaatcttacttttacccgatctggccgcacgctgacagataacgtttcgctgtcactgtcgcagggagagctggttacattgatcggccccaacggcgcggggaaatccacactgctgcggctgctgaccggctacctgaaacccgacagcggcggctgttcgctggcgggaaaagcgctggaggaatggcatccgcagacgctgtcccgctatcgggcagtgatgcgccagcagtctcagcctggatttgactggcaggtggaggagatcgttggcatggggcgtgcgccctggacgcgtcacccggaaccgtcgattgtgcgtgaggtgttgcagctgaccggttgcctgccgctggccggcaggcgttatcatgccctctccggcggcgagcagcagcgcgtccagctcgcccgcgcgctggcgcagctgtggcgtgacggaacgccgcgcggctggctgtttctcgacgaacccacttcagcgctggatctctaccaccagcagcatctgctgcgcctgttgaaatcgctgacccgtcagggccatcttcacgcctgcgtggtgctgcacgatctcaatcttgccgcattatggtcggaccggatcctgctgttacacaacggcaggattgtttctcagggcataccggagacggttttgcaggccgacgcgctggcacactggtacggtgcgcaggtgcacgtcggcagacatccggcgcacgccgcaccgcaggtttttctcgccccttag

SEQ ID NO: 114743 - DNA, 1443 bp, Enterobacter cloacae
atgaccctgtcttttactgctcactggcacgatgaattacccggcttttacaccgcgcttaagccaacgccattacagaacgcgcgtcttatctggcataacgatgcattggcggattcgcttggcatcccttcgacgctttttcagccagaaaaaggcgccggcgtctggggcggcgaaacgctgctcccgggcatgaagccgctggctcaggtctacagcggacatcagtttggcgtctgggcgggacagctcggcgatggccgcggcatcctgctgggtgaacaggttctgccgaatggcgaaacgctcgactggcacctgaaaggggcagggctaaccccgtactcacgcatgggggatggccgcgcggtgctgcgttcaaccatccgtgaaggtctggcttccgaggcgatgcatgccctggggatccccacctcacgcgcgctgtccatagtcaacagcgacacgccggtggcccgtgaaacgatggagcagggagcgatgctgatccgcgtggcggaaagccatctgcgtttcggtcattttgaacacttctactatcgccgcgagccggataaggtccgccagcttgccgattacgcccttcgccgtcactggccgcacctgcaaaacgagccggaccgctatgttctctggttccgtgatattgtcgcgcgcactgccgcaatgattgcccgctggcaggccgtcggctttgcccacggggtgatgaataccgacaacatgtccctgttagggctgacgtttgactacggtccgtacggcttccttgatgactatcagccgggttacatctgtaaccattcggactatcaggggcgttaccgtttcgacaaccagcctgcggtggggctgtggaaccttcagcggcttgcgcaaagcctgtcgccgtttatcgacgtcgatgccctgaacgatgcgctggacagctatcaggagatcctgctgcgggaatatggtgtgttaatgcgcaacaagctggggctgatgacgcaggaaaaaggcgataacgcgctgttgaatgggctgtttgccatcatggtgcgtgaaggcagcgactatacccgaaccttccgtatgctgagccagaccgcgcagcagagcgccgcgtcaccgctgcgcgacgagttcatcgatcgtcaggcgtttgatgactggtttgccgtttaccggacgcgtttacagcaggaacagattgatgacgatacccgccagacgcggatgaaggcggttaacccggcgatggtgttgcgcaactggctggcgcagcgggccattgagcaggcagagcagggggattataccgagctgcatcggctgcatatcgccctgcgcacgccgtttgccgaccgggaggatgactatgtcagccgcccgccggactggggcaagcggctggaagtgagctgctcaagctaa

SEQ ID NO: 114744 - DNA, 714 bp, Enterobacter cloacae
atgattattacgctagataatgcttaccagtctgaacttttactccttccggcgcgtgatagtgcaggtttgcttaaaggtttagagattttggttaactttactggcgtgggtgcggacgtacggatcccgactgaactggttatcccacatctttctcaggaagatgaattagcgctgtttcaggagaaactgcaattactcgatacctgtaagctattttttattcagcatcagttaattgcatggatcaatattacacctgcaattgttgagtttttattaactaatgagaacgctgtttcaatcctcgagcgttatccgtttcttgagtttactgttaatgagaactatccaggtttaaataacgggaaagacgatccctgtctggcaagaatggcgatccatttccccttagtactggctaactttggtgcaggggcatcttcccttaaaccggtttatgatggtctgttcaaacgggtgattctggataaaaactttatccagcagcgcgtgtcggcactctcgtttgagccttttatgcgcgccattctctggcagatcgcgccgcattgtcagtcggtcatggtctcgggaattgacgatcacggcatcttacaacgcgtgctgcccttcaattttggtgcaatgcagggaagcctgtggcctgccgtcccggcagagcgagtcacgactctcgttcagcaataa

SEQ ID NO: 114745 - DNA, 465 bp, Enterobacter cloacae
atgcgattctggtttctccttgttgcggcgctctttcttgcaggatgcagcagccatcgtgcacctccgcccaacccacggctttccgattccattacggtcattgccagcctgaacgatcagctcagcaactggcgcggcacaccttatcgctacggcggcatgagccggggcggggtggattgctcgggattcgtgctgatgaccttccgcgataaatttgacctccagcttccgcgtgaaacgcgtatgcaggcgaaaatcggcactgaaattgataaagacgagctcctgcccggcgatctggtcttttttaaaacgggctccggtgaaagcggccttcatgtcggcatctatgatactgataatcagttcattcatgcctcgaccagccgtggcgtgatgcgctcctctctggataatgtttactggcgtaaaaacttctggcaggccagacgtatttaa

SEQ ID NO: 114746 - DNA, 756 bp, Enterobacter cloacae
atgacgctgctgatgcagctcacggacgttgccgggaagggacgtcttgagcctgtgactgccgcagtcaacgcaggtgaaatccttcacctggttgggccaaacggcgccggaaaaagcacgctgctggcgcgtatggcggggctgaccaccggggaaggaaagattacctttctcgggcaatcgctcgtcgactggctacccgctacacttgcctcccgtcgaagctatctggttcagcagcaggttccgccctttgcgatgcccgtctggcactacctgacgctgcatctgcctgacaaaaatcaggtgggattgctcaacgaggttgctgcggcactcgggttagacgacaagcttacccggcaggcaaatcagctttccggcggcgagtggcagcgcgtgcgtctggcggccgttatccttcagatccatccggcgggaaatcctcacgggcggttgctgctgctggacgagccgatgagtgggctggacgttgcccaacaggcagcgctggataccctgctcagcgcgctgtgtcgcaaggggattgccattgtgatgagcagccatgatttgaaccatacgttgcgccacgcgcatcgggtgtggttgctggcgcgtggcaagctgattgccagcggaacgcgcgacagcgtactgacggccgccaatcttgcgagcgcttaccacatgtcgttccggaggctggatattgaaggccacaagatgctcatttccacggcgcaggaataa

SEQ ID NO: 114747 - DNA, 552 bp, Enterobacter cloacae
atgcagtctgatattctgaataccgaagtgacgaccattgacggcgagaaaaccacgctggaaggctacaagggcaaggtgctgctcatcgtgaacgtggcgtcgaaatgtggccttacgccgcagtatgaacagctggaaaacattcataaagcctgggaaaaagacggctttaccgtactcggcttcccgtgcaaccagttcctgggccaggagccgggtagcgaagaggagattaagaccttttgcagcacaacctatggcgtgacgttcccgatgttcagcaaaattgacgtgaacggtgaaaatcgtcatccgctgtatgccaaactggtggccgcggcgccgaccgccgttgcgcctgaagagagtggtttctatgagcgtatggcaagtaaaggccgcgcgccgctctatccggacgatattctgtggaacttcgaaaaattcctgattggccgtgacggtgaggtcgtgcagcgtttttcgcctgacatgacgcctgaagatcctatcgtgatggaatcaatcaagctggcgctggcgaaataa

SEQ ID NO: 114748 - DNA, 981 bp, Enterobacter cloacae
atgcttgatcttgcccgccgccagcaccgctccgatcttcgccgcctgtgtctgctcggggtgctgttgattgtcgccaccaccgtcagcctgtgtgcgggcgatcggtggctggggccggaaagctggtttacgcctgaaggacagctctttgtatggcagatccgcctgccgcggacgttggctgtccttttagttggcgctgcgctagcgctgtgcggcacgatcatgcaggcattatttgaaaaccctctggcggaacccgggcttctcggggtctcgaatggcgcaggcgtcgggcttatcgccgccgtgatgctggggggaggcgagctctccggctgggggattagcctcagcgccatccttggcgcgctgttgataacccttatccttctgcgctttgcccgccgccacttatccaccagtcggctgctgcttgccggggtagcgttggggatcatctgtagtgcgctgatgacctgggccgtctacttttctacctccttcgatctgcgccagttaatgtactggatgatggggggatttgggggtgttgactggcgtcaggggtggctgatggtgctcctgatcccggtcatcctgtggacggcgttccaggcgcagcctcttaatattctcgcgctgggcgaaacgtctgctcgccagctcgggatgccgattggattctggcgcaacgtgctggttatcgccattggctggatggtaggcgtaagcgtggcgctggcgggggcgattggctttattgggctggtgatcccgcatatgctgcgcctgtgcggcattacggaccaccgaactctgctcccggcctcggcggttgccggggcggcaacgctgctggttgccgatatcatcgcccggctcgccctgacggccgctgagttgcccataggcgtggtgaccgcaacgctgggcgcaccggtctttatctggctactattaaaagctggacgttaa

SEQ ID NO: 114749 - DNA, 300 bp, Enterobacter cloacae
atggcgcttacaaaagctgaaatgtcagaatatctgtttgataagcttgggcttagcaaacgggatgccaaagagctggtagagctgtttttcgaagagatccgtcgtgctctggaaaatggtgagcaggttaaactctccggttttggcaattttgatttgcgagacaaaaaccaacgtccgggccgtaacccgaagacgggggaagatattcccattacagcccgccgcgtggtgaccttcagacccggacagaagttaaaaagccgtgtcgaaaacgcaacgcccaaagcagagtaa

SEQ ID NO: 114750 - DNA, 2388 bp, Enterobacter cloacae
atgaaattcagtgaactgtggttacgcgaatgggtgaacaccacgctggatagcgacgagctttccaaccagatcaccatggcgggtctggaagttgacggtgtagagccggtttctggcgccttcaccggcgtggtcgtgggtgaagtggttgaatgcggtcagcaccctaacgctgacaaactgcgcgtaacaaaagtcaatgtgggcggtgaccgtctgctggatatcgtctgcggtgcgccaaactgccgtcagggcctgaaagtggccgtggcgaccgtcggtgcggtgctgccgggcgatttcaaaatcaaagcggctaagctgcgcggtgagccgtctgaaggcatgctgtgctccttctccgaactgggtatttccgacgatcactccggcattattgaactgccgcaggatgcgccagttggtaccgatatccgcgaatacctgaagcttgatgacaacaccatcgaaatcagcgtaacgccaaaccgtgctgactgtttaggcatcatcggtgtggcccgcgacgtggccgtgctgaaccagactgaactgaacgtgccggagatcgctccggttgaggcaaccatcagtgacgtgctgccgatacaggtagacgcgcctgaggcctgcccacgctacctcggtcgtgtggtgaaaggtattaacgttaaagcgccaaccccgctgtggatgaaagagaaactgcgtcgctgcggtatccgttctatcgatgcggtcgtcgacgtcaccaactatgttctgctggagctgggccagccaatgcacgcctttgataaagatcgtatcgaaggtgggatcgtcgtgcgcatggcgaaagagggcgaaaccctggttctgctggacggcagcgaagcgaaactgaacgctgacaccctggtgattgccgatcacaacaaagcgctggcgatgggcgggatcttcggcggcgagcactctggcgtcaacgacgagacgcaaaacgtcctgctggaatgcgcgttcttcagcccgctctccatcaccggccgcgcacgccgtcacggtctgcacactgatgcttctcaccgctacgagcgtggcgtggatcctgcgctgcaatacaaagcgatggagcgtgctactcgcctgctgatcgacatctgcggcggcgaagcgggtccggttatcgatgtgaccaacgaagcgacgctgccgaagcgtgcgaccattaccctgcgccgcagcaaactggatcgtctgattggtcaccacgttgccgatgcgcaggtgaccgacattctgacgcgtctgggctgcgaagttactgagggtcaggacgagtggaaagccgttgcgccgtcctggcgttttgacatggagatcgaggaagatctggtggaagaagtggcccgcgtttacggctacaacaacatccctgacgagccggtgcaggcgggtctggtgatgggcagccatcgcgaggccgatctgtctctgaagcgtgtgaaaaccatgctgaacgacaaaggctaccaggaagtgatcacctacagcttcgttgatcctaagctgcaacagctgatccatccgggtcaggaagcgctgattttgccaagcccgatttccagcgagatgtcagcgatgcgtctgtccctgtggacgggactgctgggtactatcgtttataaccagaaccgtcagcaaaaccgcgtgcgtattttcgaaagcggtttgcgctttgtaccggatactcaggcgaatttaggcatccgtcaggatctcatgctggccggcgccatcagcggtaaccgctttgaagagcactgggacctggcaaaagggacggttgatttctacgatatgaagggcgatttggaagcgattctcgatctgaccggtaaattatccgaaattgaattccgcgcagaagcgattccagccctgcatccgggtcagagtgcggcgatctatttagacggcaaacgtgttggtttcattggggttgttcacccggagctggaacgtaagctggatctgaatggccgtaccatcgtattcgaactggagtggaacccggttgcagaccgcgtcattcctcaggcgcaggacgtctcccgcttcccggcaaaccgccgtgatatcgcggttgtggtcgctgaaaatgtgcccgcagcagatattttggccgaatgtaagaaagttggcgtaaatcaggtagttggcgtaaacttatttgacgtgtaccgcggcaagggcgtagcagaaggtttcaagagcctcgctattagccttatccttcaggataccagccgtacactcgaagaagaggagattgccgctaccgtcgccaaatgtgtagaggcattaaaagagcgattccaggcatcattgagggattga

SEQ ID NO: 114751 - DNA, 984 bp, Enterobacter cloacae
atgtcacatctcgcagagctggttgccagtgcaacggccgccattaaccaggcctcagatgttgccgcgttagacaatgtccgcgtcgaatatctgggcaagaaagggcatttgacccttcagatgactaccctgcgtgaactgccagcagaggagcgcccggcagccggtgcagtgattaacgaagccaaagagcaggtacagcaggcgctgaacgcgcgtaaagccgagctggaaagcgcagtactgaatgcgcgtctggcggcagaaacgattgacgtttctctgccgggtcgtcgtattgaaaacggcggtctgcatccggtgactcgtactatcgatcgtattgaaagtttcttcggtgagctcggctttaccgtggcgactggcccggaaattgaagatgattaccacaacttcgatgccctgaacattcctggccatcatccggcacgtgctgaccacgacactttctggtttgacgctacccgtctgctgcgtactcagacttccggcgttcagatccgtaccatgaaggagcaggagccgccaatccgcatcatcgcgccgggtcgcgtataccgtaacgactacgatcagacccacaccccaatgttccaccagatggaaggtctgattgttgataaaaacatcagctttaccaacctgaaaggcacgctgcacgatttcctgaacaacttctttgaggaagatttgcaggttcgcttccgcccgtcctacttcccgttcaccgaaccgtctgcggaagttgacgtgatgggtaaaaacggcaaatggctggaagtgctgggctgcggcatggtgcatccaaacgtgctgcgcaacgtgggtatcgatccggaagtgtattccggctttgcgttcggtatgggtatggagcgtctgaccatgctgcgctacggcgtaaccgacttacgtgcgttcttcgaaaacgatctgcgtttcctcaaacagtttaaataa

SEQ ID NO: 114752 - DNA, 357 bp, Enterobacter cloacae
atggctcgcgtaaaacgtggtgtaattgcacgtgcacgtcacaagaaaattttgaaacaagctaaaggctactacggtgcgcgttcacgcgtataccgcgttgccttccaggctgttatcaaagcaggtcagtacgcttaccgtgaccgtcgtcagcgtaagcgtcagttccgtcaactgtggattgcgcgtatcaacgcagcagcacgtcagaacggtatttcttacagcaaattcatcaacggcctgaaaaaagcctctgttgaaatcgaccgtaagatcctggctgacatcgcagtattcgacaaagtagcgttcaccgctctggtcgaaaaagcgaaagcagcactggcataa

SEQ ID NO: 114753 - DNA, 198 bp, Enterobacter cloacae
atgccaaaaattaagaccgtacgcggtgctgctaagcgcttcaaaaaaaccggtaaaggtggttttaagcacaagcacgctaacctgcgtcacattctgactaagaaagctaccaagcgtaaacgtcacctgcgtccaaaagccatggtttctaaaggcgatctgggcctggtcatcgcgtgcctgccgtacgcataa

SEQ ID NO: 114754 - DNA, 342 bp, Enterobacter cloacae
atggactacggcaagttcctttatgaaaagagtaagtcttctaaggaacagaagaagaagcaaaaagttatccaggttaaggaaattaaattccgtcctggtaccgacgatggcgattatcaggtaaaactccgcagcctgattcgctttctggaagatggcgataaggccaagatcacgctgcgtttccgcggtcgtgagatggcccaccaacagattggtatggaagtgcttaaccgcgtccgtgacgatctgagtgaactggcagtagtcgaatccttccctacgaagatcgaaggccgccagatgatcatggtgctcgctcctaagaagaaacagtaa

SEQ ID NO: 114755 - DNA, 1929 bp, Enterobacter cloacae
atgcctgtaattactcttcctgatggcagccaacgccatttcgaccatgctgttagcccaatggatgttgccctggatatcggccctggacttgcaaaagcaaccatagcaggtcgcgtaaacggtgagctggtagacgcgtccgatctgattgaaagcgatgcaacgcttgcgatcatcaccgcgaaagacgaagaaggtctggagatcattcgtcactcctgtgcgcacctgttaggccatgctattaagcagctgtggccaaacaccaaaatggcgatcggcccggttatcgacaacggtttctactacgacgttgaccttgaccacaccctgactcaggaagatatcgacgcgctcgagaaacgaatgcacgagctcgccgaaaccaactatgacgtcattaagaagaaagtcagctggcacgaagcgcgtgaaaccttcgtgaagcgcggcgagagctacaaagtctcgattcttgatgaaaacatcgctcatgatgacaagcctggcttgtaccatcaccaggaatacgtcgacatgtgccgtggaccgcacgtgccgaacatgcgcttctgtcatcacttcaaactgatgaaaatcgcaggcgcttactggcgtggcgacagcaacaacaaaatgttgcagcgtatttatggtaccgcgtgggccgataagaaggccctgaacgcgtacctgcaacgcctggaagaggcggctaagcgtgaccaccgtaaaatcggtaagcagcttgacctgtatcatatgcaggaagaagcgccggggatggtgttctggcataacgacggctggactatcttccgtgaactggaaacgttcgtgcgctccaagctgaaagagtaccagtaccaggaagtgaaaggcccgttcatgatggaccgtgtgctgtgggaaaaaaccggccactgggacaactacaaagatgcaatgttcaccacttcgtctgagaaccgagaatactgcatcaagccaatgaactgtccgggccacgttcagatcttcaaccagggtctgaaatcctaccgcgatctgccgctgcgtatggcggagttcggtagctgccaccgtaacgagccatcaggtgcgctgcacggtctgatgcgtgttcgtggctttactcaggatgatgcgcatatcttctgtactgaagatcaggtccgtgaagaagttaacgcctgtattcgtatggtctacgatatgtacagcacctttggcttcgagaagatcgtggtcaaactctcaacgcgtccggaaaaacgtatcggcagcgatgagacatgggatcgcgcagaggcggatctcgccgtcgcgctggaagagaacggtattccgttcgaataccagctgggcgagggcgcattctacggtccgaaaattgaatttaccctgtatgactgcctcgatcgcgcatggcagtgcggaacggtacagctggacttctccctgccgcagcgtttaagcgcctcttatgttggcgaagacaacgagcgtcaggtgccggttatgattcaccgtgcgattctcggttcactggagcgcttcatcggcatcctgaccgaagagttcgcgggcttcttcccaacctggcttgcgccagtgcaggtagtggtgatgaacattaccgattctcaggcggattacgttaaagaattgacgcagaaactacaaaatgcgggcattcgcgtaaaagcagacttgagaaatgagaagattggctttaaaatccgcgagcacactttacgtcgtgtcccgtatatgttggtctgtggtgataaagaggtggaagcaggcaaagttgccgttcgcacccgccgtggtaaagacctggggagcctggacgtaagtgaagtgattgagaagctgcaacaagagattcgcagccgcagtcttcaacaactggaggaataa

SEQ ID NO: 114756 - DNA, 234 bp, Enterobacter cloacae
atgaaaaaaatcaaaaccgctacagcagcgatggtgctttccgcactttcatttggcgtatttgctgctgataatatgacgcaacctgccagtgacgttaacagcccaatcgggatcgctaaagcctcggatgtagaagcaggctccaacattgcccctggctctcagtctaccggccagtcaatgaatgatgcatttgatgtacacaagctggtggcgggtgagtggtcctga

SEQ ID NO: 114757 - DNA, 900 bp, Enterobacter cloacae
atgaaagaagaaaatattgctatgttatttgcggctttttataatttgttacctttctatggtcgccttgtcattgatccgcaagaaagtttccgagaccgtgacggtctctttttatgttgtacggactccttaaataaaatgaagcttttgaagacagtacccgcagcactgatgctggcgggtggcgtatttgcgtcactgaatgcaaccgccgatgataccgtttttactgtcatggacgatccctccactgccaaaaaaccctttgaaggtaacgtgaatgccgggtatctggcgcaatccggtaatacgaaaagctcctccctgaccgcagacagcaccctgacctggtacggcaacaccacggcctggtcgctgtggggaaatgccagcaacacctctgctaacgatcaacgctcatcagagaaatacgcggtaggcggacgtagccgatacaacatgaccgattatgactacctgttcgggcaggcgagttggctgactgaccgctacaacggctatcgccagcgtgatgtcgtgactgcgggttatggtcgtcagttcctcaatgggccggtgcacagcctgcgttttgaattcggtccgggtgtccgttacgacgagtacaccaacggcgaagatgaaacccagccgctgggttatgcatcgggcacctatgcatggcagatgacggacaacacaaaattcacccagggtgtgtcggtgtttggtgctgaagatacaacgctgaactcagaaagtgcgttgaacgtggccatcaacgaacactttggactcaaggtggcgtacaacgtaacctggaactcatccccacctgattctgcgccggaacataccgatcgccgaaccacgatttctttaggttataaaatgtaa

SEQ ID NO: 114758 - DNA, 933 bp, Enterobacter cloacae
atggcttcgatttatacgctgacactctccccttccctcgactccgcgaccatgacgccgcaaatctacccggaaggtaagctgcgctgtagcgcgccggtgtttgagccgggcggcggcggcatcaacgtggcgcgcgctattacccatctcggcggaaaagccaccgccatcttccccgctggcggtgccacgggagaacatctggttgcgttgctggcagatgaacaggtggccgtagacaccgtcgatgctaaagactggacccggcagaacctgcatgtccatgttgaatccagcggcgagcaatatcgttttgtgatgccgggggcgaaattgagcgatgatgagtttcgtcaactggaagagaaagtgctgaccattgaaagcggcgcattactggtgatcagcggtagcctgccgccgggcgtcaaaacagaaaaactgacggcgctggttcaggcggcgctccagcgcggcatccgctgcattgtcgatagctcgggcgaagccctgaaggcggcgttagaacccggacaacttgaactcgttaaacctaaccagaaagagctcagtgccctggttaatcgagaactcagccagcctgatgacgttcgtactgccgcagaagagctggtacgtacgggcaaagcgcatcgcgttgtggtctctctcggtcctcagggtgcgctggccgtcgacaagacgggctttgtacaggttgtgccaccgccgatgaaaagccagagcaccgtgggtgccggtgacagtatggttggcgcgatggtgctgaagctggcgcagggcgcttcgcttctggagatggcacgctatggcgtcgcggcagggagtgcagccaccataaaccagggaacgcgtctgtgttcgcttgcggatacccagaaaattgtcgattacctggcgagaagctga

SEQ ID NO: 114759 - DNA, 291 bp, Enterobacter cloacae
atgagcagtggtgatatcacccgctacgtcgtaaccgtgaatattcatgaggcgtcgctgaccgaactgaatgaactcaacaacgcgttcacgcgcgccaattttctgctcacgctgacggacgatgagggcaatattcacgatctcggctcactggcatttggcctgataagcccgctgagtcaggaagaggtgaaggcgctggccagtagtctggtggaaagcgtgactgacaaagccacggaaattgatgtggatagctgggaaaactggcataaaaaagaacaataa

SEQ ID NO: 114760 - DNA, 861 bp, Enterobacter cloacae
atgtggcaggctatcagtcatcttttaagtgagcagctgggtgaaggtgaaattgaactgcgtaacgaactgccaggcggagagatccatgccgcatggcatttacgttacgccgggcgcgatcttttcgttaaatgtgatgagcgcgaattactccccatttttactgccgaagccgatcagcttgagctgttatcacgcagtaaaacagtcaccgttccgcaggttttagccgtcggcagcgatcgtgactatagctttctggtgatgaactatcttcccgcgcgtcctctggatgcgcacaacgcctttattctcgggcaacagatcgcccgtttgcaccagtggagcgatcaacctcagtttgggctcgattttgataatgacctctccaccaccccacagccaaacgcatggcagcgccgctggtcgacttttttcgccgagcagcgcatcggctggcagctggagctggccgctgaaaagggattagcgttcggcaacatcgacgcgattgttgaacacattcagcagcgtctggcttcgcatcagcctcaggcatcccttctgcacggtgatttatggtcgaacaactgcgcgcttgggcctgatggtccctatatatttgacccggcctgctactggggcgacagagagtgtgacctcgcgatgctgccgttgcaccctgaacagccgccgcaaatttatgatggctatcagtctgtctcgccgttacctgcgggtttccttgatcgtcagccggtttatcagctgtacaccttgctaaaccgggctattttgtttggcgggagtcatctggtgaatgcccagcgggcgctggaccgtatcctggccgcatag

SEQ ID NO: 114761 - DNA, 537 bp, Enterobacter cloacae
atgacgtatcaacaagctggacgcatcgcggtcttaaaacgtattgctggttgggttattttcattcccgccctgatttcaacgctgatctccgtactcaaatttatgtacgatcacagcgaaaaacagccgggcatcaacgccgttatgcttgattttgcccacgtcatgattgagatgatgcggtttaacaccccgttcctgaacgtcttctggttcaactcgcccacgccggattttcaccaccagctgaatgtcggtttctggataatctatgcgttgatatttatcgcgatggcgttgcaggcctccggcgcgcgcatgagtcgccagacccgctttttacgcgaaggggtggaagaccagttgatccttgagaaggcgaaaggccctgacgggatgagccgcgagcagatcgaatcgcgcattgtcgtgccgcgtcataccattttcgtgcagttcttcccgctctacatcctgccggtcattatcattgtggccgggtatttcttctttacgctgcttggcttcctgtaa

SEQ ID NO: 114762 - DNA, 672 bp, Enterobacter cloacae
atgtcgaccccgcgccagatacttgccgctatttttgacatggatggattgctgattgattccgaacccctgtgggatcgggctgaactggaggtgatggccagcctcggcgtcgatatcagtcgtcgtaacgagcttcccgataccctggggctgcgcatcgatatggtggttgacctctggtatgcccaccagccatgggttggcccggatcgcgacgaagttacggcgcgcattatcaaccgcgccatttctctcgtagaagagtataagcctctgttaccgggcgtacgcgacgctatcgccctgtgcaaggcacaagggctgaaagtggggctggcctccgcctcaccgctgcatatgctggaaaaagtgctgacgatgttcgggctgcgcgacagcttcgacgcgctggcctcggccgaaaagcttccttacagcaagccacatccgcaggtgtatatggactgcgcagcgaaactggggctggatccgcttacctgtgtggcgctggaagattcggttaacggtatggtggcgtccaaagccgcacgtatgcgctccatcgttgtgccggctgaagaaggccgacacgatccccgttttgccctcgcggacgtcaggctgacgtctcttgaagaattgactgcccgccatctgcgcggggagtaa

SEQ ID NO: 114763 - DNA, 762 bp, Enterobacter cloacae
atgatactggatgcttttactctggcaggaaaagtggcgatggtgaccgggtgcgataccggtctggggcaaggtatggccattgccctcgcccaggcaggatgcgatatcgtgggggttaaccgcaaggttcctgacgaaacggcagcgcgcgttacggcgctgggacgacgctttatcgcgattcgcgccgatcttggcaagcaggagagtattcagagcgtggtggataccgcagtcgctgagatgggccgcatcgatattctggttaacaatgccggcaccatccgccgtgccgatgcgctggaatttagcgagaaggactgggacgaggtcatcgatctcaatctgaaatcggtctttttcctctctcaggcagtggcgaaacagtttatcgcgcagggtcagggcggcaagattattaacattgcctccatgctctccttccagggcggcatccgggtgccctcctatacggcgtccaaaagcggcgtgctgggcctcacccgcctgctggcgaacgaatgggcaacgctgggcattaatgtgaatgctatagcgccgggttatatggcgaccaataacacccggcagcttcgcgatgatgagcagcgcagccaggcgatcctcgaccgtattccggcgggtcgctggggtctgccggaggatttacagggtccggtggtgttcctggcctcatcggcctctgattacgttaacggtcataccctcgccgtagacggtggctggctggcgcgctaa

SEQ ID NO: 114764 - DNA, 591 bp, Enterobacter cloacae
atgacggcggaaggccacctgcttttttcacttgcctgtgcagtgtttgccaaaaacgctgaactgacccctgtgctggcacagggggactggtggcatattgtcccttccgccgtgctgacctgcctcctgccggacatagatcatccaaagtcattccttggccagcggctgaagtggatttcaaaacccatcgccagagcctttggtcatcgcgggtttacccacagcctgctggccgtattcggcctgcttacactcttctatttgaaggttccggagagctggatcgtcccggcggatgccattcagggcatggtgctcggctacttaagccatatcctcgccgatatgctgacgccagcaggtgtaccgctgctctggccctgccgctggcgtttccgtctgccaatcctcgtgccgcaaaaaggcaaccagctggagcgcgttctgtgtatggcgctgtttgcgtatgccgtgtggatgccgcagacattgcccgaaaatggtgcagtgcgctggtcatcgcaaatgatcaactcgctacaatttcagttcaatcgttttattaatcaccagattgaacattaa

SEQ ID NO: 114765 - DNA, 1392 bp, Enterobacter cloacae
atgaattttccactcatcgcgaacattgttgtgttcgtcgtattgctattgcttctcgcccaggctcgccacaaacagtggagcctggcgaaaaaggtactggtcggtctggtcatgggcgtggtgtttggcctggccttacacgccatttacggctccgatagcccggtactgaaagattctattcagtggttcaacattgtcggtaacggctatgtacagctgctgcaaatgatcgttatgccgctggtattcgcctctattctgagcgccgtagcccgcctgcataatgcctctcaactgggtaaaatcagtttcctgaccattggtaccctgctcttcaccacgctgattgcggcgctggtgggtgtgctggtaaccaatctgtttggcctgactgctgaaggtctggtgcagggtagcgctgaaaccgcgcgtctgacggcgattgagaccaactacgtgggtaaagtggccgatctgaccgttccgcagatggtgctctccttcattccgaagaacccgttcgctgacctgaccggtgcaagcccaacttccattatcagcgtggtgatcttcgcggcattcctgggcgtggcggcgctcaagctgctgaaggacgatgcgccgaaaggcgagcgcgttctgacagccatcgataccctgcaaagctgggtgatgaagctggtgcgtctggtcatgcagctgacgccgtacggtgtcctggcgctgatgaccaaagtcgtggcaggctctaacctgcaagacatcatcaagcttggcagctttgtgatcgcctcttatctggggctgggcattatgtttgtggtgcacggtatcctgctgggcgtgaacggcgttagcccgctgaaatatttccgcaaagtctggccggtgctgaccttcgccttcaccagccgttccagcgcggcatctatcccgctgaacgtggaagcacagacccgtcgtctgggcgtaccggagtctatcgccagcttctcggcctcctttggcgccaccatcgggcagaacggctgtgcgggtctctacccggcgatgctggccgtgatggttgccccaaccgtggggattaacccgctggatccggtctggattgcgacgctggtgggtatcgtgaccattagctccgccggtgttgcgggcgtgggcggcggcgcgaccttcgctgcgctgatcgttctgcctgcgctgggactgccggtgacgctggttgccctgctgatctctgttgaaccgctgatcgatatggggcgtaccgccctgaacgtgagtggctcaatgaccgccggtaccctgaccagccagtggctgaagcagaccgacaaaacgattctcgacagtgaagaagatgcggaactggcccatcgttaa

SEQ ID NO: 114766 - DNA, 240 bp, Enterobacter cloacae
atgaaacctcttcgtcaacaaaaccgccaggttattagctatgtgccccgcgttgaacccgcgccgcctgaccatgccctgaaagtggatggttttcgcgatgtctggatgttacggggtaaatacgttgccttcgtgctgattggcgagcacttccgtcgctcccctgcgtttacggtgccggaatcggcgcagcgatgggctgtgcagacccgccaggatgaagaggttgaagaataa

SEQ ID NO: 114767 - DNA, 2250 bp, Enterobacter cloacae
atgtcgaacaatgataaaccacatcaagcccctattcatggcaccgaagaatctcaaccgggaatggactcactcgcccctgcggatggctctcataaaccgtcgccgggcctgtccgcgccgggcgagcaacctactgcaccgggaagcgtgaagtcgcccgatgcggataacgagaagttaaaatctctcgacccgcaccgcaaagggggtgaaggctatgcgctgaccaccaatcagggcgtgcgtatcgccgatgaccagaactccctgcgcgccggaacgcgcggcccgacgctgctggaagatttcatcctgcgggaaaaaatcacccatttcgaccatgagcgtattcctgagcgtatcgttcacgctcgcggctccgcggcgcacggctatttccagccgtacaagagcctgaaggcgatcacgaaggcggatttcctttccgatccgaacaaaatcacaccggtatttgtgcgcttctctacagtacagggcggcgcgggttcggccgatacggtgcgtgatatccgcggcttcgccaccaaattctataccgaagagggcattttcgacctcgtcgggaataacaccccggttttcttcattcaggatgcgcataagttccctgactttgtccatgcggtaaaaccagagccacactgggccataccgcagggacaaagtgcgcatgacaccttctgggactacgtctccctgcaaccggaaacccttcacaacgtgatgtgggcgatgtctgaccgggggatcccacgcagctatcgcaccatggaagggtttggtattcataccttccgtctgattaacgctgaaggtaaagcgacgtttgtgcgtttccactggaaaccggtcgcggggaaagcatccctggtgtgggatgaagcacagaagctgaccgggcgcgatccggacttccaccgtcgcgaactgtgggaatccattgaagccggtgatttcccggaatacgagctggggttacagctgatcccggaagaggacgagttcaaattcgacttcgacctgctcgacccgaccaagcttattcctgaggagctggtgccggttcagctagtgggcaaaatggtgcttaaccgcaacccggataacttcttcgcggagaatgagcaggctgcgttccacccgggccatattgtgccggggctggatttcaccaacgatccgctgctacagggccgtctgttctcttacaccgatacgcagatcagccgtctcggtggaccgaacttccacgaaattcctatcaaccgtccgacctgcccgtaccataacttccagcgtgacgggatgcatcgccaggatatcgataccaacccggcgaactacgagccaaactccattaacgataactggccgcgtgaaaccccgccggggccaaaacgtggcggatttgagtcgtatcaggagcgcgtggacggaacaaaaattcgcgagcgcagcccgtcattcggcgaatattacgctcagcctcgcctgttctggaacagccagaccccgattgaacagcagcacattatcggcggtttcagctttgagctgagcaaagtggtgcgtacctacattcgcgagcgcgtggtcgaccatctggcgcatattgatatccagcttgctcagggcgtggcgaataatctcggcatcacgctgactgacgagcaatgccatgccgcaccgccaaaagacgtgaacgggctgaagaaggatccgtccctgagcctgtacgcggtacctggcgggtcaattaaaggccgcgtagtggctatcctgctgaatgataaaccgcgcgccagcgacgtgctggggatcatgaaggcgctcaaaacccagggcgtacatgccaaactgctttactcccgcatgggtgaagtgacagccgacgatggctctgtcctgccaattgccgcgaccttcgccggggcaccgtcgctgacggttgacgcggtgattatgccgtgcggcgacgttgagagcctgctcggtaacggtgatgccgcctattatctgctggaagcctataagcacctgaagccaatcgccctggcaggcgatgcgcggaagtttaaatctctgctgaaggtaccggatcaaggggaagaaggcattgtcgaaggtgataacattgacgatgcgtttatgacccggttgtttgacctgcttgccgcccaccgcgtgtggtcgcgcagcagtaagattgaccagataccggcgtaa

SEQ ID NO: 114768 - DNA, 750 bp, Enterobacter cloacae
atggaaaacctgctgatcgtcaatgccgatgattttggcctgtcaaaagggcagaactacggcattattgaagcctgtcgccggggcgtcgtgacctctacaacagcgctcatcaacggtgaggcggtggaacatgcggcgcagttaagccgtgagctgcccgagctgggcgtgggcatgcactttgtgctgacgcttgggttgcccctttcgccaatgccgggcctgacgcgcgacggccagctggggaaatggatttgggaaatggcggagcagggcgctctgccgctcgatgagattgcccgcgagctggattgccagtttaaccgctttgtggatgtgtttggccgcgagcctacccatattgacagccatcatcatgtgcatatgatcccggcgattttcccgcttgtggcagagtttgcgcaacgtaaaggcgtggcgatgcgcgtggatcgtgaggtgcgcgggttgccggacgtcgcggtgacgtcaacgggggggttcagcagcgcattttatggcgacgagatcgacgaagcgctgttcctgaaggtgctggatgactccgccgcaaaaggggagcgctcgcttgaggtaatggcgcacccggcgtttgtcgataacatcgtacgtaagagcgcctactgctggccgcgtctggcagaactggatgtgctgacgtcggcgtcgttaaagtacgcgattgccgagcgtgggtatcgtctggggacgttcagggatctttga

SEQ ID NO: 114769 - DNA, 1356 bp, Enterobacter cloacae
atgcaacagaaattaaaagtcgtaaccattggtggcggcagcagctataccccggaattacttgaaggtttcctgaaacggtatcatgaattaccggtcagcgaattatggctggtggatgttgaagaaggtcaggagaagctgaatattatttttgaactgtgcaaacgcatggttgaaaaagcgggcgtgcccttaaccgtgcataaaacgctggatcgccgcctggcactgaaagatgctgacttcgtgaccacgcagctgcgcgtcggccaactgaaggcgcgtgagctggacgagcgcattccgctgagccacggttatctgggccaggaaaccaacggggcaggtggcctgtttaaaggcctgcgtactattccggtcatttttgacatcattaaagacgtggaggagatctgcccgaacgcctgggtgatcaactttaccaacccggccgggatggtcaccgaggcagtctatcgccacaccggtttcaaacgctttatcggcgtctgcaatattccgattggcatgaagatgttcatccgcgatgtactggaactgaccgataacgatgatctctccattgatctgttcggcctgaatcacatggtctttatcaaagatgtgatagtgaacgggcaatcgcgctttgcggaactgctcgacggcgtcgcctctggtcgcctgaccgcggcctcggtgaaaaacattttcgatctgccgttcagcgaagggctgatccgctccctgaatctgctgccgtgctcgtatctgctctactacttcaagcagaaagagatgctggccattgagatgggcgaatactacaaaggtggcgcacgcgctcaggttgtacagaaagtagagaagcagctgtttgatttgtataaagatccgaacctgaacgtcaaaccgaaagagctggagcagcgcggcggggcatactattcggatgccgcgtgtgaagtgattaacgccatttacaatgacaagcaggccgagcactatgtaaacgttccccatcacgggcacatcgacaatatcccggcagactgggccgttgagatgacctgcattcttgggcgcgagggtgcaaaaccacatccccgcattacccacttcgatgataaggtgatgggcctgattcacaccatcaaaggctttgaagtggcggcgagcaatgcggccctgagcggcgaactgaatgacgtgctgctggcgctgaacctcagcccgctggtgcattctgaccgtgacgctgaaaaactcgcgggtgagatgatcctggcgcatgaaaaatggctgccaaactttgctgcaacggttgagaaactgaaactcacacaccgttaa

SEQ ID NO: 114770 - DNA, 819 bp, Enterobacter cloacae
atggaaatcaaaaccgcacatgagcaacagctgtttaatggcaaaaattttcacgtggtgatttacaacaaaacggagagcgccagcggtctgcaccagcatgactactacgagttcacgattgttctgaccggccgctactatcaggagatcaacggtaagcgcgtcctgcttgagcgtggcgatttcgtcttcctgccaatgggatcttatcaccagagcttttatgagtttggtgcgacacgcattctgaacgtaggggtgagcaggcgtttcttcgagaagcactatctgccgctggtgccgttctgctttgtggcgtcacaggtgtatcgcgttaaaaatgagtttatgacctggattgaaacggttatcgcatcgctgaatttccgcgacaatgaatttgatgaatttattgaaaccgtgacgttctacgtcatgaatcgcctccgccatcaccgtgaagaacagcaggtggtggatgatattcctcagtggctgcgcagtaccgtggagctgatgcacgataaaggacagttcagcgataacgccctggagaatatggtggcgctgtcgggtaaatcgcaggaatatttgacgcgcgccacgcagcgttattaccgtaaaacgcctgtgcaaatcattaatgaaatccgcattaactttgccaaaaaacagctggaaattactaactactctgtcaccgatatcgcttacgaatcgggttacagcagccccagcctgtttattaaaacctttaaaaaattgacttcattcacaccgaacagttaccgcaaaaatttaacggtaattaattaa

SEQ ID NO: 114771 - DNA, 348 bp, Enterobacter cloacae
atgttagatttagagagtatcgttgccgaagaaaccgcagagaacgatctggaagaggtggtgatgggcctcatcatcaactccgggcaggcacgcagcctggcgtatgcggcgcttaagcaggctaagcagggcgacttcgttgccgcgaaaaccatgatggagcagtcccgtacagcgttaaacgaagcgcatctggtgcagacgaagctcatcgaaagcgaccagggcgaagggaagatgaaagtgagtctggtgctggtacatgcgcaggatcatctgatgacctccatgctggcacgcgagctggtcgcggagctcatcgagcttcacgagaagatgcaataa

SEQ ID NO: 114772 - DNA, 1359 bp, Enterobacter cloacae
atgagtaaagtcatcgcttcacttgaaaaggtactccttccttttgctgttaaaataggaaagcagcctcacgttaatgccattaagaacggctttattaaattaatgccgttgacattagccggggcaatgttcgttttaattaacaacgtttttctgagctttggagaaggttcctttttttattcattaggaattaggttagatgcttcaactattgaaacccttaatggtttaaaagccattggcggcaacgtatacaacggtacgttgggtattatgtcgctaatggcgcctttctttatcggaatggcgctggcggaagagcgtaaagtggatccgctggcggcaggcttactgtccattgccgcgttcatgaccgtcacaccgtacagcgtgggtgacgcttacgccgttggcgcaaactggctgggtggggcaaacatcatttccggtattattatcgggctggtggtggccgaaatgttcaccttcattattcgccgtaactgggttatccgcttgccggatagcgttccggcctccgtttctcgttcattttccgcgttgattccgggcttcattattctctccatcatggggattattgcctgggcgctctctcactggggaactaacttccaccagatcattatggactctatctcaacgccgctggcgtcgatgggtagcgtggtcggttgggcgtatgtcatctttacctccctgctgtggttcttcggcgtgcatggttcactggcactggcggcgctggacagcggtattatgaccccgtgggcactggaaaacgtcgcgctttaccagcagtacggctccgtcgatgcggcgctggcggccggtaaaaccttccatgtgtgggcgaagccgatgcttgactcctatatcttcctgggcggtaccggggcgacgttgggtctgatcatcgcggtctttattgtctctcgccgcgccgaccatcgtcaggttgcgaagctggccctgccatcaggcatcttccagattaacgagccgatcctgtttggtctgccaattatcatgaacccggtgatgttcattcccttcatcctggttcagccgctgctggccgcgattacgctgacggcgtactacctgggcattatcccgccggtgaccaacattgcgccgtggacgatgccggctggtctgggcgcgttcttcaacaccaacggtagcgtggcggccttcctgctggcgatattcaacctcgggattgcaaccctgctctacatgccgttcgtggcgattgcgaacaaggccgcaacggttatcgatgaagaagagagcgaagaggatatcgccctcgcactgaaattctaa

SEQ ID NO: 114773 - DNA, 318 bp, Enterobacter cloacae
atggaaaagaaacatatctatctgttttgctctgcgggcatgtccacttcgctgctggtttccaaaatgcgcgcgcaggccgaaaaatatgaagtccctgtggtgattgaggcgtttccggaaacgctggcgggcgagaagggccagacagcagacgttattttactcgggccgcaaatcgcttatatgctgccagaaattcagcgtctgctacccaataagccggtcgaagtgatcgattccgttttatacggcaagattgatggtttaggtgtattaaaagctgccgttgcggcgattaaaaaagctgctaattaa

SEQ ID NO: 114774 - DNA, 345 bp, Enterobacter cloacae
atgaacaagaacgtagcaggaattttaagcgcagcggcggtactgactatgctggcagggtgtacagcttacgatcgcactaaagatcagttcacacagccagtggtaaaagacgtcaaaaaaggcatgacgcgttcccaggttgcagccattgccggtaaaccttcttcagaagtcactatgatccacgcgcgtggtacctgccagacctatattctgggtcaacgtgatggtaaggcagagacctattttgtcgccctggatgatacgggtcacgtgatcaattctggttaccagacctgtgccgaatacgacaccgacccacaggcacctaaggcacagtaa

SEQ ID NO: 114775 - DNA, 828 bp, Enterobacter cloacae
atggctctgcaacaagaaattattcaggcgctgggcgcgaaacctgcgattgatgccaatgaagagatccgtcgtagcgttgattttttgaaagcttacctgtctgcacaccctttcctgaagacgctggtgctgggcatcagcggcggtcaggattccactctggccggtaagctgagccagatggccatctccgagctgcgtgacgagaccggtgacaccgcgctgcaatttattgccgtacgtctgccgtatggcgtgcaagccgacgagcaggactgtcaggatgcgattgcgtttattcagccggaccgtgttcttaccgtaaacatcaaaggttcggtactggccagcgagcaggccctgcgtgaagccggtattgaactgagcgattttgtccgcggcaacgagaaagcccgtgagcgcatgaaagcgcagtacagtatcgcagggatgaccaaaggggtcgtcgtcggcactgaccacgccgcggaagccatcaccggcttcttcaccaaatacggcgatggcggcacggatatcaaccccctcttccgcctgaacaagcgtcagggtaagcaactgctggcggcgttgggctgcccggagcacctgtataagaaggcgccaacggcggacctggaggacgatcgcccttccctgccggatgaagcggcgctgggcgttacgtatgacaacatcgatgattatctggaaggcaaaacgctcgacgaaggtaccgctaaaattatcgaaggctggtatctgaaaaccgagcataagcgccgtccgcccattacggtgtttgatgatttctggaaaaagtaa

SEQ ID NO: 114776 - DNA, 906 bp, Enterobacter cloacae
atgcctgaacagtatatggagcagtatgtgagcaggcgtcaatccgccccgcgtcttgagttcgaagcggcggctatctacgaatatcccgagcatcttcgcccctggcttgaggcactgcctaaacagcctggcgtctatttcttccacggcgacagcgacaccatgccgctctatatcggcaaaagcgtgaatatccgcagccgggtgatgtcgcacctgcgtacgccggatgaagcatcgatgctcaggcagtcccggcggatcacctggatcgagacggcaggcgaactgggcgcgcttctgctcgaagcccggctcatcaaggaacagcagccgctgtttaacaaacgcctgcgccgcaaccgccagctgtgttccttgcagattaacgcaggaaaaccgcaggtcgtttatgcccgggaagtggatttttcgcatgaacccaatctttacggtctgtttgccaacaaacgtgccgcactgcaaaccctgcaatccctggctgatgaattacagctttgttacggcctgttaggactggaagccaccacccgtggtcgcgcctgtttccgctcagcgctgaaacgctgcgccggggcgtgctgtggaaaagagagcgttgaagaacatcatgcccggtttatggctggccttgcctctatcagcgttaactgctggccgtgggaaggcgcggtggcgctgaaagaaacccgcgatgggatgacgcactatcacatcatccgcaactggctctggcttggcgccgttgaaaatctggatgacgctaccgctctgctgcgcacccctgccggtttcgatcaggatggttacaaaattctctgcaagccactgttaaccggaaaatatgagatcatcgtcctcaatgacccggcagccaggtaa

SEQ ID NO: 114777 - DNA, 558 bp, Enterobacter cloacae
atggaattctttgatatccgtaaaatgccggtcagtctctggcgtaatggtgcgggtgagacgcgtgagatttgctgttttcctcccgcgacgcgggattttttctggcgggccagtattgcctccatcgccagtaacggcgaattttccgcgttcccgggcgttgaccgggtgattacgctgctggagggcggcgaggtgaccctggatgcaggcagggcgttttgtcataccctgaagcatcatcagccttaccgatttgcgggcgatctggcggtgaaagccgtgctcacagaggggcagatgtcgatggacttcaacatcatgacccgacgggattgctgccaggcaaaggtgcgcgttgctacccggacgttcactaccttcgcatcacgcggtggggtggcattcatattaagcggcgcctggcaactgggcgacaaattactgaccgccgatcagggcgccagctgggaagcgggcagtcataccctccgtttactggaaacgaaggggtcgctgctgttcagtgaaattacctggctgccgggtcattga

SEQ ID NO: 114778 - DNA, 495 bp, Enterobacter cloacae
atgcgtaaattaactgcactgtttgttgcctctaccctggctctgggcgctaccagcatggcgttcgccgccgataccgcgaccactaccgccgcgccgacggaaggcaaaatgatgatgcatcataaaggcaagccgggtatgcaccatgagatgatgatgtttaaagatctgaacctcaccgatgcgcagaagcagcagatccgcgacatcatgaaaagccagcgtgaccagatgaaacgtcctccgctggaagagcgccgcgcaatgcatgacatcattgccagcgacagcttcgataaagcaaaagcggaagcgcagatcgacaaaatggccgagcagcataaagcgcgcatgctggcccacatggaaacccagaacaagatttacaacattctgacgccggaacagaaaaagcaatttaatgccaattttgagaagcgtctgacagaacgtgcagcgccggaaggtaaaatgcctgcaccaaccgaataa

SEQ ID NO: 114779 - DNA, 966 bp, Enterobacter cloacae
atggaaaacttactggcgctgacgctggccgaagagacaccggagcggcaagagggggaaggcccctcgttccactggcgatggctggggcggggcgtgcttgaactgacgccgacgggggaatatgacctgtcgctgctgctttcgaccggcattcacggaaacgaaaccgcgcccgtggagattgtcgatcttttgctgcgcgcgctgtttcgcgcagagatcacgctgcactgccgtctgctggtggtgctgggaaatccgcctgcgctggcgcaaaataaacggtatctcgtgagcgacatcaaccgcatgtttggtggtcgctgggcgcagtttccacagagtgatgagacgacacgcgcgcaatggctggagaaggtggtcacggcgttttttgccggggcgggggaaacgcgctggcacctcgatctgcatacggccattcgcgcctcgtaccacgtgcgttttggcgtgttaccgcagcgtcatcagccgtgggatgaggcgtttctgacctggcttggcgacgcggggctggaggcgctggttttccaccagacgccaggcggcacgtttacccacttcacctgcgagaatgttggcgcgttatcctgcaccctggagctgggaaaagcgctgccgttcgggcaaaacgacctgacgcgttttgcccctacgcatcaggcgcttcgggcgttgctcgccggggttgcgccggaaccctcccgggaacccgttgtgcgctatcgggtcgtgcagcagatcacgcgtcaaagcgaggctttccagctacatatggcgccccatacgctgaactttacgccgtttcgccagggcgtcctgctggcggaagatggtgagacgcgctatgcggtacagaaatccacggaatatgttttatttcctaatccgtcggtcgcgtttggtttgcgagctggcctgatgctggaaaaaatgccctga

SEQ ID NO: 114780 - DNA, 1326 bp, Enterobacter cloacae
atgaaagcgcgtgaggttaactttgacggcctcgtggggctgacgcaccactatgccgggctgtcgttcggtaatgaagcctcgacgaagcaccgtttccaggtctcgaacccgaagctggcggcgaagcagggtctgttgaaaatgaaggcgctgtccgatgccggtttcccgcaggcggtgatcccgcctcaggagcgaccaaacgtggccgtgctgcgccagctggggttcagcggtacggatgaacaggtggtggaaaaagcaggcacgcagacgccacacctgctttcggcggccagttcagcctcctcgatgtgggtggcgaatgccgccaccgttgcgccgtcggcggatacgctggacggcaaagtgcatctgaccgttgctaacctgaacaacaaattccaccgcgccagcgaagcggagaccaccgggcgcgtgctgcgcgccatttttaatcatgaagcgcatttcgaggtgcattcggcgctgccgcaggtcgcgatgtttggcgatgaaggggcggcaaaccacaaccgtctgggcggcgactatggcgagccgggtttgcagctgtttatctatggacgggaagagggcggccacgccgcgccggttcgttatccggcgagacaaaccttagccgcaagccaggcggttgcgcggctgaaccaggttaatccttctcaggtgatttttgcccagcaaaatccgcaggtgatcgaccagggcgtgtttcataacgacgtcattgccgtttccaaccgtcaggtgctgttctgccacgagcaggcgtttgcccatcaggaaaagttgctggccacgctgcgcgaacgcgtgccgggatttatgccgattcaggtgcccacgcaggcggtaagcgtacaggatgcggtcgaaacgtatctgttcaacagccagctgctgagccgggatgatggcagcatgatgctggtgctgccgcaggagtcccgcaaccatcagggcgtctggcgctatctgagcgaactggtgcaggcggataacccgattgatgaactgcgcgtgtttgatctgcgggaaagtatggccaatggcgggggaccggcgtgcctgcgactgcgcgtggtgttaacgccggaggagatgcaggccgtgaatccggcggtgatgatgaacgacacgctgttcaataccctcaatgactgggtggaccgctattatcgcgaccgtctggttcaggccgatctggttgatccgcagctgctgcgcgaaggccgcgaggcgctggatgcattatcgaccatcctgcaactgggatcggtttatccgttccagcgctaa

SEQ ID NO: 114781 - DNA, 1488 bp, Enterobacter cloacae
atgactctatggattaacggtgactgggtaacgggcgaaggtgacgcgcggacaaaaactaacccggtcggtcaggaggtgctctggtcggggaacgacgccagcgccgggcaggttgagcaggcctgccaggctgcacgccgcgcgtttccggcatgggcgaaacggccattctccgagcgccaggcgctggttgagaaatttgctgcgctgctggaggccaataaagccgagctgacccgcatcattgcctgcgaaaccagcaagccgcgctgggaggcaacaaccgaagtcacggcgatgatcaacaaaattgcgatatcggtgaaggcgtaccatacccgcaccggcgagcagcataccgagatgccagacggcgccgccacgctgcgacaccgtccgcacggggtgctggcggtgtttggcccgtataacttccccggacatctgccgaacgggcacattgtgcctgcgctgctggcggggaataccgtcatcttcaagccgagtgagttaacccccttaaccggagaagcagtcataaaactctgggagcaggcggggctgccgccgggggtggtgaatctggtgcagggcgggcgtgaaacaggtcaggcgctgagtgcgctgagcgacattgacggtctgctgttcaccggcagtgccggaacgggctatcagctgcatcgtcagctggcggggcagccggaaaaaattctggcgctggagatgggcggcaacaacccgctgattgtggaagatccggatgatatcgatgccgcggtccatctgaccattcagtcggcgttcattaccgccggacagcgctgtacctgcgcccgccgcctgctggttaaacgcggcgcgcagggggatgcgttcctgaagcgtctggtggaggtgagcgcgcgtctggttcccgcgaaatgggatgccgagccgcagccgtttatcggcgggctgatctccgcgcaggcggcgctgaacgtgctgaaagcgtggcaggagcacgtggcgcgcggggcgaaaaccctgctggagccgaagctggttcagccgggcacgtcgctgctgacgccggggattattgagatgagtgcgacgagcaacgtgccggatgaagaggtctttggcccgctgctgtgcgtctggcgctatgacgattttgagtcggcgatcgagatggccaacaacacccgctacggcctgtcgagcggcctgatatcgccgcatcgcgagaaattcgaacagctgctgctggaagcgcgcgccgggatcgtgaactggaacaaaccgctgaccggtgcggcgagcaccgcgccgtttggtggcgtaggggcgtcgggcaaccatcgcgccagcgcctggtatgccgccgattactgcgcgtggccgatggcaagcctggaaaccccggcgctgacgctgccggagacgctgaatccggggctggattttacagagggtgacgcccatgaaagcgcgtga

SEQ ID NO: 114782 - DNA, 1035 bp, Enterobacter cloacae
atgatggtcatccgtcccgttgcgcacggcgatctcgccgggcttatgcagcttgccggtaagacagggggcgggctgacctcgctgcctgccgatgaaaaaacgctgtcggcgcgcattgagcgcgccctgcaaacctggcaggggacgttgccaaaaagcgaacagggctatgtgttcgtgctggaagatactgacacgggaaccgtggcggggatttgcgctatcgaggtggccgtcgggcttaacgatccgtggtacaactaccgcgtcggcacgatggtccacgcctcgaaagagctgaacgtttacaacgcgctgccgacgctcttcctctgtaatgaccataccggcgccagcgaactctgcaccctgtttctcgatccggactggcgcaaagagggcaacggttatctgctctccaaatcgcgctttatgtttatggccgcctttcgcgaccgcttcaacgaaaaagtggtcgcggagatgcgcggcgtgattgatgagacgggctactcgccgttctgggagagtctgggcgaacgcttcttctccatggaatttagccgggcggattacctgtgcgggaccggtcagaaggcgtttatcgccgagctgatgccgaagcatcctatttatacccatttcttaacgcctgaagcgcaggcggtgatcggcgaagttcacccgcaaaccgccccggcccgcgcagtgctggagaaagagggatttcgctaccgtaactacgtcgacatcttcgacggcggcccgacgctggaatgcgacattgaccgcgttcgcgccatccgtaaaagccgcctggttgaggtttcagaaggccagcccgcgccgggcgagtggccagcctgcctggtctcgaacgagaattacaccaacttccgcgccatgctggtgcgaaccaacccaacatgcgagcgtctggtactgacggctgcgcaactggatgccctgaaatgtaacgctggcgacacggttcgcctggtgcggctctgccctgaggagaaaacagcatga

SEQ ID NO: 114783 - DNA, 1221 bp, Enterobacter cloacae
atgtctctgtcagttacgcgtgaaaatttcgatgaatggatgatgccggtatacgctccggcggcttttattccggtacgtggggaaggctctcgcctgtgggatcagcagggcaaagagtatatcgactttgcgggtgggattgcggtgaatgcgctggggcatgcaaacccggcgctgcggcaggcgctgaatgaccaggcagcgaaattctggcataccggcaacggttataccaacgaaccggcattgcgtctggcgaagaagctgatcgacgccactttcgcagacaaagtctttttctgtaactccggcgcggaagcgaacgaagcggcgctaaagctggcgcgaaaatatgcgcacgataaattcggcgcgcacaagagcggcatcgtagcctttaaaaatgccttccatggccgcacgctgtttaccgtcagcgcgggtggtcagccctcatattctcaggattttgcgccgctgccgccggatatccggcatgcggcgtataacgatttacactctgccagcgagctgattgacgacaccacctgtgcggtgattgtcgagcccatgcagggggaaggcggcgtcatgcccgcccagaaagcgttcctgcaagggctgcgcgagctgtgcgatcggcataacgcggtcctgatttttgacgaagtccagaccggcgtgggccgcacgggtgagctgtacgcctacatgcactatggcgtgaccccggatgtgctctcaacagccaaagcgctcggcggcggtttcccggtgggggcgatgctgaccaccgataaattcgccagcgtgatgaccgtgggcacccatggcaccacatacggcggcaacccgctggcaaccgctgtcgccggacaggtgctggatatcatcaacacccctgaggtgcttaacggcgtgaagcagcgtcaccagtggtttgttgagcgccttactgccattaacagcaaaactggcctgttcaacgagatccgcggtctggggctgttaataggctgtgagcttgcccctgagtttgccggcaaagcgaagctgatttcacaggaagcggcaaagcagggcgtaatggtgctgattgccggtgctaacgtggtgcggtttgcccctgcgctgatcgtcagcgaggaagaggtcagaactggcttagatcgttttgcgctggcctgcgaacaggtgaagtccggggtgtcatcatga

SEQ ID NO: 114784 - DNA, 807 bp, Enterobacter cloacae
atgaaatttgtctcttttaatatcaacggcctgcgtgcccgccctcaccagcttgaagcgattgttgagcaacatcagccagatgtgatcggcttgcaggagacaaaagttcacgacgatatgttcccgctcgaagaggtagcgaagctgggctataacgttttttaccacggtcagaaaggccactacggcgttgcgctgctgaccaaagatacgccggtgtcggtgcgtcgtggcttcccgggtgacgatgaagaggcgcaacgccgcatcatcatggcggaaattccttccgcgctcggcaatgtgaccgtcatcaacggctatttcccgcagggtgaaagccgcgatcatgaaaccaaattcccggccaaagcgaagttttatcaggatctgcaaaactacctgacaaccgaactcaaaaaagaaaacccggtgctgatcatgggcgacatgaatatcagcccgacggatctggatatcggtattggcgaagagaaccgtaagcgctggctgcgcaccggcaaatgctctttcctgccggaggagcgcgagtggatggagcgcctgctgggttgggggctggtggatactttccgcacggctaacccggcgacgcaggatcgcttctcgtggtttgattatcgctctaaaggcttcgatgacaaccggggcctgcgtattgatctgctgctggcgagcgcccccctggccgaacgctgcatcgaaaccggtatcgactatgacatccgcagcatggaaaaaccgtccgaccatgcgccggtatgggcaacgtttaagctgtaa

SEQ ID NO: 114785 - DNA, 606 bp, Enterobacter cloacae
atgctctccctcgacacgctaaaaatgcaccagcaaacgttgatcgatcgtgtggagcaggcgcctcttcagagcgcgctgatctattttgcggtttacgttctgctctccgcgctgtcgatccccggagccgcgcttctgacgctgctcggcggggcgcttttcagcctgtgggaggcgacgctgttggtgtcatttgcctcgacgctcggcgccacgcttgccatgctcgtcagccgttatctgctgcgcgactgggtgcaacggcgctttgccgcacagatgagcacgatagatgcggggatggatcgcgacggcgcacgctacctttttgccctgcgcctgatgccgttgttcccgttctttctggtcaatttgctgatggggctaacccgtctcagggtgcgtcactactggtgggtcagccagcttgcaatgctacctgccaccgtcatttatctgaacgccggacgcgagctggggaaactcaccgcgctgcgcgatattctgtcgccgggactgctgttcgcctttacactattagggttattaccgctggtcactcgctggctgttttcccgttacatcccttcgattaaaaagtga

SEQ ID NO: 114786 - DNA, 1170 bp, Enterobacter cloacae
atgcgccgggtgcgtttttgcgcgtttctgacgagtctgctgctggcaacctctgccttcgccgcagagagctggcaatccattcagcaacaggccaccgggcagaccgtctggtttaacgcctggggcggtgacgaggccgttaaccgctacctcgactgggtaagcggcgagatgaaaacgcactacgccgtcaacctgaagatcgttcatctggccgatgccgccgacgcggtgaagcggatccagacggaacatgccgcaggacgcagcagtaacgggtcggtggatctactctgggtaaacggggaaaacttccgcaacctgaaagcggcaaacctgctgctcaccggctgggcgcaaaccctgcccaactggcgctacgtcgatacccgtaaaccggtaacggaagattttgccatcccgaccgatggggcagaatccccgtggggcggcgcgcaattaacctttatcgcccgtaaagcgagtacgccgacaccaccggcagatccccacgcgctgctggtatacgcccgacagcaccctggcaaggtgagctatccgcgaccgccggattttaccggcacggcgtttcttgagcagctactgctggcgctgaccgcccatccggaggcgttaaaaaacgcgccagacagaacctttgcgcaggtcaccgcgccgctgtgggattaccttgatacgctgcaccccctgctgtggcgcgaagggaacgattttcctccgtcgcctgcgcgcatggatacgctgctggccagcggcagcctgaacctgtcgctcacctttaaccccgcccatgcgatgcaaaaggtggcgagcggtgaactgcctgccgacagctacagtttcggctttctcaaaggcatgatcggcaacgtccattttgtcgctatcccggcaaacgccagcgcgagcgcaggcgcgaaggtggtggcgaatttcctgctgtcaccgcaggcgcagatccgcaaagctaatcctgccgtctggggtgacccgagcgtgctggatggcgaaaaactgcctgcgaaagcggcaaaacagcttagcgcctttaccccctcaggcacgcctgatgtacttcccgaacctcacgccgcctgggttaacgccctggagcaggaatggcttcgccgctacggaacccgctaa

SEQ ID NO: 114787 - DNA, 1530 bp, Enterobacter cloacae
atggcttcgccgctacggaacccgctaagcgggctggtctgggcggcaatggcggtcatctatctgccactgcttcccgccagcggcatgctgctggccccggcgttttctcccggcaactgggcgacgctgtttgccgacccgcagctgccgcaggcgctggccgccacgctggtttccacgcttatcgcgacgctgggctcactgtttatcgccctgaccctgcttgcgcttctctggccgggtgaaggctggcagcgcctgagcacccgtctgccgtggctgttagccgtgccgcacgtcgccttcgccaccagcgcgctgctgctgtttgcggaaggggggcagttttaccggatctgtacggtctgttcgccgcagcttgaccgctacggtatcgggcttggcctgacgcttgcggtcaaagagagcgcgttcgttctgtgggcaatctacgccgcgctgcctgaaaagcgtctcgcacagcagaaaatcgtcctgcataccttcggctacggacgaatgcaggcgctcaactggctcgtcctcccggcaatcgcccccgcgctgggcgcagtcatgctggcggtgctggcctggtcgctttccgtggtggatgtggcgatcgtgctcgggccaggcaacccgcctacgctggcggtactggcctggcagtggctcgcccagggcgatgcacaacagcaaacaaagggaacgctgctgtgtctggtgttgctcctgctgctggcggcgcttgccgcggtgggatacggcttctggacggcatggcggcgcgcccagcgtgacccctccggaattcgtcacgcttcgcatactgcgctgcccgcacggacgctgggcgggttactgccgctgtgcggcgtcctctgtgcgctggttctgctgatgctggcacgccgggacgacatcggccccgtcagcgacagcctttcactgggactgctgtccagcctgacagcgctggccatcctcatgctctggcttgagtggggaccccagcgcggcgcggtgtgggtctggctgccgctcgccctcccggcgctgcccctcgtgtccgggcaatatgccgtggcgctgtggctgggcatcgacggccagtacgctgcggtgctctggagccatatgctctgggttctcccgtggatgctcctggtgctgcaaccggcctggcgcaggctcgatccccggcttatcctcaccgccagaacgctgggctggcgacaggcgaaaattttctggttcgtgaaatgccccctgatgattcgtccggccctgctggcctttgccaccggcttttccgtgagcatggcccagtacatgccgaccctctggctgggagcgggacgtttcaccaccctgacgacggaggcggtcgccctcagcagcggcggcagcattccgatcctcgccagccgggcgctgggtctgttgctgttgaccagcagcgtatttgcccttgccgcgctgctctcccggctcgtgggccgtcacagacaaggattacgttaa

SEQ ID NO: 114788 - DNA, 621 bp, Enterobacter cloacae
atgctgaacgtgaaaaatctcaccattgcgccactcttccgtgaggtcaacttccgcgtcccggcgggggagattgtcacgctgatggggccctccgggagcgggaaatcgacccttttcgcctggatggtgggggcgttatccgctgattttaaggcgcacggcgagctgtggctgaacgatcgccgctgcgatatgcttcccgtggaaacgcgcgggatcggcattctgtttcaggatgccctgctgtttgacgccttcagcgtggggcaaaacctgatgctggcgctgccggcgcacatcgtcgggcccgcccgccgcaacgcggtagaacaggccctggacactgccgggctggcaaaccactacgccagcgatccggcgaccctgtccggcggcgagcgcgcccgggtcagcctgttgcgcgctcttctcgcccagccgcaggcattgctgctcgacgagccgttcagtcgactggataaaacgctgcgcgcctcattccgggcgtgggtattcgaggttactcgccagcgcaggatcccggtggtgctggtcacgcatgatgaggacgatattccgcccggcggcgaggtgattgagatttctcgctggcaataa

SEQ ID NO: 114789 - DNA, 1308 bp, Enterobacter cloacae
atgaaacgtgtttctcaactgaccgtgctggccctgatctgcggcctcgcctcactctcctccacggcggctgatatgccccactccctcacgctggaccagctccaggcgcaaaacggcgcggtaattgatacgcgcgtcagtgcgttctataacggctggccgcagaccctgagcggaacgtccgggcatgaacccgccgcgcttaatctctctgccagctggcttggggcaatgagcgatgaacagctcagcggctgggcaaaacaacatcggcttacgccagacatgccggtcgcgctctatggcaacgatgatgacaaccagaccgtcaaagcgcggctggagaaagcgggctttacccacgtctccaccctgagcgatgccctgcaacaatccgaccgtctgcaacgtctggcacatttcgaacagctggtttatccgcagtggatccgccagttgcagcagggcaaacccgttaccgccgcaccagccggagaatggaaggtgatcgaggctggctggggtgcgccgaagctttatctcctgagccacattcccggtgcgggctatatcgacaccaatgaagtggaaagcgaaccgctgtggaataaggtctctgacgaaaagctgaaagcgatgctggcgaagcacgggatccgtcacgataccaccgtcattctgtacggtcgcgacgtgtatgccgccgcgcgcgtggcgcagatcatgctctacgcgggcgtgaaggatgtgcgaattctggatggcggctggaaggcgtggtccgacgccagcctgcccgttgagcgcggaacgcctgcaaaggtgaagccagcccctgattttggcgcgccgatcccgagccagccccggctgatggtggatatggagcaggcccggggaatgctgcaccgtcaggacgcctcgctggtgagcattcgttcctggccagagtttatcggtgaaaccagcggctacagctatatcaagccaaaaggtgagattgccggtgcgcgctggggccatgcgggcagcgacgcgacccacatggaagatttccacaatccggatggcaccatgcgcagcgccgatgatattgccgccatgtggaaaacatggaatatcctgccggagcagcacgttgcgttttactgtggtaccggctggcgcgcgtctgaagcctttatgtacgcccgcgcgatgggctggcagaacgttgccgtctacgacggcggctggtacgaatggagcagccatccgcagaacccggtctccaccggggagcgcggaccggaaagcgcacgctag

SEQ ID NO: 114790 - DNA, 618 bp, Enterobacter cloacae
atgctggataaacatctgcacccccgactgaaacccgggttaaatcagctggccgccacgctggataaaccgtttatcacgcctgatggcttaacgctcgccgggtttgcgattggcgtgctggcgttaccgtttctggcgctgggctggtatccggcggcgctgatcgccattgtgctgaaccggctgctggatggtctggacggcgcgctggcgcgtcgccgtggcctgacggacgcgggaggctttctggatatcgccctcgacttcctgttctacgccctggtgccgtttggctttgcgctggccgctccggctgataacgcgatcgccgccgcctggctgctgttcgcgtttatggggacgggcagcagcttcctggcctttgccgcgctggcggggaagcatgatatcgacaatcccggctatgcgcacaagtcgctttattacattggaggattaacggaaggaacggagaccatcgcgctgtttgtgctgtgctgcctgtttccggcgcatttcgcgctgtttgcctggacatttggcgcgttgtgctggctgaccaccacaacgcgcatctggagcggttatatcacgctgaaatcacttccccgctag

SEQ ID NO: 114791 - DNA, 573 bp, Enterobacter cloacae
gtgaaagagacatccgcctgggttgcgcccatggaaacccttcccgtcagcctcagccccatcgccgccatgcagaaaaaacacttcggcgcggtgctgaaccccacgcgctggtgggggcgcatgccgcgtcttttctggctggtggcgctgtttgtcggctatctggagcggcgcaaggcgcgtttgacgccggttctgcgatcgctactaatgacgcgggtctcgcagatctgccactgcgcattttgtattgatgccaacagcctgcgtctggccgagcggagcggggcgctggataaagtgcaggccgtcagcgactggcaaaattccaccctgttcagcgaagaggagcgcgcggcgctggcctatgcggaagcggtcaccgccacgccacctcaggtggatgaaaatattaaaagtctgctgaagcgccactttacggaagagaccatcaccgaaatgacggctctgattgcctttcagaatctttccgcccgctttaacgccgcgctggatatcccggctcaggggctgtgcgccaagtttaaaggtaaaccgcatgctggataa

SEQ ID NO: 114792 - DNA, 417 bp, Enterobacter cloacae
atgctgaaaacactcgatgtggttgcggccatcctcgaaaaagagggcaagattttgctggcgcagcgtcccgaacatgccgatcagccaggaatgtgggaatttgcaggcgggaaggttgaagccggtgagacccagccggaagcgctgatccgcgaactgcgcgaagaactcggcattgaagccgtgcccgcgcggtatgtggcaagccaccagcgggaggtgtcgcagcggctgattcacctccacgcctggcatgtgcctgaatttagcggtcagctgaaggcgcattatcactcggcgctggtatggtgcacgccagaagacgcgttcacgtatgctttagccccggcggatataccgctgctggaagcgtttattcttttacgcgacgccagaccagcggatttgtactga

SEQ ID NO: 114793 - DNA, 273 bp, Enterobacter cloacae
atgaaccgttacgcaatggccgcgttatgtttgatggtgtccgccggggcacaggctgaccgcattcgcccggatgtcgaggtcaacgtgccgccagaggtttttagcgctggcggccagcgtgcgcagccgtgtaatcagtgctgtatctatcaggatcaaaactattccgaaggcgcagtagtcagggcagatggcgtgctgttgcagtgccagcgtgatgaacgcaccctcagtacaaatccgctggtctggcgtcgcgtaaaagaataa

SEQ ID NO: 114794 - DNA, 1344 bp, Enterobacter cloacae
atggatcagacacgctctctggaaagctttcttgcccatgttcagcagcgcgacccgcaccaaagcgagtttgcccaggccgttcgtgaagtcatgaccgccctgtggcccttccttgaggaaaatccgcgttaccgtcagatggcgctgcttgaacgtctggtagagccggagcgcgtcatccagttccgcgtggcgtgggtggacgaccgcaatcaggtgcaggtcaaccgcgcgtggcgcgtgcagtttaactccgccattgggccgtttaagggcgggatgcgcttccacccctcggtgaacctgtcgattctgaaattcctcggcttcgagcagacctttaaaaatgcgctcactaccctgccgatgggcggcggtaaaggcgggagtgatttcgatccgaaaggcaagagcgaaggcgaagtgatgcgcttctgccaggcgctggtcactgagctctatcgccaccttgggccggacaccgacgttcctgccggggatatcggcgtgggggggcgtgaagtgggctttatggccgggatgatgaaaaagctctccaacaacagcgcctgcgtctttaccggcaaaggtctgtcgtttggcggtagcctgattcgcccggaagcgacgggttatggtctggtctatttcaccgaagcgatgcttaagcgtcacgggctgagcttcgaggggatgcgcgtggcggtctccggctccggcaacgtggcgcagtacgctatcgagaaagcgatggcgtttggcgcgcgcgtggtgaccgcctccgattccagcggtaccgtggtggatgaagctggctttacggcagaaaaactggcgcgtatgtgcgaaatcaaagccagccgtgacggtcgggtagcggattatgcccgtgaatttggcctgacctatctggaaggtaaacagccgtggggcgtgccggtggatatcgccctgccgtgcgcgacgcaaaacgaactggacgtggatgccgcccggacgctgattagcaatggcgtgaaagcggtagcggaaggggcaaatatgcccaccaccattgaagcgaccgacctgttcctggatgcgggcgtactgtttgcgccaggcaaggcggcgaacgctggcggcgtggcaacatccggtctggaaatggcgcaaaacgccgcgagaatgggctggaaggcagagaaagtggatgcccgtctgcaccacatcatgctcgatattcatcacgcctgcgtggagtacggcggcgaggcttcgcaaactaactacgtgcgcggggcgaatatcgccgggttcgtgaaggtggccgatgcgatgatcggacagggtgtgatttag

SEQ ID NO: 114795 - DNA, 1923 bp, Enterobacter cloacae
atgcggttgtttattgccgaaaagccgagtctggcgcgtgccatcgccgatgtgctgcccaggccgcatcgcaaaggcgacggctttatcgaatgcggtaacgggcaggtggtcacctggtgtatcggtcacctgcttgaacaggcgcagccggatgtctacgacagccgctacgcccgctggaatctcaacgatctaccgattgtgccggaaaaatggcgtctccaaccgcgtccttccgtcaccaaacagctcaacgtcattaagcgcttcctgcatgaggcgacggaagtggtccacgcgggtgacccggacagggaagggcaactgctggtcgatgaagtgctggactacctggagctggcgccggaaaagcgccagcaggtgcagcgctgcctgatcaacgacctcaaccctcaggcggtagagcgggccatttcacgcctgcgcgccaacagcgaatttattcccctgtgtgtctccgcgctggcgcgtgcccgtgcggactggctgtacgggatcaacatgacccgcgcctacaccattctcgggcgcaacgcgggttatcagggcgtactctccgtcggtcgtgtccagacaccggtgctggggctggtggtgcgtcgcgacgaagagatcgaaaatttcgtcgccaaagacttcttcgaagtcaaagcgcatatcgtcacgccgaaagacgaacgctttaccgccgtctggcagccaagcgatgcctgtgagtcatatcaggacgaagagggacggctgctgcatcgcccgctggcggagcacgtggtcaaccgcattaccggccagcccgcaatcgtcaccagctataacgacaaacgggaaacggagcccgcaccgctgccgttctccctttcggcgttgcagattgaggcggctaagcgctttggtcttagcgcacagaacgtgctcgatatctgccagaagctctacgaaacccacaagctgatcacctatccgcgttcggacagccgctatctgccggaagaacacttcgccggacgccactcggtgatgaatgccattggcgtccatgcgccggatctgttgccgcaaccggcggtaaacccggatacccataaccgctgctgggacgataaaaaagtcgatgctcaccacgcgataatcccgacggcgcgcaccagcaacgtcaacctgaccgacaacgaagcaaaggtctataacctgatcgcacgtcagtatctgatgcagttctgcccggacgcggtgttccgcaagtgcgttattgaactggagattgccaaaggcaaatttatcgccaaagcgcgtttcctcgcggaagcgggctggcgcacgctgctcggcaacaaagagcgtgacgaagagaacgacggcacgccgctgccggtcgtggccaaaggcgacgaactgctgtgcgagaagggcgaagtggttgaacgacaaacccagccgccgcgccatttcaccgacgcgacgctgctgtcggccatgaccggcatcgcccgttttgtgcaggataaagatctgaagaagatcctgcgcgccaccgacggtctggggacggaggcgacccgcgcggggatcatcgaactgctctttaagcgcggcttcctggagaaaaagggacgttacatccattcaacagaaccgggccgggcgctaattcattcgctgccggagctggccgccaggccggacatgaccgcgcactgggagtcggtgctgacgcagatcagcgaaaagcagtgccgttatcaggactttatgcagccgctggtagggacgctttatcagctgattgaccaggcgcgcagtacgccagtgaagcgattccggggaatgttcgccccgggcggcggggcgaagaaaccgttcaaaaagaagaaaagcgcagccaaaaatacaaccgcttaa

SEQ ID NO: 114796 - DNA, 1044 bp, Enterobacter cloacae
atgagcgagcaaaccattcgtttaacgcaatacagccacggagccggttgcggttgtaaaatttccccgaaagtgctggagaccatcctgcacagtgaacaggcgaagtttgtcgacccgaacctgcttgtcggtaacgaaacgcgtgacgatgcagcggtttatgacctgggtaacggcaccagcattatcagcactactgacttctttatgccgattgtcgacaacccgttcgacttcgggcgcattgcggccaccaacgccatcagcgatatctttgcgatgggcggtaaaccgattatggcgatcgccattctgggctggccgattaacaccctcccgccggagattgcccgcgacgtgatcgaaggcggacgctttgcctgccagcaggcgggtattgccctggccggtggtcactctatcgatgcgccggagccgatcttcggcctggccgtcaccggcgtggtgccgaccgagcgcgtgaagcgcaacagcacggcgcaaccgggctgcaaattgttcctcaccaagccgctgggcattggcgtactgaccactgccgagaagaaatccctgctgaagcccgagcatatcggtctggcaacggaagtgatgtgccagatgaacctcgccggtgcggcattcgccaatatcgacggcgtgaaggccatgaccgacgtgaccggttttggtctgctggggcacctctctgaagtctgtcagggcgcgggcgtgcaggcgcaggtctggtatcaggatgtgcctaagctgccgggcgtggaagagtacattgctcagggcgcagtgccgggcgggacgcagcgcaacttcgccagctacggccatttaatgggcgaaatgccggaagcgtggcgtaacctgctgtgcgatccgcaaacctccggcggcctgctgctggcggtgacgccggaagctgaagctgacgttcaggcgacggctgccgagtttggcatcaccctgacggccattggtgagctggtgaccgcccgcggtggtcgaccgatgattgagatccgttaa

SEQ ID NO: 114797 - DNA, 552 bp, Enterobacter cloacae
atggacgcacttgaactgcttgttaaccgtcgtagcgcttcccgcctggccgaaccggcacccgtcggcgagcagctggaaaacattctgcgtgccggaatgcgtgcgccggaccatggcacattgcagccgtggcacttctttattattgaaggcgaagggcgcgaccgcttcagccagctgctggagcagggggctgttgccgcaggccaggatgagaaggggattgataaagcccgcaacgcgccgttccgtgcgccgatgatcatcgcggtagtcgcaaaatgtcaggccgatcataaagtgccggtctgggagcaggagatgtctgccggttgcgcggtaatggcaatgcagatggccgccgtcgcgcagggctttaacggcatctggcgtaccgggccgctgaccgggagcgccgccgtgcgggaaggtttctcctgcggcgaacatgataaaattgtcggcttcctctatctcggcaccccgcagcttaaagcctccagcaccattagcgtgccggacaccacacctttcgtcagccgtttttaa

SEQ ID NO: 114798 - DNA, 1857 bp, Enterobacter cloacae
atgcgaaccctttggcgaatctttgccggtttctttaaatggacgtggcgactgctcaacttcgtccgcaacctggtgatgaacatcttcttcatcttcctggtcctggtatgcgcaggtatctggatgcatatcagcaacgcaaaccagtcgcagcattcgacgcgcggcgcgctgttactcgatatcaccggggtgattgttgataagccatcgaccagcaaccgtctgggcgtgattggccgccagctgttcggcgcaacgtcagaccgtcttcaggaaaactccctgtttgatattgtcgacaccattcgtcaggccaaagacgatcgtaacattaccggtatcgtgctggacctgaaagattttgccggggccgatcagccgtcaatgcagtacatcggcaaagcgctgcgcgaattccgcgacagcggtaaaccggttattgccattggcgacagctacacccagggacaatattatctggcgagctttgccaataagatctggctttcgccacagggcacggtcgatctgcatggcttcgccactaacggtctgtactacaaatcgctgctcgacaagctgaaggtcaccacccacgtcttccgcgtcgggacctataaatccgccgtggagccgtttatccgcgatgatatgtcccctgccgcccgtgaagcggacagccgctggattggcgagctgtggcagaactacctcggcaccattgccgctaaccgtcagattaccgctgagcaggtcttcccgggcgcgcgcggcgtgctggacggcctgcgcaaggtggacggcgatacagcgaaatacgcgcttgataacaaactggtcgatcagctgggttccagcgctgaaattgaaaaagcgctgaccaaacagttcggctggagtaaagaggataaaaactacagcgccatcagcatgtatgactacgccgcgaaaaagccggacgacagtggtgacagcatcgccgtggtgtttgctaacggggccattatggatggcgaagaaacgccggggaacgtcggcggggacaccaccgcgtcgcagatccgcgatgcgcgcctggatccgaaagtgaaggcgattgtcctgcgggtgaacagccctggaggcagcgtcagcgcctctgaagtgatccgtgctgaactggccgccgcgcgcgccgcgggcaagccggtagtggtctcgatgggcggcatggcggcttccgggggctactggatctcgacgccagccaactacattgtggctaacccaagcacgctgaccggctcgattggcatcttcggcgtgatcaacaccgtagagaacagcctggattatctcggcgtccacaccgacggcgtttccacctcgccgctggcggatgtgtccgtcaccaaatccctgccgcctgaggtgtctgagatgatgcagctcagcattgagagtggctataaacgtttcatcacgctggttgcggactcccgtaaaaagacgcccgatcagattgaccagatcgctcagggccacgtctggaccggccaggacgcgaagagcaacggcctggtagacagtctgggtgacttcgacgacgccgtgaagaaagcagcggagctggcgaagctcaagcagtggcacgtggactattatcaggacgaaccaacgttcttcgatatggtcgtggacagcatgtccggctccgttcgtgccatgctgccggacgcgcttcaggcttatctgccggcgccggtggcgaccgcggcgaaagccatgaaagcggagagcgacaagctcgcagcctttaatgatccacaaagccgctacgcgttttgcctgacctgtgcgaacgtgcgttaa

SEQ ID NO: 114799 - DNA, 1107 bp, Enterobacter cloacae
ttgcctgacctgtgcgaacgtgcgttaaaaaccgtcccctcttcccgtgaagaggggattttttattttgaagaacaagaactcaagaccatgcagaagaaatcaatttatgtcgcctataccggcggcaccatcggtatgcagcgctcagaaaatggctatatcccggtttccggccacttacagcgccagctggcgctgatgcctgaattccaccgtccggaaatgccggactttaccatccacgaatatgagccgctgatggactcctccgacatgacgccggaagactggcagcatattgcggacgatattaaagctcattacgaccagtacgacggcttcgtgatcctgcacggcaccgacaccatggcgttcaccgcctcggcgctctccttcatgctggagaacctgagcaagcccgtcatcgtgaccggctcgcagatcccgctggcggaactgcgttcagacgggcagatcaacctgcttaactccctgtacgtggccgctaattacccgatcaacgaggtaacgctgttcttcaacaaccggctgtaccgcgggaaccgtaccactaaagcacacgccgatggctttgacgcttttgcctcacctaacctgcaaccgctgctggaagcggggatccatatccgtcgtctgggcacgccgcccgcgccaaataccgcaggcgagctgatcgttcaccccatcaccccgcagccgatcggcgtggtgacgatttatccgggtatttccgctgacgtggtgcgcaacttcctgcgccagccggtgaaggcgctgatcctgcgctcctatggtgtgggtaacgccccgcagaacggtgaattcctgaaagagcttcaggaggcgagcgatcgcgggattgtggtggtcaacctcacccagtgtatgtccggcaaagtcaatatgggcggctacgccaccggtaatgccctggcgcacgctggcgtgatcagtggtttcgatatgaccgttgaggcaacgctgactaaacttcactatttactgagtcaggatctggatattgattccattcgccgcgccatgatgcaaaacctgcgcggtgaactgacgccggacgaataa

SEQ ID NO: 114800 - DNA, 642 bp, Enterobacter cloacae
atgaagcaacgcgccctgttactggtcgatttgcaaaatgatttctgtgcgggcggtgcgctggccgttgccgaaggcgacagcaccgtagacgtcgcgaattcgctgattgagtggtgtaaagctcgtggtgaagcggtggtggcgagtcaggactggcatccggcaaaccacggcagctttgccagccagcacaacgttgagccttacagccagggcgaactgaacgggctggcgcaaaccttctggcccgatcactgcgtgcagcagacggaaggcgctgagctgcatccgctgctgaaccagaaggccatcgacgcggtgttccacaaaggtgaaaacccaaccatcgacagctacagcgcgttctttgataacggtcatcgtcagaagacggcgctggacgcgtggttgcgccaccatgagatcaccgagctgattgtgctgggcctggcgacggattactgcgtgaagttcaccgtgctggatgcgctccagttgggctataccgtgaatgtcatcaccgacggctgtcgcggggtgaatattcagccgcatgacagcgctcaggcgtttatggatatggccgcagaaggcgcaacgctgtatacgctggctgactggatggagacgcaggcgtaa

SEQ ID NO: 114801 - DNA, 696 bp, Enterobacter cloacae
atgaaacgtttgcccttgctggcagcattacccttgctttgcgcgtcactggcttccgccgcgcccctgatgtccgtgggttacttcaatgggggtggcgatgttaccgccggaccgggtggcgatattaataaactcgacgtccgccagatcacccacctcaactactcgtttggtctggtctataacaacgagaaagacgaaaccaacgccgcgctgaaagatccggcaaaactgcatcaaatctggttatcacctaaggtggcatccgatctggcgttacttcctcagcttcgtaaacaaaacccgaacctgaaagtcctgctttccgttggcggctggggcgcgcgtggtttttctggcgcagcggcaaccaaagagagtcgcgcggtatttattcgctccgcgcaggagatcgtcagtaaatacggcctggacgggatcgacctggactgggaatatccggtcaacggcgcgtggggactggtcgagagcacccctgccgaccgggataatttcaccgcgctgttaaaagagatgcgtgacgcgtttggtaagaaaaagctggtcacgattgcggtgggcgcgaatgcggaaagtccgaaaagctgggtggatgtgaaagccattgccccccctgctcgattacatcaacctgatgacctacgacatggcgtacggtactcagtattttaa

SEQ ID NO: 114802 - DNA, 597 bp, Enterobacter cloacae
atgacctacgacatggcgtacggtactcagtattttaacgcgaatctgtatgactccagcgcctggccaacggtggctgccgcagacaagtacagcgtcgattttgtggtgaataactatctggccgccgggctgaagccgcagcagatgaacctcggaattggtttctatgggcgcgtgccgaagcgcgccgttgaaccgggtatcgactggagcaaatcggacgcgcagaacaatccggtgacgcagccctacttcgggccgcaggaactgggcctgttcaaatcgcttggctatgatctgaccaaagatacctatgtgaaatacaacgatatcgtccgcaagctgctgaacgatccgcagaaacgctttaccgagcactgggacgaacaggcgaaggtgccgtggctgtcggtgaaatccgccgacgggaaggcgctgtttgcgatttcctatgagaacccgcgctccgtggcgatcaaagcggattacattaaggagaaaggtctggctggcgccatgttctgggagtacggtgctgacgacgaaaaccagctcacgaaacagctggcggagtcgcttgggatcccgcactaa

SEQ ID NO: 114803 - DNA, 273 bp, Enterobacter cloacae
atgaatattgatgacatgattgcaggtatgaccccggaggtttatcagcgtctggtaacggccgttgagctgggaaaatggccggacggtgtggcgctcacacctgagcaaaaagagaacagtttgcagctggtgatgctgtggcaggcgcgtcacaataccgacgcccagcacatgaccatcgacactaacggtcagatggtgatgaaaagcaagcgcgagctgaaagaagagttcggcatcgcgccgaagccgattgcgaccttcaaataa

SEQ ID NO: 114804 - DNA, 414 bp, Enterobacter cloacae
atgtcgaaccaacgtaaccccgacgatttgaaaaaaaaccttacagagatgcagttttacgtgacgcaaaatcacggcacagaaccgccgttttccgggcgtttgctgcacaataaacgggaaggcgtctaccactgcctggtgtgtgatgcaccgctgtttaactcccagacgaagtacgattctggctgcggctggccgagcttttacgagcctgtcagcgatgatgcgatccgctacctgacggacacctcgcacggcatggtgcgcaccgaaattcgctgcgggaactgtgacgcccatctcgggcatgtcttcccggatggcccgcagccgacgggggagcgtttctgtgtaaattcggcttccatgagctttaccgatgatgaaaacggcgaccataccaagggttga

SEQ ID NO: 114805 - DNA, 996 bp, Enterobacter cloacae
atgactatcaaagtaggtatcaacggttttggccgtatcggccgtattgttttccgtgctgctcagaaacgttctgacatcgaaatcgttggtatcaacgatctcctggacgctgaatacatggcgtacatgctgaagtacgactcaactcacggtcgtttcgacggcaccgttgaagtgaaagacggccacctggttgttaatggcaaaaccatccgcgttactgctgagaaagacccagctaacctgaaatggaacgaaatcggtgttgacgttgtagctgaagctaccggtatcttcctgaccgacgaaactgcacgtaaacacatcactgcgggtgcgaagaaagttgttctgactggtccttccaaagacaacaccccaatgttcgttcgcggtgcaaacttcgaaacttacgctggccaggacatcgtttccaacgcatcctgcaccaccaactgcctggcaccgctggctaaagttatcaacgacaacttcggcatcatcgaaggtctgatgactaccgttcacgcaaccaccgctactcagaaaaccgttgatggcccgtctcacaaagactggcgcggcggccgtggcgcggctcagaacatcatcccatcttctaccggtgctgctaaagcagtaggtaaagtactgccagaactgaatggcaaactgactggtatggcgttccgcgttccaactcctaacgtatccgttgttgacctgaccgttcgtctggaaaaagctgcttcttatgaagaaattaagaaagcaatcaaagctgcttccgaaggcccaatgaaaggcgttctgggttacaccgaagacgacgttgtatctaccgatttcaacggcgaagtgtgcacttccgtgttcgatgctaaagcaggtatcgcactgaacgacaacttcgtgaaactggtttcctggtacgacaacgaaactggctactctaacaaagtactggacctgatcgctcacatctccaaataa

SEQ ID NO: 114806 - DNA, 885 bp, Enterobacter cloacae
atgattaataaaatttttgcacttccggtagtcgaacaacttacccctgtgctctcccgccgtcagatctacggtgctgatatcatcgtcgttgatcatccgcgcgttaaagcctccgtagcgctcaatggtgcccacctgctctcctggaaaccagaaggtgaagaagaaggcctgtggctgagcgaggccacctcgttcaaaaaaggggcggcgatccgcggcggcgtaccgatctgctggccatggtttggcccgtcagcgcagcagggtttaccctcacacggtttcgcccgtaaccagcagtggacgctgaaagcccacaacgaagatgaaaacggtgcggtgttgacctttgaactccaggcgaatgatgaaacgcgtgccctgtggccacacgagttcaccctgtatgcccgcttcaagctgggtaaaacctgcgaaattgaactggaagcgcacggcgaattcgaaacaacgtccgccctgcacacctatttcaacgtaggcgacattcaggccgttaaggtgagcggacttggcgatacctttatcgacaaagtggataacgcgaaagaaggcaagctggacgacggcgtgcagactttcccggatcgtaccgaccgcgtgtatctgcacccggaagcctgtagcgtcatccacgacagcgcgctgaaccgcggtattgatgtggttcatcaccaccacagcaacgtggtgggctggaacccgggccctgccctttccgtcagcatggcggatatcccggatgacggttacaagaccttcgtgtgcgtggaaaccgcgtgcgtgaccgcgccgcagaaaaccagcgaagaaaaaccgtcccgcttaggccagacgatcaagattgtgaagcgctaa

SEQ ID NO: 114807 - DNA, 747 bp, Enterobacter cloacae
gtgaccaaactcaaacttctggcattgggcatccttgccgctaccgcagcgagcaccgtacaggctgagagccagtggactgttggcgcgggtgctggcgtgattaacagcccgtacaagcagtatgaccgcgacgtttatcctgtccccgttgtcacctatgaaggcgataacttctggttccgtgggttgggcggtggctactatctgtggaacgatacggccgataagctctccatcatggcctattacgatccaacgcactttaaaccaggcgacagcgacagcaatgcgcttcgtcagctggacaaacgcagaagctcactgatggcggggctttcttacgtccataataccgagtatggcttcctgcgcactgcgctggcgggcgataccctggacaacagcaacggcttcatctgggatctggcgtggctttatcgctataccaacggcgcagtgacgctgacgccgggtatcggtgtgcagtacagcagcgagaattacaacgactactactatggcgtgtctaaagcggagtctcgccgcagtggtctgaagagctacagcgcggatgatggctgggacccgtacctggaactcaccgcctcgtataacttcctcggtgactggaatgtgtacggtactggccgttacattcgtctgagcgatgaagtgaaagacagcccgatggtcgacaagtcctggtctggcatcttctccgtgggtgtgacctacaagttctga

SEQ ID NO: 114808 - DNA, 1935 bp, Enterobacter cloacae
atgaatatattcgatcactatcgccagcgctacgaagctgccaaggacgaagagttcacactgcaggagtttcttaccatttgtcggcaagatcgcagtgcctatgccaatgcggcagaacggctattgatggctattggtgagccaaacatggttgatactgccctggagccacggctttcccgtctattttcgaatcgggtggtcgcccgatacccggcgtttgaagagttctatggcatggaagacgccattgagcagatcgtctcctacctgaagcatgccgctcaggggctggaagagaagaaacagatcctttacctgctgggtcctgtcggtgggggtaaatcctccctggctgaacggctgaaagcgctgatgcagcgcgtgccgatctatgtgctgagcgccaacggcgaacgcagcccggtcaatgaccatccgctgtgcctgtttaatccgcaagaggatgcgcaaattctggaaaaagagtttggcattccgcatcgctatctcggtacgatcatgtcgccgtgggcggcaaaacgtctgcacgagtttggcggggacatcaccaagttccgcgtcgtgaaagtgtggccgtctatcctcgagcagatcgccatcgctaaaactgaacccggtgacgagaacaaccaggatatctcggcgctggtgggtaaagtcgatatccgtaagctggagcatcacgcgcaaaacgacccggatgcctacggttattccggtgcgctgtgccgcgccaaccaggggattatggaatttgtcgagatgtttaaagcaccgatcaaagtgctgcatccgctactgaccgccacccaggaggggaactacaacgggacagaaggtatttccgccctgccgtttaacgggattatccttgcccactctaacgaatctgaatgggtgaccttccgtaacaacaaaaacaatgaggcgttccttgaccgtgtgtatatcgtcaaagtgccttattgcctgcggatctccgaggagatcaagatttacgaaaaactgctcaaccacagtgagctggttcatgccccttgcgcaccgggaacgctggaaacactgtcgcgcttctcgatcctgtcgcgcctgaaagagccggaaaactccagcatctactcaaaaatgcgcgtgtatgacggcgaaagcctgaaggataccgacccgaaagcgaaatcgtaccaggaataccgcgattacgccggggtcgacgaagggatgaacggtctgtcgacgcgtttcgcgtttaagatcctctcccgcgtctttaacttcgaccacgcggaggtggccgccaacccggtacatctgttctacgtgctggaacagcaaattgaacgtgaacagttcccacaggagcaggctgaacgctacctggagttcctgaaaggctacctgatcccgaaatacgccgagtttatcggcaaagagatccagaccgcctacctggaatcctattccgaatacggccagaacatcttcgaccggtacgtcacctacgctgacttctggatccaggatcaggagtatcgcgacccggataccggccagctgtttgaccgtgaatccctgaacgcggaacttgaaaaaatcgagaaaccagccgggatcagcaacccgaaagacttccgaaacgagattgtgaacttcgtgctgcgcgccagagcgcataacaacggccgcaatccgaactggaccagctacgaaaaactgcgcacggttatagagaagaaaatgttctctaacacggaagagctgttgccggtcatctcgttcaacgccaaaacctcaaccgacgagcagaaaaagcacgacgagtttgtcgaccgtatgatggaaaaaggctatacccgcaaacaggtccgcctgctctgtgaatggtatctgcgcgtgcgtaaatcgtcttaa

SEQ ID NO: 114809 - DNA, 1284 bp, Enterobacter cloacae
atgacctggtttattgaccggcgtcttaacggcaaaaacaagagcacggtgaaccgccagcgcttcttgcgccgttataaagcgcaaattaaacagtcgatctccgaggccatcaacaaacgctcggtgaccgacgtcgacagcggcgaatccgtctccatccctaacgatgacatcagcgaaccgatgtttcatcaggggcgtggcggccttcgccatcgcgtgcacccaggtaatgaccacttcgtccagaatgacagaatcgagcggccccaaggcggaggcggcggttctggcagcggtcaggggcaggccagccaggacggtgaaggccaggacgagttcgtctttcagatttcaaaagacgaatatctcgacctgctgtttgaggatctggccctgccgaatctgagaaagaatcagcaccgtcagctcaacgaatacaaaacccatcgcgcgggttataccgcaaacggggtgcccgccaacatcagcgtggtgcgttcactgcaaaactcactggcgcgacgcacggcgatgacggcaggcaaacggcgcgaactgcgcgagctggaaaccagcctgaaagtggtggaaaacacggaacccgcgcaactgctggaagaggagcgcctgcgaaaagagatcgccgaactgcgggcgaagatcgaccgggtgccgtttatcgacacgttcgacctgcgctacaagaactacgaaaaacggccggagccttccagtcaggcggtgatgttctgcctgatggacgtatcaggttcaatggatcaggccaccaaggatatggctaagcgtttttatattctgctctatctgttcctgagcagaacgtataagaacgtggaggtggtctacatccgccatcacactcaggcgaaagaggtggatgaacatgagttcttctactcgcaggagaccggcggcaccatcgtgtcgagcgccctgaagctgatggacgaggtggtgaaggagcgctacgatccggcgcagtggaatatctacgccgcgcaggcatcggatggcgataactgggcggatgactcgccgctgtgtcatgaaattctggcgaagaagatcctgccggtggtgcgttactacagctacattgaaattacccgtcgcgcccaccagacgctgtggcgtgagtatgagcatctgcaagcgatgttcgataactttgcgatgcagcacattcgtgaccaagatgacatctacccggtcttccgggaactgttccagaaacagtcgtccaccagcaacgcatga

SEQ ID NO: 114810 - DNA, 501 bp, Enterobacter cloacae
atgtctgatgacgtgatcgggacgacgacccatcagcggctaatcagcttattaaccgagcaggaggcgcgctttcgcgtggtggcgcatgaggccgttgggaaatgcgaagcggtcagtgaaattcgcgggaccgatctccggcagggtgcaaaagcactggtctgcaaggtaaaaggcaacggtgttaagaaacatattctggcaatcctcgccgccgatcggcaggccgatctgagcctgctggccagtcatttcggtgggctaaaggcctctctcgccagtccggctgaagtggatgcgcttaccggctgcgtcttcggcgccattccccccttcagctttcatccggatctgacgctggtcgccgatccgctgctgtttgagcgcttcgatgagatcgcctttaacgccggcctgctggaaaagtcggtgattatggacacccaggactatctgcgtatcgcccgtcctgaactggtgacgttccgtaaacaataa

SEQ ID NO: 114811 - DNA, 1332 bp, Enterobacter cloacae
atgaccgaaataattacccgtaaagaaaagatcagttatgggttaggcgatatggcgagccatattgggctggataacgtcattatttttctgacgttttactatacggacgtggtggggctacctgccgcattcgtgggcaccatgtttcttctggcgagaaccgccgatgccataatagacccggcgatgggctatatcgcagacaggacgcgcacgcgctggggcaaattccgcccctggatgctgtggctggcgctgccctttggcgcaagttgtctgctgacctacgccgttccggcgtcgctcgatctgcacggtaaaatgattttcgccaccgtcagctataccctgatgatgctgatgtataccgcaatcaatattccctattgctccatgggcgcggtgatcacgcccgacaacgatgcgcgaatttccctccagtcctatcgttttttcctggccacgctgggtggcgcgctgtcgacattctttatgatgccgctcgcagagtttttaggcggcgatgataaattactgggctaccgctgggcgatggccattatggcgaccatcgcggtcatcatgttctggatctgcttcgccaatacgcgtgaacgtattaaggctcccgctacccacaataattatcttgcggaactgcgggatttattacgaaacgaccaatggcgggttgtcgccgtcctggtattaaccaacattggttttggcgttattcgccttggcgcaatgatgtatttcgtcacttattatctcggtagcgcaagctattttatgtggatgctcggggcgcatattctcgggaaagccgcaggcagcgcgctggccaaacgtctgacgcagaacgtcagcaaagtacagatgtttggatactgttccgtactggcgggggtactcagcatcgccctgttctttgcgcctaagtcagtgcttattctggtgcccatgacgtttatcgtctccaccctttaccaggccaccaccacgctgatgtgggtaatgatggcggacgtcgccgattacggcgaatggaaacagggcaaacggatggacggcgtgatcttctccaccttcctcgccgtactcaagctggggatggcgatcagcggcgcgattgttggctggacgctgggcttaagcggctatgtcgccaatgccccggaacagaccaccacggccatgtactgcatcatcgccctcttcaccgtcgtgcctggcgtcttgtcactctgcgcgtttgccacgctgcgctggtacaagctcgacgacagcacaatgcaatccatccatcttgccaaacaccctgtttag

SEQ ID NO: 114812 - DNA, 2037 bp, Enterobacter cloacae
atgagtgagctgatccaacattccaacagtatcgaatggcgttttgaacgccagatcctgcgtattgaaccgtggggtgaaaacagcctgcgcgtcagggccacctgctccccgacttttgatgacgccttacaggcactgttgcccgccgccccttgccaggctgagattgtcgccgaagcggaaagcctgacgctgcgcaacggcaatattaccgcgacgctgaaccttaaaggtcagctggccttctacaatcagcgcggcgaactgctgctggaagagatgtggcgccagcgttcaacggtgggtatcggtgccagcgagaagagccaggataaatatgtcagcgccctgaagctggatggccgcgaatttaagccgctaatgggggggaaatatcagctcaccgtccggtttgaatcgcgtccggatgaacgcatctatggcatgggtcagtatcaacagccgtggctggatctgaaaggctgtacgctggaactggcacagcgcaactcccaggccagcgtgccctttatgcagtccagccttggctatggcctgctgtggaacaacccggcgattggtgaagccagctttgcaaaaaatcagacggaatggcgcgcccgcgtcacaggagaaatggactactggatcaccgccgccgacacggtggcggatatcacccgccagtatgtgaaagccaccggtactccgccctccgccccggcgtttatcagcgggctgtggcagtgcaaattacgctaccgcacccagcaggaggtgctggaggttgcgcgggagtatcgccgccgtaatctgccgctgtcggtgatggtcatcgactttttccactggccgaatcagggcacctggtgcttcgaccccgtagactggcccgatcctgaagggatggtcgacgagctgcgcgaaatgggtattgcgctgatggtgtcggtgtggccaacggtagaggcgcgcagccctctctacccgctgatgaaagccaaaggctggctggtcagcagtgaacgtggcgtgcaggtcaacctcgattttatgggcaataccaccttctttgatgcgacccatcctgaggcgcggaaattcgtctgggatacggtgaagaaaaattactacgacatgggcattaagctgttctggctggacgaagccgaaccggaataccgcgcctatgattttgacaactatcgctaccacgccggtccggtgctggaagtgggtaatcgctacccgcgtgactttgcgcagggcttttacgatgggctccaggcaaatggtgaaaccgacattgttaacctggtacgctgcgcctgggcaggcagccagcgcttcggcgtgctggcgtggtcgggtgatgtccactcctcgttccatgcttttcgcaatcaactcgccgcgggactgaatatggggctggcggggatcccatggtggacaaccgatatcggtggcttccagggagggaacgttaacgacccggcgttccacgaattgctgatccgttggttccagtgggcggtgtttacaccggttctgcgcatgcacggctatcgcgaaccgcagatccagcccccggagcgctaccgtgacggcattcctcagtgtaacagcggttcgcctaatgagctgtggagttacggagaagagaattacgccatcatgcagcactggcttaccgtgcgcgaaaccctgcgcccgtatattgacgcgttgtaccagcaggctcatctgcacggagacccgctcatgcgtccgctgttctggcactatccgcaggataagcagagctgggcgtgtgaagatcagtatctgtttggcgaagatcttctggtggcgccggttatgcaggccggtcagcgtgagcgcgatgtctggctgccgacgggcaatagctggatcgctctcaacggtgagcgctacgccggtggggagcatatccgggtgcctgcggcgctggaaaccatcccggtgtttatccgcgaaggaagtccacttatccagcagctggtggactga

SEQ ID NO: 114813 - DNA, 447 bp, Enterobacter cloacae
atgttcgaccctacactgctcatacttttggccctggctgctctgggttttgtcagccacaacaccaccgtcgcgatttccattctggtcctgatcatcgttcgcgtcacaccattgaataccttcttcccgtggatagaaaaacaggggcttaccatcgggatcattattttgaccatcggcgtgatggccccgattgccagcggaacgctaccggcctcaacgctgctgcactcctttgtaaactggaaatcgctggtggcgattgcggtgggcgtttttgtctcatggcttggcgggcgcggcgtgacgctgatgagcagccagccttcactggtggccgggctgctggtgggcaccgtgttaggcgtggcgctgtttcgtggcgtgccggttggcccgctgattgctgccggactggtttcgctgtttatcgggaagtcgtag

SEQ ID NO: 114814 - DNA, 792 bp, Enterobacter cloacae
atgtacggactggggctcgatggctacgatcccgatagccagcacgacgcggcggtggcctttcgcatccgcgtggtggcacaggaacaatatattccgctgcatcagcaccgcaaagggcagctgattatggcgctggggggagcgatcacctgtgaagtggagaacgcgatgctgatggtgccgccccagtatgcggtgtggatcccgggacaaacgccgcacagcaacaaggcgacgcccggcgcgcagctctgtctgctgtttattgaacccggtgcgctcgaattgccgacgcgtacctgtacgctgaaaatatcgcccctggtgcgggagttggtgctggcgcttgcggacaggtcacgggaggaactgcctcttcccgctaccggaaggctggttgacgtcctgtttgatgaactgcccctgcaaccgcaggagcatctacagctgccggtatctccgcatccaaaaattcgcctgatgagcgagaccatggcaaacgaacctgccgcctggcagacgctggcgcagtgggcaagccactttgccatgagcgaacgcaatctggcgcggctggtggtgaaagagaccggcttaagctttcgccgctggcggcaccagctccagctgattgtcgcattgcagtttttgatcggcggaaagtcggttcagcaggcggcgcaggcgctggggtatgactccaccaccgccttcatcaccatgtttaagaaaggactgggacagacgcccgcccgctatatcgccagcctgactacgacttcccgataa

SEQ ID NO: 114815 - DNA, 1188 bp, Enterobacter cloacae
atgactactgctattcaaccttccgggaaacagggtgcgctgctgattgcaggcatcctgatgattgccacgacgctgcgcgtcacctttaccggtgtcgcccccctgctcgataccatccgacaggactatggtttaagcacggcgcaaaccggcctgctcacgacgctgcctctgctggccttcgcctttatctctccccttgccgcaggcgtcgcccggcgcctgggcatggagcgcagcctttttatcgctctgctgctgatttgcatcgggattggcgtacgttcgctgccgtcggcctcgctgctgtttatcggtacggcgatcgtgggctgtgggattgcgctgggcaatgtcctgttacctggcttaatcaaacgtgattttccgggccaggtcgcaaaactgacgggggcttattcgctgacgatgggagccgctgctgccgcagggtcggcgctgatcgtcccgctgtcgctggggagtggtggctggcacggggcgctgttgatgctgatgttcttcccgctggtggcgctgctgctgtggttaccgcaatggcgccagaagccggccgccaccctgaccggagcgggcgcgttgcacaatcgggctatctggcgctcggcgctcgcctggcaggtgacgctttttctgggcattaactcgctgatttactacgtcattatcggctggttacccgcgattttgcttagccatggctacagcgaaacgcaggctggctccatgcacgggcttctccagctggcaaccgcggttcccggtctcgccattccgctgatcctgcaccgtcttaacgatcagcgtggcattgccgggctagtcgccctgatgtgcgccgtcagcgcggccgggttctggttcgcgccggggctggccgtcgtctggacgctggtgtttgggtttggatccggcgccaccatgatcctcggcctgacgtttatcgggctgcgcgccagctcggcccatcaggccgcggcgctctccggcatggcacagtcgattggctatcttctggcggcctgtggcccaccgctgatggggaaaattcacgataccgccggagactggcgcattccgctgctcgcctgcgcgctggccgcggtggtgatggcgttatgcggtatgcttgccgggcgtgaccgggagatcacaccccgctga

SEQ ID NO: 114816 - DNA, 708 bp, Enterobacter cloacae
atggaactctccccggttaaaacgacgctgcgcattgcgctggttggtgattacaatcccgatgttattgcgcaccaggcgatcccgctggcgattgacgacgccgctgcggttctggagctcaccgctgattatgactggctcgccacgcctgagctgaccagccccgaagacctggtcgggtacgatgccatctggctggtaccggcaagcccgtataaaaacaccgaggcggcgtttattgcggcccgttacgcgcgtgagaacagcatcccctttctcggcacctgcggcgggttccagcatgcgctgattgagtatgcgcgtaatgtactgggctggcacgatgcaggccatgccgaaaccgacaccgagggaaggatggtaattgcgccgctgacctgctcgctggtggaaaaaaccgacgcgatcgagctgcgaaataacacgctgattgctaaagcgtatggcaagccggaaattcaggaggggtatcactgcaattacggcgtctcacctgagtttgccgaccagcttgagcggggcgacatgcgcgtaacgggctgggacgagcagggcgagatccgcgcggcagagctggtaacccatcctttctttgtcctcaccctgttccagcatgagcgggccgcgctacaagggcgcccggtcgtgctggtacaggccatgatgcgggcggcgcagggttaa

SEQ ID NO: 114817 - DNA, 345 bp, Enterobacter cloacae
atgattcaatgtaaacgcgtgtatgagcaggcgacctcaaaagacggttaccggatcctggtcgacagactctggccgcgagggataaaaaagaccgacctcgcctgtgacgagtggtgtaaagcgctaacgccgtccagcgaactgcgaaaagcttttcacagtgaaacgatagatttcaccgcgttcagtgaagcctatcgtaaagagctggcgcagcatccggatgaaggcaaacgcctggcggctctcgccaaacagcagaccgtgacgctactctatggggcgaaaaatacggagcagaatcacgcgcaggtactggcggactggctgcgtaaactgtga

SEQ ID NO: 114818 - DNA, 306 bp, Enterobacter cloacae
atgtttcagttaaaaccgggcagcatggcgatgatcgtgggtgcgcgtacggcggcaggccgtcgaaatatcggtaaatccgtcgagctgtttggactttgtcagccgggccagcgttttgtgaacccggttaacggcgtcatgacgcaattacccgccacgtcagcgcgtgcgctgtggctggtcaccggtgatgtttacgcctttgataatcagcacggttttgcgtttgttcgcccggaacatctgatgccgcttactcccgacgagatgccacacaacgtggatgagctggcgatcggttaa

SEQ ID NO: 114819 - DNA, 255 bp, Enterobacter cloacae
atgaaatatcttctcctggcgctggttttaccgctggccgcctgctcaacaaagacaacccctcctgatgcgcctcaaccgccgcacgctattggtatggcaaacccggcgtcagtgtactgtctggagaaagggggagagcaaatccctgttcaaagcccgcagggcgtacgtaccgagtgcaaattgcccggcggggaagtgatcgatgaatgggatctctaccgccgcgatcacccgcaaccgaccagatga

SEQ ID NO: 114820 - DNA, 1029 bp, Enterobacter cloacae
atgtcagatatcattcttgcccgtgtttcagaaaccctctccactgagcaatctctcgacagtctggtgcgtcagctactggaaatgctggaaattgtgacggatatggaatcaacctacctgacgaaagtcgatatcaatgcgcgtttgcagcacattttatatgcccgtaacagcaagcaaatgcagatcccggaagggttcagcgtgccctgggacgaaacactgtgtaagcgcgccatcgacagcgacacgttgttcagtaacgaggtgcccgaccgctggccggagtgtgaagcggccaaagcactgggcattacaacctatatgagcgtgccggttcacctggctgacggttctctgtatggcacgctttgcgctgccagcaccgcacagaaacagttcagcgagcgtggcgagcaggtgatcagactctttgccggtttaattggtcagtacattcagaaagagtcgcttgtgcttcagcttcgcgtagcaaatgcggcgctcattgctcactcttacaccgacgccctcaccggcctgccgaatcgtcgcgccatttttgaaaaccttaccaccctgttctcactggcgcgccatcttaaccgcaacgtcatgatggcttttattgacctcgatgatttcaagcgaatcaatgaccagtacgggcatgaggcgggcgatcgcttcctcgtacaggtcggcaagcggctgactcacgagcaaacgcaggatgagattattggccggctcggcggcgatgaatttctggttgccagcctgagtcacagcgatgatggcgacgccagtacagaggtcaacgcaatcaaaacccgcctcaatggtcttattgcgggcgaatacgggttaggcaatgccactattctttatcccggcgcaagccttggcgtcgttattgttgatcctcacagcacggatgaagatagcgccctgcgcaccgcagacctcgcgatgtatcaggataaaaaaggaaaaagcaaaacaggctttgtcgcgttagattaa

SEQ ID NO: 114821 - DNA, 249 bp, Enterobacter cloacae
atgggaattttatcctggattatctttgggctgattgcggggatcctggcgaagtggattatgccgggcaaagatggcggcggtttcatcgtcacgatcattctggggattgtgggtgcagtcgtcggtggctggatcagtaccctgttcggctttggcagagttgatggcttcaacttcggcagctttgtcgtcgcggtgattggcgcgctggttgttctgtttatctacagaaaaatcaaaagctaa

SEQ ID NO: 114822 - DNA, 1500 bp, Enterobacter cloacae
atgaagaaggccattgccgttgctatcatctcaacctttatggtcgtcctgtcgctgtatgcggttaacgccattatcgctgagcagcaaaagaaccggcagagggagatctcccacacgctcttaagctattctgaagagttaacgcaaaatatcgccagtacgcttaaaaatacctccgcgcagggatgcgatagcgccagtctgaacgtctaccgaaaattaaagatgcgaagtctctatttcgccgatgtggggtttattgaaaaggggaaaatcacctgcaccgcgttttggggcaagctggcaaatcccatcgcccttccctctgagctgcataatacccagaacggattcagcctggcgcagttttcgcagaaagatttctttgtcggcaatgcgacaatctataaccaccttattatcttcacctcccgttcagcctacgataaatttgcccccgttaccgccaactattcgcttcgttcttccactaaagatttcggccgcacctttttcaccgttacgccgccatcagaaaacttcagccgcttacagtctctgttatttacgctggctgtgacagagtgcagtacacgctgggatttgtgcgttaccgtcacacaccatgatgccggactggcttcgctctcccacgtagtgatggtgcttctgtgcttgtttttatactttatctgggtatccctgacgctgttttctcttcgactttatgaagaccgacgttctctggaacgaacgctggtcaaagcggtaaaagcgaataccatcagcgttcattttcagcctgttattcgggttgctgataagaaaatcgtcggggttgaagtgttatcaagatggcaggataacaatcacaaagaggtttctcctgagctgtttatcccgttaattaaaaaaattggcctgtataacgtttattatcagaacatgataaagaaatccctggcggaaattgccgcgctggccgctgaacatcagttaatgatttcactgaacgttggccggacggaaattgaagacggcaaattcctggcggtattacgtcatgaatgctcagagaacgcgattcccttatcgttaatcaaagttgagttatccgagaatggcgtttccaccgcggccatccttgaagagttttgtgaggagcttaaatcggcaggcgtcaaaatttcaatagacgattttggtgtgcaaaactctaatctggccaggctatcaaatctcaaatatgacgaaatcaaggtggataagtcgttagtggacggcatcagcgagcactataaacaggatatcctggtgatcttcagcgacgcgctagctaaactgcacaaaacccttgtttttgaaggggttgaaagcgaaacgcaatatcagttcatcgcgcagagataccccgatgccctcgtacaaggctggtacttttcgaagtcgctaacccggcacgacctcgccaggctgctggcagactcagcgcgatga

SEQ ID NO: 114823 - DNA, 246 bp, Enterobacter cloacae
atgaaccatgatatcccgctcaagtattatgacatcgtcgacgagtatgcgactgaaacggcgaaaccggtagaagaggcagaacgtacgccgctggcacactatttccagctgctgctcactcgcttatacaacaatgaggaaatcagtgaagaggcgcagcgggagatggctgtccaggcggagatagacgaagcgcgcattgacgatattgcgaacttcctgaatcagtggggcaatgaataa

SEQ ID NO: 114824 - DNA, 1251 bp, Enterobacter cloacae
atggaaagcaaagtagttgttccggcggaaggtaaaaagatcaccctgcaaaacggcaagattaacgttcctcacaacccgattatcccgttcattgaaggcgacggtatcggcgtagacgttaccccggcaatgctgaaagtggttgatgccgctgttgagaaagcctacaaaggcgagcgtaaaatttcctggatggaaatttacaccggtgaaaaatcgactcaagtttatggccaggacgtctggctgccagccgaaacgctggacctgatccgcgactatcgcgttgctatcaaaggccctctgaccacgccagttggcggcggcattcgctccctgaacgtggcgctgcgtcaggaactggatctgtatgtgtgtctgcgtccggtgcgttactaccagggcaccccaagcccggttaagcacccggaactgaccgacatggttatcttccgtgaaaactcagaagacatctacgccggtatcgaatggaaagcggactctgctgatgcagaaaaagtgattaaattcctgcgcgaagagatgggcgtgaagaaaattcgcttccctgagcattgcggcatcggcatcaagccatgctccgaagaagggaccaagcgtctggtgcgtgccgccatcgaatacgctatcaccaacgatcgtgactctgtgaccctggttcacaaaggcaacatcatgaagttcaccgaaggcgcgttcaaagactggggctaccagctggcgaccgaagagttcggcggtgaactgatcgacggcggcccatggcagaaaattaagaacccgaacaccggtaaagagatcatcattaaagatgtgattgccgatgcgttcctgcaacagatcctgctgcgacctgctgagtatgacgtgatcgcctgtatgaacctgaatggtgactacatctccgatgcgctggcagcacaggtgggtggtatcggtatcgccccgggcgcgaacatcggtgacgagtgcgccctgttcgaagcaactcacggtactgcacctaaatacgcaggccaggacaaagtcaacccaggctctatcattctgtccgcagagatgatgctgcgtcatatggaatggttcgaagccgcagacctaatcgttaagggtatggaaggcgcgattaacgcgaaaaccgtcacctatgactttgaacgtctgatggaaggcgctaaactgctgaaatgctcagagtttggcgacgcgattatcgcgaacatgtaa

SEQ ID NO: 114825 - DNA, 663 bp, Enterobacter cloacae
atgcggcaattgataacgcctgaaaataccatgacgaaaacttcttttagaaaacaccgggttgagcgattcagctcacgacaagccaccagaaaaacgccagaaccccagccaacgcgggtcatactgttcaataaaccctacgatgtattgccacagtttaccgacgaggcagggcgcagcacgctgaaggactttatttccgttcagggagtgtacgcggcgggacgtctggatcgtgacagcgaagggttgctggtgctcaccaatgacggcgtgctccaggccaggctcactcagccgggcaagcgtaccgggaaaatttactttgtgcaggttgaaggcgagccggacgacgcgtcgctggcaaaactgcgtaacggcgtaacgctgaacgacggtcccaccctgccggctggtattgagcgcgtgaatgaacccgagtggttgtggccgcgcaacccgccgattcgtgagcggaaatccattcccaccagctggcttaaaatcaccctttatgaaggccgcaaccgacaggtcaggcgcatgactgcgcatgtgggcttccctaccctgcgactcattcgctatgccatgggcagctacacgctggactcgctggcaaacggtgaatggcgggatgttacccctaaggagatctga

SEQ ID NO: 114826 - DNA, 474 bp, Enterobacter cloacae
atgtttaaacctcatgttacggtcgcctgcgtggtccatgcgcaggggaaattcctggtggtggaagagaccatcaatggcaaagcgctgtggaaccagcctgccgggcatcttgaagccaatgaaaccttacgccaggcggcagcccgtgagctgtgggaggagacgggtatccgcgccgaaccgcagcattttatccgtatgcatcagtggatagcgcctgaccagacgcctttcctgcgcttcttattcgccgttgaacttaacgaaacgtgcgccactgaaccgcacgacgacgatatcgatcgctgcctgtgggtgactgccgaggagatcctgaacgcgccaaacctgcgttcgccgctggtggcggaaagcatccgctgctggcagtctgcggcgcgcctgccgctggatgtcattgcagaatttaactggccgtttacagagggtgtcaatggtgggggggcgtga

SEQ ID NO: 114827 - DNA, 1170 bp, Enterobacter cloacae
atggtgggggggcgtgatagaatacgccgccttgaagttcaatgtcgtgagtattccatgtcagataacagccagaaaaaagtaatcgtcggcatgtccggcggtgtcgattcctccgtttccgcctacctgttgcagcaacagggctataaggtggagggcctgttcatgaagaactgggaggaagacgatggcgaggaatactgcactgccgctgcggatctcgccgatgcgcaggccgtgtgcgataagctcggcatcgaactgcacaccgttaactttgccgcagaatactgggacaacgtttttgaactcttcctcgaagagtacaaagcgggccgcacgccaaacccggatatcctgtgcaacaaagagatcaaattcaaagccttcctggaattcgccgcggaagacctgggcgcagactacattgcgaccggccactacgtgcgtcgcgcggatgtgaatggcaaaagccagctgctgcgcggcctggacggcaacaaagatcagagctacttcctctatacgctgagccacgaacagattgcccagagcctgttcccggtcggcgagctggaaaagccggaagtgcgtaagattgctgaagatctggatctgatcaccgcgaagaaaaaagactccaccggtatttgttttatcggcgagcgtaaattccgcgagttcctggggcgctacctgcctgcacagccgggcaaaatcgtcaccgttgacggcgatgagattggtcagcaccaggggctgatgtaccacactctcggccagcgtaaaggtctgggtatcggcggcaccaaagagggcagcgaagatccgtggtacgtggtcgacaaagacgtcgaaaacaatattctggttgtggctcagggtcacgaccacccgcgcctgatgtccgttggactgatcgcgcaacagctgcactgggtcgatcgcgagccgctgaaaggcacgctacgctgcacagtgaaaacgcgctaccgccagacggacatcccttgcaccgtaaccgcactggatgacgatcgcattgacgtgcgtttcgacgagccggtttccgccgttacccctggccagtctgctgttttctacagcggcgaaatttgcctcggcggtgggatcattgaacagcgcctgccgctgcctgctgtttaa

SEQ ID NO: 114828 - DNA, 630 bp, Enterobacter cloacae
gtggcgaagaactattatgacatcaccctggcgctggcgggaatttgccagtcagcccgtctggtgcaacagctggcgcatcagggtcattgcgacgctgatgccctgcacgtttcactcaacagcgttatcgatcttaacccaggctcaacgctgggcgtctttggcggcagtgaaaccaatcttcgtctcggtcttgaaactctgctcggcgtgctcaacgccagcaaccgtcaggggttgaacgcggaactgacccgctacaccttaagcctgatggtgctggaacgtaagcttaatgcggcaaaaggcgcaatgaataccctgggcgaccgcatcgccgggctacagcgccagctcgaccactttgacctccagtctgagaccctgctcagcgcgatggccggtatctacgttgacgtgattagcccgctcggcccgcgtattcaggtcaccggttcgcctgccgtattgcaaagcccacaggtacaggcgaaggtacgcgcttcgctgctggcaggcatccgtgccgccgtgctgtggcaacaggtcggcggtggccgcctacagttaatgttttctcgtcatcgcctgacgactcaggcaaaacaaattcttgctcattgttaa

SEQ ID NO: 114829 - DNA, 1371 bp, Enterobacter cloacae
atggaattatcctcactgaccgccgtatcccctgtcgatggacgctacggcgataaagtcagcgcgctgcgcgggatcttcagcgaatatggcctgctgaagttccgtgttcaggttgaagtacgctggctgcaaaagctggccgcccagacagcaatcaaggaagttcctgcttttgacgcaaaggcaaacgattaccttgataaaatcgttgctgagttcagcgaagaagatgccgcgcgcattaaaaccatcgaacgcaccaccaaccacgacgtgaaagcggttgaatacttcctgaaagagaaagtggcaagcgtccctgccctgcacgcggtatctgaatttattcacttcgcctgtacgtctgaagatattaacaacctgtctcacgcgctgatgctctctaccgcgcggaaagaggtagtactcccttactggcgtaaaatcattgatgcggtgaaagcgctgtccgtggaataccgcgacattccgctgctgtcccgtactcacggccagccagcaaccccatccaccatgggtaaagagatggcgaacgtggcgtaccgcatggaacgccagtatcgtcagctggagcaggttgagatcctcggcaaaatcaacggcgcggtgggtaactataacgcccacatcgccgcgtacccggaagtggactggcaccagttcagcgaagagtttgtgacctctctggggatccagtggaacccgtacaccacccagattgagccgcacgactacatcgccgagctgtttgactgcattgcgcgcttcaacaccatcctgatcgacttcgatcgtgacgtatggggttacatcgccctgaaccacttcaagcagaagaccatcgccggggaaatcggttcgtccaccatgccgcacaaagtgaacccaatcgacttcgaaaactccgaaggtaacctgggtctggcgaatgccgtgttgcagcatatggcgagcaagctgccggtatctcgctggcagcgcgacctgactgactccacggtgctgcgtaacctgggcgttggtattggctacgcgctgatcgcctaccagtccaccctgaaaggtgtgagcaaactggaagttaaccgcgaccgtctgctggacgagctggatcataactgggaagtgctggcggagccgattcagaccgtgatgcgtcgttacggcatcgaaaaaccgtacgagaaactcaaagagctgacccgcggtaaacgcgttgatgctgaaggtatgaaacagtttatcgacggtctggcgctgccagaagaagaaaaagcgcgcctgaaagagatgaccccggaaaactatattggacgtgccatcgctatggttgacgagctgaagtaa

SEQ ID NO: 114830 - DNA, 393 bp, Enterobacter cloacae
atggaatggaaggttgttgagactattgcgagcccggaaagcggaaccatcttttgcaaagttgaaacacagtatggcctgaattatatcctgtggttaaagggagattattacgttcgtacaggtgaaatcatcaccacttcaaaccaggggatcctgattaacgatcggcggcgtagagtatggatagcgcaggcaatgccctttacatcaataggctggatggggttcaaacagaaaaacgcgtgtccaggcaaccgacaggagatggatcgcccgtgcacggctgaaaccccgtgccagttcaaactttgcccgttcggcttaaaacggtatattccggaaagttattccacggcaaaaaataacattcagcctgacggcaggctctaa

SEQ ID NO: 114831 - DNA, 675 bp, Enterobacter cloacae
atgatgcgcgtactggttgttgaggataacgcattgctacgccatcacctgaaagttcaacttcaggagatgggtcatcaggtggatgatgctgaagacgcaaaagaggccgattattatctcaatgaacacctgccggacatcgccattgtcgatttagggctgccggatgaagacggattgtcccttatccgccgctggcgtagccatgacgtttccctgccggtactggtgctgactgcccgcgaaggctggcaggacaaggttgaagtcctgagcgctggcgcggatgactacgtgaccaaacccttccatattgaagaagtcgctgcgcgtatgcaggcgctgctgcgccgcaacagcgggctggcgtcacaggttatctctctgccgccgttccaggtggacctctctcgccgcgaattttctattaatgatgaagtgatcaagctgaccgcattcgaatacaccatcatggaaacgctgatccgtaacaacggtaaagtggtgagcaaagattccctgatgcttcagctctatccggatgccgagctgcgcgaaagccacaccattgacgtgctgatgggtcgcctgcgtaaaaaaattcaggcgcagtacccgcatgacgtgatcaccaccgtgcgtggtcagggctacctgttcgaattacgctaa

SEQ ID NO: 114832 - DNA, 1464 bp, Enterobacter cloacae
atgaaagggatattgcgccacattttacccctttcgctgcgggttcgctttttgctggcaaccgccgccgtcgtgctggtgctgtcgctctcttatgggatggtggcgttggtcggttatagcgtgagcttcgataaaaccaccttccgcctgcttcgcggcgaaagtaacctgttttataccctggcgaagtgggagaacaaccgaatcaccgtcgagatgccggaaaacctgaatcagcagagcccgacgctggcgctgatctatgatgaaaaagggaaattgctttgggcccagcgcgatgtcccgtggttgaaaaagcgcatccgtccggaatggctgaaaaccaacggttttcatgaaatagaagccgacctcaactccaccagcagcctgctgcgtgacgatcgcgccttacagatcaagctaaatgagatccgtgccgaagatgacgacacggagatgacccactctgtggccatcaacctttaccccgccaccctgaacatgccgcagttaaccattgtggtgatcgataccataccggttgagctgaaacgctcgtatatggtctggaactggtttgtgtatgttctggctgccaacctgctgctggtgatccctctcctgtgggttgctgcgtggtggagcctccgcccgattgaatcccttgccaaagaggtgcgcgagctggaggaacatcaccgcgagaagctaaacccggagaccacgcgtgagctgaccagcctggtgcgcaacctcaaccgcctgctgaaaagcgaacgtgaacgctacgacaagtatcgcacgacgctcaccgaccttacgcacagcctgaaaaccccgctggccgtgatgcagagtaccctgcgttccatgcgcagttcgaaaatgagcgtggatgacgccgagccggtgatgctggaacaaatcagccgtatttcacagcagatcggctattacctgcaccgcgcgagcatgcgttccggaagcgccctgttgagccgtgaactgcacccggtagccccgctgctggataacctcacctctgcgctgaacaaggtgtaccagcgtaaaggggtcaacatcagtctggatatctcaccggaaattagctttgtcggtgagaaaaatgactttatggaagtgatgggaaacctgctcgataacgcctgcaaatattgtctggagtttgtcgaggtgtccgcgcgggtaacggataacgaactgcatattatcgttgaggatgatggtcctggcattccctgtaataaacgcgaagtggtgttcgatcgcggccagcgcgccgatacgctgcggccaggccagggcgtcggattatccgtcgccagggaaatcgtcgatcagtacgagggcaagattgaaaccggtgaaagtttgctgggcggtgcccgtatggaagtcatttttggccgccagcatcccgtatcgaacgatagttga

SEQ ID NO: 114833 - DNA, 1122 bp, Enterobacter cloacae
atggattatcaattaacgcttaactggcccgaatttattgaacgttactggcaaaaacgcccagtcgttcttaaacgcgggatcagcaattttatcgaccctatttctcctgacgaactcgctggtctggcgatggaaaacgaggtagacagccgtctggtgagccaccaggacgggaaatggcaggtcagccacggtccctttgaaagctacgatcacctgggcgaaaacaactggtctttactggtgcaggcggtcaacaactggcacgaacccaccgcagccttaatgcgtcccttccgcgccctgccagactggcgaatggacgatctgatgatctccttctccgttcccggtggcggcgtgggtccgcatctggatcagtacgacgtgtttatcattcagggtaccggtcgccgtcgctggcgcgtgggcgaaaaagtgccaatgaagcagcactgcccgcacccggatctgcttcaggttgatccgtttgaagggatcattgatgaagagctggaaccaggtgacattctttatatcccaccgggcttcccgcatgaaggttattccctggaaaactcgctgaactattcggttggtttccgcgcgccaagcgggcgcgagatgatcagcggatttgctgactatgttttacagcgtgagctgggcagctaccgttacagcgatccggacgttcaggcgcgtgagcacccggcggatattctgccagaggagctggataagctgcgcgggatgatgctggatctgatcaatgaaccggagcacttcagacagtggtttggcgagtttatcagccagtcgcgtcacgaactggacgtcgcaccgccagagccgccgtatcaggcagatgaaatctatgatgcgctccagcagggcgataagctggttcgtctgggcggattacgcgtactacgcattggcgaagaggtattcgtcaacggcgagcgcctggactctccgcatcgcccggcgctggaagcgattgccagccatatggtgctgactgcggatacctttggcgacgcactggacgatccctccttcctcgccatgctggccgcgctggtgaacagcgggtactggttttttgaggactga

SEQ ID NO: 114834 - DNA, 492 bp, Enterobacter cloacae
atgtcaaactaccgccaccactacatccccggtgggacctggtttttcaccgtcaatctgcaaaaccgccagagcgatttacttactcgccacatcgacagcctgcgttccgctaccgccacggttaagcgtgcgaagccctttaccattaacgcctgggttatcctgcctgaacatatgcactgtatctggaccctgccggaaggggacagtgacttttcagcgcgctggcgcgacatcaaaaaaacgtttagccgcaacattgaaatgcgccacgtctggcaaccgcgtttctgggagcacactattcgcaatgagcaggattatcggcggcatatggattacatctacatcaatccgctgaagcatggctatgtcgggaaagtcgtcgactggccatattcaacgtttcatcgggacgtgcgggaagggttatatccggcagactgggcgggtgagattgaggattttgcggcgggggggcggaagtaa

SEQ ID NO: 114835 - DNA, 1224 bp, Enterobacter cloacae
atggataaactacttgagcgtttcttacattacgtttcgctggatacccaatctaagccgggggtccgacaggtgccaagcaccgaaggccagtggaagctgctaaatctgctgaaagagcagctggaggccatggggctggttgatgtcacgctcagcgaaaaagggaccgtgatgggaacgctgccggcgaatattgacggcgatatcccggcaattggctttatttctcatgtcgatacctcacctgattttagcggtaaacacgtaaacccgcagattgttgaaaactatcgcggcggtgatattgcgctgggcattggcgacgaagtgctgtcgccggtgatgttcccggtactgcatcagctgctggggcagacgttaatcaccactgacggcaaaaccttgctgggggccgatgacaaagcgggcatcgccgagatcatgacggcgctggcggtgctgaagggcaaaaatatcccacatggcgatatccgcgtggccttcacgccggatgaagaggttggaaaaggcgcgaaacactttgacgttgaggcgtttaacgcgcagtgggcctacaccgtcgacggtggcggcgtgggtgaactggagtatgaaaactttaacgcggcatcggtgacgatcaaaatcgttgggaacaacgtgcacccggggtctgcgaaaggggtgatggtgaatgcgctgtcgctggctgcgcgtattcatgcggaagtgcccgccgaagagagcccggagatgacggaagggtatgagggtttttatcatctgaccagcatcaaggggaccgtggacagcgcgcagatgcactatattgtccgcgatttcgaccgcaaagcctttgaagcacgcaaacgtaagatgatggagatcgcgaaaaaggtcggcaaggggctacatccggattgctatattgaactcatcatcgaagacagctattacaatatgcgcgataaggtgatggagcatccgcatattcttgatatcgcccagcaggcgatgcgcgattgtgacatcgagccggtgatgaaaccgatccgtggcggtaccgatggttcacagctgtcgtttatgggcctgccgtgcccgaacctgtttaccggtggatataactaccacggcaagcatgagttcgtgacgctggaagggatggataaagcggtgcaggtgatcgtgcggatagcggagttaaccgcgaagcggtaa

SEQ ID NO: 114836 - DNA, 1119 bp, Enterobacter cloacae
ttgaatacacaaccccgttccctttcaccgctggtgcaactggaacgaattcgtaaaagtttcgatggcaaagatgtcatttccgaccttaatctgaccatcaatgacggtgagtttctcacgctgctcggcccctccggctgcggcaaaaccaccgtcctgcgccttatcgccgggctggaaagcgtcgataacggccatatccatcttgagaaccaggacataacccaggttccagccgaagatcgccacgtcaataccgtctttcagagctatgccctgttcccgcacatgaccgtgtttgagaacgtggcgtttggcctgcggatgcaaaaaacaccggccagcgagatcccacctcgggttaccgaagccctgcgcatggtacagctggaggcgttcgcccagcgcaagccgcatcaactttccggtggtcagcagcagcgtgtggccattgcccgcgccgtggtcaacaaacctcgcctgctcctgctggatgaatccctctctgcgctggactacaagctgcgcaagcagatgcagaacgagctgaaagcgcttcagcgtaagctcggcatcacgttcgtgtttgtcacgcacgatcaggaagaagccctgaccatgtcagaccgtatcgtggtgatgcgcgacggcaagattgagcaggatggcaccccgcgtgaaatttacgaagagccgaaaaacctgttcgtcgccagctttattggcgaaatcaatatctttaacgccacggtgatcgagcatctggacgatcggcgcgttcgcgcaaatgtggaaggccgcgaatgcaatattaccgtcaactttgccgtcgagaagggtcaaaagctcaacgtcctgctgcgcccggaagatctccgcgttgatgagatccacgacacggctgacgtcgaaggtctgatcggttacgttcgcgaacgcaactacaaagggatgaccctcgaatccgttgtggaactggaaaacggcaaaatggtgatggtcagcgagttctttaacgaggacgatccggacttcgaccattcgctggatcagaaaatggtcatcaactgggtagaaagctgggaggttgtactggctgatgaagaacacaagtaa

SEQ ID NO: 114837 - DNA, 858 bp, Enterobacter cloacae
atgaagaacacaagtaagttccagaatgtggtgattgccacgatcgtcggttggcttgtgttgtttgtctttcttcccaacctgatgatcatcgtgaccagcttcctgacccgcgacgacgcgaacttcgtgacgatggtctttacgctggacaactacgcgcgcctgctcgatccgctctattttgacgtgctgctgcactcgctcaatatggcgctgattgccaccctcgcctgtctggtgctggggtatccattcgcctggttcctggcccgcctgccgcaaaaagtgcggccgctgctgctgtttttactgattgtacccttctggaccaactcgttaatccgcatctacgggctgaaaatctttctcagcaccaaaggttatctgaacgagttcctgctgtggctgggggtgatcgagacgccgatccgcatcatgttcaccccgggcgcggtaattgtcggcctggtctatatcctgctgccgtttatggtgatgccgctctactccagcattgaaaagctcgataagccgctgctggaagcggcgaaagacctgggcgccagtaagttacaaacctttgtccgcatcattattccgctgaccatgccgggtattatcgccggctgtctgctggtcatgctgcctgcgatgggcctgttctacgtatcggacctgatgggcggggcgaaaaacctgctgatcggtaacgtgattaagagtcagttcctgaatatccgcgactggccgttcggctcggccaccagcataacgctgacggtggtgatgggactgatgctgctggtttactggcgtgcatcacgcctgctgaataagaaggtggagctggaatga

SEQ ID NO: 114838 - DNA, 792 bp, Enterobacter cloacae
atgatcggtcgactgcttcgcggcggttttatgaccgccatttatgcgtatctctatattccgataatcattttgatcgtgaactcctttaacagctcacgcttcgggatcaactggcaagggtttaccaccaaatggtatggcctgctgatgaacaatgacagcctgctacaggccgctcagcactcgctgacgatggcggtattctctgccaccttcgcgacgctgattggctcactgaccgccgtggcgctgtaccgctaccgttttcgcggtaagccgttcgtcagtggcatgctgtttgtggtgatgatgtccccggatatcgtgatggccatttcactgctggtgctgtttatgctgctgggcgtccagctcggtttctggtcgctgctgttctcgcatatcaccttctgtctgccgtttgtggtggtaaccgtctacgcgcgtctgaaagggttcgacgtacgcatgctggaagcggcgaaagatctgggtgcgagcgagatgaccattctgcgcaaaatcattctgccgctggcgatgcccgccgtggcagcaggatggctgctcagctttaccctgtcgatggacgacgtggtcgtgtcctccttcgtcaccgggccgagctatgaaattctgccgttgaagatctactcaatggttaaagtcggtgtttcacccgaagtgaacgcgctggcgactattctgttggtgttatcgctggttctggtaattgccagccaggttattgctcgtgataaaacaaaatctcaggggacacagaaatga

SEQ ID NO: 114839 - DNA, 1035 bp, Enterobacter cloacae
atgaaaaaaatgcttgccgctgcggcactggtgctcggaatgggcgccgcgcatgctgatgacagcaaaacgctctatttctacaactggaccgagtatgtgccgccgggcctgctggagcagttcaccaaagagacgggcatcaaggtgatctattcgacctacgagtcgaatgaaaccatgtacgccaagctcaaaacctataaagatggcgcgtatgacctggtggtgccgtcgacctatttcgtcgacaagatgcgcaaagaaggcatgatccagaagatcgacaaaacgaagctaaccaatttttcaaacctcgatcctgagatgctaaacaagccgttcgacccgaacaacgactactccattccgtacatctggggcgcgacggcaattggcgtcaacagcgatgccattgatccaaaaacggtttcatcctgggctgacctgtggaagccggaatacaaaagcagcctgctgttaaccgacgatgcgcgcgaagtgttccaggttgcgctgcgtaaactcggctattccggtaacaccaccgatccgaaagagatcgaagcggcgtataacgaactgaaaaagctgatgccaaacgtggcggcgttcaactcggataacccggctaacccgtatatggaaggtgaagtgaatctgggtatggtctggaacggctctgcgtttgtggcgcgtcaggccgggacgccgctggaggtggtctggccgaaggagggcggcatcttctggatggacagcctcgcgatcccggcgaatgcgaaaaacgtcgagggcgccctgaagctgatcaatttcctgctgcgcccggatgtggcaaaagaggtggcggaaaccatcggctacccgacgccaaacctggccgcgcggaagctgttaagccctgaagtggcaaatgataaatcgctttatccggacgctgaaaccatcagcaaaggggaatggcagaacgacgtcggtgacgcgagccgcctgtatgaagagtattatcagaagctaaaagcaggccgttaa

SEQ ID NO: 114840 - DNA, 822 bp, Enterobacter cloacae
atgctgtcgcgtcgccagggtcgactcagccgttttcgcaaaaataaacgccgcttacgtgaacgcctgcgtcagcggatctttttcagagacaggatgatgccagaagcgatggataaacccagagtggtggtgttgaccggggcggggatctccgccgaatccggtattcagaccttccgcgcggcggacggactgtgggaagaacaccgagttgaagatgtggcgacgccggaaggtttcgcccgcgacccggcgctggtgcaggcgttctacaacgcccgccgtcgccagcttcagcagccggagattgcgccgaatgcggcgcacctggcgctggcaaagctggaggaagcgctgggggatcgttttctgctggtcacgcagaacatcgacaatcttcacgaaagggccggaaaccacaacatcatccacatgcacggcgaactgctcaaggtgcggtgcgcatggagtggtcaggtgctggactggaaagaggacgtgctggacgaagaccgctgccattgctgtcagttcccttcgcgtctgcgtccgcatgtggtctggtttggcgaaatgccgctgggaatggatgagatctacagcgccctggccatggcggacgtctttatcgccattggcacttcgggacatgtctatccggcggcaggatttgttcacgaagcgcgactgcaaggtgcccatacggtggagcttaatctggagccaagccaggtcgggagcgagtttgaagagaaacattacggtctggcgagcgaggtggtgccagcctttgtggataaactcctgaaggggctgtaa

SEQ ID NO: 114841 - DNA, 912 bp, Enterobacter cloacae
atgtattacggatttgatattggcggcaccaagattgcgctcggcgtgttcgataaagaccttaagctacaatgggaaacccgcgtacccacgccgcgcgaaagctacgatgaatttttaaccgccattgccgcgctggtggcgcaagcggatgaacgctttggcgtcataggcagcgtcggcattggtattccgggtatgcccgaaaccgacgatggcacgctgtatgccgccaacgttcctgccgccagcggcaaaccgctgcgtgccgatctctctgctctccttgagcgcgacgtgcgcttagacaacgatgccaactgttttgctctctcagaggcctgggacgacgagtttcgtcgctatccgctggtgatgggtttgattctcggaaccggtgtggggggcgggatagtcattaacggtaagcccattaccgggcgcagctacattaccggcgaatttggtcatatccgtctgccggtggatgcgctggatgttgtcggacgtgatttcccgttgatccgctgcggttgtggtcagcacggctgtattgagagttacctttcaggccgtgggtttgcatggctttatgaacacttctatcatcagaaacatgacgccccccaaatcattaccctgtgggaacaaggggatgcgcaggcgcgagagcacgttgaacgctatctcgacctgctggccgtgtgcctggggaatatcctgaccatcgtcgacccggatctgctggtgatcgggggagggctgtcaaatttcactgcgattacggaacagttgtccgggcgtctgccccgacatttattgccggtcgcccgcgtgccgcgcattgagcgtgcgcgacacggggacgcaggaggcatgcgcggagccgcattccttcatctcaccgattag

SEQ ID NO: 114842 - DNA, 1245 bp, Enterobacter cloacae
atggcttcaccgttatcgttactcatcgggttacgctttagccgcggtcgtcgccggagcgggatggtatcccttatctccgtgatctccaccatcggtatcgccctgggcgtggcggtgttgatcgtgggcttaagcgccatgaacggctttgagcgtgaactgaataaccgcattctggccgttgtcccccacggtgaaatcgagccggctaaccagccgtggtccaactggcgtgatgcccttaacaaagtggaaaaggtgcccggcattgcggcggctgcaccttacatcaactttaccgggctggtagagagcggggtaaacctgcgcgccattcaggtgaaaggggtaaatcctcgtcaggaagagcgtctgagtgcgctgccgcgctatgtgcaaaatggcgcatgggcaaactttaaggctggcgagcagcagatcatcatgggcaaaggcgttgccgatgcgctgaaggtgaagcagggcgactgggtctcgatcatgatcccgaacgccagcgctgatcacaaattgcagcagcctaagcgcgtacgtctgcacgtcaccggtattttgcagctgagcggccagctcgatcacagcttcgcgatggtgccgctggaagatgcgcgccagtatctggatatgagcgacagcgtgacgggcattgccattaaggttaacgacgtcttcaacgccaataaactggtgcgtgacgctggcagcgtgaccaataactatgtctacatcaaaagctggatcggcacttacgggtatatgtaccgtgatatccagatgatccgcgcgattatgtatctggcgatggtgctggtgattggggtggcgtgttttaatatcgtctcgacgctggtcatggccgttaaggataagagcggcgacatcgccgtgctgcgtaccttaggggcgaaagacggtcttattcgcgccatcttcgtctggtacggtttgctggcggggctgtttggcagcctctgcggcgtggcgatcggcgtggtggtttcccttcagctgacgccgattatcaacgggattgaagcgcttattggccatcagttcctttcaggcgatatctattttattgacttcctgccgtctgaactgcactggctggacgttatttatgtgctggttacagcacttttactgagtctgctggcaagctggtatccggcgcgtcgcgcaagccgaattgatccggcgagggtattaagtggccagtaa

SEQ ID NO: 114843 - DNA, 702 bp, Enterobacter cloacae
atgaataagatcctgttgcagtgcgacaacctgtccaaacgctatcaggaaggcactgtgcagaccgacgtgttgcacaatgtgagttttagcgtgggtgaaggcgagatgatggcgattgtcggcagctccggttccggtaaaagtacgttgctgcatctgcttggcgggctggacacgccaaccgaaggcgatgtgatcttctccgggcagccgctgagtaaaatgtcgtctacggcgaaagccgagctgcgtaaccgcgagctgggctttatctatcagttccaccatctgctgccggactttacggcgctggaaaacgtcgcaatgccgctgctgattggtaaaaagaaacccgcggaaattaatgcccgcgccagcgacatgctaaaagcggtagggctgggtcatcgcgggaatcaccgtccgtctgagctttccggcggtgagcgtcagcgtgtggccatcgcccgtgcgctggtcaacaacccgcgcctggtgctggcggatgaaccgacaggtaacctcgatgcgcgtaacgcagacagcattttccagcttctcggcgaactgaacgccgcacagggaaccgcgtttctggtggtcacccacgatttacaactggctaagcggatggggcgtcagctggaaatgcgtgacggtcgtctgaatgctgaactgacgctgatgggagcggagtaa

SEQ ID NO: 114844 - DNA, 1161 bp, Enterobacter cloacae
atgcgtgggcgcgccgcggaccgcttcggtcgctttgtctcctggctttcgactattggcattacgcttggcgtgatggcactggtgacggtgctttccgtcatgaacggcttcgagcgcgagctgcaaaacaatatcctggggctgatgccgcaggccgttctctcttccactcagggttccgttaatccgcaacagctgccggaaagcgcggtgaagttacagggtgtcacgcgcgttgcgccgctcacgacgggcgatgtggtgctgcaaagcgcccgtagcgtggcggtcggggtgatgctgggtatcgatccggcgcaaaaagatccgctgacgccgttcctggtcaatgtgaaacaaaccgacctggaagcgggtaaatacaacgtcatcctcggcgagcagcttgccgggcagctcggggtcaaccgtggcgatcagctgcgcgtgatggtgccgtcagccagtcagtttacgccgatggggcgtctgccaagccagcgcctgttcaacgtgattggcacgtttgcggcgaacagcgaagtcgatggttaccagatgctggttaacattcaggacgcctcgcgtctgatgcgctacccggcgggaaatatcaccggctggcgtctgtggcttgatgcgccactgaaggtggatacccttagccagcagacgctaccggaagggacgaaatggcaggactggcgcgaccggaagggcgaactgttccaggccgtgcgcatggagaaaaacatgatggggctgctgctgagcctgatcgtggccgttgccgcgtttaatatcatcacctcgctcgggctgatggtgatggagaagcaaggcgaagtcgccattctgcaaactcaggggctgactccgcgccagatcatggcggtatttatggtccagggcgccagcgccggcatcatcggcgcgctgctcggcgcggcgctgggggcgctgctcgccagccagctcaacaatctcatgccgattattggcgcgctgcttgatggcgcggcgctgccggtggctatcgagccgctccaggtggtcggtattgcgctggccgcgatggccattgcgctgctctctacgctttatccttcctggcgggctgccgccactcaacccgctgaggctttacgttatgaataa

SEQ ID NO: 114845 - DNA, 1074 bp, Enterobacter cloacae
atgaaacaaaaagcattatggattaaccagataaaaggtctgtgcatctgcctggtggtgatttaccactcggtgatcactttttatcctcacctggacgggctacagcatccgttatcgggcctgctcgccaaatgctgggtctactttaatctttaccttgccccgttccgtatgccggtgtttttctttatctccggctatttgatccgtcgatatattgacgaggtgaactggcgcaccagtctcgacaagcggatctggggcattgtctgggttttggccctgtggggcgtcctgcaatggcaggcgctgactcatctgaatgcctggctcgcccccgagcgagagctggcgacagcatccaatgcggcctacgccgattccgtttcagggtttgtacggggaatgctcacggccagcactagcctgtggtatttgtacgccttagtggtctactttacgctctgtaagctgctgagccgctggaaactgccgatgctggggcttctggcgctggcaagcatcgccatcaacttcctgccgttaccgtggtggggaatgaacagcgtggtgcgcaacatggtctactacagcctcggcgcatggtatggcgcacagttgatggcgtggatgaaagggatgaatttgcgccgcagctggctgatcctcatcgcctctggtgcggtgtcggtggtgctgtggttcgctaatgtccctctgccgctctctctgctgtcaatcgtggttatcatgaagctcttttacagcttcgagcagcgttatgccgttcatcccaataatctgctgaacgtcatcggttcaaacaccatcgcgatatataccacccaccgcattttaatcgaggcatttagcctgctcctgatccgcgaaatgaatgcggcgtactggccgatctgggcggagttaacgctgattctggtttatccatttatcagcctgctcgtctgcacgctggttgggctgggggcacgtaagctctcgaccgccctctttggcgatcttttcttctcccctcccgcgcggttttcgcccgtgcccacgacccgctaa

SEQ ID NO: 114846 - DNA, 3447 bp, Enterobacter cloacae
atgcctgaacactatcgttactccttgcctgtcaaagcgggcgaccagcgccagctgggcgaactcacgggcgcggcctgcgccaccctggtggcggaaattgctgagcggcatccagggccggtggtgctggttgccccggacatgcaaaacgccctgcgcctgcacgacgaaattcgtcagttcaccgatagcctggtgttcagcctggccgactgggaaacgcttccctacgacagtttttctccgcaccaggagatcatctcttcgcgcctgtcgacgctgtatcagcttcccaccatgcagcgcggcgtgctgattgtaccggtgaacaccctgatgcagcgcgtctgtccgcacagctatttgcacggccatgcgctggtgatgaaaaaaggccaacgcctgtcgcgcgatgccctgcgcgtgcagctggacggagccggctatcgacatgtcgaccaggtgatggagcacggcgaatatgcgacgcgcggtgcgctgctggatctctatccgatgggcagcgatcggccatatcgtctggatttctttgatgatgagatcgacagcctgcgcgtgttcgacgctgacacccagcgcacgctggaggaagtggactccattaacctactgcccgcccatgagttcccgacggataaaaccgccatcgagctgttccgcagccagtggcgcgacaggttcgacgtgaagcgcgatgccgaacatatctaccagcaagtcagcaagggcacccttccggccgggatcgagtactggcagcccctgttctttaacgaaccgctgccggcgctgttcagctacttcccggcgaatacgctgattgttaacaccggggatatcgacgccagtgccagccgctttgaaagcgaaacgcgcgcccgctttgaaaaccggggcgttgacccgatgcgtccgctgctgccgcgggaaatgctgtggctacgtaccgacgagctcaacgccgagctgaaacgctggccgcgcatgcagctcaaaaccgacgcgcttgccgagaaggcggcgaacaccaatctcgcgttccggacgctgcctgatctggccgtccaggcgcagcagaaatccccccttgataatctgcgcaagtttcttgagtccttcaccgggccggtggtcttctccgttgaaagtgagggtcgccgtgaagcgctgggcgaactgctgggacggatcaaagttgcgccgaagcgcattcttcgcctgagcgaagcgaccggaaatggccgttacctgatgatcggcgccgccgagcacggattcattgatacgctcaataacctggcgttgatttgtgaaagcgacctgctgggcgagcgcgtcgcgcgccgtcgtcaggacagccgtcgcaccatcaacccggacaccctgatccgtaacctggccgaactgcaccccggtcagccgatcgttcacctggaacacggggtgggtcgctatcaggggatgaccaccctcgaagcaggcggcatcaaaggtgaatacctgatgctgacctacgccaacgacgccaaactgtacgtgccggtgtcgtccctgcacctgatcagtcgctacgccgggggcgcggaagacaacgcgccgctgcataagctgggcggcgatgcctgggcgcgtgcgcgccagaaggcagcggaaaaagtgcgcgacgtggccgccgagctgctggatatttacgcccagcgtgcggccaaagagggctatgcgtttaagcatgataaagagcagtatcagctgttctgcgacagcttcccgtttgaaactacgccggatcaggcccaggccattaacgccgtgctgagcgacatgtgccagccgctggccatggaccgcttggtctgcggtgacgtgggcttcggcaaaaccgaagtggcgatgcgtgccgccttcctggcggtggaaaacaacaagcaggtggcggtgctggtgccgactaccctcctcgcccagcagcacttcgacaacttccgcgaccgcttcgccaactggccggtgcgcattgagatgctgtcgcgttttcgcagcgccaaagagcagacgcaaatcctggaacaggcaagcgaaggcaaaattgatattctgatcggcactcacaagctgctgcaaagcgacgtgaagtggaaagatctggggctgctgatcgtggatgaagagcaccgcttcggggtgcgccataaagagcgcatcaaagcgatgcgcgccgacgtcgacattctgaccctgaccgcaacgccgatcccgcgcaccctgaacatggcgatgagcggcatgcgcgatctgtcgataatcgccaccccaccggcgcgccgtctggcggtgaaaacctttgttcgcgagtacgacaatctggtggtgcgcgaggcgatcctgcgcgaagtgctgcgcggcggccaggtgtattacctgtataacgacgttgaaaatattcagaaagccgccgacaggttggcagagctggtaccggaagcgcgcatcgccattggtcacggccagatgcgcgagcgcgagctggagcgggtgatgaacgatttccaccaccagcgtttcaacgtgctggtgtgtaccaccatcattgagaccgggatcgacattccaacggcgaacaccatcattatcgaacgtgcggatcacttcggcctggcccagctgcaccagctgcgcgggcgcgtcgggcgctcgcaccatcaggcctacgcctggctgctgacgccgcatccgaaggcgatgaccaccgacgcgcaaaagcgtctggaagctatcgcctcgctggaagatctgggtgctggctttgcgctggcgacccacgacctggagatccgcggcgccggtgagctgctgggtgaagaccagagcggctccatggaaaccatcggtttctcgctgtatatggagctgctggaaaatgccgtcgacgcgcttaaagccggacgtgaaccgtctctggaagatctcaccagccagcagaccgaagtggaactgcgcatgccttctctgctgccggatgattttattcctgacgtgaatacccgtctgtcgttctacaaacgcattgccagcgcgaaaagcgaaggcgagctggaagagatcaaagtcgaactgattgaccgttttggaatattgcccgatgcggcgcgcaacctgctggatattgcccgcctgcgtcagcaggcgcagaagctgggcattcgcaagcttgaaggcaatgagaaaggcggcgtcattgagtttgccgagaagaaccacgtcgatccgatgtggctgattggcctcctgcaaaaacagccgcagcatttccgtcttgatggcccgacgcgtctgaaattcactcaggatctgacggaacgtaaaacccgcatggactgggtgcgtaactttatgcgtcagctggaagagaacgccatcgcataa

SEQ ID NO: 114847 - DNA, 966 bp, Enterobacter cloacae
atgatgatttcttcgcgttttacccgctggttaactctgtttgcgctggccgcgacggttgccgtcgcgctccctgctcgcgcaaatacctggcctcttccgcctgccggcagcaacgtcgtaggtgaaaaccgctttcacgtggttgaaaacgatggcggttcgctggaagcgattgccaaaaaatataacgtcgggttcctggcgctgttgcaggccaacccgggcgtagatccatacgtgccccgggcaggcagcgtactgacgattccgctgcaaaccatcctgccggacgcgccgcgtcagggcattgtgattaacctcgccgagctgcgtctgtattactacccgccgggcaagaacgaagtgaccgtctaccctatcggtattggtcagttggggggcgatacgctcacgcctaccatggtcaccaccgtctctgataagcgcgctaatccaacctggaccccgacggcaaacattcgcgcccgttataaagctcaaggtatcgacctgcctgccgtggtgcctgctggcccggataatccgatggggcaccatgcgattcgcctggcggcatacggtggggtttatcttctgcacggaacgaatgcggatttcgggatcgggatgcgcgtcagctccggctgcattcgcctgcgcgatgacgatatcaaaacgctctaccgcgtgatcgcccctggcacgaaagtgaatatcattaatacgccgattaaagtgtctgaagagccgggtggcgtccgtctggttgagatccaccagccgctatcgaaaaacatcaatgacgatccgcagacgctgccgattaatctgaatgcctcgatggtgagctttaaaacgaatgccaataccgatggcgcggtgatggagcgggcgatggaagcgcgctcggggatgccaaccgatgtcacgcggcatcatgaggttgctcagcaatcaatgtaa

SEQ ID NO: 114848 - DNA, 258 bp, Enterobacter cloacae
atgaaaaacgttaaaaccctcatcgctgccgccgttctgagttcactctctttcgcaagcttcgctgctgttgaagtgcaatccacgccagcagaccagcagaaagtcggtactatctctgccactgccgggactaatctgggctctctggaagatcagctggcacaaaaagctgacgaaatgggtgcgaaatcattccgcatcacctctgtgaccggtcctaacaccctgcacggtaccgctgttatctacaaataa

SEQ ID NO: 114849 - DNA, 636 bp, Enterobacter cloacae
atgacaaccgatgtcacgcgttgcgcgaagaaaagccgtggccgaccaaaagtgttcgacagggatgcggcgctcgataaggccatgacgctcttctggcagcatgggtatgaagccacgtcgctttccgatctcgtggaagcaacgggcgcgaaagcccctaccctgtacgcagagttcaccaacaaagaaggcttattccgggccgttctggacagatacatcgcgcgcttcgcggcaaaacatgaagcccagctgttctgcgaagaaaaaacggttgagcaggcattgcaggattatttcacggcaatcgcgacctgctataccagcaaggacacgcctgcgggctgttttatgatcaacacctccgcgaccctcgcggcatcgtctaaagagattgccaacacggtcaaatcgcgacatgcgatgcaggaggagacgctcagcacgtttctggctcagcgtcagcagcgcggcgaaataccggcgcattgccgtccgcaggagctttcccagtatctgagctgtattttacaggggatgtccatcagcgcccgtgaaggcgcgacgctggaaaaattgcaggggattacgcaaacaacgctgcgcctgtggcctgaacttcttaaactctga

SEQ ID NO: 114850 - DNA, 540 bp, Enterobacter cloacae
gtgaataaatcaatgttggcgggtatagggattggcgtcgcagctgcgttaggtgtggctgccgttgccagtctgaacgtacttgatcgtggcccgcagtatgcgcaggtggtttccgctacaccgatcaaagagacggtcaagacgcctcgtcaggagtgccgtaatgtttctgtcacccaccgtcgtccggttcaggatgaaaaccgtatcgctggctccgtgctgggcgcggttgctggtggggtgattggtcatcagtttggtggcggccgtggtaatgatgtcgcgacggtggttggtgcgctgggtggcggttatgccggtaaccaggtacagggcgcgatgcaggaaaatgatacctacaccacaacgcagcagcgctgtaaaaccgtgtatgacaagtctgaaaaaatgttgggctacgacgtaacctacaaaattggcgatcagcagggcaaaatccgcatggataaagatcctggcacgcagatccctctcgacagcaacggtcagctgatactgaataacaaagtgtaa

SEQ ID NO: 114851 - DNA, 1305 bp, Enterobacter cloacae
ttgactacgccattgaaaaagatagtgattgtcggcggtggtgctggcggattggagctggcgacacagctgggtaagaagctgggtcgcggtaagaaagccaaaatcacgctggtggatcgtaaccacagtcatctgtggaagccgttactgcacgaagtggcgaccgggtcgctggatgagggcgtggatgcgctgagctatctggcgcatgcgcgtaaccaccacttccagttccagctgggttcggtggtggatatcaatcgtgaaaacaaaaccatcacgctggctgagctgcgtgatgataaaggcgagttgctggttcctgagcgcaagctggcctatgacacgctggtgatggccctgggcagtacctccaatgatttcaacaccccaggcgtaaaagagcactgcatcttcctggataacccgcatcaggcgcgtcgtttccatcaggagatgcttaacctgttcctgaagtacaccaataacatgggtgctaacggcaaggtcaacattgctatcgtgggcggcggcgcaacgggcgttgaattatcggcggagttgcacaatgcggtcaaacagctgcacagctacggctacaaagggctgactaacgaagcgctgaatgtgacgctggtggaagcaggtgaacgtattctgcctgcgctgccgccgcgtatttccggcgcggcgcacaacgagctgaccaaactgggcgtgcgcgtgctgacccagaccatggtgaccagcgcggatgagggcggcctgcataccaaagacggcgaatatatccaggccgacctgatggtttgggctgcggggatcaaagcgcctgatttcatgaaagatatcggtgggctggagacgaaccgcattaaccagctggtgacagagccgacgctgcaaaccacgcgcgatccggacatcttcgccattggcgactgtgcctcctgcgcacgtccggaaggcggatttgtaccgcctcgcgctcaggccgcgcaccagatggcaagcctcgtgctgcataacatcctggcgcagatgaaaggcaaaccgatgaaagcctatgtctacaaagaccacggctctctggtgtcgctctcaaacttctccaccgtgggcagcctgatgggtaacctgatgcgcggctccatgatggtggaagggcgcatcgcccgcttcgtgtacatttctctgtaccgtatgcaccagattgcgctgcacggctacttcaaaaccggcctgatgatgctggttggccgcatcaaccgcgtgatccgtccacgcctgaagctgcactaa

SEQ ID NO: 114852 - DNA, 543 bp, Enterobacter cloacae
atgatcatttatttacacggttttgactcaaacagtcctggtaatcatgagaaagtgctgcaattgcagtttatcgatccggatgtccggctgatcagttacagcacacgtcatccgaagcatgacatgcagcatctgcttaaagaagtggataaaatgttgcagctcaatatcgacgatcgcccgctgatctgcggcgtggggttaggaggatactgggcagagcgcatcggttttttgtgcgatatccgtcaggtcatttttaatcctaacctctttccgaacgaaaacatggaaggcaaaatcgatcgcccggaggagtacgccgacatcgcaactaaatgcgtgagcaatttccgtgaaaagaaccgcgatcggtgtcttgtgatcctctcccgcaacgatgaagcgctgaacagctcccgcgccgccgagcttctgcaccattactacgaaattgtctgggacgaagagcagacccacaagttcaaaaacatttccccgcacttgcagcgtattaaagcctttaaaacgctgggctga

SEQ ID NO: 114853 - DNA, 1026 bp, Enterobacter cloacae
gtgggtccagtaatgttggatgtcgaagggtttgagctggatgcggaagagcgcgaaattctggcgcatccgctggtaggggggctgattcttttcacccgcaattatcatgatccggagcagttgcgtgagctggttcgccagatccgtgcggcgtcgcgcaatcacctggtggtggccgtagaccaggaaggtgggcgtgtgcagcgtttccgcgaagggtttacccgtttacccgccgcgcaatcttttgctgcgctgctggggatcgaagagggcggtcaactggcgcaggacgccggctggctgatggccagcgagatgatcgccatggatatcgacatcagcttcgccccggtgctggacgtaggacacattagcgcggcaattggtgagcgttcgtatcatgacgatccgcgtattgcgctggcaatggcgacgcgctttattgacggtatgcatgctgcgggcatgaaaaccaccggcaaacatttcccgggccacggggcggtgacggcggattcccataaagaaaccccgcgcgatccgcgcccggaagcagacattcgcgctaaagacatgtcggttttccgctcgctgatcgctgataacaagctggatgccatcatgcctgcgcacgtcatctacagtgaggtcgatccgcgtccggccagcggctctccacactggctgaaaaccgtactgcgtcaggaattaggcttcaatggcgtaattttctctgacgatttatccatggagggggcggcaattatgggtagctatgccgaacgtgggcaggcttcgctggatgcgggttgcgatatgatcctcgtctgcaataatcgtaaaggggcggtgagcgtgctggataacctgtcgccgatcaatgctgaacgtgttacacaattgtatcataaaggttcatttagtcgtcaggagctgatggactcggcgcgctggaaaacggtaaacgcccggcttgaagccctgaacgagcgctggcaggcacataaagcagccctttaa

SEQ ID NO: 114854 - DNA, 825 bp, Enterobacter cloacae
gtgccgttacgcaacaataagcgcacgcgtcatgacgtcctgacgcgttatttccctcagtaccgtgttatcgcgccgcaagcccccgccgggcttggcggcgcgagttgcattattgagcgtggcgaccatcggctggttttacgtcagcatcacgatgccgccgcgcctgcctcccattttcgtcgccagttccgcgccctgaagcgcctgcccgccgaccttgcgccacaacctcatctctttatcagagactggatggcggtggcgtttattgcgggtgagatcaaaagcgagcttcccgatacgcctgcgcttgcagccatgctgtatcatctgcatcgccagccgcgtctgggctggcgggtaacgttacttcctttgctggatcactactggcagcaggctgcgcctggacgacgcacgccctactggctggcgcagcttaagcggctacgcagagcgggagagccgcaggcgttacgtctggcgccgctgcatatggatgtccacgcgggtaatatcgttcataccacggcaggcgagaaacttatcgactgggaatatgccggagacggtgacgtggcgctcgaactcgctgcggtctggatgcctgatgaggcgtcgcgcgagcagctgataaccgcctatgcccgaaacgccaacatcaatgcgctcacccttgcgcggcaggtcgcgcgctggcgtccgtgggtgttgatgctgatggcgggatggtttgaaatgcgccttcagcagacagatgacaaacaatttattgcgctggcaaatgatgcctggcgtcagttacaaacgaaaggataa

SEQ ID NO: 114855 - DNA, 648 bp, Enterobacter cloacae
ttgattaaaacaatgagccgttatgcgctcctgagtgcttttgcactctttctggcgggttgtgtgacgcgaacggaagaaccagcaccggtagatcaggcgaagccgggaacggaacagccaacaacgccagcgcagcctgttccaaccgtgccgtctgtaccgaccattccggcgcagcctggcccgatcgaacatccggacgacaccgcacagcctgcgccgcgagtacgccactatgactggaacggcgcaatgcagccgatggtgggcaaaatgttgcaggcacagggcgttacgcccggtagcgtgctgctggtggacagcgtgaacaaccgtacaaacggttccctgaatgcgggagaagcgacggaaaccctgcgcaacgcgctggcaaacaacggtaaatttacgctggtctcagctcagcagctcgcggtcgccaagcagcagcttggtctgtcgcctcaggacagcctgggttcgcgcagtaaagcgatgggtattgcccgcaacgttggcgcgcagtatgtcctttattctaacgcgacaggcaacgtgaacacgccgtcgttgcagatgcagttaatgctggttcagaccggcgaaattatctggtcaggtaaaggtgccgttacgcaacaataa

SEQ ID NO: 114856 - DNA, 375 bp, Enterobacter cloacae
atgttaactgggcgtattgcagcgctgatcgtgacgctggtaatggttgggtgcagcgcgcgtcccgccatcccggtcagtgaagaacagacgctggtgatggagtcctcagtgcttgctgcgggcatcacggcggagaaaccttcgctgaccataagcgaaatccagtcttcagcctcctctacgctctataacgaaaggcaagagccagtgacggtgcattatcgcttctactggtatgacgtgagaggtcttgagatgcacccgcttgaggcgccgcgcagcgtgactatcccggcaagatcgtcagtcacgctctacggcagcgccagctatctgggtgcacataaggtgagactttatctttatttgtaa

SEQ ID NO: 114857 - DNA, 360 bp, Enterobacter cloacae
atggctgaagaaacgattttcagtaaaattatccgccgagaaattccgtcggatattgtctatcaggatgaactggtcacggctttccgcgacatttctccccaggcgccgacgcacatccttattattcccaatattctgatcccgaccgtcaatgacgttaaaaccgagcatgaagtggcgctgggccgtatgcttacggtggccgcgaaaatcgcagagcaggaagggattgctgaagacggataccgtctgatcatgaactgtaatcgccatggcggccaggaagtctatcatattcatatgcatctgctgggtggacgtccactgggaccgatgctggcacataaaggtctttaa

SEQ ID NO: 114858 - DNA, 405 bp, Enterobacter cloacae
atgatgtctttcattaatcacaccagggatgggcaacgtcagcctgctgcaacaccttcgttgctggccgcctgcattgctatggcattgacgccaaccgccgctttcgctgcttcaaccaccgaagataccgtcgtcgtagacgggggttttgacaacacacaggatctttctgccagccaggatcaggattacagcgtaaaaaccaccaccaccggcaccaaactgttgctggttccccgcgacatcccacagtccgtcagcgttatcagccagcaacgtatggctgaccagaatctgcaatccatcggacaggtgctgacgaataccacgggcattacggcccaggtgcaggacagcgaccgtaccgtgttttactcacgcggctttttcgtcagcaactag

SEQ ID NO: 114859 - DNA, 1755 bp, Enterobacter cloacae
gtgtggaactttggtgataccgccgcggataccgcgatttatgaccgcatcgaagtggttcgcggcgccaccggcctgatgtccggcacgggcaacccggcggcgtacgttaatatggtgcgtaagcacgcggacagcccggaatttaaaggtaacgtctccgccagttacggcagctgggacaagcagcgctacgtgctggatctccaggcgccgctggtagagtcaggtaaggtacggggccgtctgattaccggttatcaggacaacgacagcttcgtggataactaccactaccggaagaaattcctctacggtgtgatggacgcggatgtcaccgacagcaccaccctctcggtagggtatgagtatcaggaaagccataccgccgacccaacctggggcgggctgccgacctggtacagcgacggaagtaagacccactacaatcgcagccagactgtcgcacctgactgggcttattcagttaaagacagcacccgcatcttcgctaacctgactcagcgtttcgataatggctgggaagcgcacatcaacggcatgcatgctgaaaccaacttcgactccaaactgatgtatatgtccggctatccggataaagagaccgatgcgggcctggtgggttacggcggctggaaccgtggggaacgtaaacaggatgcggttgacgccttcctgcgcggcggcttcgatctctttggccgtcagcacgaaatgatgttcggcggcagcttcagccgtcagcgtaaccattacgacaactccatgccggatgcggtatacggcatggttgatgtcggcaactttaagaactggaacgggaacatcgccgatccccagtggacgccgtggaaactctacagcaaggatgatattcgccagtcttcagcctattcgtcggctcgtttctcgctggccgatccgctgcacctgatcctgggcgcgcgctacacccaatataacattcgttataacccggcaggatcgccgaatacccgtctggaaagcaccaaagatgatgtcacgccgtacgccggcctggtgtatgacatcaatgaggactggtcgacctacgtcagctatacctctatcttccagccgcaggataagcgcgacgccagcggacgttatctcgaccctaccacgggtaaaagctacgaagccggggtgaaggcggactggtttaatacccgcctcaccacctcgctggcgattttccgcattgagcaggataacgtcgccagcaacacctatacctacatgccgagcggtgagtcgatctatgaatcgctggacggggtggtcagcaaaggggtcgagttcgagctcaacggtgccctgaccgataactggcagctgaccttcggcgcgacgcgttacatcgcagaagataagaatggaaacgccgtcagcgccgatcagccgcgcacaaccatgaagctcttcacccgctatcagttgccaatgctgccggaactgaccgtgggcggcggcgtaaactggcagaacaaagtgtggacggacgtggaaggcggcccggcaggacgttcccgcgcggagcaaggcagctatgggctggtgaacctgttcagccgttatcaggtcaccaaagattttgcggtgcaggctaacgtcaacaacctgttcgacaaagagtattacgattacgtcggttcttatgtagtgtatggcgcgccgctgaacgtctcggtgagcgcgagctacgatttctga

SEQ ID NO: 114860 - DNA, 1434 bp, Enterobacter cloacae
atgtttaagaatgcatttgctaacctgcaaaaggtcggtaaatcgctgatgctgccagtatccgtactgcctatcgcaggtatcctgctgggtgtcggttctgcaaacttcagctggctgccagccgtagtttcccacgtgatggccgaagcaggcggttctgtttttgctaacatgccgctgatcttcgctatcggtgttgctctgggcttcaccaataacgacggtgtatccgcgctggcgtccgttgttgcttacggcatcatggtgaaaaccatggctgtggttgcgccgctggtactgcatttacctgctgaagagattgccgctaagcatctggcggacaccggtgttctcggtggtatcatctccggtgcgattgcagcgtatatgtttaaccgcttctatcgcatcaagctgcctgagtatctgggcttcttcgcgggtaaacgttttgtgccgatcatttctggtctggccgcgattttcaccggtgtggttctgtctttcatctggccaccaatcggtacagcaatccagacattctctcagtgggcggcttaccagaacccggttgtggcgttcggtatctacggcttcattgagcgctgcctggtaccatttggtctgcaccacatctggaacgttccattccagatgcagattggtgaatacaccaacgcagcaggccaggtgttccacggcgacatcccacgctacatggcgggtgacccaacggcaggtaaactgtctggtggcttcctgttcaaaatgtacggtctgccggccgccgcaattgcgatctggcactctgctaaaccagagaaccgtgcaaaagtgggcggtatcatgatctccgcagcgctgacctcgttcctgaccggtatcaccgagccgatcgagttctccttcatgttcgttgcgccgatcctgtacatcatccacgcggtactggcaggtctggcattcccaatctgtatcctgctgggtatgcgtgacggtacgtccttctctcacggtctgatcgacttcatcgttctgtccggtaacagcagcaagctgtggctgttcccaattgtgggtgcgggctacgcagtggtgtactacaccgtcttccgcgtgctgatcaaagcactggacctgaaaacgccgggtcgtgaagatgcaacggaagacagcaaagccggtgtgaccagcgaaatggcgcctgctctggtagctgctttcggcggtaaagagaacatcactaacctggacgcgtgtatcactcgtctgcgtgtgagcgttgccgacgttgcgaaagtagaccagccgggtctgaaaaaactgggcgcagcgggcgtcgttgttgcaggttctggtgttcaggcaatcttcggtacgaaatccgataacctgaaaaccgaaatggatgagtacatccgcaacaactaa

SEQ ID NO: 114861 - DNA, 795 bp, Enterobacter cloacae
atgtttttagtcgactcacactgccatctcgatggcctggattatcagtccctgcataaaaatgtggacgacgtgctggcgaaagccgccgcgcgcgatgtgaaattttgcctggccgtggcgaccacgttgccgggttaccgcgccatgcgtgaactggtaggcgagcgcgataatgtcgtcttctcctgcggcgtgcatccgctgaatcaggatgaagcatacgacgttgaggatttacgccgtcttgccgcagaagagggcgtagtggcgatgggcgagaccggtctcgactatttctacaccccggaaacgaaacctcgccagcaggaatccttccgcaaccatatccgtattggccgtgaactgaataagccggttatcgttcatacccgcgatgcgcgtgccgacacgctggcgatcctgcgggaagaaaaggtgacggattgcggtggcgtactacactgtttcactgaagacagagaaacggcgggtaagctgcttgatttaggcttttatatctcgttttcggggatcgtcacgttccgcaatgccgagcaactgcgtgatgcggcgcgctatgttccgctggatcgtattctggtggaaaccgattcaccgtacctggcgccggtgcctcatcgcggcaaagagaatcagccagcgatgacccgggatgtcgctgagtatatggccgttctgaaaggtgtcagtattgaagagctggctcgcgtgacaacggaaaacttcgccagtctgttccatatcgaccccgcccgcctgcaatctgtctga

SEQ ID NO: 114862 - DNA, 1005 bp, Enterobacter cloacae
atgaaatggtatccatggttgcgcccacactttgaacagctgatcggcagctatcaggttggtcgggggcatcatgcgttactgatccaggcgctgccgggaatgggtgatgatgcgttgatttacgccatcacccgctttctgatgtgccaacagccggaaggacataaaagctgcggtaaatgccggggttgccagctcatgcaggcgggcacgcatcctgactattacaccctcgaacccgagaagggcaaaaatacgctcggtatcgacgcggtgcgtgaggtcagtgagaaactgtacgaatatgcgcgtctggggggggcgaaagtggtgtggctgaaagacgccgcgctgctcacggaagccgcagccaacgccctgttaaaaaccctggaagagccgccagagaatacctggtttttcctctcctgccgcgagccggaacgcttgctggcgacgctgcgcagtcgctgccgtcttcaccacctcgctgtccctcaggaatcctgggcgctcgcctggcttgagcgagaagtgacggtgtcacaagatgcggcgcgctcggcgttgcgcctgtgcagcggtgcgcctgcggctgcgctggccttattgcagccggaagtgtggtctcagcgtgaaacgctgtgtcgtgcggttgaatcagccctcgacagccatgactggctgagcgtgctgccagcgctgaacagcgatcaggctccggaacggctacactggctggccgcactgctgctggatgcgctcaaaatccagcagggggcgacgcttctgactaaccctgacgtgtgggcgctggtcaccacgctggcgaatcgcctgtcagggcagtcgctgcacgctatccttcatgatatctgccagagccgtgaacaacttttgacagtgaccggtctcaatcgcgagcttttactgaccgaccagttactgcgtatcgaacactacctgcaaccgggcgtcataccgccggtttcccacctctga

SEQ ID NO: 114863 - DNA, 642 bp, Enterobacter cloacae
atgcgcagtaaatacattgtcattgagggactcgaaggggcgggcaaaacaactgcccgtaacgtggtggtggatacgcttacgtcgcttggcgttgccgacatggtctttacccgcgagccgggcggtacgcagctggcggaaaaactgcgcagcctggttctggatatcaaatccgttggcgatgaagttattaccgacaaagcggaagtgctgatgttctatgcggcgcgcgttcagctggtggagacggtgatcaaacccgctctcgcagaagggaaatgggtgatcggcgatcgccacgatctctcaacccaggcgtatcagggcggtggccggggtatcgaccagaccatgctggctacgcttcgcgacgcggttctgggcgatttccgtcctgacctgacgctgtatctggacgtgacccctgaggtgggcctgaagcgcgcccgtgcccgcggcgaactggaccgcattgaacaggagtcttttgatttctttaaccgcacccgtgcgcgttatctggaactggccgggcaggacaagaccattcgtaccatcgatgcgacgcaatcccttgaagacgttacgcgtgatattcagcagaccgttacgcagtggctacaggagcagcaggcatga

SEQ ID NO: 114864 - DNA, 1023 bp, Enterobacter cloacae
atgaagaaaatgttacgctttgtcctccttcttatcgttgcgttcggtatcgctggcggagcgggagtgtggaaagtccgtcagctggcggagagtcagattctgataaaagatgagacgatttttaccctgaaagcggggaccgggcggcaggcgcttggtcagcagctgtatgacgacaaaattatcaatcgcccacgcgtattccagtggctgctgcgtattgaaccggacctgtcccatttcaaggccggcacctatcgctttacccctggcatgaccgtgcgcgagatgctgcaactgctggagagtggtaaagaagcccagttcccgctgcgttttgtggaaggtatgcgtctgagcgattacctcaggcagctgcgggacgcgccatacattaagcatacgctgaaagatgaccgctaccagaccgtggcagacgccttaaaattcgaacatcccgagtgggtggaaggctggttctggcccgatacgtggatgtatacggcaggcacgacggatgtggccattctgaagcgcgcgcacaacaaaatggtcgcggcggtagacgctgcctggaaagggcgagcagagggcctgccttataaagatcaaaaccagttcatgacgatggcctcgatcatcgagaaagagacggccgttgctgccgaacgtgaccaggttgcctcggtgtttattaaccgtctgcgcatcggcatgcgtttgcaaaccgatcctaccgtcatctacggcatgggcgaaaactacaacggcaggatttccagaaaagatctggagacgccaacggcgtataatacctacgtgattagcggcctgccgcctggaccgatcgcgacgccgagtgaagcatcgttgaaggccgccgcgcacccggccaaaacgccgtatctctattttgtggctgacggaaaaggggggcatacgtttaataccaacctggccagccacaatcgctccgttcaggactatctgaaggcacttaaggaaaaaaatgcgcagtaa

SEQ ID NO: 114865 - DNA, 810 bp, Enterobacter cloacae
atgtttttaattaatggccttgagcaagaaacgctgccggcaagcgacagggcgacccagtttggcgatggctgtttcacgactgcgcgtattctcgacggtggcgtgtgtctgctcggggcccatatccttcgtttacaaaaagcctgcgaagcactactgatccctttctcgcagtgggacattcttgaaagtgaaatgcgtcggctggcgtcagataaagcaagcggcgtcctgaaagtcattattagccgcgggagcggtggccggggctatagcggttctgcctgtctgcatcctacgcgggtcctttccgtttcagattatccttcccattatgcgcactggcgtgaagagggcgtagccctggcgttaagtccggtacgtctggggcgaaacccgatgctcgctggcataaaacatctcaaccgccttgaacaggtgcttattcgtactcatcttgagcagacggaggccggggaggcgctggttcttgacagcgaagggtacattacggaatgctgtgcggctaatttactctggcggaagggcagtgacgtgttcacgccttcgctggagcaggccggcgtcaacggcattatgcggcagttttgtctgcaccagctggcacgcgcaggctttcgcgttgtcgaagtcaacgctaaggaagaggcgctgctgtctgccgatgaagtcgtaatctgcaatgcgctgatgcccgttgtccccgttcgcgcttatggccgcaaatgctggtcatcccgcgagctgttccagtttctggccccgttatgtgagcaaaccaggtag

SEQ ID NO: 114866 - DNA, 1242 bp, Enterobacter cloacae
gtgtctaagcgtcgtgtagttgtgaccggacttggcatgttgtctcctgtcggcaataccgtagagtccacctggaaagctctccttgccggtcagagcggcatcagcctaatcgaccatttcgatactagcgcctatgcaacgaaatttgctggcttagtaaaggattttaactgtgaagagatcatctcgcgcaaagaacagcgcaagatggatgccttcattcaatatggaattgtcgctggcgttcaggccatgcaggattctggccttgagattacggaagagaacgcgacccgtatcggcgccgctatcggctccgggattggcggtcttggtctgattgaagaaaaccatacatctctgatgaatggcggcccgcgtaaaatcagcccgttcttcgttccgtctacgattgtcaacatggtggcaggtcacctgaccattatgttcggcctgcgtggcccaagcatctcaatcgcgacagcctgtacgtctggcgtgcataacatcggccaggccgcgcgtatcattgcgtacggcgatgcagatgctatggttgcgggcggcgctgaaaaagccagtaccccgctgggcgtcggtggcttcggtgcagcgcgtgcgctctctacccgaaacgataatccgcaggcggcgagccgtccgtgggataaagaccgtgacggcttcgtgctgggtgacggtgcaggcatgatcgtactggaagagtacgaacacgcgaaaaaacgtggcgcgaaaatttatgctgaagttgttggctttggcatgagcagcgatgcttatcacatgacgtctcctccagagaacggcgcaggcgctgcgctggcgatggaaaacgccattcgcgatgcgggcattacgccggcacagattggctacgttaacgcgcacgggacgtctacccctgcgggcgataaagcagaagcgcaggctgttaagtctatcttcggcgaatctgccagccgtgtgctggtgagctccacgaaatccatgaccggtcacctgctgggtgctgcgggggcagtagagtcaatctactctattctcgcgctgcgcgatcaggctgtaccgccaaccatcaacctggataatccggatgaaggttgcgatctggacttcgttcctcacgaagcgcgccaggttagcggtatggagtataccctgtgtaactccttcggcttcggtgggactaacggttctctgatcttcaaaaaggtctga

SEQ ID NO: 114867 - DNA, 237 bp, Enterobacter cloacae
atgagcactatcgaagaacgcgttaagaaaattatcggcgaacagctgggcgttaagcaggaagaagttgtgaactccgcttcctttgttgaagacctgggcgcagattctcttgacaccgttgagctggtaatggctctggaagaagagtttgatactgagattccggacgaagaagctgagaaaatcaccaccgttcaggctgccattgattacatcaacggtcaccaggcgtaa

SEQ ID NO: 114868 - DNA, 735 bp, Enterobacter cloacae
atgagttttgaaggaaaaattgccctggtgaccggcgcaagccgcggtattgggcgcgctattgctgaaacactggttgcgcgcggcgcgacggtgatcgggactgcgaccagtgagaatggcgcacaggccatcagcgactatctgggtgcgaacggtaaaggtctggtactgaatgtgactgaaccagcatctatcgaatctgttctggaaaatattcgcgcagagtttggcgaagtggatattctggtcaataatgccgggatcactcgcgacaacctgctgatgcgaatgaaagacgacgagtggaacgatattatcgaaaccaacctgtcatctgtattccgtctgtcaaaagcggtaatgcgcgctatgatgaaaaagcgtcatggtcgtattatcactgtaggttctgtggttggtaccatgggaaatgctggtcaggctaactacgctgcggcgaaagcaggtctgatcggtttcagtaagtcgctggcgcgtgaagtcgcgtcccgcggaattactgtaaacgttgttgctccgggctttattgaaacggacatgacgcgtgcgctgactgatgagcagcgtgcgggtacgctggcggcagttccggcgggtcgtcttggcgaccctaaagaaatcgccagcgcggttgcatttttagcctctgacgaagcgggttacatcactggtgaaaccctccacgtcaacggcgggatgtacatggtttaa

SEQ ID NO: 114869 - DNA, 930 bp, Enterobacter cloacae
atgacgcaatttgcttttgtgttcccgggacagggctcgcaaactgttgggatgttgtctgaaatggcagcaaactatccggttattgaagagactttccgtgaagcctctgacgcgctgggttatgatctgtgggcgctgacccaacagggccccgctgaagagctgaacaaaacctggcaaactcaaccggcactgctggcagcctccgtcgcattgtggcgcgtatggcagcagcagggcggcaaagcgccgacgctgatggcgggtcatagcctgggtgaatactctgcgctggtctgcgcaggggtgattgccttcgctgacgcggtacgcctggttgaattgcgtggtaaattcatgcaggaagcggtgccagagggcacgggcggcatgtctgccatcatcggtctggatgatgcttctatcgctaaagcctgtgaagaatctgctgaaggtcaggtcgtttctccggtaaactttaactcgccaggccaggtggttatcgcgggtcataaagaagcggttgagcgtgcaggcgctgcctgtaaagctgcgggcgcaaaacgtgcactgcccctgccggtgagcgtaccgtctcactgcgcgctgatgaagcccgctgccgataagctggcggttgagctggaaaaaatgacctttaacgcaccgacgatttccgttgtgaataacgtcgatgtgcagtgcgaaaccgcgccggaggctatccgtaacgcgctggttcgccagctctacagcccggttcagtggactaaaaccgttgaatttatggcgtctcagggcgttgaacatctgtatgaagttggtccaggtaaggtacttaccggtctgacaaaacgtattgtagacaccctgactgcctcggcgattaacgagccggaagccatgaaagcggcactctcgcaataa

SEQ ID NO: 114870 - DNA, 954 bp, Enterobacter cloacae
atgtatacgaagattttaggtaccggcagctacctgccaaaacaagtgcgtaccaacgccgatcttgaaaaaatggtagatacgtctgacgagtggattgtcacgcgcacaggtatccgtgaacgtcgtatcgccgcgccagacgaaactgtgtccaccatgggctacgaagccgctcagcgagcgcttgagatggctggcattgataaagaacagatcgggcttattgtggtggcgacaacctctgccacgcatgccttcccaagcgcagcgtgccaggtgcagaacatgctcggcatcaaaggctgcccggcatttgatgttgcagcagcgtgcgcgggtttcacctatgcgctgagcatcgccgatcagtatgtaaaatcgggcgccgtaaaatatgcgctggtgatcggcgctgatgtgctggcgcgtacctgcgatccgaccgatcgcggcacgatcattatttttggcgatggcgcgggcgcggtgctgctggggcagtccgaagagccgggcatcatctccacgcacctgcatgccgatggccgctacggcgagctgttaacgctgcctaacgccgatcgcgttaatcctgataactccatttacctcaccatggcaggtaatgaagtattcaaggtggcggtgactgagcttgcgcatattgtcgatgagacgctggaagccaataaccttgaacgcaccgcactcgactggctggtgccgcatcaggcgaacctgcgtatcatcagcgcgacggcgaagaagctgggcatgtctatggataacgttgtggtgacgcttgatcgccacggcaacacctctgcggcatcggtaccgtgcgcatttgacgaagcggtacgcgatggacgaattaaacggggccaactggtcttgcttgaagcctttggtggcgggttcacctggggttccgcgctggttcgtttctag

SEQ ID NO: 114871 - DNA, 777 bp, Enterobacter cloacae
atgcgaatggcgctggagctggtgaaagaagggcgagcgcaggcttgcgtcagcgcgggaaatactggcgcgctgatggggctgtcgaaattattgctcaagccgattgagggcattgagcgtccggcgctggtgacggtattaccgcatcagcagaagggcaaaacggtggtgctggatctgggcgctaacgtggattgtgatagtacaatgctggctcagtttgccgttatggggtcggtgctggctgaagacgtggtcgggattaataatccccgcgttgctttactgaatattggtgaagaagagactaaaggcctggacagtatccgcgacgctgcggaaatactcaaacaggtcccctccatcaactatattggttatctcgaagccaatgagttgctgacgggcaaaacggatgtattagtgtgtgatggcttcaccggaaacgtgacgttgaagaccatggaaggggtcgtacgaatgttcctttctctgctgaaatcgcagggagaaggtaaaaaaaggtcctggtggctgattttattaaagcgttggttacaaaaaagcctgacgcggcgattcagtcacctcaaccccgaccagtataatggcgcctgtctgttaggattgcgcggcatcgtgattaagagtcatggcgccgccaatcagcgagcatttaccgtcgcgattgaacaggcagtgcaggcggtgcagcgacaagtccctcagaggattgccgctcgcctgggatctgtattagctaaaagtgactga

SEQ ID NO: 114872 - DNA, 174 bp, Enterobacter cloacae
atggccgtacaacagaataaaccaacccgttccaaacgtggcatgcgtcgttcccatgacgcgctgaccgcagttaccagcctgtctgtagacaagacttctggtgagaaacacctgcgtcaccacatcaccgctgacggtttctaccgcggccgcaaggttatcactaagtaa

SEQ ID NO: 114873 - DNA, 522 bp, Enterobacter cloacae
atgcaaaaggtaaaattacccctgactcttgatccggttcgtacggctcaaaaacgcctcgattacgaaggaatctattcttccgatcaggctgagcgtattgccgaatctgtagtcagtgtggacagtgatgtagaatgctccatgtcgttcgctatcgacaaccagcgtctcgccgtgttaaccggtgatgcaaaggtgacggtaacgctcgaatgtcagcgttgcgggaaaccgtttgtacagcatgttcacacaacgtattgttttagtccggttcgttctgacgaacaggctgaagcactcccggaagcgtatgagccgattgaggttaacgaattcggtgaaatcgatcttctggcgctggttgaagatgaagtcatcctctccctgccagtcgttccggtgcatgattctgaacactgtgaagtgtccgaggcggacatggtctttggggaactgcctgatgaagcgcaaaaaccaaacccatttgccgtattagccagcttaaagcgtaagtaa

SEQ ID NO: 114874 - DNA, 543 bp, Enterobacter cloacae
atgctgctggaaaagctcgggatcccgtttgaatgcgctgcgccggaggtggatgaaacgccacagccgggcgagtcaccgcgtcatctggtgacccgtctcgcgaaagagaaagcacagtcgctggccgtacgttaccccgcacatctgattataggctccgatcaggtttgtgtgctggacggcgaaatcaccggcaaaccgcatacggaagaaaacgcctgccagcagctgttgcgtgcgcgaggcggtatcgtgaccttttataccggcctggcgctttataattcggcttccggtcatctgcaaaccgagtgcgagccgtttgatgtgcacttccgtcatcttagcgagcaggagattatggattatgtgcgtcgggaacgtccgctaaactgtgcagggagctttaaaagtgaaggactagggattgcgttgttcgacaagctcgatggccgcgatcccaacacgctggtggggttgccgctgattgcgctgtgccagatgttgaggcgagaagagtgtaatccgctgacgatgtga

SEQ ID NO: 114875 - DNA, 921 bp, Enterobacter cloacae
atggttgccatcgccgacgacgaggcggggcaacgtatcgataattttttgcgcacccagttgaagggcgtgccaaaaagtatgatttatcgcatcttgcgtaagggcgaggtgcgggtgaacaaaaaacgcgtgaagccagagtataagctcgaggcgggcgatgaagtccggatcccaccggtacgtgttgcagagcgtgaagaagaggtcgtttctccgaagctgcaaaaagtcgcggccctgagcgacgttatcctttatgaggacgaccacattctggtgctgaataaaccgtccggaacggcggtacacggggggagcggtctgagcttcggcgtgattgaagggttacgcgcgctgcgcccggaagcgcgtttcctcgaactggttcaccgtcttgaccgcgatacctctggcgtgctgctggtggcgaaaaaacgttctgcgctgcgttcactgcatgaacagctgcgcgaaaaagggatgcagaaagattacctggcgctggtgcgcggccagtggcagtcccacgtgaaagtggtgcaggcgccgctgctgaaaaatattctgcaaagcggcgagcgcattgttcgtgttaatcaggaagggaaaccgtctgagacgcgctttaaagttgaagagcgctacgaattcgccacgctggtgcgctgtagtccggtgacggggcgtacccaccagattcgcgtccatacccagtttgcgggccatccgattgcgtttgatgaccgctatggcgatcgcgaatttgataagcagctggcgggaacagggctgtcgcgtctgttcctgcacgcggcagcgctgaaatttacccatcctaataccggcgaagttatccgtattgaagcgccgctggatgagcagctcaaacgctgtctgaaagttctgcgcggctaa

SEQ ID NO: 114876 - DNA, 3117 bp, Enterobacter cloacae
atgaaaagaatgttaatcaacgcaactcagcaagaagagttgcgtgtcgcccttgtggatgggcagcgcctgtacgatctggatatcgaaagtcctggacacgaacagaaaaaagcgaacatttacaaaggcaaaatcacccgcattgaaccaagccttgaagctgcatttgtcgattacggtgctgagcgtcacggtttccttcctctcaaagaaatcgcccgcgaatattttcctgcaaactacaactcccatggccgtccgaacattaaagatgttctgcgtgaaggtcaggaagttatcgtccagatcgataaagaagagcgtggcaacaaaggtgccgcactgaccacctttatcagcctggcaggaagctatctggtattgatgccaaacaacccgcgtgcgggtggcatctctcgccgtatcgaaggcgatgaccgtaccgagctgaaagaagcgctggcaagtctcgagctgccagacggcatgggccttatcgtgcgcaccgcaggcgtcggcaaatctgccgaagcgttgcagtgggacctgagcttccgtctgaagcactgggaagccatcaagaaagcggctgagagccgtcctgctccgttcctgatccaccaggaaagcaacgttattgtgcgtgccttccgtgattatctacgtcaggacatcggtgaaattctgattgataacccgaaagtgcttgagctggctcgccagcacatcgccgcgctgggtcgcccggatttcaccagcaaaattaaactgtacaccggtgaaatcccgctgttcagccactatcagattgaatcccagatcgagtctgccttccagcgtgaagtgcgtctgccgtccggcggttctatcgtaattgataccaccgaagcgctgaccgctatcgacatcaactccgcgcgtgcaacccgtggcggcgacatcgaagagaccgccttcaacaccaaccttgaagccgctgatgaaatcgcccgccagctccgcctgcgcgacctgggtggtctgattgttatcgacttcatcgacatgaccccggttcgccatcagcgtgcggttgaaaaccgtctgcgtgaagcggtgcgccaggatcgcgcacgtatccagattagccatatctcgcgcttcggcctgctggaaatgtcccgtcagcgtctgagcccgtcactcggcgagtccagccatcacgtctgcccgcgctgttccggtacgggtaccgtgcgtgacaatgaatcgctctccctctctattctgcgtctgattgaagaagaagcgctgaaagagaacaccaaagaggttcacgccatcgttccggtgccgattgcctcctacctgctgaacgaaaaacgtgcagcggtaagcgcaatcgaagcgcgtcagggcggcgttcgctgcatcatcgtgccaaacgacgagatgcaaaccccgcactatcacgtgctgcgcgtgcgtaaaggcgaagagacaagcaccctcagctacctgctaccgaagctgcatgaagaagaaatggcgctgccatcggatgaagagcctgccgagcgtaaactgcctgagcagcctgcattagcaaccttcatcatgccggaagccccgccggaagcgacgctggaaaaaccagcggcaaaacctgccgtgcaaaaggcggcccctgctgcgccaaaagcgcagcctgagcagccgggtctcctgagccgcatcttcggcgcgctgaaaaaaatgtttgctggcgaagaagttcagcctgagcagccgaaagaagcgccaaaagaagcgaaaccagagcgtcagcaggaccgtcgtaagcgtcagaacaatcgtcgcgatcgtaatgaccgcaacgaccgtagcgatcgtaacgagcgccgtgataatcgttccgagaacaacgaaggtcgtgaacaacgcgaggacaaccgtcgcaaccgtcgcgagaagcaacagcagaacgttgaagatcgtgaaattcgccagcaggcgggcgatgagtccgagaagagcaaacagcgtgacgagcagcaacctcgccgcgagcgtaaccgtcgtcgtaacgacgagaaacgccaggcccagcaggaagtcaaaaacctgaaccgcgaagcgcctgttgaacagcaggacacggagcaggaagagcgtactcaggttatgccgcgtcgtaagcagcgtcagctgacccagaaagtacgtgtgggtgctgttcagacggaagaaaacgacgttatcgcggttgaagcagcagaaagcacaacgggtacccaggtcgcgaaagttgacctgccagccgtagtggaaaatcaggttgagcaggacgaaagcagcgaaaaccgtgacaacgcaggtatgccgcgtcgctcccgtcgttctccgcgtcacctgcgcgtgagcggccagcgtcgtcgtcgctaccgtgacgagcgttacccgactcagtcgccaatgccgctgaccgtggcgtgcgcgtcacctgagatggcatccggtaaagtctggatccgttatccggttgctcgcccggagcaggctgttgaagaacaggctgtgaccgaagaggtgattgcaccggtagcagcggtggaagacgtcgtgactgaagcagcaaccgtggttgaaccgcaggttgttgacacggtggcaccgcaggctgtggaagttgaaacgacccatcctgaagtcattgctgcgccggttgatgccgccccgcagatcattgccgaagaagataccgtggtggctgaagaagtcgcggaggaagctgagccggtctccgcagcagaagaacccgcagacgttaccgtcgaaacggtgacggaagaggttgttcaggacgtcgagattcaggttgagcctgttgtcgaagaggtcaaagaggctgaagtgaaatccgagccggttgaggtcgttgccgctccagcgcctgctcacgttgctaccgcgccgatgactcgcgccccggcacctgagtatgtacctgaagcgccacgccatagcgactgggttcgtccggcattcaacttcgaaggcaaaggtgctgccggtggtcacagtgcaacgcacatggctactgcgccagcgacccgtcctcagcctgttgaataa

SEQ ID NO: 114877 - DNA, 954 bp, Enterobacter cloacae
atgggtaaaaatggtatgaaaaggtctgagcgtatagatcgggtagaactgatgcgaacgtttgttcgcattgtggaggcggggtctctttctgcggcggcacgtcagctggcaacaacccaggccacggtgagccgacggttgcagtcgcttgagaccatgctgggagtacgcctgatgctgcgcacaacccatacgacccggctgaccgatgacggcgaacgctgctatcagcatgcccgacgggtgattgacagctggctggcgctggaagacgaggtagggcagacggaagatgaaccggttggggtgctgagggtgcgcgccccgcacgcgtttggccaggatcagcttctgaaaccgttaaccgaatttttacagcgctatccccagctttctgttgagtggatgctcaacgatcgctcggttgatttcctcggcgacaaccttgactgtgctattcgggtgggtgtggaagtcgatccggcaaccgtgtccgtgctgctggctgaagtgccgcgctcggtggtggcttcaccggaattactggcccgttatcccgcggttaaaacgccggaagatttgcagcagcttccctggattgccatcagctctttttatcaacgtcatgtggagcttttcctcgatgcatcatctgccccggcgcgggttaccattacgccacgcctgagtaccgacagcctgtatgtggcgcgcaatacggcactcaccgggctgggcgtggcggtggtatccagctggacagtacaggatgatattcaggaaggacgactggtgcatctactgccagagtggcagccggcagcgttaccggtacatctggtttacccctggtctcgttattatccggcgcgcttgcggcgttttctggagctgatgcggcagataatgccggaggtcaccggaatgagaaagcccctgcaacagccataa

SEQ ID NO: 114878 - DNA, 1212 bp, Enterobacter cloacae
atgaacacaaccaccacccgggccgtaagccgctgggtaatcttaatgctggcgctcggtgcgggctttagcgtggcatccatctattatgcccagcctctgctgccgctgatgggctcagacctgcatctgagcatcgaaggcatgggcatggtcccgacgctcacccaggcgggttatgccctgggcatcctgtttctgctcccgctcggcgatcgtcatgaccgcagaacgctgatcctgataaaaagtgcggccctggcgctgttcctgctgggttgtagcctgaccggacaactgcactccctgctgctcaccagcctgctgattggcatggccgccaccatggcgcaggatattgtcccggccgcagcgatcctcgcgccggaaggtaaacagggaaaaacggtcggcacggtgatgaccggcctgctgctggggattttgctctccagaaccgtcagcggcgtggtcggtgaagcctttggctggcgggtgatgtatcagctggctgctgcaagcattgcctttgtcggcgtggtgatgtgggccgtactcccacgttttgctattcactccacgctgagctatcccgcgctgatgcgttccatggagcacctgtggcgtcgttacccggcactgcgtcgcgcggcgctggctcagggttttctgtcgattgcctttagcgcattctggtcaacgctggcggtcatgctgctggaacggtatcaccttggcagcgccgtagcgggtggatttggtattgccggagccgctggtgcgctggctgcaccgctggcagggggtctggcagataagctgggcgccggtaaagtgacccagctgggtgccgcgctggtgaccctctcgtttgccctgatgttcctgatgccggcactgggtgtacacggtcagttgatcctgattgccctctcagcggtcggtttcgatctcggcttgcagtccagcctcgtggcccaccagaacctggtctacagccttgagccgcaggcccgcggacgcctgaacgccctgctgtttaccgtcattttcatcggaatggcgctgggttcggcattaggcagcaatatctatacgctggcaggctggtctggcgtggtggctctggcaaccctgtgtggtgccattgcgctggctatcagagtgattgaaagcgcccgggtgctgtccgcacaggcagaaagtgtgtaa

SEQ ID NO: 114879 - DNA, 954 bp, Enterobacter cloacae
atgcgtattagtactcaaatgatgtatgagcaaagcatgcgcggcgtgacgaactcccaaagtctctggctcagctacggcgagcagatgtctacggggaagcgtatcaaccgtccgtctgacgatccgattgccgcctcgcaggccgttgtgctctctcaggctcaaacgcaaaacagccagtatgcgctggcacgctccttcgctacgacgaaagtctcgctggaagagaacgtgttatcgcaagtgacaaccgccatccaggctgctcaggaaaagattgtcaatgcgggcaacggtacgttaagtgacgatgaccgcgcttcgctggccacaaacctgcaaggtattcgcgatcagctcatgaacctggctaacagcacggacggtaacggtcgctatattttttccggttacaagaccgaagcggcggctttcgaccaggcgacgggtgattataagggcggcggaacgccaatcagccagcaggttgactccgcgcgcacgatgcaaattagccatacgggcactgaagttttcgatagcttcaccagcaatgccaagccagagccagatggtagtgcgccggaaacgaatttgttcaagatcctcgactccgcaattgaagcgttgaatacgccgattggggaggacgaaacgaaagccgaggcgtttacggcggctattgataaagccaaccgtggcctgagcaactccctcaacaacgtgctgaccgtgcgcgccgacctcggcatcaagctggatgagctgggcaagctggacgctctgggtgaagaccgcgcgctgggtcagacgcagcagatgagtaacctggttgacgtggactggaactcggtgatttcgtcctacaccatgcagcaggcggcgttgcaggcctcgtataaagcctttagcgatatgcagggtatgtctttgttccagatgaacaaataa

SEQ ID NO: 114880 - DNA, 1641 bp, Enterobacter cloacae
atgtccagtttgattaacagcgccatgagtggcctcagtgctgcgcagtcggcactcaataccgtcagtaataatatttcaagctacaacgtggcaggttatacccgccagaccaccattctgggggcatcaaacagcaccctgaccggcggtggctgggtgggtaacggggtctatgtctccggtgttcagcgtgaatatgatgcgtttatcaccaaccagctgcgcgcggcgcagaaccagagcagtgggctgaccacgcgctaccagcagatgtcaaaaattgacgacgtgctttctgataccacgaactcgctttctgccaacctccaggatttctttaaaagcctgcaaacgctggtgagtaacgcagaagatccggctgctcgccagacggtactcgggaaggcggatggtctggtaaaccagtttaaaaccaacgatcaatatctccgcgatcaggatgcgcaggtcaatacggcgatttctaccagcgtcgatcagatcaataactacgcgaaacagattgccaatcttaacgatcagatctcccggctgactggcgtcggtgcgggcgcatccccgaatgaactgctcgatcagcgcgatcagctggtgagtgaactgaacaagattgtcggtgtggacgtcaccgtacaggacagcggcacctacaacatctctatcgccaacggttacaccctggtacagggcagcaacgccagccagctggcggcggtgaaatccagtgcggacccagcgcgtacaacaattgcgtatgtggataccgcagcgggcaacgtggagatctcagaaaaacagatcaccacggggtcgcttggggggctgttaacgttccgttctcaggatctggatcaggcgcgaaacacccttaaccagatggcgctggcgtttgcggatgccatgaatacccagcaccaggctggctttgatgccaacggggatgcaggcggcaagctgtttgattttggctcgccggcagtgctgagtaacggtaaaaacaccggaagcgcgtccgttacggccacgatgacggacagtacaaaggtccaggcgacaaactataaagtcgagtacaacggtactgactggacaatcacgcgtctgtcggacaacaccagcttcacggccaagcctgacgccagcggtaatctgtcgtttgatggtctcaacgttaagattagcggctcagccgataataaagacagtttcatcgtcaaaccggtgaatgacgtcattgtcaatatggacgtagcgatcagcgacgaatccaaactggcgatggcctccgcgaaaggaagcggtgaaagcgacaataccaatggccagaagctgctggatttacagagcgccaaattggtgggagggaacaaaacctttaacgatgcttatgccgcgctggtcagtacggtgggcagcaccacggcgtcgctgaaaaccagcagcgaaaccaaagttaacgtggtgacgcagctgaccaaacaacagcagtcaatctccggggttaacctggatgaagagtatggcaacctgcaacgctatcagcagtactatctggcgaatgcgcaggtgctgcaaacggcgagcacgctgtttgatgcattgatcaatatccgctaa

SEQ ID NO: 114881 - DNA, 954 bp, Enterobacter cloacae
atgctgaccgatagcaaactgttgaccagtgccgcctgggatgcccagtcgctcaacgagctgaaaaccaaagcgggcaaggatccggcggcgaatatccgcccggtggcccgtcaggtggaaggcatgttcgtacaaatgatgttgaaaagcatgcgtgaaaccctgccgaaagatggcatgttcagcagcgattccacgcggctttacaccagcatgtacgatcagcagattgcccagcaaatgaccgccggaaaggggctcggcctggcggacatgattgtgaagcagaccgcagccgctcaggggctcccgcctgaagaggccccgccgcaggtgccgctgaagtttgatctggaaaaggtgaccagttatcaaaatcaggcgctgacgcagatggtgcgtaaggcgatgccgaagccggcagaaacgcgtgacgagccgctctccggcgacagcaaagacttcctggcgcagctctccctgccggcgcgtcttgccagtgaagagagcggcgtgccgcaccatctgattctggcgcaggcggcgctggagtcgggctgggggcaacgtcagatccgcagggagaacggtgagccgagcttcaacatctttggcgtgaaggccacctccagctggaaagggccgaccaccgagatcaccaccaccgaatatgagaacggtgcggcagtgaaggtgaaagccaaattccgcgtctacagctcgtatctggaagcgttgtcggattatgtcgggctgctgagccggaatccgcgctacaccgccgtgacccaggccgccacgccagagcagggcgctcaggcattgcagaatgctggctacgcgaccgatccaaactatgcgcgcaagctgaccagcatgatccagcagctgaaatccatgtctgagaaggtcagcaaagcgtatagcacagatctcgaaaatctgttctga

SEQ ID NO: 114882 - DNA, 1098 bp, Enterobacter cloacae
atgtataaatttctcttcgccgtggcgctgtcgctggtcgctaccgttgcgcaggccgatcgcatacgcgatctcaccagcgtgcagggcgtgcgcgaaaactcgctgattggctacggcctggtggtggggctggatgggacgggtgaccagacgacccagacgccgttcaccacccagagcctgaacaatatgctctcgcagctcggtattaccgtaccggccgggaccaacatgcagctgaaaaacgtggcggccgtgatggtgaccgcgtcttatccggcctttgcgcgtcaggggcagaccatcgacgtggttgtctcgtcgatgggtaacgccaaaagcctgcgcggcggtacgttgctgatgacgccgctgaaaggcgtcgacagccaggtgtatgctctggcgcagggcaacattctggttggcggagcaggcgcgtcggcgggcggcagcagcgtgcaggtgaaccagctgaacgggggacgtattaccaacggcgcgatcatcgaacgtgagctgccgacccagttcggcaccggcaacaccattaacctgcaactgaataacgaagactttacgatggcgcagcagatcgctgacaccatcaaccgcagccggggctacggcagcgccaccgcgctggatgcccgtaccgtgcagatccgcacgtcaaccggcagcagcaaccaggtgcggttgctggccgatatccagaatatggaagtgaacgtgccggtgcaggatgcgaaagtcattatcaactcccgtaccggctcggtggtgatgaaccgcgaagtgacgctggacagctgcgccgtggcgcagggcaatctctccgtcacggttaaccgctcggccaacgtcagccagccggataccccgtttggtggcggtcagacggtagtgaccccgcaaacgcagattgatttacgacagagcggcggttcgttgcagagcgtgcgctccagcgccaacctgaacagcgtggtgcgtgctctgaatgcgctgggtgcaacgccaatggatctgatgtccattctgcaatccatgcaaagtgcaggctgcctgcgcgccagactggaaatcatctaa

SEQ ID NO: 114883 - DNA, 699 bp, Enterobacter cloacae
atgcaaaaaaacgcggcgtttcgttatccgatcctgactgttctggccgtcaccctcagcgggtgtgcctggatcccgtctaaaccattggtacagggtgcgactaccgcccaacccgttcccggccccgcgccggtggtgaacggctctattttccagaccgcgcagccgattaactacggttatcagccgctgtttgaagaccgtcgtccgcgtaacgttggcgatacgctgaccattgtgttgcaggaaaacgtcagtgcgagtaagagctcgtcggcgaacgccagccgcgatggcaaaaccaattttggcttcgacaccgtgccgcgctatctgcaagggctgttcggcaacgcccgtgcggatgtggaagcctccggcggcaacacctttaacggtaaaggtggtgcgaacgccagcaacaccttcagcggaacgctgacggttacggttgaccaggttctggtgaacggcaacctgcacgtggtgggcgaaaaacagatcgccattaaccagggtacggaattcattcgcttctccggtgtggttaaccctcgcaccatcagcggcaccaataccgtaccgtccacccaggtggcggatgcgcgcattgagtacgtcggcaacggctacatcaacgaagcgcaaaatatgggctggctgcaacgcttcttccttaacttatcgccgatgtaa

SEQ ID NO: 114884 - DNA, 783 bp, Enterobacter cloacae
atgatcagttctttatggatcgcgaaaaccggtctggacgcacagcaaaccaatatggatgtgattgccaacaacctggcaaacgtcagcaccaatggtttcaagcgccagcgtgcggttttcgaagatttgctttatcaaacgattcgtcagccaggggcgcagtcttctgagcaaaccacgctgccgtccggtctgcaaattggtaccggcgtgcgcccggtcgccaccgagcgtctgcacagccagggcaacctgtcccagaccaacaacagtaaagacgttgccattaaaggtcagggtttcttccaggtgcagctgcctgacgggacctccgcctatacccgcgatggttcgttccaggtggatcagaacggccagctggtgacggcgggcggtttccaggttcagcctgcgatcaccataccggcgaacgcgctgagtatcaccattggtcgtgacggcatcgtcagcgtcactcagcaaggtcaggccgcgccggtccaggttggacagctcaacctgaccaccttcatgaacgataccggactggaaagcatcggcgagaacctctacaccgaaacgcagtcttccggcacgccaaatgaaagtaccccgggcctgaacggggcggggctgctgtatcaggggtatgtggaaacctcgaacgttaacgtggcggaagagctggtgaatatgatccaggtccagcgcgcctatgaaattaacagtaaagcagtgtcgacgaccgaccagatgctgcaaaaactgacgcaactctaa

SEQ ID NO: 114885 - DNA, 756 bp, Enterobacter cloacae
atggatcacgcaatatatacagcgatgggcgcagcaagccagacgctcaatcagcaagctgttaccgccagcaaccttgcgaacgcttccacgccaggttttcgtgcgcagctcaacgcgctgcgtgcggtgccggtagaagggctgtcattgcccacgcgtacgctggtcaccgcctccacgccgggcgccgacatgacgccaggtcagatggattacaccgcgcgtccgctggacgttgcccttcagcaggacggctggctggcggtgcaaacggctgacggcggggaagggtatacccgcaacggtaatatccaggtgagcgccaccgggcagctgacgattcaggggcatccggtgatgggcgaagccggtccgttgacggtgccggaagggtcagagctgaccattgcggcagacgggacgatctcggcgttaaacccgggcgacccggcgaacaccgttgcgcctgtcggtcgtctgaagctggtgaaagcggaaggcaacgaagtgcagcgtggcgatgacgggatgttccgtctgacccaggcggcgcaggccacgcgtggcgccacgttacaggccgacccgaccatccgcgtgatgtccggcgtgctggaaggcagtaacgtcaaaccggtggaagccatgaccgacatgatcgccagcgcccgccgcttcgaaatgcagatgaaaatcatcagcagcgtcgatgaaaacgcaggcaaggctaaccaacttctggctatgagttaa

SEQ ID NO: 114886 - DNA, 1209 bp, Enterobacter cloacae
atggccttttctcaagcggtcagcggcctgaatgctgcggccaccaacctggacgtcattggcaacaacatcgccaactccgcgacctatggttttaaatccggttctgcgtcttttgcagatatgtttgcaggctctaaagtgggcctgggcgtgaaggttgcgggtatcacccaggacttcaccgacgggacgaccaccaacaccggtcgcggtctggacgtcgccatcagccagaacggtttcttccgtatggtggatgccaacggttccgtgttctacagccgcaacggccagttcaagctggatgaaaaccgtaacctggtgaacatgcaggggcttcagttaaccggttatccggttgccggcacgccgcctacggtgcaaaccggtgcgaatccgcaggcgatctccatcccaacgacgctgatggcggcgaagtccaccaccacggcctctcagcagatcaacctgaactccaccgataccgcgccaaccgtcgccttcgatccgtccaaccctgactcttacaacaagaaaggcaccgtgacggtgtttgacagtcagggtaatgcgcacaacatgaacctgttttatgtcaaaaacgagacgccagctaactcctggaaagtgtattcgcaggacggcagcgtagcgggagatgcagcgaaactggcaaccacgctgacctttaacgagagtggtgtgctgacgggtggcgatgatatcaagatcacaacgggcaccgttccgggcgcgacgccagccacgtttgacatgagtttcgccaactccatgcagcaaaacaccggtgcgaacaacatcgtggcgacgagccagaacggctataagccgggcgatctggtgagctaccagatcaacgatgacggtaccgttgtcggtaactattcgaacgaacagacccaggtgctgggccagatcgtactggcaaacttcgccaacaacgaaggcctgaaatccgaaggggataacgtctggtctgccacgcagtcttccggggttgccctgctgggaaccgcgggttccggtaacttcggcacgctgactaacggcgcgctggaagcctccaacgtcgatctgagtaaagagctggtgaacatgatcgtcgcgcaacgtaactaccagtccaacgcgcagaccatcaaaacccaggatcagatcctcaacacgctggttaacctgcgttaa

SEQ ID NO: 114887 - DNA, 711 bp, Enterobacter cloacae
atgtccatcgccgtaaacgtgaatgacccgacaaataccggcgtcaacagcaccagcagtgcgaccggttccagctctctcaccgggagcaatgcctccgatttacagagtagctttctgaccctgctggtggcgcagctgaaaaatcaggatccgaccaatccgatgcagaacaacgaactgaccacgcagcttgcgcagatcagtaccgtcagcggcattgagaaactgaacaccacgctcggctcggtctccggtcaaatcgataacagccagtccttgcaggccgccaacctgatcggtcacggggtgatgatcccggggaccacgattctggcgggcaccagcactaccgatggcacgtccaccaccaccacgacgccgtttggcgttgagttgcagcagccggccgacaaagtcaccgccacaatcaaagacgccagcggcaatgtggtgcgcacgattgagattggcgagcttaaagcgggcgttcatacctttacctgggatggcagcctgaccgacggcactaaagcgcctaacggctcgtatcaggttgcgattagcgccagcaacggcaccactcagctggtggctcagccgctacagtttgccctggttcagggcgtcatcaaaggtagcgatggcaacaaactggatttgggtacctccggtaccaccacactcgacgaagttcggcagattatctaa

SEQ ID NO: 114888 - DNA, 405 bp, Enterobacter cloacae
atggccttgctgaatatttttgatatcgccggttcggcattaacggcgcagtccaaacgactgaacgtggccgccagtaacctcgccaacgccgacagcgtgaccggccctgacgggcaaccgtatcgcgctaaacaggttgtcttccaggttgatgctgcaccgggtgcggcaacgggcggcgtaaaagtggcggacgtggttgagagccaggcacccgacaagctggtttacgagcctggcaacccgctcgcggatgccagcggctacgtgaaaatgccgaacgtggatgtggtcggggagatggtgaactccatgtccgcgtcgcgcagctaccaggcaaacgtcgaagtgcttaataccgtgaagagcatgatgctcaaaacactcactctcggccagtaa

SEQ ID NO: 114889 - DNA, 417 bp, Enterobacter cloacae
atgctcgataaactcgacgccgcgttacgttttcagcaggaagcgctcaatttacgcgcccagcggcaggagattttagccgccaatatcgccaacgcggatacccccgggtatcaggcgcgcgatattgatttttccagtgaactcaaaaaagtgatggagcgtggacgtgccgaaggaacgggtgtctcactggccctgacatcctcacgtcatattcccgctcaggcgatgaccgcgccaacgaccgacctgctttaccgtattcccgatcagccctcacttgatggcaataccgtcgacatggaccgggagcgcacacagtttgccgataacagcctgcaataccagacaggtctgacgctactcggcgggcaaattaaaggcatgatgaccgtcctacaggggggcaattag

SEQ ID NO: 114890 - DNA, 660 bp, Enterobacter cloacae
atgcggacttttaaacgtggcctggcggcgaccctactgcttttaagccctctggtgcaggctgaggggttagaggaccagctcaatgcattctttgcgcagaaactggccggtttcagcgatgacgtacgcgtgaccgtgcgctccccgcctaacctttacccttcctgcgaagccccgtcatttagcgtgaccggcagcacccgcttatggggcaacgtgaacgtgctggcgcgttgcgccaatgaaaaacgctacttacaggttgcggttcaggcgacgggcaattatgttgtcgccgccgttcccattccccggggcagcctgctgcaacctgacagcgtaacgctgaagcgaggccgtctggatcagcttccaccgcggacgatgctggatatcaaccaggctcaggaggcggtcagcctgcgcgatgtcgctcctggacaggcgatacagctatccatgctgcgccaggcgtggcgggtgaaagcgggacaacaggtgatggtggtcgccaatggcgaaggctttagtatcaacagtgaaggaaaagcgctgaataatgccgcagtggcgcaaaatgcccgggtcagaatgtcctcaggccaggtggtcagcggcacggtcggtcctgatgggaatattctgattaacctgtaa

SEQ ID NO: 114891 - DNA, 294 bp, Enterobacter cloacae
atgagcattgatcgtacatcagccctgaagccggttagcactgtacaacctcgcgaaacgaatgaggctgccccgcaaaaaacgcgtctggaaaaaacgtcgacggctaacagcaccagcgtcacgctgagcgatgcgcagtcgaagctgatgcagccaggcagcagcgatatcaatatggaacgtgttgaagcgctgaaaacggctatccgtaacggcgaactgaaaatggataccagcaaaatcgctgatgcgctgattcaggacgcacagagtttcctccagagtaactaa

SEQ ID NO: 114892 - DNA, 426 bp, Enterobacter cloacae
atgagtcgactgtcagaaatactggatcagatgacggtggtcctgaacgacctgaaaacggtgatggatgcagaacagcaccacctctcttctggtcaaatcaacggcagcgcgttgcaacgcataactgaagataaaagctcgctgctggcgaccctggattatctggaaaaacagcgacgcgctgagcaagacgcgaaacgcagcgccaatgatgagatcaacgaacgctggcagaccattacagaaaaaacccagcatcttcgcgatcttaaccagcataacggctggctgctggaaggacagattatccgtaatcagcaggcgcttgaagtgttaaagccctataaagagccggggctgtacggtgcggatggtcagacggccacggcacgtatcacgggtgggaaaaagatttcgatttga

SEQ ID NO: 114893 - DNA, 1536 bp, Enterobacter cloacae
atgaacttattaaaatcgctggcggccgtcagctcgatgaccatgttttcccgcgtgcttggctttgcgcgcgatgccattgtggctagggtttttggcgccgggatggcgactgacgcctttttcgtcgcctttaagctgccaaacctgctgcgccgtatttttgccgaaggggccttttcacaggcatttgttccgatcctcgcagaatataaaagcaaacagggcgaagatgccacccgcgtctttgtggcctacgtttccggattactgacgctggcgctggcgatcgtgaccgtcctggggatgctggcagcgccctgggtgatcatggtgacggcgccgggttttgctgacacagcggataaatttaccctgaccacccaactgctgcgtataaccttcccctatattctgctgatttcgctggcgtcgctggtgggtgccatcctgaatacctggaaccgcttctccgttccggcctttgcccccacgttcctcaacgtcagcatgattggctttgcgctgttcgccgcgccgcattttaacccaccggtgctggcgctggcctgggccgtgaccgtcggcggcgtgttacagcttgcttaccagcttccgcacctgaaaaaaatcggcatgctggttctgccgcgcattaatttcaaagatgcgggcgcaatgcgcgttatcaaacagatgggaccggcgatactcggcgtgtccgttagccagatctcgctgatcatcaataccatcttcgcctctttcctggtgtcgggctcggtgtcctggatgtactacgccgatcgtctgatggagtttccatccggggtgctgggcgtggcgctggggactattctgctgccgtcgctgtcgaaaagtttcgccagcggcaaccacgatgaatactgccgcctgatggactggggcctgcgtctctgttttctgctggcgctgccaagcgcggtggcgctggggatcctggcgaaaccgctgacggtgtcgttgttccagtatggaaagttcaccgcctttgatgccgctatgacccagcgtgcgctcgtagcctactcggtggggctgatggggctgattgtcgtgaaggtgcttgcgcccggtttctattcacgtcaggacatcaaaacgccggttaagattgccattgtgacgctgatcatgacgcagctgatgaacctggcgtttattggaccgctgaaacacgcggggctgtcattgtcgattggtctggcggcctgtctgaacgccgggctgctgtactggcagctgcgcaagcaggatatcttcacaccgcagccgggctgggcaagcttcctgctgcgtctggcgattgcggtagtggtgatggcggccgcgctggttggcatgttgtatgtcatgcctgagtgggcgcagggcaccatgccttaccgcctgatgcgtctgatggccgtggtggtggtcggtgtggtggcgtactttgccacgctggcggtgcttggcttcaaagtgaaagagttcacccgccgcacggtataa

SEQ ID NO: 114894 - DNA, 924 bp, Enterobacter cloacae
gtgacaacattacgcattggtgttgtggggctgggagggatcgcgcaaaaagcctggctgcccgttttaggcgccgcgtccgactggacgctgcaaggggcgtggtcgcccacccgcgagaaagcagagcgcatctgcaaaacctggcgcatcccttatgccggttcgctacaggatttagcccgtgaatgtgatgcggtatttgtgcatacctcaaccgcgacgcactaccaggtggtgagcgagttgctgaacgcaggcgttcacgtctgcgtggataaacccctggcggaaaatgtacaggatgctgaacgactgattgagctggccgcgcgtaaaaagctgacgctgatggtcggcttcaaccgccgttttgcgccgctctatcagcagcttaaagcgcagtccggctcgttcgcctctctgcgtatggataagcaccgtaccgacagcgtggggcctaacgacctgcgcttcacgctgctggatgattatctccacgtcgtggatacggccctgtggctgagtaacggaaaagcccagctgcaaagcggcacgctgctgaccaacgagcagggtgagatggtttacgccgaacatcattttgccgttgagcatttgcaggtgacgaccagcatgcatcgtcgggcgggcagccagcgcgagtccgtgcaggccgttacggatggcgcgctgtatgacgtcactgatatgcgagagtggcgggaagagaagggcaatggcgtggtcgcgttaccggttcccggctggcaaagcaccctggagcagcgtggctttgtgggctgcgcgcgtcacttcatcacctgcgtgcagaatcagacggttcctgaaacgtccggggagcaggctattctggcgcagcgcattgtggaacgactctggcgcgaagccatgtcggaataa

SEQ ID NO: 114895 - DNA, 651 bp, Enterobacter cloacae
atgaaatatcagttaaatggcgccgaagcgcgcgtggtcggctgccttctggaaaagcaggtcaccacgccggaacagtatcctctgtccgtgaattccgtcacgatggcctgcaaccagaagacgaaccgtgagccggtgatgaaccttggcgagcacgaggtgcaggatatccttgatgagctggtgaagcgccactacctgcgcaccgtcagcggcttcggtaatcgcgtcactaaatatgaacagcgcttttgtaattccgaatttggcgatttaaaactcagtgccgcggaagtggcagtgatcaccacgctgctgctgcgcggggcgcagacgccgggtgaactgcgcacgcgcgcctcccgcatgcatgagtttcaggatatgcaggacgttgaacagacgctggagcgattagcctcacgcgaggacggtccttacgtggtgcgtctgccacgcgagccgggcaagcgtgaaagccgctacatgcacctttttagcggcgacgttgagccctctgggctggccgtagaatccgacacgccagcatcaaacgacagcctgaacgcgcgcgtggcggccctggaagacgaggttgccgggctgaagcagcgtctggatgcgttactcgcacatctgggagattaa

SEQ ID NO: 114896 - DNA, 585 bp, Enterobacter cloacae
atgtttggctatcgcagtaatgtgccaaaagtgcgtctgacgacggacaggctggtcgttcgtctggtgcatgagcgtgatgcctggcgtctggcggattattacgccgagaatcgccagtttttaaaaccctgggaacccgttcgggacgagagccactgctacccctctggctggcaggcgcgcctcagtatgattgcggaatttcataaacagggaagtgcgttttatttcgcgcttctcgatccggaagagaaagagatcgttggcattgccaatttttcaaacgtggtacgcgggtcgtttcacgcctgttacctcgggtattccatcggtcagaaatggcaggggcaggggctcatgtttgaggcgctgacggcggcgattcgctacatgcagcgcacgcaacatatccatcgcattatggccaactacatgccgcacaataagcgcagcggcgatctgctggcccgcctggggtttgagaaagagggctatgccaaagattatctgctgattgacggcgagtggcgggaccatgtgctcaccgcgctcaccacccaggagtggaccgcgggtcgttaa

SEQ ID NO: 114897 - DNA, 1209 bp, Enterobacter cloacae
atgtcccgcgtatcacaggccaggagcctgggtaaatatttcctgctcgtcgataacatgctggtcgtgctcggcttttttgtcgtttttccgcttatatcgattcgttttgtcgatcaaatgggctgggcggcattgatggtcgggatcgcgctgggtctacgccagtttgtacaacagggtctgggcgtgtttggcggcgcaatagccgaccgcttcggcgcgaaaccgatgatcgtcaccggcatgctgttacgtgcggcgggattcgccaccatggcaatcgctcatgaaccctggctgctgtggttctcctgtttcctttccgggattggcggcacccttttcgacccaccgcgtaccgcgctggtggttaagcttatccgtccgcaacaccgggggcgcttcttttcgattttgatgatgcaggacagcgctggcgcggtggtgggcgccctgctgggaagctggctgctgcaatacgatttccgcctggtctgcgccaccggcgcggtgttgtttattctctgcgcgctgtttaacggtctgtttctgcccgcgtggaagctgtcgacggtgaaggcgcctgtgcgggaagggcttgaccgcgtgctgagcgataaacgcttcgtcacctatgtgttaaccctgaccggctactacatgctcgccgtgcaggtcatgctgatgctgcccattatggttaacgatattgccggcacgccggcagcggtgaaatggatgtatgccattgaggccagcctctctctgacgctgctctatccgattgcccgctggagcgagcgccgtttccggcttgagcaccgtctgatggccgggctgttgctgatgacgctgagcatgatgcccatcggcctggtgagttcgcttcagcaactgtttatgctcatctgcaccttctatattggctcaatcattgccgagccagcccgtgaaacgctgagcgcgtcacttgccgacgcccgggcccgcggcagctacatgggcttcagccgtctcgggctggcgcttggcggcgcactgggttacaccggtggcggctggctgtttgatgccggaaaagcgctccatcagccggagctgccgtgggtcatgctcggcatggtcggctttatgacgctgattgccctctggtggcagttcagtgataaacgcagcacccgcgggatgctggagcctggcgcctga

SEQ ID NO: 114898 - DNA, 561 bp, Enterobacter cloacae
atgaaaaagatcgttattgccgctgcgttaattgtcagtggtctgctggtgggatgtaaccagcttacgcagtacaccgtcagtgagcaggaaattaatcaggcgctggaaaaacataataacttttcaaaagatatcggcgtgcccggccttgcggatgcgcatatcgtcctgacgaatctcgccagccagattgggcgcgaggagcctaacaaagtcaccctttccggcgatgccagcctcgatatgacctcgctcttcggcaatcagaaagcggatatcaagctgaagctcaaggcgctgccggtctttaataaagagaaaggggccattttcctgcaagagatggaaatcgtcgatgcagttgtgacgccggaaaaaatgaaaccggtgctgcaaacgctgatgccgtatctcaaccagtcgttgcagaactactttaaccaacagcctgcctatgttctgagcgaagacaagagcaaaggcgaatctctggcgaaaaaatatgccaaagggatagaggtgaaaccgggtgaaatcatcatccctttcaccgactaa

SEQ ID NO: 114899 - DNA, 1047 bp, Enterobacter cloacae
atgactgtacaatcccaggttctcaaaatccgccgcccagacgactggcatatccatcttcgtgatggcgacatgctgaaaaccgtcgtgccgtataccagcgaaatttatggccgtgcgattgttatgcctaacctggttccgccagtcactaccgtcgaggccgcgattgcctatcgccagcgtatccttgacgccgttccggccggacacgattttaccccattgatgacctgctacctgacggactcgctggatccgaatgaagttgagcgcgggtttaacgaaggtgtatttaccgccgcgaagctctacccggcgaatgccaccaccaactccagccatggggtgaccagtattgatgccatcatgcctgttctggagcgtatgcaaaaactgggcatgccgctgctggtgcatggggaagtgacccacgctgacattgatattttcgatcgcgaagcacgttttatcgaaacggtcatggagccgctgcgccagcgtcttccggggctgaaagtggtgtttgaacacattacgactaaagatgccgcagagtatgtccgggatggaaacgagctgattgccgccaccatcaccccgcagcacctgatgtttaaccgtaaccacatgctggtgggcggcgttcgcccacatctgtattgtctgccaatcctcaagcgcaacatccaccagcaggcgctacgtgagttggtcgccagcggcttcccgcgcgcgttcctcggcacggattccgccccgcatgcccgtcaccgtaaagaggcgagctgcggctgtgcaggctgctttaacgccccgaccgccctggcaagttacgcaaccgtgtttgaagagatgaatgcgttagaccatttcgaagccttctgctcccttaacggcccgcgtttctacggtctgccagtcaatgacacgttcattgagctggagcgcaaagaaagccaggttgaagcgtcgattgcgctcaccgacgatacgctgatccccttcctggccggtgaaaccgtaaactggacggtaaaacgctaa

SEQ ID NO: 114900 - DNA, 246 bp, Enterobacter cloacae
atgcgtatcgaagtcaccatagccaaatccaccgtcctgcctgctggcgcactcgacgctctggcgggtgaactatcccgacgtattaacagcacttttcctgaaaacgatggtgccgtaacggtacgttatgcaacagcaaaccatctttccgtcatcggcggcgcgaaagaagacaaagaacgcatcagcgaaattttgcaggaaacatgggaaagcgccgacgactggttcatcactgcttaa

SEQ ID NO: 114901 - DNA, 255 bp, Enterobacter cloacae
atggaaaagaatagtgaagtcatccagacccatccgcttgttggctgggatatcagcaccgtagacagctacgatgcgctgatgctgcgtttgcactaccagaccccaaatcagcaaaaccgtgatgaagcggaagttggacagatgctgtggcttacaacagacgtcgcccgtcagtttatctctattttagaagcaggcatcgcaaaaatagaatctggcgactatcaggaaaatgagtataaacggcattga

SEQ ID NO: 114902 - DNA, 1119 bp, Enterobacter cloacae
atgaaatacgatttaatcattatcggaagcggctccgtaggatctgccgccggttattacgccacgcaggcgggtctgaaagtgctgatgattgacgcccaccttcccccccactctgaaggaagccatcacggcgatacccgtctgatccgtcacgcttacggcgaaggtgaacgttatgtaccgctggtgcttcgggctcagacgctgtgggatgagctggccacactcaccgaagatcgcatttttgagcgcaccggggtcgttaacctggggccagccagctccacgtttctggcgaccgtcgaggagagcgcgaaagcctaccgcctggacgtcgagcgtctggatgcaaacggcatcatggcgcgctggccggaaatttctgtccctgacgactacattgggttgtttgaagccaactctggcgtgctgcacagcgaaacggccattaagacctggattgatctcgccgccaaagcgggctgcgcacagttgttcaactgtccggtcacgggcatcacccaccatgcagagggttcaaccgtcaccacctctgaaggtgaatataccgccacgcgtctgctggtgagtgcgggaacgtgggtgacgaaactgctgccggacctacccatccagccggtgcgaaaagtcttctcctggttccagtctgacgggcgttacagcagccagaacaaattcccggcgtttacaggcgagttacccaatggcgaccagttctacggtttcccctcggaaaaagacgcgctcaagattggcaaacataacggcggacaggtaatttcctctgcggaagaacgcaagccttacggtgcttatccgcaggatggttccgaagccttcacgttcctgcgtaatatcctgccgggcataggcgggttgctttacggcgcagcgtgcacctacgacaacaccccggatgaagattttatcatcgacacccttccgggacacgataacaccctgctcgtaaccggactcagcggtcacgggtttaaatttgcctctgtgttaggtgaaatcgccgcccagtttgcgcaggggatcgcgccttcgtttgatctcaagcccttcgcgctctcgcgctttgatcgataa

SEQ ID NO: 114903 - DNA, 567 bp, Enterobacter cloacae
atgcaatggcgtaactcctcccgtcgctacggaataatatccatgtgtttacactggctatttgcacttgccgtctatgccatgtttggtctcggcctctggatggtgacattaagctattatgacggttggtatcatcaggcccccgaattgcacaaaagcattggggttctgctgatgatgggtctggtttttcgcgtgatctggcgacatatctctccgccccctccagcgcccaaaagccatggccgccttacccgcataagcgctgttggcgcacatatcgcactctatgccctgctgttcgccattctgatcagcggctatctcatttcgaccgcagacggtaaaccgatcagcgtgtttgggctttttgacgtcccagccacgctggctgacgccggttcacaggctgacaccgcaggtgtggttcatctgtggctggcatggagcgtggtgatcctgtctgtcctgcatggccttgcggccctgaaacatcactttattgataaagacgatacgctgaagcgcatgcttggccgttcgtcagttgactctggagcataa

SEQ ID NO: 114904 - DNA, 579 bp, Enterobacter cloacae
atgaaaaaacgcctgttgggtatcgcattaggttcgctgctatttaccaccggttcggccattgccgctgactataaaattgataaggagggccagcatgcctttgtcaatttccgtattcagcatctgggttacagctggttatatggcacattcaatgatttcgatggcacatttactttcgacgagaaaaaccctgctgccgataaagtgaacgtcaccattaataccaacagcgtcgacactaatcacgccgagcgtgataaacatctgcgcagcgctgaatttctgaacgtgggcaaattcccgcaagctactttcgcgtcgacagaggtgaagaaagacggtgataagctcgctattaccggtaatctgacgctgaacggcgtaacaaaaccggtcacactggatgccaaattaattggacagggcgacgatccgtggggtggcaaacgtgctggctttgaagccgcaggcaaaattcatctgaaagattttaatatcaccacggatttaggcccggcatcgcaggatgttgagttgattatttcggtggaaggcgttcagcagaagtcataa

SEQ ID NO: 114905 - DNA, 1050 bp, Enterobacter cloacae
atgccagtgttacacaaccgcgtttcgaatgagatgttgaaagcgcgtatgttggccgaaaccgaaccgcgcacaacgatctctttctataagtatttcaccatcgatgatccccaggcgacccgcgatgcgctttaccaggcttttaccgccctgaacgtgtttggtcgcgtctatctggcgcgtgaggggattaacgcgcagatcagcgtgccggaaagcaaggtcagcgccttccgcgacctcctttacgggtttgatccggcgcttaacggcttacgcctgaacattgcgctggatgatgacggtaaatcattctgggtgctgcgcatgaaggtgcgcgagcgtattgtggcggatggcattgacgatccgagcttcaatgccgctaatgtgggggagtacctgaaggccgctgaagtgaacgcgatgctcgacgatccggatgcggtgttcattgatatgcgtaaccactacgaatatgaagtggggcacttcgagaatgcgatggaaattcctgccgacaccttccgcgagcaactgccaaaagccgttgagatgatgcaggagcataaagacaaaaagatcgttatgtactgcaccggggggatccgctgtgaaaaagccagcgcctggatgaagcacaacgggtttaataaagtctggcacattgagggtgggatcattgagtatgcccgtcgcgcccgtgagcagggtttaccggtgcgttttatcggtaagaactttgtgtttgacgagcgtatgggcgagcgaatttcagaggacgtgatcgcgcactgccaccagtgcggtacgccgtgcgatacgcataccaactgcaaaaacgacggatgtcatctgctgtttattcagtgccctgcatgtgccgagaagtttaatggctgctgtagcgagctgtgcagtgaagagagtatcttgcctgaagaagagcaacgtcgtcgccgtgccggacgcgagaacgggaataagatctttaataaatcccggggccgactgaataccaaactgggtattccggacccggagtaa

SEQ ID NO: 114906 - DNA, 927 bp, Enterobacter cloacae
atgacccagttaccgaaatttactgccgcgcttttgcatccccgctattggttaacatggtcaggcattggcttgttgtggctaattgtacagctgccttatcccgtcattttccgcatgggtaaaggactgggccgcattgctcagcagtttatgaagcgtcgcgccaggatcgcgtatcgtaaccttgagctttgttttcctcagatgagtgaatctgagcgccacgacatggtgattaaaaacttcgaatctgtcggcatggggctgatggagaccggtatggcctggttctggtcggataaacgcatggcgcgctggacggaagtggccgggaccggcatggagccggtgcatactcttcaggccaaccagactggcgtcctgctgattggcgttcatttcctgacgctcgaaattggcgcgcgcatgttcggcatgcaggcgccgggtataggcgtttatcgtcctaacgataatccggtgatcgatttgatccagaccaacggacgcatgcgctccaataaaagcatgatcgatcgcaaagacctgaaagggatgatccgcgccctgaaagcaggtgaagtggtctggtatgccccggatcatgactatggcccgcaatccagcgtgtttgtcccgttctttgcggtggaagatgcagcgacgaccaccgggacctggatgctggcgcggatgtccaaagcggctatcgtgccgtttgtgccgcgccgtaaaccagacggttcaggctatcagctcatcatgctggagccggaactcgcgccaccgctgattgatgcagaaaccaccgcccgctggatgaacggcgttgtcgagaaatgcattatgctcgcgccggagcagtacatgtggctgcatcgccgctttaaaacccggcctcagggcgtcccttcccggtattaa

SEQ ID NO: 114907 - DNA, 1236 bp, Enterobacter cloacae
atgtcccccacagatgctcccataaactggaaacgtaacctgacggttgcgtggctgggttgttttcttactggcgccgcctttagcctggtgatgcccttcctgcccctctacgttgaacagctcggcgtcaccggacatagcgccctgaatatgtggtccggcctggtgttcagcattacgttcctgttctccgccattgcgtcgcctttctggggtgggctggcggatcgcaaaggccgcaaaattatgctgctgcgctccgcgctcggcatggcgatcattatgctgctgatgggggtggcgcagaatgtctggcagttcctgatactacgcgcgcttctgggcctgctcgggggatttatccctaacgccaacgccctgatcgccacccaaatcccgcgccagaaaagcggctgggcgttgggcacgctatccactggcggcgtaagcggcgcactgctgggcccactggcgggcgggctgctggccgaccactacggactgcggccggtattcttcattaccgccagcgtgctgttcctctgcttcctggtgacgcttatctgtatccgcgagaatttcacgcccgtggccaaaaaagagatgctgcacgcccgggatgtgctggcctcgctgaaaaacccaaagctggtgctgagcctgtttgtaaccaccatgattatccaggtggccaccggttcaatcgcgcctatactgacgctctacgtacgcgacctggcgggaaatgtcagtaatatcgcctttatcagcggcctaatcgcctctgttcccggcgtggcggcgctactgagcgcgccgaggctcggcaagctgggagaccgtatcggcccggaaaagatcctgatctgcgccctgatcgtctccgtcctgctgctgatccccatggcgatggtgcagtctccgtggcagctcggcgtcctgcgcttcctgctgggggctgcggatggtgcgctactcccggctgtacagacgctgctggtctataactccaccaaccagatagccggtcgtattttcagttataaccagtcgtttcgcgatctgggtaacgtcaccggaccgctggttggcgcggggatttcggccagcttcggtttccgggcggtctttatcgtgacggcaggcgtcgtgctgttcaacgccgtttattcgtggctcagcttatcccgggcgctacgcccggcgcgaataagagcacatcgtgacggctaa

SEQ ID NO: 114908 - DNA, 375 bp, Enterobacter cloacae
atgaccatgtacgccacgctggaagaagcaattgatgccgctcgcgaagagttcctcgccgataatcccggcgttgaggaagaagatgctgacgtgcaacaactcaatatccaaaaatacgtcctgcaggacggcgatattatgtggcaggccgaattctttgctgatgaaggtgaagatggtgaatgtctgccgatactcagtggtgaaggtgcacaggcggtattcgacggcgactatgacgaaattgagttacgtcaggagtggctggaagaaaatacgctgcacgaatgggacgaaggtgagtttcagctcgaaccgccgctggataccgaagagggtcaggccgcagcggacgaatgggacgagcgataa

SEQ ID NO: 114909 - DNA, 228 bp, Enterobacter cloacae
atgaaagtaatcattgtcgtcatgatggcatgcctgctcagcggttgcggcagcattatcagccgcaccatccccgggcagggccacgggaatcagtactaccccggcgtacagtgggatgtccgtgattccgcatggcgctatctcaccgtgctcgatctgccgttttcgctgattttcgacacgctactgctgcccatcgatgccagccacggcccctacgagtag

SEQ ID NO: 114910 - DNA, 2529 bp, Enterobacter cloacae
atgaataatacatctgaatatattgatgccatgccgctgacggacattgaaaaagcggcactccctgcgagcgacatccgcgcggttcacaccgcgctggatggtgaacatcgtcacttttcccgtgatgatgatacgccgctggggtcagtgaaggcacgtctggagcaggcatggccggactcgctggcagaagggcagctaatcaaggatgacgaagggcgtgaccagctacaggcgatgccgaaggccacgcgttcctccatgttccccgatccgtggcgcaccaacccggtgggccgcttctgggatcgcctgcgtgggcgtgacgtgacgccgcgctatctgtcacgtctgaccaaagaacagcaggcatccgagcagaaatggcgtaccgtgggaacgattcgtcgttacattctgctgctgctgacgctggcgcagacggttgtcgccacctggtacatgaaaaccattctgccgtaccagggctgggcgttgattaaccctgctgacatgattggccaggatatctgggtctccttcatgcagctgctgccgtatattttacagagcggcattcttctgctgttcgcggtgctgttctgttgggtctccgccgggttctggacggcgctgatgggcttcctgcaactgctgatggggcgtgacaaatacagcatttccgcgtcgacggtcggggatgagcccctcaatcctgagcatcgtaccgcgctgatcatgcctatctgtaacgaagacgttgaccgcgtattcgccgggctgcgtgctacctgggagtccgtgaaggcgaccggtaacgcggcgcatttcgacgtctatatcctgagcgacagctacaatccggatatctgcgtggcggagcaaaaagcctggatggaactgattgccgaggtgcagggcgaagggcagatcttctaccgtcgtcgtcgtcgtcgtgttaagcgtaagagcggaaacattgatgacttctgtcgtcgctggggtaaccagtacagctacatggtggtactggatgcagactccgtgatgagcggcgactgcctgagcgggctggtccgtctgatggaagccaacccgaacgcgggaattattcagtcctcgccaaaagcgtccggtatggacacgctgtatgcgcgctgccagcagtttgcgacccgcgtctacgggccgctgtttactgccggtctgcacttctggcagctgggtgaatcccactactggggccacaacgccattatccgcgtgaagccattcatcgagcactgcgccctggcgccgctgccgggtgaagggtcgtttgccgggtccattctgtcgcatgactttgtggaagccgcgctgatgcgtcgtgcagggtggggagtctggattgcctacgatctgcctggctcgtatgaagagctgccgccgaacctgctggatgagctcaaacgcgaccgccgctggtgtcacggtaacctgatgaacttccgcctgttcctggtgaaagggatgcaccctgttcaccgtgcggtgttcctgacgggcgttatgtcctatctgtctgcgccgctgtggtttatgttcctggcgctctcaaccgcgttgcaggttgtgcatgccctgacggagccgcagtatttcctgcaaccgcgccagctgttcccggtgtggccgcagtggcgtccggagcttgcgatcgcgctgttcgcgtcgaccatggtgctgctgttcctgcctaagctgctcagtatcattctgatctggtgcaaaggttcgaaggagtacggtggtttctgccgcgtgaccctttcactgctgctggaagtgctgttctcggtcctgctggcgccggtgcgtatgctgttccatacggtgtttgtggtgagcgcgttcctgggatgggaagtggtgtggaattcaccgcagcgtgacgatgactctacgccgtggagtgaagcctttatgcgccacggctctcagctgctgctgggcctggtgtgggccgttggtatggcctggctggatctgcgtttcctgttctggcttgcgccgattgtgttctcgctgatcctgtcgccgtttgtatcggtgatctccagccgttccacggtgggcctgcgtaccaaacgctggaagctgttcctgatcccggaagagtattctccgccgcaggtgctggtggataccgatacctatctggagcagaaccgcaaacgcacgctggatgatggctttatgcatgccgtgtttaacccgtcattcaacgcgctggcaaccgcgatggcgacggcgcgtcaccgcgccagccaggtgctggagatcgcccgcgatcgccacgttgagcaggcgctgaacgagacgccagaaaagcttaaccgcgaccgtcgtctggtgttgttgagcgatccggtgacgatggcacggcttcactaccgcgtgtggtcctctccggagagatactcttcgtgggtgaactactacaaggacgtgaagctcaatccgctggccctgaaggcgaagtaa

SEQ ID NO: 114911 - DNA, 1602 bp, Enterobacter cloacae
atggatcggatcgatataagcacacaaagggggaagtgcttacttattatgaaacataaaccacaaatgatgaaaatgcgttggttgggtgtagcagtgctgttgtcactgtatacctcatctgcactggcctttaacatcgatgatgtcgcaaaacaggctaaatcgatggcgggcaagagctacgaagcgccaaaaagtaacctgccctccgttttccgcgacatgaaatacgcggactatcagcagatccagttcaatcacgataaagcgtactggaacaatattaaaaccccgttcaagcttgaattttaccaccagggtatgtacttcgacacgccggttgccatcaacgaagtgacggcgaccgcggtacgcaaaatcaagtacagcccggattatttcaattttggcgatgtgcaacacgataaagacacggtaaaagacctcggcttcgcaggcttcaaggtgctttatccgattaacagcaaagataaaaacgacgaaatcgtcagcatgcttggcgccagctacttccgcgtgattggcgcggggcaggtgtacgggctttctgcgcgcggtctggcaattgataccgcgctgccatcaggtgaagaatttccacgttttcgcgagttctggatcgaacgtccaaaaccaaccgacaaacgtctgacaatttatgcgctgctggactcccctcgtgcgacaggcgcttatcgcttcgtgatcatgccagggcgtgacacggtggttgacgtacagtctaaagtttacctgcgcgataaagtgggcaaactgggcgtcgcgccgctgaccagcatgttcctgttcgggccgaaccagccctctccggcgaccaatttccgtcctgaactgcatgattccaatggcctctccattcatgcgggtaacggcgagtggatctggcgtccgctgaacaacccgaaacacctcgccgtcagcagctttgcgatggaaaacccgcagggctttggtctgctgcaacgtggccgtcagttctcccgctttgaagatctggatgaccgctacgatctgcgtccaagcgcctgggttacgccgaaaggcgactggggtaaaggcaaggttgagctggttgaaattccaactaacgatgaaaccaacgataacattgtggcgtactggacaccggatcagctgccggaagccggtaaagagatgaacttcaagtatgcgatcaccttcagccgtgacgaagacaaactgcacgcaccggataacgcgtatgtaatgcagacgcgtcgttcgacgggtgacgtgaagcagtccaacctgattcgtcagccggatggcacgctggcatttatcgtggacttcaccgggcaggatatgaaaaaactggccccggatactgccgtgacggcacaggccagcattggcgataacggtgaaatcgttgagaacgccgtgcgttacaacccggtcaccaaagggtggcgtttgaccctgcgcgtgaaggtgaaagatccgaaacagaccactgaaatgcgcgccgcgctggtcagtaacgataagccgctgagtgaaacctggagctatcagctacctgccaatgaataa

SEQ ID NO: 114912 - DNA, 1140 bp, Enterobacter cloacae
atgagcacaacccctgtacaacgtgaatatttcctcgactcgatccgcgcatggctcatgctattggggatcccttttcatatttcactgatctattccagccacacctggcacgtgaacagccagatgccctcctggtggctgacgctgtttaatgattttatccatgccttccgcatgcaggtgttttttgtcatttccggttatttctcttacatgctcttcttgcgctatcccctcaaacgatggtggaaagtgcgcgtggagcgcgtgggcataccgatgttgacggccattccgctgctgacgctgccgcagttcatcatgttgcagcatgttaaaggcaaggcggaaaactggccgaatctctccttctatgagaaatacaacaccctggtctgggaactgatttcccacctctggttcctgctggtactggtggtgctaaccacggtgagtttgttgatcttcagccagctgcgccagcgtgcgagcaccgcatcctcgaccttcttcgccaacatcaccctgggcaagctgtctctgctgtttcttgcgctgggggtcgcgtatgccgccgtcaggcgtaccctgctcattgtctaccctcccattctgagcgatgggctgtttaatttcgtggtgatgcagaccctgttttacattcccttcttcctgattggggcgctggcatttattcatcctcggcttaaagcgctgtttaccaccccctccccctggtgtgcggtgggtgctgcgctggcctttgccgcctatcttctcaatcagcgctatggcagcggggacgcgtggatgtatgagacagagagcgtgataacgatgctgatgggcctgtggatggttaacgtggtgttcgcccttggccatcgtctgctgaattttaaatccagtcgcgtcacctatttcgttaatgcttcgctgtttatctacctggttcaccatccgctgacgctgtttttcggggcgtacataacgccgcatatcgcctcgaatgcgctgggcttcttcaccggcctggtctttgtggttggcattgccatcgtgttgtatgaaatccatctgcggatcccgcttttgcgtttcctgttctcaggcaaacctcaggttaaagcgggataa

SEQ ID NO: 114913 - DNA, 537 bp, Enterobacter cloacae
atgagaccgcatttcgacgttattcatggcgatatcacgacggtacacgttgacgtgatcgtcaacgcagccaattcctccctgatgggtgggggcggggtggacggtgccattcaccgggccgcaggccctcaactccttgaagcatgcaaaaccgtgcgtcagcagcagggagagtgcccgccggggcatgctgttattacgcttgcaggcgatctcccggccaaagcggtgatccataccgttggacccgtctggcacggtggcgaccgccatgaggctgagattctggagcaggcgtatcggaactgcctgcggcttgcggcggataacgggtataagaccatggcgttccccgccattagcaccggcgtgtacggttatccaaaggaagcggcagctacaatcgccgtgaataccgtttatcactacctttccctcaaacccatgccggaaaaagtcatttttgtctgtttcgatgagcacaccgccgacctgtatcagcggattttgaccgcgcgcagccaggcattttga

SEQ ID NO: 114914 - DNA, 321 bp, Enterobacter cloacae
atgttcaaatccgcagcgtgtattatttctggtctgggactgatcctgtcctcttttttatctccggcttattcagcaactatagaaaatggtggggtgattcattttcgtggcgcggtggtcgctgacccgtgcgaagtcacgccccggcatcagcagtttgcgatctcctgtccggaaaataaccgtatgaaaacgcataccatcagttatgacgaggcgctccggggccatcatcctcattcagctctggccgctgtcagcatgaaatacctgaatgaacagaaaacgcttgcggtcgttcaggtcgattaccgataa

SEQ ID NO: 114915 - DNA, 333 bp, Enterobacter cloacae
atgagcaccttcattctccttgctgcgcttgccagccagataacgttcagcacctcacagcaggcaaatatgacaaccattattcctcaggtcacgctggcagacgcctgcgaatgtcaggttgaggtgttatctgtccgacaggggcaagcgggacaaagtacatcgcggcagaaaaatactctttttatacccgctaatcagccgattgatttaacgcgaatcagtttaaatattcgttcaggggatgcggtaaaaataatcgtcaccgtttccgatggaaaatcgcttcatttatcacagcagtggaacgcaccggtaagtacgctttaa

SEQ ID NO: 114916 - DNA, 456 bp, Enterobacter cloacae
atgaaacttttcaaagtggcagttattgcagcaatcgtagtttctggcagtgctttcgcaggtgcggtaccacaatttggcggcggccacggtggtggctggggtggcggcaataacggccctgactcaaccctgagcatttaccagtacggcggcggtaactccgcgcttgctttgcagacggacgcccgagattctgaattgaccattacccagcacggtggcggtaacggcgcagatgttggtcagggctctgatgacagttctatcgatctgctgcaaaaaggctttggtaacagcgccaccatcgaccagtggaatagcaaagactctgttatcaacgtgaaacagttcggcggcggcaacggcgcggcggtagaccagacagcgtccggctcaacggtgactgtgcaccaggttggctttggcaacaacgcgaccgcacatcagtactga

SEQ ID NO: 114917 - DNA, 456 bp, Enterobacter cloacae
atgaaaaacaaaatgttgtttatgatgtttacattactgggtgcgcctgggtttgtaatcgcaggtgattcagatttagccagttctgaatataattttgcgataaatgaattaagtaaagcttcatacaatcaggcagccattattggtcaacagggctcaggtaataatgctgatgtacgccagggcggttctaaattgctgtccattatttcccaagagggcgggaataaccgcgcgcatgttgatcagtcagggacgtataaccttgcttatatcgatcagaccggtaacggcaacgatgcgagtattaagcagggcgcttttggcaacaccgccatgattatccagaaaggctcgggtaacagggcgaatataacgcagtatggtacgcagaaaacagcagttgtagtacagagacagtcgcaaatggctattcgcgttattcaacgctag

SEQ ID NO: 114918 - DNA, 651 bp, Enterobacter cloacae
atgtttaatgaagtccatagcttacccggtcatacattattgttgatcacaaaaccttccctacaagcgacagcgttattgcagcatttaaaacaatgcctctcgcttaacgggaaactgcataatattcaacgttcttttgatgatatcgctcctggcagcatcattcttctcgatatgatggaagcggataaaaaactggtccattactggcaggataatttaagcaggaaaaacaataatatccgcgtattgttattaaatacgcctgatgagtatcctttccgcgatattgagagctggccgcatatcaacggcgtgttttacgtcactgaagaagaaaaccgtgtcgtggagggtttgcagggcatattgcggggggagtgttatttctcgcaaaaactggccagctacctcattacccactccggaaattatcgctataacagttcagaatctgcacttttgacgcaccgtgagaaagagatcctgaacaaactgcgtattggtgcttcaaatattgaaatcgcccgttcgttatttatcagcgaaaatacggttaagacgcatctttataatcttttcaaaaagatagctgttaaaaatcgcacgcaggcggtgtcgtgggcaaacgataacctcaggcgttaa

SEQ ID NO: 114919 - DNA, 351 bp, Enterobacter cloacae
atgcttgctgccggaaaccttcaggctgttgaggtggaagttcccggactgttgaccgaccacaccgtcacctctgtcggacacgatttttatcgtgccttcagcgataagtgggaaagcgattatccgggtaacttaaccatcaacgaacggcccagtgcgcggtggggaagctggatcacaataaccgctaatcaggacgttatttaccagacttttttattcccaacgaaaagagacttcgatcagaacgtcgctttcgcgctggcacaaacagaagaagctattaaccgcctacagttaaacaaagcccttttgagcacaggcgatttagcaaaagatgagttctag

SEQ ID NO: 114920 - DNA, 417 bp, Enterobacter cloacae
atgcgtctcgcacacacagtgatttcgttaatgctcattgcgccgttgagctgggccggaaatatgacattccagttccgcaaccctaattttggcggcaacccgaataacggagcctttatgcttaaccaggctcaggctcaaaactcctataaagaccccagctatgacgatgatttcggtatcgagaccccgtcggccctggataatttcactcaggccatccagtcgcaaatattaggtggcttattaaccaacattaataccggaaaacccggccggatggtcactaacgactttatcgtcgatattgccaataaagacgggcagcttcagctaaatgtgacagaccgaaaaaccggtaaaacgtcgacaatccaggtttccggtttgcagaccagttcaactgatttctaa

SEQ ID NO: 114921 - DNA, 834 bp, Enterobacter cloacae
atgcagcgcttttttattttagttgcagtgtgcttattaagcggttgtttaactgccccgccaaaagaagccgctaaacccaccctaatgcctcgtgcccagagctaccgggatctgacgcatctgccggtccctaccgggaagatattcgtctcggtctataacattcaggatgagacgggccagttcaaaccgtatccggccagtaacttctcgacggccgtaccgcagagcgccaccgcgatgctggtcaccgccctgaaagattctcgctggtttatcccgctggaacgtcaggggctgcaaaacctgcttaacgaacgaaaaatcattcgtgccgcgcaggagaatggtaccgttggcgtcaataaccgcatgccgctacagtctctcaccgcagccaatatcatggtggaaggctcgattatcggctacgaaagtaacgtgaaatcgggcggcgcgggtgcgcgttactttggcatcggggccgacacgcagtatcagctggatcagattgccgtcaacctgcgcgtggttaacgtgagcacgggtgagatattatcctccgtgaccaccagcaaaacgattctctcttatgaagtgcaggccggggtgttccgctttatcgattaccagcgtctgctggagggtgaaattggctatacctctaacgagccggtcatgctgtgtctgatgtcggccatcgaaaccggcgtgattttcctgattaatgacggtatcgatcgcggcttgtgggatcttcagaataaaagtgacgtgagtaatgcggtgctggtgaaataccgagagatgtcggtgccgccagagtcataa

SEQ ID NO: 114922 - DNA, 492 bp, Enterobacter cloacae
atgcgcaccatgaacatactactttgtattgcaatcacgactggcatcctctccggcctctggggttgggtggctgtctctctcggcttgttgagctgggctggttttcttggctgcacggcctatttcgcctgcccgcagggtggtctcaaagggctcttcatctccggctgtactctgatgagcggtgtgatttgggcgctggtcattatgaaaggcagcgcgctggcgccgcatgtggaaatcctggggtacgccatcaccggcattgtggccttcctgatgtgcgttcaggcaaaacatctgctgttgtcctttgtgcccggcacgttcatgggtgcctgcgcgacctttgcggggcagggggactggaagcttgtggtcccttcgctcatgctgggattactgtttggctacgccatgaagaacagcggcctctggcttgcggcccgacgcgagaagagccagagcgttcctgcggtaagtaaataa

SEQ ID NO: 114923 - DNA, 555 bp, Enterobacter cloacae
atgaatgagttttccatcctttgccgcgtgctgggcaccttatattaccgccagccgcaggatccgctgctggttccgctgtttaccctgattcgtgaaggtaaactggcgcagagctggccgctggaacaggatgagttgctggaacgcttgcaaaaaagctgcgatatgcagcagatttcaacggattacaacgcgctgtttgtgggagaagagtgtcgcgtgtcgccgtatcgttctgcctggcaggaaggtacgaccgaagcggaagttcgggcgtttctgtcagaacgcggcatgccgctgacggatatgcctgccgatcatatcggtaccctgctgctggcggcctcctggattgaagataatgcaggtgatgatgagaacgaggcgattgaaaccctgttcgaaacgtatttgcttccgtgggttggcaccttcctgggtaaagttgaagcccacgccacctcgccgttctggagaacgctggctccgctgacgcgtgacgccatcgctgccatgtgggacgagctggaagaagagaacgaagagtga

SEQ ID NO: 114924 - DNA, 738 bp, Enterobacter cloacae
atgtatcccgttgacctgcatatgcacaccgtcgccagtacccacgcttacagtaacctccatgattatatcgctcaggcgaagctgaaaggcattaaactgtttgcgataaccgatcacggtccggacatggcggatgcgccgcactactggcattttgtgaatatgcgtatctggccacgcctggtggacggtatcgggatactgcgcggcatcgaagcgaacatcaaaaatactgacggtgagattgactgcaccggcccgatgctgacctccttagatctgatcctcgccggcttccacgagccggtctttgcgccccaggataaagagaccaacaccgcagcgatgattgccactattgccagcggcaacgtgcacattatcagccacccgggaaatccgaaatacccgattgatattcaggccgtggcgcaggcggcagcgaagcaccgcgtggcgctggagattaacaactcctcctttgttcactcgcgtaagggcagtgaagccaactgccgcgaagtggcggcggccgtgcgtgacgcgggcggcatggtggcgctgggctctgattcacacacggccttcacgctgggtgattttagcgagtgcctgaaaatattgcgggacgtgaatttcccggaagaacagatcctgaacgtcacgccgcgtcgtatgctcgacttccttgagtcgcgcggcatggcgccgattgatgaatttgccgatctttaa

SEQ ID NO: 114925 - DNA, 939 bp, Enterobacter cloacae
atggatattatcttctctcaccccacttttgatacggcttactggattaacgcgctcacggcggcactgcctggcgcacgcgttcgcgaatggaaacagggcgataatgaacatgccgactacgcgctggtctggcatcccccggtcgaaatgcttcagggacgccgtttgaaggcggtgtttgctcttggtgcgggtgtggattccattctcagtaagctgaaggcacaccctgaaatgctgccggaggatattcccctgtttcgtctggaagataccggtatggggcagcagatgcaggaatatgccgtgagccaggtgctgcactggttccgccgcttcgacgattatcaggcgtttaaacagcaatcccactgggaaccgcttccggattatcagcatgaagatttcaccatcggcatcctcggcgcgggtgtactgggttcgaaagtcgccgaagcgctcgcgccgtggggcttcccactgcgctgctggagccggagccgtaaggattatccaggcgtcgagagctttgccggaacggacgaactcccggcgttcctgaaagggactcgcgtcctcattaacctgctgccgaatacggcggaaacggtcggcattatcaatggcacgttcctcaaccagttggcagaagacagctacttaatgaacctggcgcgcggggtacacgttgtggaagacgatctgctgaaagcgctggatagcggtaaactgaaaggcgcaatgctggatgtctatagccgcgaaccgctgccgacagacagcccgctctgggcacatccgcgcgtggcgatgacgcctcatattgcggccgtgacgcgaccggcggaggccgtggcgtacatctcgcataccatcagcgaaatagagaagggcaacgcggtgaccggacaggtcgacagacagcgaggctactga

SEQ ID NO: 114926 - DNA, 906 bp, Enterobacter cloacae
atgcaggatctcaatgatttcgtatggtttgtgaaggtggtggagcatggcggctttgcggcggcggggcgggcgctcgatcagcctaagtcgaaactgagccgtcggattgcgcagctggaagaacgcctgggcgttcggttgatacaacgtaccacgcggcagtttgcggtgacggaggtggggcagacattctatcagcactgtaaagccatgctggtggaagctgaagctgcggaggaggcggtggctgctttacaggctgagccgcgcggtatggtccggatcacctgtcctgtcaccttgctgcacgttcacgtggggcccatgctggcacggtttatggcgcgctatccagggatcaacctccagcttgaagccaccaaccgccgggtcgatctggtggcggagggggtggatgtggcgatccgcgttcgtccgcgcccgtttgatgacagcgatctggtattaagggtgctggcggacagggggcactgtctggttgccgggccggcactgattgaacggatgggcaacccggcgatgccctctgaactcagcgagtggccggggttaagtatgggggcgggcaagcacctgcataagtgggaattgagcgggccggagggcgcaaaggcagaaattcacttcacgccgcgcctggtgactaccgacatgctggcgctgcgggaggcggcgatggcgggcgtgggcgtggtacagctgcccattttgatggtgaaggatcagctggcttcaggtgaacttgttcgggtgctgaatgcctgggaacccagacgggaagtgatccacgcggtgtatccatcccggcgcggcctgctgccatcggtcaggacgctggtggattttctgactgaagagtatgcaaagatggttgaggactag

SEQ ID NO: 114927 - DNA, 861 bp, Enterobacter cloacae
atgaaaaacgtaacaggcgtgtataccgcacctcgtccgcactgggtcggtgacggttttccggttcgttcgatgttttcttaccagacgcacggcgagcccctgagcccgttcctgctgctggactacgccggaccgcataccttcccggcggacggcgcgaaacgcggcgtgggcgagcatcctcatcgcggttttgaaacggtgaccatcgtctactcaggcgaagtggagcaccgtgattccactggcagaggcggcgttattggcccaggcgatgtgcagtggatgacggcaggcgcaggcattttgcacgaggagttccactccagcgcgttttcgcagaaaggcggtgaactgaaaatgatgcagctgtgggtcaacctgcccgctaaagacaaaatggcgacgcctggctaccagagcatcactcagtcggatatcccggtggtcaccctgccggataacagcggaacattgcgcgtgattgctggccgttttggagaggtaaccggcccggcgcataccttctcaccgctgaacgtgtgggatctcgcgctgcgccagggtagccatctgacgctcaatcagcccgaaggctggagcacggcgctggttgtcgttgaaggcagcgtgacggtgaacggcaccacgcctgccggtgaggcgcaactggtcgtgctgagtcagagcggtgacaaactgcatctcgaagccagcagcgatgccaaagtgctgctgatggccggggagccgctgaatgaacccatcgtgggctatggcccgtttgtgatgaacagtaaaaccgaaattgccgaggctattcgcgatttcaactccggccgctttggccaaatctaa

SEQ ID NO: 114928 - DNA, 678 bp, Enterobacter cloacae
atgtctacccctgcaaacttcaacggtgcacgtcccgttattgacgtaaacgatgccgttatgctgcttatcgatcaccagagcgggctgttccagaccgtaggagacatgccaatgcctgagctgcgcgcccgtgcagcagcgctggcaaaaatcgcctcgctggcgaagatcccggtgatcaccacggcgtcggttccacagggaccgaacggcccgcttatcccggagatccacgccaacgcgccgcacgcacagtatgtggcacgcaagggtgagatcaacgcctgggataacccggagttcgtggcggcggtgaaagccaccgggcgcgaaacgctgattatcgcggggacgatcaccagcgtctgcatggccttcccgtccatcagcgcggtggcggacggatataaagtgtttgcggtgattgatgcctccggcacctacagcaaaatggcgcaggagatcaccctggcgcgcgtggtgcaggcaggcgtggtgccgatggacacggctgctgttgcttccgaaattcagcgcacgtggaaccgtgaagatgcgggtgaatgggctgaggtgtacacacacatcttcccggcctaccagctgctgatcgaaagctacagcaaagcgcaggacgtggtgaaaaatagcgaagtgctcgattcgcagcgttaa

SEQ ID NO: 114929 - DNA, 1506 bp, Enterobacter cloacae
atgaacgaactggttagtgcaattaatggtgttatctggagcccggcgttaatatttttatgtctgggtgtcggcctctatttctcgctgcgtagtcgctttctgcaattacggcatataaaacttatgattaccctgatgtttcaggggcgtcctaccgaggcaggcgtgtcgtcgtttcaggcgctgacgatgacgctggcgggccgcgtggggacagggaatattgccggtgtagcgaccgccattacctttggtggacccggtgcgcttttctggatgtggatagtggcatttttgggggcaagctctgcttttgtcgaatccacgttaggtcaggtttataaagagaaaattaacggcgaatatcgtggtggtcctgccttttatattgagaaagggttaggcgtgaagtggtacgcatggttatttgccatcgtaacgattttctcctgcggattattactgccaggtgtgcaggcaaactctattggtgcgagcctgtatattgcctttggtctgagcccaaatgtcacggcggcgttacttgctgtgctgttgagttttattatttttggcggcgtaaaaaggattgccagctttagcagcatggtggttccgtttatggcgctcggctatattattgtcgcgtgcgtgattatcgctatcaatattgatcagcttccttcagttatattgctgatctggaaaagtgcttttggccttgaagctgggtttggcgctattctgggccaggccatcatgtggggcgtgaagcgtggcgtctattccaacgaggcggcgcagggtaccgggccacatgcctcctcggcggcggccgtaagccatccggtgaaacaggggctggttcaggcgttctccgtgtacatcgacacgctgtttgtctgctccgcgaccgggtttatgctgttgatcaccgggctgtataacgtgcagggcgtcgacggcgcagcgctctataccggaatagcaggcgtggccgcaggaccgggatatgtccagacggcaatggaaagtatgatgccgggcttcggtaattactttgttgccatcgcgctgttcttctttgccttcaccacgatcattgcttactactacatcgctgaaacgaatatcgcctacatcaaccgtaagattcatcgcccgtggctgacgttcctgctcaagctgtgtctgatggcttcgacggtatatggcacggtacgcaccgcggatctggcctggggattaggggatatcggcgtagggctgatggcatggctcaacattattgccatcgttctgttgcataaaaaagcgtttgccagcctgaaggattatgaaatccagaatgcacaggggttggatccacactttgacccggttcggctggggattaaaaatgcggattactggctggaggagcgtaaggatgaagcgggtttgaatattggccagagacttgctcccgagggaaagcaaccggctggaaagctgaatagctga

SEQ ID NO: 114930 - DNA, 1068 bp, Enterobacter cloacae
atggttgcgtcctgtactggacaaggtaaaaacatcaaccgcagtacccggcgcggaggctcagactccggcagcgatttcttcaccaccaaattctctccttcacctcaagaacctttttctaccgacgtgcataacggtgcgcgtagccgttgtatatcgtcatccggtaatgcaagcaatggcttacaaggaagccaaccctctgatgttcgtgcgcataatcgtgccgatgctggcgcgtgtgatgaataccaacaactcaaggtgctatccatgggaagacagaaagcagtgatcaaagctcgtcgtgaagcaaaacgtgtgctgagacgggattcacgtagccataagcagcgtgaagaagaatcggtcacctcgcttgtgcagatgagcggcgtagaatccattggcatggcgcgggacagccgcgatgcatcgccaattgtggcgcggaatgaagctcaggcgcactacctgaatgctatcgagagtaaacagctcatctttgcaaccggggaagccggatgcgggaaaacctggatcagcgccgccaaagcggcggaggcgctgattcataaggacgtggaaaggatcatcgttacccgtccggtactgcaagcggatgaagatctgggcttcctgcccggcgatatttccgagaagtttgccccgtacttcaggcccgtctatgacgtgctggtgaagcggttgggcgcttcctttatgcagtactgcctgcgaccagagattggcaaggtggaaatcgcgccgttcgcctatatgcgcggacgtacatttgaaaatgcggtcgttattcttgacgaggctcagaatgtgaccgctgcgcaaatgaagatgtttttaacgcgcctcggggagaacgtgacggttatcgtcaacggcgatattacccagtgtgacctgccgtcgggcgtgaagtccggcctgagcgatgccatgtcacgttttgaggaagatgagatgataggggtggtccgcttcacaaaagaggactgcgtccgctcagcgctgtgccaacgaacgctggaagtgtactccgactaa

SEQ ID NO: 114931 - DNA, 1284 bp, Enterobacter cloacae
atgaacaagcatgacgaatacgacgtggcggaaccttcccgacgtcggttgttaaaaggggtaggggcgctgggcggcgcgtttgccctggcgggaggctgtccggtggcgcatgcggcaaaaccgcaaagcgcccctggcacgctctccccggatgcgcgtatggaaacgcagccgttttatggtgagcaccaggcggggatcctgacgccgcagcaggcctcgatgatgctggtggctttcgattcgctggcgagtgataaagccgaccttgagcgtctgttcaggctgttgaccacgcgtattgccttcctcaccgccggcggtcccgcaccggaaacaccgaatccgcgcctgccgccgatggattccggcatcctcggcgcgtttatcgctcccgataatctgaccatcaccgtgtcggtgggggaatcgctgtttgatgatcgctacggactggcgaagcagaagccgaaagcgctgcaaaaaatgacgcgattcccgaatgattctcttgacgcggcgctgtgccacggcgatctgctgttgcagatctgcgctaatacccaggatacggtgatccatgccctgcgcgatattatcaagcacaccccggatctgctgagcgtgcgctggaagcgggaaggttttatctctgaccacgccgcgcgcagtaaagggaaagagacgccggtcaacctgctgggcttcaaagacggcaccgccaacccggacagcagcaataccgcgttgatgaagaacgtggtatgggtgacggcggatcagggcgaaccggcttgggcggtcggaggcacctatcaggcggtgcgtatcattcagttccacgtggagttctgggaccgcacgccgctgaaagagcagcaaactatcttcggtcgcgataagcaaaccggcgcaccgctcggcatgaagcacgagcacgatgaacccaactacgcccgcgatccgaacggggatgtcatcgcgctggacagccatattcgcctcgccaatcctcgcaccaaagagacgcaatccagcctcatgatgcgcaggggctacagctactcgctgggggtgaccaactccggtcagcttgatatgggactgctgtttgtctgctatcagcacgatctggagaagggattcctcaccgtgcagaagcggctcaacggcgaagcgctggaggaatatattaagcccatcggcggcggctatttctttgccctgcccggcgcgcgtaacgcgaatgcctggctcgctcagggtctgatagaagcctga

SEQ ID NO: 114932 - DNA, 1128 bp, Enterobacter cloacae
atggccattcagttccgtcgtagtgcgttatgcgcaggcattgccgcgctgttcgtgtctgccttcaccgctcaggcggcagatattccgcaggtaaaagtcaccgtcaacgataaacagtgcgagccgatgaccatcacggttaacagcggtaaaacgcagtttattattcagaaccacagccagaaggcgctggagtgggaaattctgaaaggcgtgatggtggtggaagagcgcgagaatatcgcgccgggcttcagccagaagatgaccgcaaatcttcagcccggggaatatgacatgacctgcggcctgctgactaacccgaaaggtaagctgatcgtcaaaggcgcagcgacggcggatgcggccaaaggcacggcgctgctgagcctcggcgacgccattaccgcctataaagcctacgtcaccaaagagacagcggacctggtggcaggcaccaaagcctttaccgacgcggtgaaagcgggcgacatcgaaaaagcgaaatccctgtatgcgcctacccgtcagcactacgagcgcattgagccgattgccgaactgttctctgacctcgatggcagcattgacgcccgtgaagacgactacgagcagaaggccgccgatccgaaattcaccggcttccaccgtctggaaaaagccctgtttggcgataactccaccagtgggatggagaaatacgccgagcagctcaacagcgacgtgctggagctgcaaaaacgcatcagcgagctggcattcccaccgtcgaaagtggtgggtggcgcagcgggcctgattgaagaagtggccgccagcaaaatcagcggtgaagaagatcgttacagccacaccgacctgtgggacttccaggcgaacgtcgacggcgcacagaaaattgtcgatctgctgcggcctcagctgcaaaaagagaacggcgagctgctggcgaaagtggatgccaactttaagaaagttgacgctatcctggcgaaataccgcaccaaagacgggttcgaaacctacgacaagctgaccgatgctgaccgtaacgcgctgaaaggcccgataaccaccctggcggaagatctctccctgctgcgtggcgtactgggtctggattaa

SEQ ID NO: 114933 - DNA, 834 bp, Enterobacter cloacae
atgtttgttccttttctcattatgttacgtgaaggccttgaagcggccctgattgttagccttatcgccagttatctgaagcgtacccagcgcggacgctggattggcgtcatgtgggttggggttttccttgctgcggcgctctgcctgggcctcggtatcctcatcaacgaaaccaccggggagttcccgcagaaagagcaggagctgtttgaagggatcgtcgccgtgattgcggtggtgatcctcacctggatggtgttctggatgcgcaaggtctcccgtaacgtgaaggtacagcttgagcaggcggtggataacgccctgcaaaaaggcaaccaccacggctgggcgctgatcatgatggtctttttcgccgtggcgcgtgaaggcctggagtctgtgttcttcctgctcgcggcttttcagcaggacgtgggcatctggcccccactgggcgcggtgctcgggctggccacggcggttgtgcttggcttcctgctctactggggcggcattcgtcttaacctgggggtgttcttcaagtggaccagcctgtttattctgctggtggccgcagggctggcggcaggggcgatccgcgccttccacgaagcgggtctgtggaaccacttccaggacgtggcgttcgatctcagcaacgtcctgtcgacccattcactgaccggtaccctgctcgaagggatcttcggctaccaggaaacgccgagcgtcagcgaagtggcgatgtactttatctatctggttccggcgctgatcctgttcgctatgccgccgcgtaccggctcgcagacgtcgcgcgtagcgccgtaa

SEQ ID NO: 114934 - DNA, 1185 bp, Enterobacter cloacae
atgtttaaaattgtccatttcctgctggcgctggtgattattcttgcgctcgcctggctggtgagtttcgaccgccgaaaaattcgtattcgtttcgttttacagctgatcgtgatcgaaatcgcgctggcgttctttttcctccacgcagaaagcggcctgtttattattaaatacgtttccggtttctttgagtcgctgcttaaattcgctgccgaagggacgaattttgtctttggcgggatgggtgaaaaagggctggcgttcattttccttggcgtgctctgccccattatttttatctcggcgctgattggtattcttcagcactggcgtattctgccgatctttattcgggtgatcgggacgctgctgtcaaaactgaacggcatgggcaagctggaatcctttaacgcggtgagttcgctgatcctcggtcagtctgaaaacttcattgcctacaaaggcgtgctgggcgatctctcctcgcgtcgtctgtttacgatggctgccacggccatgtcgacggtttcgctgtcgattgtcggggcctatatgactatgctcgacgccaggtttgtcgtcgcggcgctgatcctgaacatgttcagcacctttattattctttcggtcattaacccggcccgcccggaagcggagccggatatcaggctggaaaaactgcacgaatcccagagcttctttgaaatgctgggcgagtatattctggccggttttaaggtggcgatgattattctggcgatgctgattggctttatcgcccttattagcgccattaacgccctcttctccggcatatttggcatgagcttccagcagattctgggttatgtgttttatccgctggcgtggcttattggtattccgctgagcgatgccttaagcgcggggagcattatggcaactaaactggtggcgaatgaatttgtggcgatgatcgagctgcaaaaaatagcccatcaaatgtcaccgcgcgggctggggattttgtccgtgttcctggtgtcgttcgctaacttcgcttccattggcattgtggcgggggcaataaaaggtctgaatgagcaacagggtaacgtggtgtcgcggtttggtttacgccttgtatacggggcaacgctggtaagcctgctgtcggcaagctttgcggggttggtgctgtaa

SEQ ID NO: 114935 - DNA, 420 bp, Enterobacter cloacae
atgagaattaaaacagggttaatggtggcagcattcgtgatgctggcgggctgtagcgcacccgcacagcacgcggcggtggaaacctgcaaagcagaaaatcagatgcagcagaccacgctttatttcggcttaaaccgtcctgccggggcgcaaatcacaggcaacgaatggcagcagtttgtcgaccaggacgtgacgccacgctttcgcgatggtttaacggtatttgatgcgcgcggtcagtggctggggaatgatggaaaagtggcgcgcgagccgagcaaggcattgatgctgatccacggtaaagatgcgcagagcgagaagaacatcgaagcgttgcgcggaatttataaatcacgcttcgcgcaggagtcggtgatgcgggtcgaccagccggtgtgcgtgcagttttaa

SEQ ID NO: 114936 - DNA, 1509 bp, Enterobacter cloacae
atggctattagcacaccgatgctggtgacatttctcgtttatatttttggcatgatcctgatagggtttttggcatggcgttccactaaaaactttgacgactacatcctcggcgggcgcagcttaggcccgatggtcaccgcactctctgcgggcgcttccgacatgagcggctggctgctgatggggctgccgggcgcgattttcatctccggtatctccgaaagctggatcgccatcggcctgaccgttggcgcgtggattaactggaagctggtggcaggccgtctgcgcgtgcacaccgaagtcaacaacaacgccctgacgctgccggactacttcaccggacgctttgaagataacagccgtatcctgcgcattatctccgcggtggtgatcctgctgttcttcaccatctactgtgcctccggcatcgtggcgggcgcgcgcctgttcgaaagcaccttcggcatgagctatgaaaccgccctgtgggccggcgccgcagcaaccatcctctataccttcgtgggcggattcctggcggtaagctggaccgataccgtgcaggcgagcctgatgatcttcgccctgatcctgactccggtgattgtcattttcaccgtcggcggctttggcgaatcgctggaagtgatcaagcagaagagcatcgaaaacgtcgatatgctgaaagggttgaacttcgtcgccatcgtctctctgatgggctggggcctgggctacttcggccagccgcacattctggcgcgcttcatggcggcggattctcaccacaccatcgttcacgcgcgtcgcatcagcatgacgtggatgatcctgtgtctggcgggggcgtgtgcggtcggcttcttcggtatcgcgtacttcaacaacaacccggcgcaggcgggcgcggtgaaccagaacgccgagcgcgtattcatcgagctggcgcagatcctgttcaacccgtggattgccggtattctgctctccgcgatcctcgcggcggtgatgtccaccctgagctgtcagctgctggtgtgctccagcgccatcaccgaagacctctacaaagcgttcctgcgtaagggcgcgagccagaaagagctggtgtgggtagggcgctttatggtgctggtggttgcgctggtggcgattgcgctggcggcaaacccggaaaaccgcgtcctggggctggtgagctacgcctgggcgggcttcggtgcggcatttggtccggtggtgctgttctctgtactgtggtcacgcatgacccgcaacggcgcgctggcggggatgattatcggtgcggtaaccgttatcgtctggaaacagttcgcgtggctgggcctgtacgaaatcattccgggcttcatcttcggcagcctcggtatcgtggtgtttagcctgctgggtaaagcgccgtctgcgtctatgcagaaacgctttgcggaggcggacgcgcactatcactcagcgccgccgtctaagctccaggctgagtaa

SEQ ID NO: 114937 - DNA, 3963 bp, Enterobacter cloacae
atggggatgaccaccatgggggttaagctggatgacgctacccgcgaacggattaaaaccgctgcgacccgcatcgaccgcacaccgcactggttaatcaagcaggcgatttttaactatctggaaagactggagagtgaagaaggtctgccggagctgcctgccctgctggcgggtgcagcgaacgaaagcgaagaggccgcgacggccgttgaagagaaccaccagccgttcctggaatttgccgagcagatcctgccgcagtccgtcagccgtgccgccattaccggcgcctaccgccgtgccgaaaccgacgccgtgccgatgctcctggagcaggcgcgcctgccggaagccgttgccgctcaggcgcacagcctcgcgtatcagctcgccgacaagctgcgtaaccagaaaaccgccagcggacgcgccggtatggtgcagggtctgttgcaggagttctccctctcctcgcaggaaggcgtggcgctgatgtgtctggcggaagcgctgctgcgtattccggataaagccacccgcgatgccctgatccgcgacaaaatcagtaacggcaactggcactcccacattggccgcagtccgtccctgttcgttaacgccgccacctggggcctgctgtttaccggcaagctggtctccacccataacgaagccaacctgtcgcgctctctgaaccgcatcatcggcaagagcggcgagccgctgatccgcaagggtgtggacatggcgatgcgcctgatgggcgagcagttcgtcaccggggaaaccattgccgaagcgctggcgaacgcccgcaagctggaagacaaaggcttccgctactcctacgacatgctgggtgaagcggcgctgaccgccgccgacgcgcaggcctacatggtctcttaccagcaggcgatccacgccatcggtaaagcgtccaacggtcgcggtatttatgaaggtccgggcatctctatcaagctttccgccctgcacccgcgctacagccgtgcgcagtacgaccgggtgatggaagaactctacccgcgcctgaagtccctgaccctgctggcgcgccagtatgacatcggcatcaacatcgacgccgaagaggcggaccgtctggagatctccctcgacctgctggaaaaactgtgcttcgagccggagctggcgggctggaacgggattggtttcgttatccaggcctaccagaaacgctgtccgttcgtcattgactacctgattgacctggccagccgcagccgtcgccgcctgatgatccgtctggtgaagggcgcctactgggacagcgaaatcaaacgcgcccagatggaaggtctggaaggttatccggtctatacccgcaaggtctataccgacgtctcttacctcgcctgcgcgaaaaaactgctcggcgtgccgaacctgatttatccgcagttcgccacccacaacgcccacaccctggcggcgatctacagcctcgcgggtcagaactactatccgggccagtacgagttccagtgcctgcacggcatgggtgaaccgctgtacgagcaagtgaccggtaaagtggccgacggcaagctgaaccgtccgtgccgaatctatgccccggtaggtacccacgagaccctgctggcctacctggtgcgtcgtctgctggagaacggggcgaacacctccttcgttaaccgcatcgccgataccaccctgccgctggacgaactggtggccgatccggtacaggccgttgagaagatggcggcgcaggaaggccagattggtctgccgcatccgaaaattgccctgccgcgcgagctgtacggcgcgggccgcgtcaactcggcgggtctggatctggcgaacgaacaccgtctggcgtcgctctcttccgccctgcttaacagcgcattgcagaagtggcaggccaggccgatccttgagcagtccgttgaggacggtgaaatgcagccggtgatcaacccggcagagccgaaggatatcgtcggctacgtgcgcgaagccacggaaacggaagtggagcaggccctggagagcgcggtgaacaacgcgccaatctggtttgccaccccgccgcaggagcgtgccgccattctggaacgcgcggcggtgctgatggaagatcagatgcagcagcttatcggcattctggtgcgtgaagcgggtaaaaccttcagcaacgccatcgccgaagtgcgcgaggcggtcgacttcctgcactactacgccggtcaggtgcgcgatgatttcgacaacgaaacccaccgtccgctcggcccggtggtgtgtatcagcccgtggaacttcccgctggcgatcttcaccggccagattgccgcggcgctggccgcaggcaacagcgttctggcgaaaccggcagagcagaccccgctgattgccgcccagggcattagcattctgctggaagcgggcgtaccggcgggcgtggtgcagctgctgccagggcgcggtgaaacggtcggggccaaactgacctccgataaccgcgtacgcggcgtgatgtttaccggttctaccgaagtggcctccctgctacaacacaacatcgccacccgtctggatgcgcagggccgtcctaccccgctgatcgctgaaaccggcggcatgaacgccatgatcgtggactcctccgcgctcaccgagcaggtcgtcgttgacgtgctggcctctgctttcgacagcgcgggccaacgctgttccgccctgcgcgtactgtgcttacaggatgacgtggctgaccacacgctgaagatgctgcgcggtgcgatggcggaatgccgcatgggcaacccgggccgtctcaccaccgacatcgggccggtgatcgacgcggaagccaaagccaacatcgaaaaccacattcagaccatgcgtgccaaaggccgtccggtgttccaggcggtgcgcgagaacagcgaagatgcccgcgagtggcagacaggcaccttcgtgccgccaacgctgattgagctggcaagcttcgacgagctgaaaaaagaggtcttcggtccggtactgcacgtggtgcgctacaaccgtaacaacctcaacgagctgatagatcagatcaacgcctcgggttacggcctgacgcttggcgtgcatacccgtatcgacgaaactattgcccaggtgaccggcaatgctaaagtcggcaacctgtacgtcaaccgcaatatggttggcgcggtcgtgggcgtgcagccattcggcggtgaaggtctctccggcaccggcccgaaagcgggcggtccgctctatctgtaccgtctgctggcaaaccgtccggaaaatgcgctgggcgtgacgctggcgcgtcaggacgcggaatatccggtggatgcgcaggtgaaagccgtgctgacccaaccgctggacgcgctgattaagtgggctgaaaatcgtcccgagctgcatgcgattgcacagcagtacggcgagctggcgcaggcgggaacacagcgtctgctgccgggtcctaccggtgagcgcaacacctggacgctgatgccgcgcgagcgtgtgctgtgcgtggcggataacgagcaggacgcgctggtgcagctggcagccgcaacggcaacgggctgtgaggtgctgtggccggaagatgccctgcatcgcgacctcgccaaacagctgccaaaagcggtctcggcccgcattcgctttgcgaaagccgatgccctgctgacccagccgtttgacgcggtgatctaccacggtgattccgaccagctacgcgaactgtgcgagcaggtggcggcccgcagcggcgcgattgtctcggtgcagggcttcgcccgcggggagaccaacctgctgctggagcgcctgtacgttgagcgctcgctcagcgtcaacaccgcggcggcgggaggtaacgccagcctgatgacaatcggttaa

SEQ ID NO: 114938 - DNA, 396 bp, Enterobacter cloacae
atgaaaagagtatttctcgcaggtgcagccctgctcatgagcgccagcgcgctggccgacgagtgcgataacgcgaccacccagcttgaactgaacacctgtagcgcgcagcagtaccaggccgccgataaaaagctcaacgagacgtatcaggccgccatcaaacgtgcggcagcgcctcagcgcgatctcctgaaaaaggcgcagcaggcgtggattagcctgcgcgacgcggactgtgcgtttatcggttcgggtacggaaggcgggagcgttcagccaatgattgttaaccagtgtctggcggagaaaaccgcggagcgcgaagcgtttctggccacgctgatgcagtgtgaagagggcgacttaagctgtcctcttccgccgggaaactag

SEQ ID NO: 114939 - DNA, 639 bp, Enterobacter cloacae
atgacacaaggcgcagtgaaaacacccggtaaacgttcgcaggcggtgagcgccaagaaacaggcgatcctcagcgctgcgctggagacattttcgcagtttggtattcacggtacgcgccttgagcaggtggcggagcaggccggggtgtccaaaaccaatctgctctactactacccgtcaaaagaggcgctctatatcgcggtgatgcagcagatcctcgatatctggctggcacctctcaaggcgtttcgcgaagagctggccccgctggtggcgatagaggagtacatacgcctgaagctggaggtatcgcgtgattacccgcaggcatcaaggctgttctgcctggagatgttgcagggcgcgccgctgttgcaggcggagctgaccggcgatttaaagcagctggtggacgataaatcggccattattgccggatgggtcgccagcggaaaagtggcgcccgtcgatccgcatcatctgatcttcatgatttgggcctcaacccagcactacgctgacttcgcggcccaggtcgaggcggtgaccggtaaaacgctccaggacgaggcgtttttccagagcaccctggaaaacgtacagcggatgattatcgaagggatccgcgtgcgctag

SEQ ID NO: 114940 - DNA, 1092 bp, Enterobacter cloacae
atgaaaattggcgtatttgtaccgatcggcaacaacggctggcttatctcgaccactgccccgcaatacatgccgacctttgagctgaataaagccatcgtgcagaaagcggagcactaccacttcgactttgcgctctcgatgatcaagctgcgcggtttcggcggtaagaccgaattctgggaccacaacctggagtctttcaccctgatggcgggcctggcggcggtaacctcgcgcatccagatttacgccaccgccgccacccttacccttcccccggcaatcgtggcgcggatggcctccaccatcgactccatctccggcgggcgctttggcgttaacctggtcaccggctggcaaaagccggagtacgagcagatggggatctggccgggggacgattacttctcccgtcgctacgactacctgactgaatatgtgcaggtgctgcgcgatctgtggggcaccggcaaaagcgatttcaaaggcgacttcttcaccatgaacgactgccgcgtcagcccgcagccgtcggtgccgatgaaggtgatatgcgccggacagagcgacgcgggaatggaattctcggcgaaatacgccgacttcaacttctgcttcggcaaaggcgttaacaccccggccgccttcgcgcccaccgcggcacgcatgaaagcggccgccgacaaaaccgggcgcgacgtgggctcctacgtgctgtttatggtgattgccgacgaaaccgacgacgccgcgcgcgccaaatgggaacgatacaaggacggcgcggatgacgaagcgctgagctggcttaccgagcagagccagaaggatacccgctccggcgcggacaccaacgttcgccagatggccgacccgacgtctgccgtcaatatcaacatgggcaccctggttggctcgtatgccagcgtcgccagaatgctcgacgaagtggctgccgtgcccggcgccgaaggcgtgctgctgaccttcgatgattttctcaccggcgtggaaactttcggcgagcgcattcagccgctgatgcagtgccgcgcccacatccctgccgtgacgaaggaggtggcgtaa

SEQ ID NO: 114941 - DNA, 690 bp, Enterobacter cloacae
atgacgaccctcaacgctcgcccggaagccattacctttgacgcgcagcgcagcgcgctgatcgtggtggatatgcaaaacgcctatgccagtaaaggcgggtatctggatctggccgggtttgacgtctccaccacgcagccggtgattgagaacatcaaaaccgccgtgagcgccgcgcgtgctgcgggcatgctgatcgtctggttccagaacggctgggacgagcagtacgtcgaggctggcggtcccggctcacccaactttcacaaatccaacgccctgaaaaccatgcgccaacggcccgaactccagggcacgctgctggcgaaaggcggctgggattatcagctggtggatgagctggtaccggaacccggcgatatcgtgctgccgaaaccgcgctacagcggctttttcaataccccgctcgacagcctgctgcgcagccggggcattcgtcatctggtctttacgggcattgccaccaacgtgtgcgtggagtcgaccctgcgcgacggctttttcctcgagtattttggggtggtgctggaggatgccacccatcaggccgggccggattttgcccagaaagccgccctgttcaatatcgaaaccttttttggctgggtcagtaacgtcaatgatttctgcgacgcgctggatcccccgctcgctcgcatcgcctga

SEQ ID NO: 114942 - DNA, 387 bp, Enterobacter cloacae
atgccgaaatccgtgattattccgccgggcaccagcaccccgattgccccgtttgtccccggcaccctcgctgacggcgtggtgtatgtctcgggcacgctgccgtttgataaagataacaacgtggtgtttatcgatgacccaaaggcgcaaacccgccacgtgctggagacgatcaaaaccgtgatcgaaacggcgggtgggacgatggaggacgtgaccttcaacagcatctttatcaccgactggaaaaactacgccgcgattaacgaaatctacgcggagtttttccccggcgataaaccggcgcggttttgcatccagtgcgggctggtaaagcccgaagcgctggttgaaattgccaccgttgcgcacattgcaaagtga

SEQ ID NO: 114943 - DNA, 801 bp, Enterobacter cloacae
atgaaactgtccatttccccgcccccctttgcgggtgcgcccgtggtggtgctgattgccgggctcggcggcagcggcaactactggctgcctcagctcgccatgctggggcaggagtatcaggtggtgtgctacgaccagcggggcacggggaataatccggatcccctgccggaagactacaccctcgcacacatggccgacgagctcgcgctggcgttagccggggccgggatcgcccgttactgcgtggtcggtcacgcgctgggggcgctggtcggcctgcggctggctatcgataagcccgacgccctcaccgcgctggtctgcgtcaacggctggctgaccctcaatgcccatacccgccgctgttttgacgttcgcgaacgcctgctgcatgcgggcggcgcgcaggcgtgggtagaggcgcagccgttgttcctctacccggcagactggatggccgcccgcgccccgcggctggaggccgaggacgcgctggcgctggcccactttcagggcaaagccaatctgctgcgcaggctacatgccctgaagcaggccgattttagccgccacgcggcacgcgttcgctgccccgtgcagattatctgttccaccgacgatctgctggtgccgtccgtctgctccgctgaactgcacgccgccctcccgcacgcccgcaaaacggtcatgcgccagggcgggcatgcctgcaacgttaccgcgccggacacctttaacactctgctgctgaacgggcttgcgagcctgctgcacagcccagaacccgctttgtaa

SEQ ID NO: 114944 - DNA, 591 bp, Enterobacter cloacae
atgagcgaagccatcacgcccgccgcgctggaaacgctgtttaccggcgcacgtacccataacggctggctggatataccggtcagtgacgagacgctgcgcgagatttatgacctgatgaaatgggggccgacgtccgccaactgctcaccggcgcgcattgtgtttgtgcgaagcccggaaggaaaagagaagctccgcccggcgctttccagcggcaacctggagaaaacgctcacggccccggtcacggcgattgtcgcctgggacagcgagttttatgagcgcctgcctgaactgttcccgcacggcgatgccagaagctggtttaccgcaagccccgcgctggcggaagagaccgcctttcgcaacagctcaatgcaggccgcgtacctgattttcgcctgccgcgcgctcgggctggacactgggccgatgtcgggttttgaccgggaaaaagtggacgcggcctttttcacgggcacgctgctcaaaagcaatctgctgattaacatcggctatggcgatatgagcaaactgtacggacgcctgccgcgtctggcctttgacgatgcctgcgggctggcgtaa

SEQ ID NO: 114945 - DNA, 495 bp, Enterobacter cloacae
atgacgaccctcgatcaacaaacgttccgtgatgccatggcctgcgtcggtgcggcagtcaatatcatcaccaccgacggcccggcgggaaaagcgggcttcaccgccagcgcggtatgcagcgtaaccgataccccgcccactctgctggtttgcctcaaccgtggcgcgtccgtctggccgattttcagcgagaaccgcaccctgtgtgttaatacgctgagtgccggacaggagccattatccaacctgtttggcgggaaaacgccgatggcggaacgctttgccgccgctcgctggcagacaggcgacacgggctgcccacgtctggaaaatgcgctggcctcgttcgactgccgcatcagccaggtggtgagcgttggcactcacgacattctgttctgcgacattgtatccatcgtacgccacccggcgccgcaagggctggtgtggtttgaccgcggctatcacgcacttatgcgacccgcctgttaa

SEQ ID NO: 114946 - DNA, 1323 bp, Enterobacter cloacae
atgttcggacttccccactggcagttgaaatcgacctccacagaagcaggcgtggtcgcgccggatgaaaggctcccgctcgggcagaccatggtgatgggcgtgcagcatgcggtcgcgatgtttggggcgacggtgctgatgcccatgctgatggggctggatcctaacctcgccattttgatgtcgggtatgggtaccctgctgttcttttttgtcaccggcgggcgtgtgcccagctatctgggctccagcgccgccttcgttggggtggtcattgcagcgaccgggtttaacggtcagggtattaaccccaacctgagcgtggccctcggcggcattatcgcctgtgggctggtctacaccctgaccggtctggtggtgatgaaagtcggcacgcgctggatcgagcgaatgatgccccccgtcgtcaccggggcggtggtgatggcgataggcctgaacctcgcgccgattgcggtgaagagcgtatccggctcgccgtttgaaagctggatggcggtgataacggtgctgtgcatcggcgtggtggcggtctttacgcgcggcatgatccaacggctgctgatcctggtcgggctgattgcggcctgtctggtctacgcgctgctggcgaacgtgttcggtctcggcaaaccggttgatttcacactgattcaccaggccgcctggttcggcctgccgcagatgacctcccccacctttaacgctcaggcgatgatgctcatcgcgcctgtcgcggtgattctggtggctgaaaacctgggccacctgaaagccgtagcgggaatgaccgggcgcaatatggatccgtatatggggcgggcgtttgtgggagacggtctggcgaccatgctctccggctcggtcggcggcagcggcgtgacgacctacgcggaaaacatcggcgtgatggctgtgaccaaagtctactcgacgctggtcttcgtggcggcggcggtgatggcgatgctgctcggcttttccccgaaattcggcgcattgatccacaccatcccggcccccgtgattggcggcgcctcgattgtggtatttggtctgattgccgtggcgggggcacgcatctgggtgcagaatcatgttgatctgagccagaacggtaatctgatcatggtggcggtgacgctggtgctgggggcgggtgatttcgccctgacgctgggcgggtttacggtgggcgggattggcacggcgaccttcggcgcgatcctgctcaacgccctgctgagccgccggaaaagggatgtaccgcaaggaaaagccatcaccccctccacctga

SEQ ID NO: 114947 - DNA, 921 bp, Enterobacter cloacae
atgtccgtttcccgttttaccttctccattaagcctcaggaagccatcctgattttgatcaccatgttctggggcggaacctttcttgccgttcagtacgcggtcacgatgagcgatccgtttttcttcgtggggctgcgctttgcaaccgcggcgattgccgtggcgcttatttcgctgaaaaccctgcgcgggttgaccctgagagagcttaaagcgggtgtcgccattggcgtggcgattgccatgggctacagcctgcaaacgtgggggctccagtctatctccagcagtaaatccgccttcatcaccgccatgtacgtaccgctggtgccgctgttgcagtggttgtgcctcggcagaatgccgggcttgatgtcgtgcattggcatcgtgctggcgttcatcggccttattttattagccgggccggaaaataatctgctggcgctggggccgggggagatcatcactctggtgggggccgtcgccattgcggcagaaattatcctgattagcgcctgggcaggaaaagtggacgtcaagcgggtgacggtggtgcagcttaccaccgcgtcgctggtggcgttcgcgacgatggtgccggcaggggagtccgtcccgccgatgtctaccgggcttatcgtcgtggcgctggggctgggcattttcagcgccattatccaggtcaccatgaactgggcgcagcgcagcgtatccccaactcgggcgacggtcatttataccggtgaaccggtatgggcgggtattttcgggcgactcgccggggagcgtctgcccctgctggcgctggtgggcgcggcgtttattatcgccggggtgctggtgagcgagttgaagttaaaaaaacgacgtaaggcgactgccggattgagcgctgaacaaggggcagatagctaa

SEQ ID NO: 114948 - DNA, 171 bp, Enterobacter cloacae
atggcaaaccatcgtggtggttcaggtaatttcgctgaagaccgtgaaagagcatcagaagcaggtcgtaaaggtggccagtctagcgggggcaactttaaaaacgaccctcagcgcgcatcagaggctggtaaaaaagggggtaaaaatagccacggcagcaacaagtag

SEQ ID NO: 114949 - DNA, 597 bp, Enterobacter cloacae
atggcaaaagttctggtgctctattattccatgtatggacacattgaaaccatggctcacgcagtagcagaaggcgcaaacagagtagacggcgttgaggtcgtggttaaacgcgtaccggaaaccatgcaggcggaagccttcgccaaagccggggggaaaacacaaaacgccccggtcgccaccccgcaggagctcgcggactatgatgccattatcttcggcaccccgacccgcttcggcaatatgtccggccagatgcgcaccttcctcgaccagacgggcgggctctgggcctccggcgcgttatacggcaagctggccagcgtgttcagctctaccggcacgggcggcggccaggagcagacgatcacctccacctggactacccttgcccatcatgggatggtgattgtgccgattggctacggcgcgcaggaactgttcgatgtttcccaggttcgtggcgggacaccgtatggcgcgacaaccattgccggtggggatgggtcacgtcagccgagcaatgaagaactttcaatcgcccgctatcagggtgaatacgtcgcgggtcttgcaaaaaaactgaacggctaa

SEQ ID NO: 114950 - DNA, 228 bp, Enterobacter cloacae
atgccaactcaagaatccaaagctcaccacgtgggcgaatgggcaagtttacgcaatacctctccggagattgccgaagccatctttgaagtctccaattatgacgaaaagctggctgagcagatttgggaagaaggcaacgatgaagtgctggttcgcgccttcgaaaaaaccgacaaagactcgctgttctggggcgagcaaaccatcgaacgtaaaaacgtctga

SEQ ID NO: 114951 - DNA, 1242 bp, Enterobacter cloacae
atgagaaaagcactactcgcagttgccgtggcatgtaccctttccgtgacctttggcgcacaggcgcaggacacgccggacggctatcagctggaacaggtgctcatcatgagccgccacaacctgcgcgcgccgcttgccaataacggcagcgtgctggagcagtccacgccgaagcagtggccggagtgggacgtcccgggtggacagctcaccaccaaaggtggcgtactggaagtgtatatgggtcactatatgcgcgagtggctggcagagcaggggatggtgaagacgggtgaatgcccgccagcggataccgtctatgcctacgccaacagcctccagcgcaccgtggcgaccgcacagttctttatcaccggcgcgttccccgggtgcgatgttcctgtgcatcaccaggaaaaaatgggcaccatggaccccaccttcaatccggtcattaccgataactcccctgagtttcgcgagaaagcgctgaaagcgatggagacggaacggcagaaaatgcagctggatgaaagctacaaactgctggaacagctgacaaactacagcgactcgccgtcctgcaaggagaaaaaagtctgctccctgacggaggcgaaagatacgttcagcgccgattatgaaaaagaaccgggcgtctccgggccgctgaaggtgggtaactcgctggtggatgcgttcacgctacagtattacgaaggcttcccgacagaccaggtggcctggggggaaatcaaaaccgatcagcagtggcgcgtgctgtcgaagctgaaaaacggctatcaggactcgctgtttacgtcgacggaggtggcgcagaacgtggctaaaccgctggtgaagtacattgataaagcgctggtgaccgaccaggcaaaagcgccaaaaatcaccctgctggtggggcacgactctaacatcgcctcgctgctgaccgcgctggacttcaggccttatcagctgcacgaccagcaggaaagaaccccgattggcggtaaaattgtcttccagcgctggcatgacaaaaacactaatcaggagctgatgaaaattgagtatgtctaccagagttcagagcaactgcgtaacgccagcgtactgtcgctgcaatcccctgcgcagcgcgtgacgctggagctgaagggctgtccggtggatggcaacggcttctgtcctgtcgataaattcaatgcggtgatgaacaacgcggcgaaatag

SEQ ID NO: 114952 - DNA, 165 bp, Enterobacter cloacae
gtgaaacgtacccgccttgaagagagcacctgccccgtcgcccgttcgctggatattatcggcgactggtggtcgctgctgattgttcgcgacgcgcgctacggggtcgcagtcgatattctggtggcctatctcaccgatgaagcggggatccgcgctacgtaa

SEQ ID NO: 114953 - DNA, 360 bp, Enterobacter cloacae
atggcagagctgctggaagcgtgctgcgaaaaaaaatctgaggcgtatacctgcccgatgacgcagtttgtgaatctgatttccggtaagtgggcgatccccattctctatcgcctgattgtgttcaatacgcccgttcgctttggcgatctgctgcgtgccgctgcccccatcacccagaaagagctgacgaagcagctgcgcctgtttgagcagcgcggtctggtgacgcgaacggtctacccggagatcccgccgcgcgtggagtatcagatcaccgagctggggctaacccttcaggacgcactctcgccgctggccgcctggatgagcgaatacggtgaccagcttcagcgttag

SEQ ID NO: 114954 - DNA, 750 bp, Enterobacter cloacae
atgggtcgtttaaccgataagtatacgttgattaccggcggcaccagcggtatcggtctcgccaccgcgcaggcgtttatcgccgaaggggcgcgcgtcgccgtgaccggacgcaacccggataccctcgccgaagcagagcgcattctgggcgataaggcctgggtgatcccaaccgacgcaggcgatatttcgtcgcaaaaagcgctggcggagtccctcaccgcccgctggccacgcctggatgcggtctttctcaacgccggtgacgtaacgcacgcgccgctggaagtctggcaggaagaggcctgggaccgtctgatgaacatcaacctgaagggaccgttctttttaattcaggcgctgctgccgctgctgaataacccatcctcggtgatcctctgcggctccgtgagcgcgcgcatcggcctgcccaccagcagcgcgtatgccgcgagcaaggccgccctgctgtcgctggcgcgtacactgtcggcggagctgctgccgcgcgggatccgcgtcaacggtctgagtcccggtccggtggaaaccccggcgtttacgaaaacgggcttaagcgacgaggcgcttaacgcgatgatggcagaggtcattaagctggtgccgctgggcagaatgggctcgacgaccgagctggcaaaagccgcactctatctggcctccgacgagtcgagctacacggtgggaacggaactgctggtggacggcggaatggggagcctgtaa

SEQ ID NO: 114955 - DNA, 504 bp, Enterobacter cloacae
atggcatgggttgataacctgctgaatcattttgcgctgtatccggcacatctgtttgtgctgttattcgtgatggcgctgagcaaatcgacggtgctgatctcctccgtgctgccgcctgcgtcggtgatgctgctggcgggtattaccgtcagccaggggagcatgcatcctgcgctgacgtggctcgccgtagtgatgggggcaacggcaggttcgatgctgaattaccatatcggccaactgatggggcatacccggatggtcacgcgcttcacctcaaagcatgccaataagttcctgcgggtccagcatcagctgcaaaagaacggggtcatcgtgctttttacgtcgcgcttcctggcggtgttgcgttacatcgttccgctggcggccgggatgctcaggctgaacgccgtcaaggtctacgccgtcagcctgctttccgcctgtgcgtgggcggcgctgtatgtcggcgcggtcaccggcatcagcgccttttga

SEQ ID NO: 114956 - DNA, 1002 bp, Enterobacter cloacae
atgtcttacgctattcacaaccaaaacctggcttttaatgacagcgccatcgcgcaatatatgaataccgattttatcgttatcgatatttcattatgcgtagctctggcacgcgagcagttctttgaaaaattaaaagatgatgatattccgtcgcatatttttatcgaagataacggtcgcctcgcgggtttaatcgccgtacgcaaattattgcaggccacggacaccgtgcagcctgttaaggggttgatgatatcggattttattcagctcaaaccggaagatgagcgggcggatgtcgccgggctgctggcgcacgcgggtgcggatgtagtgccggtggtgacccacggcaagctggtgggctgccttaccgagcgtgaaatcgcccatctgctggaagatgacgttactgaagatgcccagcttcagggggcgacgctgccgctggagaagccctatctggaaaccagcgccttcagcctgtggaagaaacgctccgtctggctgctgctgctgtttgttgcggaagcgtataccagttcggtgatccagcattttgaagaggcgctggaatctgccatcgcgctggcgttctttattccgctgctgattggcaccggcggaaacagcgggacgcagatcacctcgacgctggtgcgcgccatggcgctgggtgaagtccaccttcgcgatgtgggtcgcgtgctgcgcaaagagatcagcacctcgttaatgattgccgccacgctgggtctggcgggctgcgttcgcgcctggatgatgggtattgggatggaaatcacgctcatcgtcagcctgacgctggtctgcattacgctgtggagcgccatcgtctcgtcggtgatcccgatggtactgaaacgctgcaaaatcgatccagcggtggtctccgcaccgtttatcgccacgctaatcgacgggaccgggctgattatctacttcaaaatcgcgcagtatacgctggggctggaataa

SEQ ID NO: 114957 - DNA, 519 bp, Enterobacter cloacae
atgaattttttatttatcagtgataactactacctttgccagggtgtatcaagctccctgacatcaacccatttgattcgcgatgacgcggatattcacgatcttgatggggtcgatcaggcgatggattttatcattgcgattgaacaggataagttacgcaataaaaccattcggcaggtcaaaaaagttaagcgtgattacattgtcctgatgcatgagatagaagccaaccgcgcagtgagaatcgataatattatctattcgtcgatgcattttactgctcacccttttcagcagctgatgcgcttttaccgggcgctcagaacacactcctttacgcgacgcgaatatgacgtgctgaagctgtttcatttggaaaaccatgagatcgcgaaaaagctgcaattgtcacaaaaaacgaccagcacctaccgcgtgaggatcctcgagaaattaaatatgcgctcaaaaaacattctggcgatgacccgtgtaaaatcggcgatcgtcgattaa

SEQ ID NO: 114958 - DNA, 1614 bp, Enterobacter cloacae
atgaaaaagatcctgctcgcgtttgcgttctgttttgccgccctgagcgccttctcatcgtatgccgcagagccccgccaggcgcctacggagcaggagcgcgcccgaacggtctacatcttccatcagcccatcgtcatgctcaaggcgaaatttggcctgaccacgccggaagaacgcgttttacgcatccgcaacaccctgcgcaattttaccgaggcggatgtgcgtgagccgctcagcatcgtccccgtgacccgctataaccagcagggacggctaatagtgatgaacgggaaacctgtgatgctgctgacggaaggggatttggacgaaggggacgatcttaccctcgatcaggccgcacagcgcgtgctggcgcgcatggaagcgcaaaggatggcgctgcgcgatcaatacgataccggctggctggcgctgtcgacggtaaaaacagccgctggcctgctggcgctgttgctgctctgctacggcgcgtggcgatcctggcgctggttccggcgcgtctaccgtcggcgtattgtggagaatcgcagccgggtgccgcaaagctggcggcggtacattggcgcaattgagattcggctttacgccttgctgatgttcctgctggggttgatcggcttttacgtctggctgagctgggcattcagtctgtttccgtggacgcgggtgtggggcacgtcgctgggagactggacgcttcgcgtggtgcagcaaatcgccctggcgattgtctcggccttgccggggctgacgattgtgctgatcattttcctcattaccgcatttattctgaagcttctcaggatggtgctcaatcaggtggaggctggtcgtctgcaacttcccggcgtacatccggaaaccgtgggggctacccgtaagctcatttccgttgccgtctggctatttgctctctccgccgcctggccgtttcttcccggtgcgaactcgctggcgtttaaaggtattagcgtcttctttggcctgatgttaacgctgggctcggcaggggtgatgaaccatgccatgagcggtctggtcctgatttactcccgcgctctgcgcaaaggcgatgtcattcgggtggcggataacgaaggcaaggtcagtgaaattggcatgctggcgaccaaaattattacccgggaaaattatgtcgttaccgtgcccaacgcggtggtggtgagcggtaagatcaccaatctgagcgcgctacagcccgatggcagcctcaatctgacggtcagcgtcacgatcggttatgacaccccatggcgtcaggtgcatgccatgctggagctggccgcgaaacgggcaaaagggattgacctttccgagccgccgctggtacgccagttagggttaatggactggtatatcgcttacgaattgcaggtccgtctgctgcccgaacagtccctcgcggttgcccgcaatgaactgcatagccagatacaggatgtgtttaacgaatttaacgtgcagatcatgtccccgaattttgttatgcagccagagggcagcgtaatggttgccaaagagaactggtataccgcgccagccaaaccccctcagggcgaaacgtga

SEQ ID NO: 114959 - DNA, 1008 bp, Enterobacter cloacae
atgttacttacaaatgggttatttctggcttcactgctcttcatggcgcctgccactttcgccgcaaccacctggcccctcacgattgaaaattgcggcgttaagcagacctttacgcaggctcctcagcgcgtcgtgaccgtgggtcagcatgaaacagaattactgctcgcactggggctggagaaaacgatcgccgcgacgtcagtctggttcggcaagctcccacccacgctggaggatgccgggaaaaacctcccccggcttgcggataattccccctcctttgaggccgtggtaggacagaaacctgaactcgttctcgcacagtatcactggcacattggtccgcagggagaagtgggaacccgtgagcagtttgcgtcgctggggattaatacgtggatctcccctgccgactgcacggataaaacggtaacggaaacctcaaacgcagacggagcacgtagcgcgccgttttcactggcggaaattacacgggaagtgacagatctggcgacgatttttgatgtttccgcgcgaggtgagcagctcaatcgtgcgctggcggagcgtattaaaaaggcccaggcgcgcgcctccgcgaaaccgcttagcgttgtattctggttctccagcagccgtctgaatggcgatccctgggtggccgggaattacggcgcgcctggctggatcagccgcacgctggggttgaagaacattattgactctcacgacgaatggcccgctgtaacgtgggaacatatagcccgctcgcagccggacgtgattgttatcgccgggatgtcccgcaggctctaccctgccgatgacgttgaggtaaaaaaagcgttcttgcgcagtgacccggtgacaaagaacatgcctgcggtcaggaacaaccacatcatcgtggtgccagcgatgtcgttaaacccttcattgcgtaacgtcgatgcggttgagcttatcagcgatcggctggcttctttccaggatgaacaatga

SEQ ID NO: 114960 - DNA, 1032 bp, Enterobacter cloacae
atgagtcatttcgcttttgaccgccgccagcagggtttactggcagcaggtgccatggcgctgccgctgatgctggtctttgccgccagtatcggtgatatgccggtgtcgtatgccagtaccgggaaagcgatcctcaacggactgggtttgacctcttatgctttgccgcaaacggaggaaggtatcgtctggcaatatcgcatgagccgggcagtaatggccgcgtgcaacggcggcggcctggcgttgtgcgggctggtgttacagtcgatcctgcgtaaccctctggctgagccttatctgctggggatttccgcgggcgcatcgctgggagccgtctgcgtgatgcttctcggcatcggggggagcgtgattggcgtaagcagcggtgcgtttgtcggctcgtgcgccgcctttgcgctcatcatggtgattacgaacgggatgagtgaaagcccgtcgcgcattttgctggctggcattgcgggcacccagctcttcaacgccatgaccgcgtacgtcgtcagtacgtccgccaatgccgagcagtcccgtagcgtcatgttctggctgctgggaagtctgagcggcgtgcgctggcctgacgcgctgctggcgctggccgttacgcttgcgggtttactggtggtattgctcttttcacgggcgctggacaccttcaccttcggggatgaggtctccaccacgctggggatcccggttaccgccgtgcgtattgtcttattgctgacctgtgccattgttaccgcaacgctggtgagcgccacgggcgcagtggggtttgtcgggctggtcattccccatgtaacgcgcatgctatgtgggccgggccatcgtctatctatcccgctgacgtttcttatcggcgcccactttatgatcctcgccgatatcgtctcacgcacgctgattgtgcaccaggttctgcccatcggggtggtgactgcgctggtgggcgcccccgtctttgtggcgttgctttatcaaaaccgaaaggagcatccatga

SEQ ID NO: 114961 - DNA, 762 bp, Enterobacter cloacae
atgaatattactgtggccgggttaaccgtaacccgacaagcgcagacggtgcttaaggatatcgatctcgacctgccatccgggcagattatcggcctgttagggccaaacggctcgggcaagtcgacgctgctgcgctgtctcgccgggctgtttccacgactcagtgaacgcgtggcgcttaatggcacaacgctaggcatgatgccgctgaaaaaacgcgcgcagcacatggcgtttgtcccgcaacatgctgaggtcgacggagaactgaccgttgaggacattgtcagactggggcgtacgccctaccggaaaacattccagaaaacctcgcgcgacgatgaggctgcggttgagcaggcgattggcctgatgcagttatgccgcttacgccagcggcgatggcactctttgtctggcggagaacgccagcgaagccagatagcccgcgcgctggcccagcagccgcaggtgctgttgctcgatgaaccgacaaaccacctggacattcagcaccagctggagctgatgcggctcgtttcacagctgccgcttacggtggtggttgcactgcacgatctcaatcttgcggccaattattgccagcgtctgatcctcctgaaggccgggcagatcgccgccacgggcgcgcccgaagcggttctgacgccggcaaacatcgaggacacctggtgcgtaaaagctcaggtctgcaaggccgacgccgggatcacgataagctacaacatggtggcatga

SEQ ID NO: 114962 - DNA, 1629 bp, Enterobacter cloacae
atgaaaccacaaacacgcacgcactttacactctctttgttaaccgcagggatcctgtgcgccagcacggcaacctgggcggctaacgtgccggcaggaacccagctggcagataagcaggaactggtcaggaacaacggcagtgaacccgcctcgctcgacccgcataaagtcgaaagcgatgtcgaattcaatattatcagcgatttattcgacgggctggtcagcgtctctccggcaggtgaaatccagccgcgcctggcggagaaatgggaaaataaagacaacaccgtctggacgttccatctgcgtccgggcattacctggagcgatggaacccccatcaccgcggaagatattgtctggagctggcagcggctggtcgacccgaaaaccgcctctccgtatgccagctatcccggtagtatgcgtatcgtcaacggcactgatatcgcagaaggcaaaaaagcgcccgagtcgctgggggtgaaagccatcaatgacaccacgctggaagttacgctcacgcaacctaacgccgctttcctggcgatgctggctcacccgtctctggtgccaattgataaagtcctggtaggccgtttcggtgataagtggaccaaaccggagcacttcgtcagcagcggggcctataaactgtcacagtgggtggttaacgaacgcattgtggcggtgcgtaacccgaaatattgggataacgaacataccgtcatcaagaaggtgacctatctgcccatttcctctgaagctgctgacgtcaaccgctacaaagcgggcgaaatcgacattgtctacacggtgccgatcaaccagtttgctcagctgaagaaaacgctggggagcgagctggacgtttcaccgcagcttgccacctattattatcagttcaacactacccggccgccgttcaacgacgcccgcgtgcgcaaggcgctgaacctggcgctggataaagacatcatcgccgataaagtattagggcagggtcagcgcccggcatggctgatcagccagccgaatattggcggcgtcaagcttcagaacccggattacgccagctggccgatggataaacgcattaccgaggcgaaaaagctgctggccgaagccggatttaacgacagccatccgctcagctttaatcttctctataacacttcggaatcgcaccagcgtattgccattgccgccagctcaatgtggaagaagaacctcggcgtggaggcgaagctgcaaaatcaggagtggaaaaccatgcttgataccatgcacacccataactttgacgcggtacgctacgcctggattgccgattacgacgatgcggcaaccttcctgaacaacttccgtaccggggacagccaaaacaccactcagtacagcaatccggactacgatcgggcactggtgaacgcggcgaaatcgaaaacggcggaggagcgcggtaaattctaccagcaggcagaagatctgctgggacgcgatgtcccggcgatcccggtctatcattacgtgcgcacgcacctggtgaaaccgtgggtagggggcttcacgccagacaagctcgggtattactacaccaaagatatgtacatcaaaaagcactaa

SEQ ID NO: 114963 - DNA, 660 bp, Enterobacter cloacae
atggatcgtataattacttcttcacgcgaccgcacatcgctactcagcacccataaggtgctgcgcaatacctatttcatgctcagcctgacgctggcgttttcggcgatcaccgcgacggccagcaccgtactgatgctgccttctccgggcctgatcctcacgctggtaggtatgtacggtctgatgttcctgacctacaaaaccgcggataaaccggtgggtattctctccgcgttcgcctttaccggcttcctgggctacattctggggccaatcctgaatgcctatctgtctgccggaatgggcgacgtgattggtatggcgctgggcggtaccgcgctggtgttcttctgctgctcggcctacgtgctgaccacccgtaaggacatgtccttccttggcggtatgctgatggcaggtatcgtgattgtgctggtcggtatgctggcgaacatcttcctgcaattgcctgcgctgcatctggcaatcagcgcggtgtttatcctgatttcatccggcgcaatcctgtatgaaaccagcaacatcattcacggcggtgagacgaactatatccgcgccactgtgagcctgtatgtgtcgctgtacaacatttttgtcagcctgctgagcatcctgggcttcgccagccgcgattaa

SEQ ID NO: 114964 - DNA, 336 bp, Enterobacter cloacae
atgaatatgttgagttttgaaggcaaagagatcgaaaccgataacgacggttatctgaaagagagcagccagtggagcgaagcgctggcggagaaaattgcggaaaacgaaggaattactctctccccggaacactgggaagtggtgcgcttcgtgcgagaattttaccttgaattcaacacctcgccggctatccgcatgctggtcaaagccatggcgaataaatttggcgaagagaaaggcaacagccgttatctgtatcgcctgtttccgaaaggcccggctaaacaggcgacaaaaatcgccggcctgccaaagccggtaaaatgcatttaa

SEQ ID NO: 114965 - DNA, 282 bp, Enterobacter cloacae
atgtcaaatgtttgcaccattgcctgggttcatggccttgtacagggcgtcggattccgctacagcacccagcgcgaagcccttcagctcgggctgacagggtatgcgcgtaacatggatgatggcagcgtggaggttgtggcctgcggtgaggcggatcgggttgagaagctggtggcgtggctgaaagcgggcggaccgcgcagcgcgcgggttgataaggtgctaacggaaccgcatcaacccgaccgggaatacgctgacttcagtattcgctattaa

SEQ ID NO: 114966 - DNA, 1176 bp, Enterobacter cloacae
gtgttagccaaagggcgcgagaagtcattactgcgccgtcatccctgggtcttttccggcgcggttgctcgcatggaaggtaaagccagcctcggtgaaaccatcgatattgttgaccatcaggggaaatggttagcacgcggcgcatactcgccagcatctcagatccgcgcgcgcgtctggacgttcgataaagaagaaaccatcgatatagacttctttgtccgtcgtctgcaacaggcgcagcagtggcgcgagtggctggcaaagcgtgacgggctggacagctatcgtctgattgccggagagtccgacgggctgccgggcgtgaccattgaccgcttcggcaatttcctggtgttgcagctgctgagcgccggggcggaataccagcgtgccgcgctgattagcgccttgcaaaccctgttcccggaatgtgccatttacgaccgcagcgacgtggcggtacgtaaaaaagagggcatggagctgacgcaaggcccggtcaccggcgaactgccgcctgccctgctgcctatcgaagaacatggcatgaagctgctggtggatatccagggcggccataagaccggttattacctcgaccagcgtgacagccgtctggcaacgcgccagtacgttgccgataaacgcgtgctgaactgcttctcttataccggcggctttgcggtctctgccctgatgggcggctgtgctcaggtggtgagcgtcgacacctcacaggaagcgctggacgtggcgaagcagaacgttgagctgaataagctggatctgagcaaagcggagtttgtgcgcgacgacgtattcaaactgctgcgtaaataccgcgaccagggcgagaaatttgacgtaatcgtgatggacccgccgaagtttgttgaaaacaaaagccagctgatgggcgcctgccgtggctataaagacatcaacatgctggcgatccagctgctgaacccgggcggcgtgctgctgacgttctcctgctctggcctgatgacgacagatttattccaaaaaatcatcgccgatgccgcaatagatgcgggtcgtgatgtacaatttatagagcagttccgtcaggccgccgatcacccggtgatcgctacctacccggaagggctgtatctgaaagggtttgcctgtcgcgtcatgtaa

SEQ ID NO: 114967 - DNA, 318 bp, Enterobacter cloacae
atgattgccagcaaattcggtatcggccagcaggtccgccacaccttgcttggatatttgggtgtggtcgtggatatcgacccggagtattcccttgatgaaccgtcagcagacgatctggccgttgacgcagagcttcgcgccgcgccctggtatcatgtggttatggagggcgacgatggtcagcctgtccatacctatcttgccgaagcgcagctgagtggtgaactacaggatgagcatccggaacaacccactatggacgagcttgctcagaccatccgcaaacagttacaggcaccaagactgcgcaactaa

SEQ ID NO: 114968 - DNA, 414 bp, Enterobacter cloacae
atgaaagagaacgacattgtcgagattctgacgtccacgcgcactatcgcgctggtcggcgcgagcgataaaccggatcgcccaagctatcgggtcatgaaataccttctggatcagggttatcacgtgatcccggtctcgccgaaggtggcggggaaaacgctgctgggccagcagggctatgcgacgctcgcggacgtgccggaaaaggtggatatggtggacgtttttcgtaattcagaggcggcctggggcgtggcgcaggaggcaattgccattggcgcgaaaacgctgtggatgcagctgggcgtgattaatgagcaggcggccgtgctggcgcgcgatgccgggctgaaggtggtgatggatcgctgtccggcaatcgatattccccgtctggggctggcaaaataa

SEQ ID NO: 114969 - DNA, 663 bp, Enterobacter cloacae
atgaaaaccggcattgcctgggctatggttgcgttaatcatgccggtttgtgttttcgcaaccactctcagactctcaaccgacattgacctgctggtgctggacgggaaaaaagtctccagctccctgctgcggggtgcagacagtatcgagctggataacggcccgcaccaggtggtttttcgggtggaaaagaccattcgcctcgccgacaacgaacagcaggtgtacatttcgcctccgctggtggtcagctttaatacccaccttatcagccaggtcaattttcgtctcccgcgccttgagacagaaaaggagtcactggcatttgatgcctcgccgcgcattgaactggtggacggggactccatgcccatcccggtaaaactggatattctggcgctgacaaaaaggtcaaagggaacagactatgaagcggacaccgagacctacaacagggccagcaggcgcgcctcgctgccccagttcgccaccatgatggcggatgacagtaccctgctttcgggcgtatcggagctggatgtactcccccctcagtcgcagacccttactgagcaacgcctcaagttctggttccagaatgccgatccggacacgcgcgcccgttttctgcaatgggcgaagcaacaaccttcgtcgtaa

SEQ ID NO: 114970 - DNA, 459 bp, Enterobacter cloacae
atggaactgacaacacgcacacttccggcgcgcaagcacattgctctggttgcgcacgatcactgtaaacaaatgctgcttaactgggttcgtcgccatcagcctcttttacagcatcatgccctttctgccacgggaacaaccggcaacctgatccaccgcgaaaccggtctggaagtgaatgccatgctgagcggcccgatggggggtgaccagcaggtaggtgctcagatttcagaaggtaaaattgacgttctgattttcttctgggatccgctgaacgcggttccgcatgatccggacgttaaagcgctgctgcgtctggcgacggtgtggaacattccggtagccaccaatctttcaacggcagatttcatcattgaatcgccgcagtttaacgatccggtggagattttgatcccggattatcagcgttatcttgcggagagactgaagtag

SEQ ID NO: 114971 - DNA, 2055 bp, Enterobacter cloacae
atggaactgaaagcaacttcaatgggcaaacgcctggcgcagcacccttacgacaaggttgtccttctcaatgcgggagtgaaagtctccggggaacgccacgaataccttattccgtttaatcagctactggccattcattgtaaacgagggctggtatggggggagctggagttcgtcctgccggcagacaaagtggtgcgactccacgggaccgagtgggcggaaacccaacgcttccaccatcatctgaacacgcgctggcagcagtggagccaggagatgagcgtgatagccgcacaggtgctacaacaggtgctggacgatatcgcgctaagcaatacgcagcagaagtggctgacgcgccagcaaaccgccgggcttcagcaaaaaatcgcccaggcgctgacggcattgcctttaccggtggcgcggcttgaggaatttgataactgccgcgacgcgtggcggaagtgccaggcctggctgagcgatatcgagaaaagccgtctggcgcataaccaggcctggactgaggcgatgcttacgcaatatgccgacttcttcagtacagtggagtcatcgcccctcaatcctgcccaggcgcgcgccgtggtgaatggcgaacagtctttattggtgctggcaggtgccgggagcggcaaaacgtcggtgctggtggcgcgcgcgggttggcttctgacaacgggcgaggcggttgcagaccagattttgctgctggcctttggtcgcaaggctgcgcaggagatggatgagcgcattcaggcgcgtttgcatacccaggatatctcggcgcgcacgttccactccctcgctttacacatcattcaacagggcagcaaaaaagttcctgttgtcagcaagctggagaacgacgctcaggctcgccaggcgctgtttatcgaggcatggcgtcagcagtgcagtgaaaaaaaggcgcaggcgaaaggctggcgtcagtggcttgaagaggaactcagctgggaggtgccggagggcagcttctggcaggatgaaaagctggcgcgccggctgggctctcgtctcgaccggtgggtaagcctgatgcgcatgcacggcggctctcaggcggagatgatagaaagcgcaccggagtcgatccgcgctgtgttttctaaacgggttaagctgatggcgccgatgctgaaagcgtggaaaaccgtgctgaaagacgaaaacgcggtcgatttttcggggctgatccatcaggccattatcattctggagaaagggcgcttcgtcagcccgtggaaacacatcctggtggatgagtttcaggatatctcgccgcagcgcgctgcgctgctttcggcgctgcgggcgcagaataaacacacgtcgctgtttgccgtgggcgatgactggcaggctatctaccgtttcagcggggcgcaactatccctcacaacggccttccaccactattttggggaaggcgatcgcagcgatctggacaccacctaccgcttcaactcgcggattggcgaaatagccaaccgttttattcagcagaacccgcaccagctgtcgaaaccgcttaacagcctgacgtcgggggataaaaaggccgtcacgctgctggcggacgatcagctggaaccgctgctggataaactgagcggctatgcgaaaccggatgagcgtattctggtgctggcgcgttatcatcacctcaagccgacggcgctggaaaaagcggcgacgcgctggccaaaacttcagctcgattttatgaccattcacgccagtaaagggcagcaggccgactacgtgattgtggtggggctaaaagaggggagcgacggtttccctgcaccggcgcgggaatccgtgatggaagaggcgttattacctgttccggaagatttcccggatgcagaggagcggcgtttactgtacgtggcgataacccgcgcgcgccatcgcgtgtggctcttgttcaacaaagaggagccgtcggtgtttgtcgatattttgaaaagtattgacgtgccggtggcgagaaagccgtaa

SEQ ID NO: 114972 - DNA, 447 bp, Enterobacter cloacae
atgcgtaccgttctgaatgtgttgaattttgtccttggcggttttgccaccaccctttcctggctttttgccactctggtgagcatcgtgctcatcttcacccttccgctgacgcgctcctgctgggaaatcaccaaactgtccctcgttccttatggaaatgaagccgtacacgtggatgagctggagccggaaagaaaaaatgccctgatgaataccggcggcacgctgctgaatattttatggctgatcttctttggctggtggttgtgtctgatgcatatcttcgctggtatcgcccagtgcatcacgattataggcattccggttggcatcgctaatttcaaaattgctaccatcgccctgtggccggtaggacgccgtgttgtcccggtcgaagtcgcgcaagccgcgcgtgaagccaacgcccgtcgccgttttcagtaa

SEQ ID NO: 114973 - DNA, 2163 bp, Enterobacter cloacae
atgctaagccccctgcttcgtcgctatacgtggaacagtaactggctgtataacgtcaggatctttatcgccctctgcggcaccgtcgctctgccgtggtggctaaatgacgtgaagctcaccatccccctcacgcttggggtggtggccggtgcgctggcggatctcgacgaccgcctggccggtcgtttgcgtaatctggtcatcacgctggtctgcttctttattgcttccgcctccgttgagctgcttttcccctggccctggctgtttgccttagggctgacggtgtccaccagcggcttcattttgctcggcggcctcgggcaacgctacgccactatcgcgtttggcgccctgctgattgccatttacaccatgctgggcgtctctctttacgatcagtggtatcagcagccggtcctgctgctgttgggcgctatctggtataacctgctgaccttaaccggacatcttatttttccggttcgtgccttacaggacaacattgcccgcagttacgaacagctggcccactatctggagctgaaatcccggctgtttgatccggatattgaagaggacagccaggcgcccctgtacgatctggcgctggcaaatggccagctggtcgccacgctaaatcagaccaaagcgtctctgctcacccgtctgcgcggcgatcgcggtcagcgcggtacccggcgcacactgcactactactttgtcgcccaggatattcacgagcgcgccagctcctcgcatgtgcagtacgctgacctgcgcgagaaattccgctacagcgacgtgatgttccgtttccagcgcctgctgtcaatgcagtctcaggcctgccagcaacttgcgcgctcaatactgctgcgcacgccctatcagcacgatcctcgctttgaacgcgcattcagtcatctggatgcggccctcgatcgcgttcaggccagtgggacatcgccggaacagttcaaagccctgggattcttgctcaacaacctgagagccatcgatgctcagctcgccaccattgagtctgaacaggcgatggcaatgccgggcaatgacgccgacaaccagcttgccgacgacagtctcaacggtttcagcgatatgtggctgcgcctgagccgtcattttacgccggaatccgccctctttcgccatgcggtaaggatgtcgctggttctgtgcgtcggctacgcgtttatccagataacaggattgcaccacggttactggatcctgctgaccagcctgtttgtctgccagccgaactataacgctacccgccatcggctcgcgctgcgtattgtcgggacattagtcggggtcgccatcgggctgccggtgctctactttgtgccatccgtagaagggcaactgatcctgattgtgattaccggtgtactgtttttcgccttccgcaatgtgcagtacgcccacgccacgatgttcatcacgctgctggtgctgctctgcttcaatctgctgggtgaaggctttgaagtggccctcccccgcgtgatcgacacgctaatcggctgcgccattgcctgggcggcggtgagctttatctggccggactggcgttttcgtaacttaccgcgcgtgtccgacagagcaatgaacgccaactgccgctatctggatgctattcttgagcaataccatcagggtcgcgataaccgtctggcctatcggattgcccgtcgcgatgcgcataacacggacgcagagctggcttccgttgtctcgaatatgtcaactgagccgcgcgccacggcagaaatccgggagacagccttccgcctgctgtgtctgaaccacacgttcaccagctatatctctacccttggcgcccaccgtgagaaactgacaaatccgggcatcctggcgctgctggacgacgccgtttgctacgttgatgatgcgcttcatcatcaacctgcggatgagccacgggttcaccaggcactggatgaactggtgcaacgtatcgcacaccttgatcctggcaccgacaacaaagctccgctggtcctacagcaaattggcctgcttatcgctttgctgccggaaatttgtcggctgcgacagaagatcgctacctggcggaatgatggccctgcgactcaggcagcgcattaa

SEQ ID NO: 114974 - DNA, 627 bp, Enterobacter cloacae
atgaaaaagatatcttatgatcggatttatcaatctcaagaatacctctctccgctgggcgaaattcatcatcgcgccctgtttggcggttataccctggccgtggatgaagcggtgttcgcgatggtgtctgacggcgagctgtaccttcgcgcctgtgagcaaagtgcaaaatactgtgtaaaaaacgcctcctcttttctgaccctgatgaaacgaggacggccagtgctgcttaattactaccgtgtggatgaaggtctgtggcaaaacagggaaaagctgcttcagctctcctcgtttgcgctcgatgccgccaggaaagagcgctaccagcgccatcagcgtaatcggcttaaggatctgccgaacctgacctttcagattgaggtcctgcttatggaggcgggcattaccaatgaagagacgctacgacagttgggggcgaagacgagctggctgaaaatgcgctctaagaataaagcgctgagtatccgggtattgttcgcgcttgaaggcgccatcgaagggttacatgaagcggcactcccggcggatattcgccgggagcttatggagtggtttaatgcgctgcctgagtcgcagggccatcattccgccaggtag

SEQ ID NO: 114975 - DNA, 564 bp, Enterobacter cloacae
atgcacacaggggttactgtatatccatacagtaactacagggctggaatgaatatgtacacttcaggctatgcaaatcacttaacaccttccacttctgccgcaggcaatgctgcgcagaattctatcgggcgtgtatcgacagggcttatcagtgaagtggtttaccgtgaagaccagccgctgttaacacaactcttactcctgccgcttttgcagcagctcgggcaacagtctcgctggcagctctggctgacgccacagcaaaaattaagtcgtgaatgggttcagtcggctggcctgccgttagcgaaggtgatgcagattaatcaactctccccttgcgatacggtcgagtcgatggtccgggcattacgtaccgggaactatagcgtcgtgattgggtggttgccggaggatctgtcgcaagaggaacatttgcgtctgactgaagcggctgaagaaggtaacgcgatgggtttcatcatgcggccggttcgtggagattcctatcgcagaggacaacatcccgggctaaaaattcactcaaatgtgtaccattga

SEQ ID NO: 114976 - DNA, 1053 bp, Enterobacter cloacae
atgaaaaagacagctatcgcgattgcagtggcactggctggcttcgctaccgtagcgcaggccgctccgaaagataatacctggtatgcaggtggtaaactgggctggtctcagttccatgacaccggttggtacaacagcagcctgaacaacgatggccctactcacgagagccagctgggtgcaggtgcgttcggtggctatcaggttaacccgtatgttggctttgaaatgggttacgactggttaggtcgtatgccttacaaaggcgacaacgtaaatggcgctttcaaagctcaaggcgtacagctgaccgctaaactgggttacccagtgactgacgatctggacgtgtacacccgtctgggcggcatggtatggcgtgcagactccagcaacagcatcgctggtgacgaccacgacactggtgtttccccagtattcgctggtggcgttgagtgggcaatgacccgtgacatcgctacccgtctggaataccagtgggttaacaacatcggtgacggtgctaccgttggcgttcgtccagacaacggcatgctgagcgttggtgtttcttaccgtttcggtcagcaggaagatgcgccagtcgtagctccagctccggctccagctccagaagtacagaccaagcacttcactctgaagtctgacgttctgttcaacttcaacaaagctaccctgaaaccagaaggtcagcaggcactggatcagctgtacacccagctgagcaacctggatcctaaagacggttctgtagtggttctgggcttcaccgaccgtatcggttctgacgcttacaaccagggtctgtctgagaaacgtgctcagtctgtagttgattacctggtatctaaaggtatcccagctaacaagatctccccacgtggtatgggcgaatctaacccagttaccggttctacctgtgacaacgtgaaaccacgcgctgcactgatcgactgcctggcaccagatcgtcgcgtagagatcgaagttaaaggtatcaaagacgttgtaactcagcctgcggcataa

SEQ ID NO: 114977 - DNA, 453 bp, Enterobacter cloacae
atgaaatatcaacaactggaaaacctcgaaagcggctggaaatggaagtacctggtcaaaaagcaccgtgaaggggagctgatcacctgctacatcgaagccagcgcggcacaagaagctgtggatatgttgctgaccctcgaaaacgaaccggtacaggtcaacggctggattgagaaacacattaatccggccttgttaaaccggatgaagcaaactatccgtgctcgtcgtaaacggcatttcaatgccgagcatcagcacacccgtaagaaatcgatcgacctggagttcatggtctggcagcgtctggccgggcttgcgcagcggcgcggaaaaaccctgtcggaaacggtggtgcagctgattgaagatgccgagcacaaagagaagtatgccagccagatgtcgacgctgaagaacgatctacaggcactgttaggtaaaaaataa

SEQ ID NO: 114978 - DNA, 1761 bp, Enterobacter cloacae
ttgaccattacgaaacttgcatggcgtgacctggttccggataccgagagctatcaggagctgtttgcacagccagacctcacaaaagaacacgaattcatacttagcgatacacaaccgcgtttgcattacgcgctggagcagatgtcatccccatgggctacatctccttttatgctgctcaaagccccggaagaagccgagtatctgacgcttctcggtgatgccatgcgccagttgcatccaaaaacgaatgccgtttttggtggtcagtaccatattgccggacgtgacgtgaccttcgaacctgccacgcaggcagacggacaattcgctgcaaaaggcgaagtgatcaccgccaactgggtggaagcagaacagctgttcggctgccttcgtcagttcaatggcgatgtgtcactgcaacccggtctggtacaccgcgcgaacggtggtgtgttgctcatctcccttcgcaccctgctcgcacagcctctgctgtggatgcgcctgaaaacggtggtgatgcagcaacgttttgactggataggctacgacgattcacgtccgctgcctgtttccattccgtctatgccgctgtcgctgaccgtcgtgctgacgggtgaccgtgaatctctggctgatttccaggaaatggagccagaactcgcggagcaggcggtttacagtgaatttgaagacaatattcagatcgccgatgccgatgacatggcgcagtggtgtcagtgggttatggccgtggcggaacgtttcgcgctgccctcgcctgccgaggatgcgtggccgggcttaatccgcgaggccgtacgctacactggcgatcaggaaaccctgccgctctgcccgctctggatcggtaaacagctgcgtgaagtgggcgttatcagcggcaacggtccgtttactggtgagcagcttagccagatgctggcccagcgtgaatggcgtgaaggttatcttgctgaccgtatgcaggatgaaattctgctggaacagattctggtggagaccgaaggcgaacgtatcgggcaaatcaacgccttgtccgtcatcgagttccccggacacccgcgcgcctttggcgagccttcccgtatcagctgtgtcgtgcacattggtgacggcgaatttaccgatatcgaacgcaaggccgaactgggcggaaacattcatgccaaaggcatgatgatcatgcaggcattcctgatgtctgaacttcagctggagcagcagatccccttctctgcctcgttgacctttgagcagtcctacagtgaagtcgacggcgacagcgcctcgatggcagagctgtgcgccgtgatcagcgcgcttgcagacgtaccgattaatcagaatattgcgattaccggttccgtagatcagtttggtcgtgctcaaccggtgggtggactgaatgagaaaatcgaaggcttctttgctatctgccagcagcgcggtttaaacggcaaacagggcgtgattattccggcgcctaacgctcgccatttgagcctgagccaggcgattctggatgcggtagagcaggaacaattcgccgtctgggccatcgaaggggttgaggatgctctacccttactgacaaacctggtctgggacggcgaaggccagacaaccctgatgcagaccattcaggaacgtatagctcaggcgacacagcaggatgctcgtcatcgttatccgtggccgttacgctggttaagttggtttagtgctaactga

SEQ ID NO: 114979 - DNA, 519 bp, Enterobacter cloacae
atggtagataaacgcgaatcctatactaaagaagaccttcttgcctctggtcgcggtgaactgtttggtgcgaaaggcccgcagttaccggccccaaatatgctgatgatggaccgtgtcgtgaaaatgaccgaaaccggcggcaactttgataagggttacgtagaagcagaactcgatatcaacccggacctgtggttcttcggttgccactttattggcgatccggtaatgcctggctgcctgggcctcgatgccatgtggcagctggttggcttctatctgggctggcttggcggtgaaggtaaaggccgtgcgctgggcgtaggcgaagtgaaattcaccggtcaggttctgcctaccgcgaagaaagtcacctaccgtatccatttcaaacgcatcgttaaccgccgcctgattatgggcctggcggacggtgaagtgctggtagatggtcgtcttatctatactgcgaacgacctgaaagtgggtctgttccaggatacctccgctttctga

SEQ ID NO: 114980 - DNA, 567 bp, Enterobacter cloacae
atgaaaaaatggctaatcatcgcaggcgcactggtattaacggcctgtagctctggaagcgataacaaaagctactaccagttgccgttaagcgcgcaatccggtgcgcagagtagcagctcgcagggcagccgtctgctgtgggttgaacaggttgccgtgccagattatctggcgggcaacggggtggtctaccagaccagcgatgtgcagtacgttatcgccaacaataacctgtgggccagcccgctggatcagcagctacgcaatacgctggtggcgaatctgagcagccagctccctggttgggtagtcgcctcgcagcctctgggaagcgatcaggataccctgaatgttaacgtgacgggattccatggccgctatgatggtgcggttgttatcagcggggagtggctcttgaatcatcagggccagctgattaagcgtcctttccatctggaactgaagcagcagaaagatggctatgacgaaatggtgaaagtgcttgcgcaggggtgggcacaggagtcggctgctatcgcaagagagatttcccggctgccataa

SEQ ID NO: 114981 - DNA, 1641 bp, Enterobacter cloacae
atggaaaataagagtggagaggctaaagtgcagaaggtcagaaactggtcgccggtgtggattttccccatcgtgaccgcgctgatcggtgcatggatcctgttttatcattacagccatcagggaccggaagtcacgctaattaccaccaatgcagaggggattgagggcggaaaaaccaccatcaagagccgcagcgtggatgtgggtgtcgtggaaagcgcgaccctgacggatgatttaacccatgttgaaatcaaggcccgcctgaatgccggcatggaaaaactgctccatgaagattctgttttttgggtagtgaaaccgcaggtcggaagagaagggatcagcggcttagggacgctattgtcaggggcctacatcgaactccagcccggcaacaaaggcgcccagccagcaaactatcagctgctggattcaccgccgcttgcgccaccggatgcaaaagggatccgcgttattctggacagcaaaaaagcgggccagctctcgccgggcgatccggtgctgttccgtgggtatcgcgtcggttcggttgaaacaagcaccttcgatccgcaaaaacggaccatcagctatcagctttttatcaatgcgcctaatgaccgcctggtgaccagcaacgttcgcttctggaaagacagcgggatcgcggtggatctgacctctgcggggatgcgcgttgagatgggttcactcaccacgctgtttggtgggggcgtcagttttgatgtgccggaaggtatagatctgggacaaccggtggcggagaaaaccgccttcaggctgtttgacgatcaaaaaagcattcaggatgcgctctataccgatcacatcgactacctgatgttctttaaggactctgtacgcggcttgcagcctggggcgccagttgagttccgcggtatccgtctggggaccgtgggacaagtgccttactttgttccgggactcaagcagatgcttgatgatgattatcgtattccggtgctgatccgcattgagcctgagcgtttgattaaccagataggcgaggaccaggatattggggagcatatcagcgatctgatgaatcgcggtctgcgtggctcgctgaaaactggcaacctggtcacaggggcgttatatgtcgatatggacttctatccaaaagcgccaccaatgacggggatccgtgaatttggcggctacaaaatcattcctacggtcagcagtggcctggcgcagatccaacagcgcctgatggaaacactggataagatcaacaatctgccgctgaatccaatgcttgaggccgcgacgggatcactgcatcagagccaggcgacgatgcaacgtctgcaaaccacgctggataatatcaacaagatcaccgccaaccagtccatgcagcagctgccgcaggatatgcagaaaacgttgcgcgaactgaatcgcagtatgcagggcttccagccgggctcagcggcttacaacaagatggtggcggatatgcaacgtcttgatcaggttttacgcgagctacagcccgttctgaaaacgctcaatgaaaagagcaacgcgctggtgtttgaagcgaaagacaaaaaggatcctgagcctaagagggcgaaacaatga

SEQ ID NO: 114982 - DNA, 1254 bp, Enterobacter cloacae
atgtgtgaccagcaccatgccgatcggcatatattatgctcgcaatgcgatatgctcgtggcgttgccagagcttggtcacggacataaggctgcctgcccgcgctgcggcgctgcgctgacgaccgagtgggacgcgccaaggcagcgtcctacggcttatgcgctggcagccttattcatgttactgctctccaatctcttccctttcatctatatgaaagtgggcgggatgaccagccaggtggatttactggaaataccaggcgtgatgttctcggaagattacgccagccttggcaccttctttcttcttttcgtgcagatcgtcccggctttttgcctggtcgtcattctgctgctggtcaaccgcgtcaggatgcccactgtccttaaaatcaaactcgcgcggatcctgttccagttgaaaagctgggggatggcggaaatttttctcgcgggtatcctggtcagtttcgtgaagctgatggcctacggcgatgtggggattggcagcagctttattccgtggtgtctgtactgcgtgctacaactgcgcgcgttccagtgcgtggaccgacgctgggcctgggacgatattgccccggcgcctacgctctcgcagacggtaaaggtgggcgtaccgggtatccgtcaggggcttcgctcctgctcgtgctgcaccgccgtgctgcccgcggatgtcgaggtgtgcccgcgctgtgaaacaaaaggtcacgtccggcgtaaaaatagcctgcaatggaccatggcgctgctggtgacctctgtcatgctctatctgcccgccaatatcttgccgatcatgatcaccgatctgctcggcgacagaatgccctcgaccatactggccggggtgattttgctgtggagcgaggggtcttaccctgtagcaggcgtcatattcctcgccagtattatggttccgaccttaaagatgattgccattgcctggctttgctgggatgcaaaagggcacggtaagcgagacagcgagcgtatgcatctgatttatgaggtcgtggaatttgttggccgctggtcgatgattgacgtgttcgtgattgcggttctctcagcgctggtgcgtatgggggggctgatgagtatttatcccgctatgggggcgctgatgtttgcgttggtcgtcattatgaccatgtttgcggccatgaccttcgaccctcgtttatcgtgggatcgtgagcccgattcaagccatgaggaagagtaa

SEQ ID NO: 114983 - DNA, 1908 bp, Enterobacter cloacae
atgtctttaattagtatgcacggcgcgtggctctctttcagcgactcaccgcttctcgataatgcagagctgcatatcgaagataacgagcgcgtctgtctggtgggccgtaacggcgcaggtaaatcgacgctgatgaaaatcctcaaccgtgagcaggggctggatgacggccgtattgtttacgagcaggatctgatcgtctctcgtctgcaacaggatccgccgcgtaacgtcaccggcagcgtgtacgattttgtggccgaagggatttcagagcaggcggaatacctcaagcgttaccacgagatttcgcatctggtgatgacggacccgagcgacaagaatctcaacgagctggcaaaagtgcaggagatgctcgatcaccacggtctgtggcagttggaaaaccgcattaatgaagtgctggcccagcttggcctggaagcggatatggagctgtcggcgctctccggcggctggctgcgtaaagcggcgctgggtcgtgccctggtgagcgggcctaaggtgctgctgctggacgaaccgacgaaccacctggatatcgaagcgattgactggctggaagggttcctgaaaacctttaacggtaccattatcttcatctcccacgaccgttcgttcatccgcaacatggctacgcgcattgtcgatctcgatcgcggcaagctggtgacctatccgggcgattacgatacctatctgctggagaaagaagaaaacctgcgcgtggaagagctgcaaaacgccgagttcgaccgcaagctggcccaggaagaggtatggatccgtcagggcattaaagcgcgtcgtacccgtaacgaaggccgcgttcgcgccctgaaggcgatgcgccgcgaacgtagcgaacgccgcgaagtcatgggtagcgccaaaatgcaggtggaagaggcgtcccgctcgggcaagattgtcttcgaaatggagaacgtgaattattcggttgacggcaaagtgctggtgaacgatttctccgctcaggttcagcgcggcgacaaaattgcgctgatcggcccgaacgggtgcggtaaaaccacactgctgaaactgatgctcggtcagctccaggccgacagcggtcgtatccactgcggtaccaaactggaagtggcgtacttcgaccagcaccgcgccgagctggatccagaccgtacggtgatggataacctcgccgagggtaaacaggaggtcatggttaatggcaagccgcgtcacgtgctgggctaccttcaggacttcctgttccacccgaaacgcgctatgacgccggtgcgcgcgctgtccgggggagaacgtaaccgtcttttgctggcgcgtctgttcctgaaacccagtaacttattgattctcgatgaaccgactaacgatctggatgtcgaaacgctggaactgctggaagagttaattgatggttatcagggaaccgtaatgctggtcagccacgatcgtcagtttgtcgataacaccgtgaccgagtgctggatcttcgaaggcaaagggcgcatcgggcaatatgtgggcggctatcatgacgcgcgtggacagcaatcgcagtcgctggcgcaaaaacaggcgaagaccaaaaatgtcgctgaacctgttgttgcaaaggcagaaactgtcaaaaagtctcctgctaaaatgagttataacttgcagcgcgagctggaagggctgccgcagcgtctggaagagctggaagctgcactggaagcactgcaaatccaggtcgctgatgcgtcattctttacgcagcctcacgactatactcagaaagtattggctgaactctcccaggctgaacaggcgctggaagaggcatttgagcgctgggagtaccttgagtctctgaaaaacggcgcataa

SEQ ID NO: 114984 - DNA, 2127 bp, Enterobacter cloacae
atgagtaaaagtgacgatatgaattctctgtttgccagtacggcccgtgggctggaagagctgttaaaaactgaactggaagccctgggcgcgaaagagtgccgggtggttcagggtggtgtccattttgagggcgacacgcggcttatttaccagagcctgatgtggagccgtctggcgtcgcgcatcatgctgccgatgaaagagtgcaaggtctacagcgatcttgatctctacaccggcgtacagatgatcgactggacagagatcttcaccccggacgctacctttgcggtgcatttcaacggcgtcaacgatgagatccgcaacagccagtatggtgccctgcgcgttaaggatgccattgtggactgcttcacgcgtcgcaataaagaacgtccgaacgttgaccgtgaaaacccggatctgcgtatcaacgtctggctgaacggcgatacggccagtatttctctggatctgagtggcgcaggcctgcatctgcgcggctatcgcgatcgcaccgggatggcgccgatcaaagaaacgctggctgccgctatcgtgatgcgctccggatggcagccaggtacgccgctgctcgatccgatgtgcggttccggtacgctgctgattgaagccgcgatgctggccaccgaccgtgcgccagggctgcaccgcggccactggggcttcaaaggctgggcgcagcacgatgaagccatctggaaagaggtcaaagacgatgcgcagacccgcgcccgtaaagggctggcggagtacacctctcacttttacggttcggacagcgacgcacgggtgattgaacgcgcgcgcagcaacgcccgtcgtgccggtatcggcgagctggtgaccttcgaggtgaaggacgtggcgaacctgaccaatcctctgccaaaaggcccgtacggtacggtgatcagcaacccgccgtatggtgagcgtctggacagcgagccggcgctgattgcactgcacagcctgctgggccgcaacatgaaagcgcatttcggcggctggaacctctccctgtttagcgcctcgccggagctgctgagctgcctgcaattgcgtgccgatcgccagttcaaagcgaaaaacggcccgctggactgcgtgcagaaaaactaccatctggcagaggtagcggcggatagcaaaccgtcaggcgtggcggaagattacgccaaccgcctgcgcaaaaacctgaagaaatttgagaagtgggcgaagcaagaaggcatcgaatgttatcgcctgtacgacgctgacctgcccgagtacaacgtggcggttgaccgctatgcggactgggtggtggttcaggaatacgccccgccgaaaactatcgatgcgcaaaaagcgcgtcagcgtatgctggatgtgattgcggccaccatcgccgtacttggcatttcgccaaacaagctggtgctgaaaacccgtgagcgtcagaaaggtaaaaatcagtatcagaagatgggcgagaaaggcgacttcctcgaagtgggcgaatataacgcgcgcctgtgggttaacctgaccgactaccttgataccggcctgttcctcgatcaccgtatcgcccgccgcatgctgggccagatgagcaaggggaaagacttcctgaacctgttctcctataccggcagcgccagcgttcatgcggggcttggcggcgcgcgtagcaccaccacggtagatatgtcccggacttatctggagtgggcagagcgcaacctgcgtcttaacggcttaaccggccgtcagcatcgcctgttacaggccgacgtgctgggctggctgcgcgataccgacgagcagtttgacctgatctttatcgatccgccgaccttctctaactccaagcgtatggaggatagctttgatgttcaacgcgatcacctgcgcctgatgactgacctgaagcgtctgctgcgtaaaggcggcaccattatgttctcgaataacaagcgcggattccgcatggatcacgacggcctggccgaactgggactgaaagcacaagaaatcagccaaaaaacgctgtctcaggactttgcccgtaaccgtcaaatccacaactgctggctgatctccgcggtctga

SEQ ID NO: 114985 - DNA, 1110 bp, Enterobacter cloacae
gtggcgacgttatccaggctttttattcatccggtgaaatccatgcgcggcatcggcgtctctcacgcgctggccgatatgagcggattcgccttcgatcgtatttttatggtcaccgagcctgacggtacgtttatcaccgcacgtcagttcccgcagatggttcgctttaccccttccccgcttcatgacgggctgcatttgactgcgccggacggttcaagcgtcgtgatccgctttgctgattttgcgccgcttgatgcgccaacggaagtgtggggcaatcattttaccgcgcgtatcgcgccggataacattaaccagtggctgagcggctttttctcccgtgacgttcagctgcgctgggttgggcctgcgctgacccgtcgcgtgaagcgccacgatgcggttcctctctccttcgcggatggttttcccttccttctgaccagcgaggcctcgctgcgtgatttacaaaaccgttgcaaagccagcgtgcagatggagcaatttcgcccgaatctggtggtgaccggagcgaatgcctgggatgaagatacttggaaagtgatccgcatcggcagcgttatttttgatgtcgtgaagccgtgcagccgctgtatttttaccaccgtcagcccggagaaaggccagaaacacccttccggcgaaccgctgaaaaccttgcagtcatttcgtaccgcgcaggataacggcgatgtcgacttcggccagaacctgatcccccgctccagcggcgtgatccgcgtgggcgacgaggtcgaaattctcacccgcgggcctgccagggtgtacggcgcaggtcaggaagaagagatggttgacgttgtcaccaacgtcgcttccgcggtggatattcactgggaaggcaaagttatccgtggtaacaatcagcaggtgctactggaacagctggaacaggcaggtatccgcgtaccgtattcctgtcgcgcggggatttgcggatgctgtcgcattaaactggtcgatggtgaagtaagtgccctgaagaaatctgcgattggcagtgacggcacgatcctgtgctgtagctgtgtcccgaaaacatccgtacagctggaagcttaa

SEQ ID NO: 114986 - DNA, 543 bp, Enterobacter cloacae
atgcgaattaaacctgacgataactggcgctggtatttttgtgacgagcatgaccgtatgatgctcgacttagccaatggcatgttgtttcgctctcgttttgcgcgccgaatgttaacgccagacgcgtttgctccctcaggcttttgcgttgacgacgctgcactctatttctcttttgaagaaaaatgccgcgagttcgatctctccaaagaacagcgcgctgaactggtactaaatgcgctggtggcgatccgtttcctgaaacctcaaatgccgaaaagctggcattttctcgcccacggcatgtgctggaccccggctatcggcgatgcggcgagcgtcaatctgagcgataccgaagaagaggtgaatttgctggtggttgaacccggtgaaaacgctgcgctctgtttgctggcccaacccggcgtgaccattgccgggcgagttatgcagttaggtgatgccatcaaagtgatgaatgacaggctgaagccacagctgcgcgttgattccttcagccttgaacaggcagtttaa

SEQ ID NO: 114987 - DNA, 1011 bp, Enterobacter cloacae
atgtactaccccttcgttcgtaaagcccttttccagctcgatcctgagcgcgctcatgaatttacatttcagcagttacgccgtattacaggaacgcctctggccgcgctggtgcgtcaaaacgtgccggaaaaaccagttcagtgcatgggcctgactttcaaaaatccactgggcctggcggccggtctggacaaaaatggcgaatgcattgatgcactcggtgcgatgggctttggctcgatcgaaatcgggacggtgacgccgcgtccgcagccgggaaatgacaagccacgtctgtttcgcctggttgaagccgaggggctgatcaaccgcatgggctttaataaccttggcgtcgatcatctggttgagaacgttaagaaagcccattttgatggcgtgctgggtattaatattggcaaaaataaagacacgccggtcgagcagggtaaagatgactatctgatttgtatggaaaaagtctatgcctatgccggttatattgcggtgaatatatcttcgcctaacaccccagggctgcgttcattacaatatggcgaagcgctcgacgatcttcttagcgccattaaaaataaacaaacggcgctacaggcgatccaccataaatatgttccggtcgcggttaagatcgccccggatctttcggcagaagaattgatccaggttgccgacagtttagttcgccataatattgatggtgtgattgcaaccaatacaacactcgatcgctctctcgttcagggaatgaaaaactgtgacgaagcgggtggattaagtggccgtccggtacaattaaaaagcaccgaaattattcgcgcactctccgcagaattaaaaggtcagctgccgattattggcgtgggtggcattgactctgtcatcgctgcacgtgagaagatggcggcaggtgcatcgctggtgcaaatttattccggctttatttttaaagggccgccgctgattaaagaaatcgtcacgcatatctaa

SEQ ID NO: 114988 - DNA, 576 bp, Enterobacter cloacae
atgcgcgtcattaccctggccggaagcccccgcttcccctctcgctccagcgcactgctggaatacgctcgcgaaaagcttaatgctctggatgtcgaagtgtgtcactggaatttgcacaatttcgcgcctgaagatctgctctacgcccgtttcgacagcccggcgctgaaaaccctgatcgaacaacttaagagtgctgacgggctggtcgtcgcgacaccgatttataaagcctctttttccggcgcactgaaaacgctgctcgatctgctgcccgaacgcgcgctggacggtaaggtcgtcctgccgctggccacaggcggtacggtagcccatttactggcggtggattatgccctcaagccggttctgaacgcgctgaaagcgcaggagatcctgcatggcgtcttcgctgacgactcacaggtaatcgactaccagcataaaccccatttcacgccgaatctgcaaacgcgcctcgacagtgcgctcgacaccttctggcacgccctgaaccgtcgggatcgccacgcggcagcatttcatcaatcacaaggagtggcgcatgtttaa

SEQ ID NO: 114989 - DNA, 963 bp, Enterobacter cloacae
atgtttaaaacagttacccgtatcgggctggcaggtctgctggcagtggcgtcgctggctcaggcggcggagaaagcgccggagagcctgcgtatcggttatcagaaaggcagcgtcagcatggtgctggcgaaaagccatgcgttgcttgagaagcgtttcccggagaccaaattctcatgggtcgagttccctgccggaccacagatgctggaggcgctgaacgtcgggagtattgatttaggcagcaccggcgatatcccgccaatctttgcgcaggctgccggggcggatctggtttacgttggcgttgagcccgccaagccgaaggcagaggttattttggtgccggaaaacagcgagatcaaaagcgtcgccgacctcaaaggccataaggttgctttccagaaaggttcaagctcgcacaaccttctgctgcgcgcgttgcaggaggccggcctaaaattcaccgatatccagcccgtttacctgacgcctgccgatgcgcgcgcggcgtttcagcaaaaaaatgttgatgcctgggctatctgggatccgtactactccgccgcactgttgcagggcggtgtgcgggtgctgaaagacggcaccaccctgaagcagaccggttcgttctacctggcggcacgtccttacgctgagaaaaatggcgcatttattcagcaggtgctggataccttctctcaggccgatgcgctgacccaaagccagcgtcagcagagcatcacgctgctggcaaaaaccatgggcctgcctgaaccggtgatcgccacttatcttgaccaccgtcctcccaccaccatagcaccggttgacgcccacgttgccgctctccagcagcaaacggcagacctcttttatcaaaaccgcctggttccaaagcaggtgaatattcgcgaacgcatctggcaacccgctggcattgaaggaaaaaaatcatga

SEQ ID NO: 114990 - DNA, 1146 bp, Enterobacter cloacae
atgagtctgaatcttttctggtttttacccacccacggtgatggacactatcttggcacagaagaaggcgcccgcccggtcgatcacggctatctacagcagatcgcccaggcggcagaccgcatcggttttaccggggtactgatcccgacgggccgctcgtgtgaggatgcgtggctggttgccgcgtcaatgatccccgtcacccagcgcctgaaattcctggtagccttgcgcccgagcgtggtgtcgccaaccgtcgcggcgcgtcaggcggcaacgctggacaggctttccaacggccgtgcgctgttcaacctggtgacgggcagcgatccgcaggagctggcgggcgatggcgtcttcctcgatcataccgagcgctatgaagcctccgcagagttcacccgcgtctggcgacgtctgctggaaggggaaaccgtcaccttcgaagggaaacatatccacgttcgcgatgcacagctctacttcccgccggtacagcagccgcgccctcccctctatttcggcggatcgtcggacgtggcgcaggagctggcggctgagcaggtcgatctctatctgacctggggcgagccaccggagctggtgaaagagaaaattgctcaggtacgcgctaaagccgcagaacatggccgtacggtacgctttggtattcgcctgcacgtgatcgtacgtgaaaccaacgacgaggcctggcaagccgccgaccgtctgatcgctcatctggacgacgacactatcgctaaagcacaggcggcgtttgccaaaaccgactccgtgggccagcatcggatggcttccctgcacaacggcaagcgtgaaaatcttgagatcagcccgaacctgtgggccggggtaggtctggtgcgcggcggtgccggcacggcactggtcggcgacggtccaaccgtagcggcacgcattaatgaatacgcggcgctggggatcgacagctttatcctgtctggctacccacatctggaggaggcgtacaaggtgggtgaactgctgttcccgcatctggatgtcgctatcccggaaattccgcagccacgtcagcttcagttgcagggcgaagccgtggcgaacgcgtttatcccgagaaaagtcgcgcaaagctaa

SEQ ID NO: 114991 - DNA, 792 bp, Enterobacter cloacae
atgtctgcaaccgcacaaaaatggctgctgcgcgccgcgccgtggtttctgcccgtcggcattgtcctcgtctggcaactggcgtcttcaactggctggctgtcgagccgcattttgccctctccggagggcgttgtggaagcgttctggtcgctaagcgccagcggtgagctgtggcaacatcttgccatcagctcctggcgcgcggtaattggcttttcgattggcggaagcatcggcctgacgctggggctgatcagcggcctgtcacgctggggtgagcggctgctggatacctccgttcagatgctgcgcaacgtgccgcatctggcgcttattccgctggttatcctgtggtttggcattgatgagagcgccaaaattttcctcgtggcgctgggaacgttattcccgatttatatcaatacctggcatgggatccgtaatatcgatcgcggtctggtggagatggcccgcagctatggcctgtcaggttttgccctgtttacccatgtgatcctgccgggcgccctgccctccattatggttggggtgcgttttgcgctcggcctgatgtggctaaccctgatcgtggcggaaaccatttcggctaactccggcattggttatctagcgatgaacgcccgcgagttcctgcaaacggacgtggtggtggttgccattatcctttatgccctgctcggcaaacttgcggacgtcagcgcccagtggctggaacgtagctggctgcgctggaacccggcctacaccgctcaggaggcgaaagcatga

SEQ ID NO: 114992 - DNA, 771 bp, Enterobacter cloacae
atgaatactgcacgactgaaccagggaacaccgttactgctgaacggcgtgaccaaacgctacggcgacaacaccattctgaatgcactggatctgcatattcctgccggacagtttgtggccgttgtcggccgcagcggtggcggcaagagtaccctgctgcgtcttttagccgggctggaagcgccaaacagcggtgacattctggcaggcactacgccgctggccacgattcaggatgatacgcgcatgatgtttcaggacgcgcgtctgctgccgtggaaaacggtgatggataacgtcgggctgggcctgaagggcagctggcgggaggacgcccggcaggcactcgctgcggtagggctggagaatcgcgcgggagagtggcctgcggccctgtcgggtggacaaaagcagcgcgtagcgctggctcgcgcgctgattcaccgtcccggcctgttgctgcttgatgaaccgctcggcgcgcttgatgccctgacgcggatcgagatgcaggatctgattgaaaccctctggcagacgcacggctttacggtactgctggtgacgcatgatgtcagtgaagccgtggcaatggcagacagggtgctgttaatagaagagggcaaaattggtctggatctgacggtagatattccacgtcctcgccgcgtgggatcggccagactggcggagctggaagccgaagtactggatcgggtgatgaaacgtggggaagcggagattcagcggataaaggctaatgcctga

SEQ ID NO: 114993 - DNA, 2613 bp, Enterobacter cloacae
atgacacaacagccacaagctaaataccgccacgactatcgtgcgccggaatacctgataagcgatatcgatctgactttcgacctggatgccacaaaaaccgtggtgacggcgataagccaggtgacgcgccagagcgcgactgccgtgccgctgcgtctggatggtgaagacctgacgttggtttccctgcatattaacgatgaagcctggtcagactataaagaagaaggcaaccagctggtcatcgacaacctgccggaacgctttaccctgcgcatcgtgaatgaaattagccctgccgccaataccgcgctggaaggactttaccagtcaggcgtagccctgtgtacccagtgtgaagccgaaggtttccgccacattacctggtatctggatcgcccggacgtcctggcgcgctttaccaccaaaattattgccgacaaaacgctgtacccgtacctgctttccaacggcaaccggattgctgaaggggaactggagaatggccgtcactgggtacagtggcaggatccgttcccgaaaccctgctatctgtttgcgctggtggcgggagatttcgatgtcctgcgcgacacctttaaaacgcgctctggccgtgaagtcgcgctggagctgttcgtggaccgtggcaaccttgaccgcgcaccgtgggcaatgacctccctcatcaactccatgaagtgggatgaaacgcgctttggcctcgaatatgacctcgacatctatatgatcgttgcggtcgatttcttcaacatgggcgcgatggagaataaaggccttaacatctttaactctaaatacgtgctggcgcgtaccgataccgccacggataaagattacctcgatatcgaacgcgttatcggccacgaatatttccataactggaccgggaaccgcgtcacctgtcgcgactggttccagctgagcctgaaagagggcttaaccgtcttccgcgatcaggagttcagctccgatctgggatcgcgggcggtgaaccgcatcaacaacgtgcgcaccatgcgtggtctgcaatttgcagaagatgccagcccaatggcgcacccgatccgcccggataaagtcattgagatgaataacttctacaccctgacggtgtatgaaaaaggcgctgaaattatccgtatgatccacaccctgctgggtgaagagaatttccagaaagggatgcagctttactttgagcgtcacgacggcagtgcggccacctgcgacgattttgttcaggcgatggaagacgcctctaacgtcgatctgtctcatttccgccgctggtacagccaggccggtacgccgattgtgacggtcaaagacgactacaacccggaaaccgagcagtacacgctgaccatcagccagcgcacgccgccaacggccgagcaggaagagaaacatccgctgcacattccattcagcgttgagctgtacgacaacgaaggcaacgtgatcccgttacagaagggcggccacccggtgcataacgtgctgaacgtgacccaggcagagcagacctttatcttcgataacgtctatttccagcccgttcctgccctgctgtgcgaattctccgcgccggtgaaactcgaatataagtggagcgatcagcagctgacgttcctgatgcgtcacgcgcgcaacgatttctcgcgctgggatgcggcacaaagcctgctggcgacctacatcaagctgaacgtcaaccgttaccagcagggccagccgctgacgctgccggttcatgtggcagacgcgttccgtgccatcctgctggatgagaacattgacccggcgctggcggctgaaattttgacgctgccgtctgcgactgaaatcgccgagctgtttgacatcatcgacccgattgccatcgtcgccgtgcgtgaagcgctgacccgcacgctggcgaccgaactggcagatgagttcctcgccatttacaacgccaacaagctggacgcgtatcgggtggaacatgcggatatcggtaaacgttccctgcgcaatacctgcctgcgctatctggcgtttggtgaggcagagctggcgaacacgctggtcagcaagcagtaccacgaagccgataacatgacggatgccctggccgcgctggccgcaagcgttgccgccgagctaccgtgccgcgatgcgctgatgcaggagtacgacgacaagtggcatcaggatggtctggtgatggacaagtggttcatccttcaggccaccagcccggcagccgatgtactcagcaaagtacgcagcctgctgaagcaccgttcgttcaccatgagcaacccgaaccgcgtccgctctctgattggtgccttcgccagcagcaacccggccgcgttccatgccgaagacggcagcggttatcagttcatggttgaaatgctgaccgagcttaacagccgtaacccgcaggtggcgtctcgtctgattgagccgctgatccgcctgaaacgttacgatgcgcagcgtcaggcgaaaatgcgcgccgcgcttgagcagctgaaagggctggacaatctgtctggcgatctgtacgagaagattgctaaggcgctggcctga

SEQ ID NO: 114994 - DNA, 1203 bp, Enterobacter cloacae
atgactcaattcgcttctccgattctgcatacgttgctggataccgacgcgtacaagctgcatatgcagcaagccgtgtttcaccactatcatgatgtccatgttgcggcggaatttcgctgccggggtgacgacttgctgggtatctacgcagattccattcgtgaacaggtcgaggccatgcagcatctggcgctcaccgatgacgaatatcagtggctttcaggcctgcctttctttaaagcggattatctgaactggctgcgtgagttccgctataacccggaacaggtcaccgtcaccaatgataacggcaagctggacattcgtctgaccggcccgtggcgtgaggtgatcatgtgggaagtgccgcttctggccgtaatcagcgagctggcccaccgctatcgctcccctgaaaccggtgtgacgcaggcggttgccgctctggagaataaactcgttgagttttccagactgaccgaagggctggatatgtcccgattccgtctgatggactttggcacgcgccgccgcttctctcgcgaggttcaggaagccattgtcagacgtctgcaacaggagccgtggttcgttggcaccagtaactacgatctggcacgtcgccttgatttaacgcctatgggcacccaggcacacgaatggttccaggcgcaccagcagatcagccctgaccttgccaacagccagcgcgccgccctcgccgcgtggctagaggaatacccggatcggctgggtattgcccttaccgactgcattaccatggacgcgttcctgcgcgactttggccctgagtttgccgaacgctaccagggtttgcgccatgattccggggacccggttgaatggggtgagaaagccatcgcccattacgaaaaactgggcatcgaccccatgagtaaggtgctggtcttctccgataaccttgacctggcgaaagccgtcgacctttatcgtcatttctcatcgcgggtgaacctgagtttcgggattggtacgcggttaacctgtgatattcctcaggtgaaaccgctgaacatcgtcataaaactggtggaatgtaacggtaagccggtcgcgaagctctccgacagtccgggcaaaaccatctgccatgacaaagcgtttgtccgcgcattacgtaaagccttcgatctgcctcaggttaaaaaagccagctaa

SEQ ID NO: 114995 - DNA, 1401 bp, Enterobacter cloacae
atgagcgttgtgcctgtagccgacgtactccagggccgtgtcgccgttgaccaggaggtcaccgtgcgcggatgggtgcgtactcgccgagattctaaagctggcatctccttcctcgccgtctatgacggttcctgctttgatcctgtacaggccgtcattaataattctctgcccaattacaatgatgacgttctgcacctgacaaccggctgttccgtgatcgtcaccggtgttgtggtggcctctccgggccagggtcagagctacgaaattcaggcgacctcggtggaagtgaccggctgggttgaagatcctgacacctacccgatggctgcaaagcgtcacagcatcgaatatctgcgtgaagtcgcgcacctgcgtccgcgcaccaacctgattggtgcggttgcccgcgtgcgtcatacgctggcgcaggcgctgcatcgtttctttgacgagcagggttacttctgggtttctactccgctgatcacggcttccgataccgaaggcgcaggtgaaatgttccgcgtttcaacgctggatatggaaaacctgccgcgtacgccggaaggtaaagtcgattacgacaaagacttctttggtaaagaagccttcctgacggtttccggccagctcaacggtgaaacctacgcctgtgcgctgtctaagatctataccttcggcccaaccttccgtgcggaaaactccaacaccagccgtcacctggcggaattctggatgctggagccggaagtggcctttgccgatctgaatgacgcggcagccctggcagaagcgatgctgaaatacgtgtttaaagccgttctcgaagagcgcgcagacgacatgaaattcttcgctgagcgtgtcgataacgacgccatcgcccgtcttgagcgcttcgtctccgcagacttcgcgcaggtggattacaccgacgcggtcgcaatcctggaaaaatgcggtgagaaattcgaaaacccggtttactggggcgtggatctctcctccgagcacgaacgttatctggcagagaagcactttaaagcaccggttgtggtgaaaaactatccgaaagacattaaggcgttctatatgcgccttaacgaagacggtaaaaccgttgccgcgatggatgtcctcgcgccgggcatcggtgagatcatcggtggctcccagcgtgaagagcgcctggatgtgctggacgcgcgtatgcaggagatgggccttaacccggcggactacagctggtatcgcgatctccgtcgctacggcaccgttccacactccggctttggcctgggcttcgaacgtctgattgcttacgtaacaggtgttcagaacgtacgtgatgtgattccgttcccacgcacaccgcgtaacgcaagtttctaa

SEQ ID NO: 114996 - DNA, 1059 bp, Enterobacter cloacae
atgatgaagcgcaatatcctggcagtggtagtccctgccctgctggtagccggtgcagcaaacgctgctgaaatctataacaaagacggcaacaaattagatctttacgggaaagcagttggcctgcattacttctctgattacgcgggcaacgatggcgacaacacttacgcgcgtctgggcttcaaaggtgaaactcagatcaacgatcagctgactggttacggtcagtgggaatacaacttccagggtaacaactctgaaggtggcgatgcacagaacggcaacaaaacccgtctggcattcgcaggtctgaaatttggtgacgcaggctccttcgactacggtcgtaactacggtctggtctatgacgcaatcggcatcaccgatatgctgcctgagttcggcggcgacaccggcgcgagcgataacttcttcgcaggccgtacgggtggtctggcgacttaccgtaacagcaacttcttcggcctggttgacggtctgaactttggtgttcagtacctgggcaaaaatgaacgtgatgacgcagtacgttccaacggtgacggctgggcaacttctctgagctatgatttcgacggtttcggcattgtgggtgcttatggtgcagctgaccgtaccaacaaccagcagacgctggattggggtaaaggcgacaaagctgagcagtgggcaaccggcctgaaatatgacgcgaacaacatctacctggcagctatttatggcgagatgcgtaacgcagcgcgtctgggcagccgtggtttcgctaacaagtctcaggacttctctgtcgtcgctcagtaccagttcgacttcggtctgcgtccatccatcgcttactacaaatctaaagcgaaagacgtagaaggtatcggtgacgaagactacatcaactacatcgacgttggtgcgacatactacttcaacaaaaacatgtctacctatgttgactatcagatcaaccagctgaaagacgacaacaagctgggcatcaacaacgacgatatcgtggctctgggtctggtttaccagttctaa

SEQ ID NO: 114997 - DNA, 1191 bp, Enterobacter cloacae
atgtttgagaacattactgccgctcctgccgacccaattctgggcctggccgatctgtttcgtgccgacgaccgccctggcaaaatcaacctgggtattggtgtatataaagatgaaaccggcaaaactccggtactgaccagcgtcaaaaaagctgagcagtatctgctggaaaacgaaaccaccaaaaactacctcggtattgatggtatccctgaatttggtcgctgcacccaggagctgctgttcggcaaaggcagcaccattgtgagcgaaaaacgcgcccgcacggcgcagaccccaggcggtaccggcgcactgcgcgtggcggcagatttcctggcgaaaaacacctctgtgaagcgtgtgtgggtaagcaatccaagctggccgaaccacaagagcgtttttaattctgcgggtctggaagtgcgtgaatacgcctactacgacgcggcaaaccacgcgctggatttcgacggtctgctggccagcctgagcgaagcccaggcgggcgatgtggtgctgttccacggctgctgccataacccaaccggtatcgatcctacgcttgaacagtgggaacagctggctaagctgtccgttgaaaaaggctggctgccgctgtttgacttcgcttaccagggctttgcccgtggtctggaagaagatgctgaaggtctgcgcgcattcgccgccgtccatcaggagctgattgtcgcaagctcctattccaagaactttggtctgtataacgagcgtgtcggcgcctgtacgctggtggctgctgacgaagcaaccgtcgatcgcgcattcagccagatgaagtccgtgatccgcgctaactactctaacccaccggcacacggtgcgtctgtggtcgcgacgatcctgagcaacgatgcgctgcgcgcaatctgggaacaagagctgaacgatatgcgtcagcgcattcagcgcatgcgtctgctgtttgtgaacacgctggctgagaaaggcgctgaccgtgacttcagcttcatcatcaagcagaacggcatgttctccttcagcggcctgaccaaagagcaggtgctgcgcctgcgtgaagagtttggcgtgtatgccgttgcctctggccgcgtgaacgttgcaggtatgacgcctgacaacatggcgccgctgtgcgaagccattgtcgcggtgctgtaa

SEQ ID NO: 114998 - DNA, 648 bp, Enterobacter cloacae
atgaactatcgtattattccggttaccgcgttctcacagaactgttcattgatctggtgtgaacaaactaaactggccgcgcttgtcgatcccggtggagacgccgggacaatcaagcaggaagtcgctgccagcggtgtaacgctgatgcagattttactcacccatggccatctcgaccatgtgggtgcagcggcagaactggctgaacactacggtgtgccgattatcggcccggaaaaagaagatgagttctggcttcaggggctgcctgcccaaagccgcatgtttggtctggatgagtgtcagccactgacaccggaccgctggctgaacgaaggcgatcgcgttaacgtagggaatgtaactttacaggtgttgcattgcccagggcatacgcccggccatatcgtcttctttgatgacgtgtcgcgcctgctgatttccggtgacgtgattttcaaagggggcgtaggacgcagcgatttcccacgcggcgatcacggtcaactgattcagtcgattaagcagaagttattgccgttaggtgatgatgtgacgtttatccctggacacggaccaatgtcgacgctgggcgatgagcggttgcataacccgttccttcaggatgaaatgcctgtctggtaa

SEQ ID NO: 114999 - DNA, 552 bp, Enterobacter cloacae
atggacaaatttgacgctaatcgccgcaaattgctggcgttaggtggcgttgcgctgggcgcagcagccatccttccgacgccagcatttgccaccctctcgacacctcgtccgcgtattttaacgctcaacaatctgcatactggtgagacgcttaaagcggaatttttcgatggcagaggctatattcaggatgaattagcaagactcaaccattttttccgtgatttccgcgcgaataaaatcaaagccatcgaccctggattattcgatcagctttaccgcttgcagggactgctggggaccaaaaggccggtgcaactcatttctggctatcgctctctggataccaacaatgaactgcgcgcccacagccgtggggtagcgaaaaaaagctatcacactaaagggcaggcgatggatttccatattgaaggcgtttcgttagccaatattcgcaaagcggcgttatctatgcgcgcaggtggtgtaggatactacccacgtagcaactttgtgcatattgataccgggccggttcggcactggtaa

SEQ ID NO: 115000 - DNA, 1890 bp, Enterobacter cloacae
atgcctttctatactgaaggaaagctccagaataatgggcatgtcgtgaaaaacagggggcaagggatgttgcttaagaaaaatcgtggtcgtcagctgtctgcgctgagtttgtgcctgacagtgatgtttgctccactgtttaccgctcaggccgatgagcctgaaattgtaccgactgacagctacgcgacgatgggcgcgcagccgacgtcgctgtcacaaccgctggatcagtctccggcgacggccatcatggccggcattaaaccgctgccggaaggcatcgatactgaatcattacgccagcagcttatgaccggcctgccctcgggctatactcccgcttatattaaccagctcacgctgctttacgctgcgcgtgatatgaaaccgatgtgggaaaatcgcgaggcggtacgagccttccagcagcagctggctgaagtggcgattgcaggctttcagccgcagttcacgacctgggttgagctcctgaccgaccctgccgtttccggacaggcgcgtgacgtggtgctgtctgatgccatgatgggctacttacagtttgtggcggggatttcggtgaacggcaaccgctggttatacagcagtaaaccgtacaagctggcgacgcctgcgctgtccgtcattaatcagtggcagctgtcgctggataacggcgaactgccgcgctttatcgcaagccttgcgcctgcccatccgcaatatgccacgatgcatcagtcgcttcttgagctggtcgcggattcccgcccgtggcctcagctgcgtggcaccacaacgctgcgtccggggcagtggagcagcgatgtgcctgcgatccgcgaaattatgaaacgctccggcattctcgacagcggccctaaaattgcgctgcccggtgacgagacgcaaaatgcggtcgtcagcccgtcggcgccggtaaaagagaaaacggccgttgcgttgagcaataagcccgccgcttacgatcgcgagctggtcgccgcagtgaagcagttccaggccgcgcaggggcttggcgctgacggcgtgattggtccatctactcgcgactggctgaacgtctctccggcccagcgggcaggggtgctggcgttgaatatccagcgcttgcgcttgctgccgggcacgttatccaccggcattatggtcaacattccggcgtactccctggtctactatcaggacggtagcgaagtgctggcgtcccgcgtgattgtcggccgacctgaccgaaaaacgccaatgatgagcagcgcgctgaataacgtggtggttaacccgccgtggaacgtgccgccgacgctggcgcgcaaagatatcctgcctaaggtatggaatgacccgggttatctggagcgacacaactatacggtgatgcggggctggaacagcaaagaagcgattgatccctggatggtcgactggtcaacgattacgccttcgaacctgccgttccgtttccagcaggcaccgggcgcacataactcgctgggacgttacaaattcaatatgccaagttcggacgctatctacctgcatgataccccgaaccataatctgttccagaaagacgctcgcgcgctcagctcgggctgcgttcgcgtgaataaggcctcggagctggcgaatatgctgttgcaggatgcaggctggaacgatacgcggatatcagatgccctgaagcagggggatacgcgttacgtcaatatccgccacaatattccggtcaatctttactatctgacggcgtttgtaggcgcggacggacgcacccagtatcgtacagatatttacaattatgatctgacagcgcgatccggcgcacaaattttgccaaaagcggaacaattaatcaggtaa

SEQ ID NO: 115001 - DNA, 4449 bp, Enterobacter cloacae
atgattgaacgcggtaaatttcgctcactaacgctgatcaactggaacggcttctttgcccgaacattcgatctggatgagctggtgacaacgctctccggcggtaacggggcgggtaaatccaccaccatggcggccttcgtgacggcgctgatccctgacctgaccctgctgcacttccgtaacaccactgaagcgggcgccacgagcggctctcgtgataaaggtctgcacggtaagctgaaagcgggcgtctgttattcagtgctggacgtcatcaactcccgccatcagcgcgtggttgtaggcgtgcgtctgcaacaggttgctggccgcgaccgtaaagtagatatcaaaccgtttgcgatccagggactaccaacctccgtacagccgaccgcgctgctgacggaaaccctgaatgaacgtcaggcgcgcgtcctcacgctccaggagctgaaagacaagctggaagctatcgaaggcgtgcagtttaagcagtttaactccattaccgactaccactctctgatgttcgatctcggtgtggtagcccgtcgtctgcgcagcgcgtcagatcgtagtaaatactaccgtctgattgaagcctccctgtacggcggtatctccagcgccattactcgctccctgcgcgactacctgctgccggaaaacagcggcgtgcgtaaggccttccaggatatggaagccgcgctgcgtgaaaaccgcatgacgctggaagcgattcgcgtcacacagtctgaccgcgacctgtttaagcacctgatcagcgaagccaccaactacgtggcggcggactatatgcgccacgccaacgagcgccgtattcatctcgaccaggcgctggagtatcgccgcgagctgtttacctcccgcaaacagctggtggctgagcagtataagcatgtcgaaatggcgcgcgaactgggcgagcacaacggtgcggaaggggatctggaagccgattaccaggcggccagcgatcacctgaacctggtgcagaccgcgctgcgtcagcaggaaaaaatcgagcgctatgaagccgatctggatgagctgcaaattcgtcttgaagagcaaaatgaagtggtggccgaagctgccgaattgcaggaagagaacgaagcccgcgcggaagccgccgagctggaagtggatgagctgaaaagccagcttgctgattaccagcaggcgctggatgtgcagcagacgcgtgcgattcagtacaaccaggcgttgcaggcgttgcagcgtgccaaagagctgtgccatctgccggacctgaccccggaaagcgctgacgaatggctggataccttccaggccaaagagcaggaagccactgagaaactgctttctcttgatcagaaaatgagcgtggcgcaaacggcgcatagccagtttgagcaggcgtaccagctggtggtggcgatcaacggtccgctggcgcgtaacgaagcgtgggacgttgcccgtgagctgctgcgcgacggcgtcaatcaacgccatctggccgaacaggtgcagccgctgcgcatgcgcctgaacgagctggaacagcgtctgcgtgaacagcaggaagccgagcgtctgctggcggaattctgcaagcgtcagggtaaaaattacgatttcgacgagcttgaggccctgcaccaggagctggaagcgcgtattgcggccctgtcggataccgtatcgaacgccagcgaacagcgcatgacgctgcgtcaggagctggaacagcttcagtcgcgttcgaagacgctcttacagcgtgcgccgatctggctggctgcacaaagcagcctgaaccagctcagcgaacagtgtggccaggagttttcctccagccaggacgtcaccgaatacatgcaacagctgctggagcgcgagcgtgaagcgattgttgagcgtgacgaagtgggtgcgcgcaagcgtgacgtcgatgaagagattgagcgtttaagccagcctggcggctcagaagatccgcgcctgaatgccttagccgagcgtttcggcggcgtgctgctgtctgaaatttacgacgatgtcggcctggacgatgcgccgtacttctccgcgctgtacggtccatcccgtaacgcgattgtggtgccggatctgtcgctgatttcggaccagcttgcagggctggaagactgcccggaagatctctacctcatcgaaggggatccgcagtcgtttgatgacagcgtattcagcgtcgacgagctggaaaaagcggtggtggtgaaaatcgccgatcgccagtggcgctattcgcgcttcccggaactgccgctgtttggccgcgccgcgcgtgaaaaccgtattgaaagcctgcacgctgagcgcgaaacgctttctgaacgttttgcaaccctgtcgtttgatgttcaaaaaacgcagcgtctgcatcaggcgttcagccgctttatcggcagccacctgggcgttgcctttgagcccgatccggaagctgaaatccgcaagctcaacacccgccgtggtgagctggagcgtgcgcttgccagtcatgaaaatgacaaccagcaaagccgcgtgcagttcgagcaggcgaaagagggcgttgcggcccttaaccgcatcctgccgcgcctgaacctgctggcggacgatacgctcgccgaccgcgtagacgaaattcaggaacgtctggacgaagcgcaggaagcggcgcgctttgtgcagcagcacggcaatcagctggcaaaactggagccgatggtttccgttctccagagcgacccggaacagtttgagcagttaaaagaagattacgcctggtcacagcaggtgcagcgcgaagcgcgtcagcaggcgtttgccctgacggaagtggtgcaacgtcgcgcacacttcggctactccgattcagcagaaatgctgagcgggaacagtgatcttaatgaaaagctgcgcgagcgtcttgagcaggccgaagcagagcgtacgcgcgcccgtgaagcgatgcgtactcacgccgcacagctgagccagtacagccaggtcatggcctcgctgaaaagctccttcgacaccaagaaagagctgttaaacgatctgcataaagagttgcaggacatcggcgtgcgcgccgacagcggtgcagaagagcgggcgcgtattcgccgcgatgagctgcatgctcagctcagtaacaaccgcgcgcgtcgtaatcagctggaaaaagcgctgaccttctgtgaagcagagatggacaacctgacgcgacgcctgcgcaagctggagcgtgactatcacgagatgcgtgaacaggttgtgaccgcgaaggcggggtggtgcgcggtgatgcgcatggtgaaagataacaacgtggaacgtcgtctgcatcgtcgcgagctggcgtacctgtcagccgatgaactgcgctctatgtcggataaggcgctgggcgcgctgcgtctggcggtggcggataacgaacacctgcgcgacgtgctgcgtatgtccgaagatccgaagcgtcctgagcgcaaaattcagttcttcgtggcggtttatcagcacttacgcgagcgtattcgtcaggacatcatccgtaccgacgatccggtggaagcgatcgaacagatggagatcgagctgggccgtttgacggaggagctgacctcccgcgagcagaagctggcaatcagctcccgcagcgtggcgaatattattcgtaaaaccattcagcgcgagcagaaccgtatccgtcagctgaaccagggcctgcaaagcgtgtcgtttggccaggtcaacagcgtgcggctgaacgtgaacgtgcgtgaggcgcactccacgctgctggacgtgttgtctgaacagcacgaacagcatcaggatctgttcaacagtaaccgcctgaccttctccgaagcgctggcgaagctatatcagcgtctgaatccgcagattgacatgggccagcgtacgccgcaaaccatcggcgaggagctgctggactaccgcaactatctggaaatggaagttgaggttaaccgtggctcagacggctggctgcgcgcggaatccggtgcgctctctaccggtgaagccatcggtaccggtatgtcgattctggtgatggtggtgcagagctgggaagatgaagcgcgtcgtctgcgcggcaaagacatctcgccatgccgtctgctgttcctcgatgaagccgcgcgtctcgacgcccgctccatcgccacgctgtttgagctttgcgagcgactcgatatgcagctcatcatcgcggcgccggaaaacatcagtccggaaaaagggacaacctataagctggtgcgtaaggtgttccagaacagtgaacacgtacacgtcgtgggcctgcgtggtttcgccccgcagccaccggagtcattaccgggcacggctgacgcctcttaa

SEQ ID NO: 115002 - DNA, 705 bp, Enterobacter cloacae
atgtcattgacaaatattgaacacgtgatgccagttaagctggcacaggcgctggcgaatccgttgtttccggcgctggatagccagctgcgtgccggtcgtcacattggccttgacgagctggataatcacgcctttttgatggactttcaggagtacctggaagagttttacgctcgctataacgttgagctgatccgcgcgccggaaggttttttctacctgcgtccgcgctctaccacgcttattccgcgctcggtgctttccgaactggatatgatggtcggcaaaattctctgctacctctatctcagcccggaacgtctggcgaatgaagggatcttcacccagcaggagctttacgatgagctgctgtcgctggcggatgaaagcaagctgctcaagctggtgaataaccgctcaacggggtccgatctggaccgtcagaaattacaggaaaaagttcgctcttccctgaaccgtctgcgccgtctgggaatggtctggttcatgggtcacgacagcagcaagttccgtattaccgaatcggtcttccgttttggcgccgatgtgcgtgcgggtgacgatgcgcgtgaagcgcagctgcgcatgatccgtgacggtgaagcgatgccggtggaaaaccatttgcagctcaatgacgagcacgaagagaatcagccggatagcggggaggaagagtaa

SEQ ID NO: 115003 - DNA, 1323 bp, Enterobacter cloacae
atgagtgaattttcccagacagtccccgaactggttgcctgggccaggaaaaacgatttctccatctcgctgccggtagacagactctcattcctgctggcggttgcgacgctaaacggcgaacgcctggatggcgaaatgagtgaaggcgaactggtggatgcgttccgccacgtcagtgatgcgtttgagcaaaccagcgaaaccattagcgtgcgtgccaacaacgcaatcaatgatatggtgcgtcaacgtctgctgaaccgctttaccagcgagcaggcggaaggaaacgccatctatcgtcttacgccactgggcattggcattaccgactattacatccgccagcgcgaattttccacgctgcgtctctccatgcagctctctattgttgcaggcgagctgaagcgtgccgccgacgcggctgatgaaaacggtgatgaattccactggcatcgcaacgtttacgcgccgctgaaatattcggttgccgagattttcgacagtatcgatctgactcaacgtctgatggacgaacagcagcagcaggtgaaagacgatatcgctcaactgcttaataaagactggcgtgcggccatctccagctgtgaactcttgctgtcagaaacgtccggtacgctgcgtgagttgcaggatacgctggaggcggcgggggataagctacaggccaatctgctgcgcatccaggacgcgacaatggcgcacgacgatctgcattttatcgaccgtctggtgtttgatttgcagagcaagcttgaccgcattatcagctggggccagcagtcaatcgacctgtggatcggttacgaccgccacgtgcataaatttatccgtaccgccatcgatatggataagaatcgcgtctttgctcagcgtctgcgccagtcggtacagacctacttcgatgcgccgtgggcgctgacctacgccaacgccgatcgtctgctggatatgcgcgacgaagagatggcgctgcgtgatgaagaggtcaccggtgaactgccgccggatctggaatacgaagaatttaacgaaattcgcgagcagcttgcggcgatgatcgaagaacagctcgctgtctacaaaaccagacaagcaccgctggatcttggcctcgtggtacgcgactatctggcgcagtatccgcgcgcgcgccacttcgatgttgcccgcattgttgtagaccaggcggtgcgcctgggcatcgcacaagccgatttcaccggactgccgccgaagtggcagccgattaacgattacggagccaaggtacaggcgcatgtcattgacaaatattga

SEQ ID NO: 115004 - DNA, 780 bp, Enterobacter cloacae
atgcgggatcgcaattttgatgacatcgcggaaaagttttcgcgcaacatttatggcaccaccaaaggtcagcttcgtcagacgatcctctggcaggatctggacaagctgctggctgaattcggtgaccgaccgttgcgcgtgctggatgccggcggtggggaaggtcagactgcaattctgatggcgcagcggggacatcacgtcacgctttgcgatctttctgccgagatggttgcgcgcgcagggcgagcggcagaagagaaaggtgtgagcgacaacatgcattttatacattgcgccgctcaggacattccgcagcatttggaaacgcaggttgatctgatattgtttcatgctgtgctcgaatggatcgccgaaccacaagcgatgttaaaaacgctgtggtcgatgttgcgcccgggcggtgcgttatcgctgatgttttacaatgccaacggcctgctaatgcgaaacgtgctggtcggcaattttggctatgtacagcagggcatgtataaaaagaaacgacgcacgctttcaccggatttcccccgtgaaccgcagcaggtctatggctggctggaggagatcggttgggaaattaccggcaaaaccggcgtgagggtgtttcatgattatctgcgtgataaacaaaaacaggatgactgtttagacgccttaacagaaatagagacgcggtactgccgccaggagccttatctgagccttggccgctatatacacgtcaccgcgcgcaagccgcagatgcaaggataa

SEQ ID NO: 115005 - DNA, 168 bp, Enterobacter cloacae
atgctttttaccctaaaaaaatatatcggaggcatgttgcttccccttcccctgctgttgcttctcatcgcgctggggctggcattgatatggtttagccgctttcagaaaagcggtaaatccctcgttaccgtgggctggctggcgctgctgttactcagcctgtaa

SEQ ID NO: 115006 - DNA, 546 bp, Enterobacter cloacae
gtggactatatcgtcgtgctgggcggcgggtatacctgggatccgaactgggcgcccagctcgaacctgatcaacaacagcctgccgcgcctgaacgaggggatccgcctgtggctggccaatcctggatcgaagatgatcttcacgggcgctgcggcaaaaaccaacccggtcagtaccgctgaagcaggagcaagagtggctgaatcgcttggcgtaccacgttccgccatcatcacgctggatagcccaaaagataccgaagaagaggcggcggcggtgaaacaggccatcggtgatgtaccgttcctgctggtgacctctgcttcacacctgccgcgcgcaatgattttctttgagaagcagggcctgcatccgcttcctgctccggcaaaccagatggctattgacgccccgctcaatccgtgggaacggataatcccgtccccggtatggctgatgcacagcgatcgcgtcggctacgagacgcttggccgcctctggcagtggctcaaaggttcgtcaggcaagccagggcaggagtga

SEQ ID NO: 115007 - DNA, 894 bp, Enterobacter cloacae
atggaacagctgcgtgctgaactcagccatctccttggcgaaaagctaagccgggtggaatgcgtgaatgaaaaggccgacaccgcactctggtcgttgtacgacagtcagggaaaccccatgccgctgatggccagaagttttacctcgccgggcgtcgccagacagctggcctggaaaatgtcgatgctggcgcgggaagggactgtccgcatgccgacggtctacggcgtgatgacccatgaggagcatcccggcccggatgttctgcttatcgagcgtttacgcggggtttctgttgaagccccgacgcgtacaccggagcgctgggaacagctgaaagatcagattgtcgaggctctgcttgcctggcatcggcaggacagccggggtcttgttggcgcggtggacagcacgcaggaaaacctgtggccgctgtggtatcgccagcgtgttgaagtgctgtggggcacgctgaaccagttcaacaacaccggtttaacgatgcaggacaaacgtattttattccgcacccgggagtgtctgccgacgctgtttgagggctttaacgacaactgcgtgctggttcacggcaatttcacgctgcgcagtatgcttaaagactcgcgcagcgaccagctgctggcgatggtcgggccggggatcatgctctgggcgccgcgcgagtacgaactgttcaggctgagcgagggcggggcggcggaagatttgctctggcactatcttcagcgcgcccctgttgcggaggcctttctctggcgacgctggctctatcttctctgggataaggtggcgcagctggtcaacaccgggcgctttaatcgcgccagtttcgatctggccgcaaaatcactcctgccctggcttgcctga

SEQ ID NO: 115008 - DNA, 747 bp, Enterobacter cloacae
atgagttttgttgtcattatccctgcgcgttatgcttcaacgcgcctgccaggtaaaccgctggtggatatcaatggcaaaccgatgattgtgcatgtccttgaacgggcacacgaatcgggcgccggacgcgtcatcgtcgccaccgatcacccggatgttgcgcgcgcggttgaggccgcgggtggggaagtgtgcatgacccgtgccgatcatcagtcaggcaccgagcgccttgcggaagtcgtcgaaaaatgcggtttcagcgacgagacggtgattgtgaacgtgcagggcgatgagccgatgatcccggcggcgattatccgtcaggtggccgacaacctggcacagcgtcaggtcgggatggcgaccctcgcggtgccgattcaccacgctgaagaggcgttcaatccgaatgcggtgaaagtggtcatggacgcagagggctacgcgctctatttctcccgcgccaccattccgtgggatcgcgatcgtttcgcgcaatcgaaagagacaatcggcgaaaccttcctgcgccacatcggtatttacggctaccgcgccggctttattcgtcgctacgtcgcctgggcaccaagcccgctggagcatattgaaatgctcgaacagcttcgcgtgctgtggtacggcgagaaaattcacgttgcggttgcccaggaaatcccaggcaccggcgtggatacccctgaagatctcgagcgcgtacgcgtcgaaatgcgttaa

SEQ ID NO: 115009 - DNA, 183 bp, Enterobacter cloacae
atggatcaccgtttacttgaaattattgcctgcccggtgtgcaacggcaaactgtattacagccaggataaacaagagctgatttgcaaactggacagcctggcgttcccgctgcgtgacggtattccggtcctgctggaaaatgaagcccgttccctggtggcagaagagatcaaaccatga

SEQ ID NO: 115010 - DNA, 1230 bp, Enterobacter cloacae
atgtctctatcgcaactctcacttgcagccgcacgaaacttgcatcttgccgcccaggggcttctgaaaaagccccgtcgccgcgcgcagccagcggatatcctctctaccgtgcaacgcatgtcgttgctgcaaatcgacaccattaacatcgtggcgcgtagcccgtatcttgtcctgtttagccgcctgggaaactatcctccgcagtggctggataatgcgctaagtcagggcgaactgatggaatactgggcgcacgaagcctgttttctcccgcgcagcgattttgcactggtgcgtcaccgcatgctcgccccggacaaaatgggctggaaataccgtcaggagtggatggtggaacacgcggatgaaatagagcaactgattgcccatattcaggaaaacgggccggtacgctccgcggattttgaacacccgcgaaaaggcgcaagcggatggtgggagtggaaaccgcacaaacgtcatcttgaagggctgtttacgtcgggcaaagtgatggtggtcgagcgtcgcaactttcagcgcgtctatgacctcacgcaccgtgttatgcctcactgggacgatacgcgtgacctgctgtctcaggacgcagccgaagccatcatgctcgggaacagcgcccgcagccttggcatcttccgcccacagtggctggcggattattatcgtctgcgtcagccgcagctaaaaccactgctggaatcgtggcagcgcgaacagcgcgtcatgccggtctcggtagagtcgttaggtgaaatgtggttgcatgcggatttgttccctctgctggcgcaggcgcaggagggcaaactccaggcgacccacagtgccgtgctgtcgccgttcgaccccgttgtctgggacagaaagcgggccgggcagttgtttaatttcagctaccgtctggaatgctacaccccggcgcccaggcggcaatatggttattttgttttgccgctgctgcacaaaggccagctagtcgggcgcatggacgctaaaatgcaccgtaaaaccggcatgcttgaaattatcgcgctctggctggaagagggcataaaggtgacggctggcctggagaaggggttaacgactgcgctcagtgaatttgcccgctggcagggagcgcatgaaattgtactcggtcgcgtgcctgcggggctgtttacgacctgtcgaggcggctgggaaacaggcactccctga

SEQ ID NO: 115011 - DNA, 978 bp, Enterobacter cloacae
atgattgcacgcatctggtcgggggaatcccctctgtgggtgctgcttctcccgctctcctggctgtatggcctggtgagcggtgctattcgtctgctttaccgcctcgggatcaagcgcgcctggcgcgcaccggtaccggtggtggtggtcggcaacctgacggcgggtggaaacggcaaaaccccggtggtgatctggctggtagaacagctccataaacgcggtatccgcccgggagttgtctcacgcggttacggtggtaaagcggcgcagtatccactggtgctgagcccagctacgacaaccgctgaagccggtgatgagccggtactgatttaccagcgtaccggcgcgccggttgcggtatcgccggtgcgcagtgatgccgtgaaggcactgcttgcggagcatgacgtacaaatcgttattaccgatgatggtttgcagcattacgcgctggcgcgtgacaaagagatcgtggtcattgacggcgtgcggcgttttggcaacggctggtggctgccagccggtccaatgcgtgagcgtgcgtcgcgcctgaagagcgtcgatgctgtgattgtaaacggtggtgaagccagagcgggcgaaatcccgatgcatcttcgtcccggacaggccgtgaatatgttgaccggcgagcgtaaagacgtcgcgcaactggaacatctggttgcgatggccggtataggtcatccgccgcgtttcttcgcaacgctggagcagtgcggcgcgcggctggaaaaacgagtaccgctggccgatcaccaggcgttagttgccgaagaggttgaaaggctggcagcgccgggacagacgctgatcatgacggaaaaagacgcggtaaaatgccgggcctttgcgaaagaaaactggtggtatctgccggttgacgctgaactcagcggcgaacagccggaacatttgctcaaggaactgctcgcgttagtgcagtaa

SEQ ID NO: 115012 - DNA, 1749 bp, Enterobacter cloacae
atgcataacgacaaagatctctccacgtggcaaacgttccgccggctctggccgatgattgctcctttcaaagcaggcttgatcgtggcgggcgtagcgttaatcctcaacgcagccagcgatacgtttatgttatcgcttctcaaaccgttactggatgacggtttcggtaaaacggatcgttcagtgctgctatggatgccgctggtggttattgggctgatgatcttacgcggaatctccagctatgtatccagctactgcatctcctgggtatccggtaaagtggtgatgaccatgcgccgccggctgttcagccatatgatggggatgccggtctcattctttgacaaacagtcaaccggcaccctgctgtcgcgtattacatacgattcagagcaggtggcgtcgtcctcttccagcgcactgattaccgttgtgcgtgaaggcgcatccatcatcggcctgttcgcgatgatgttctattacagctggcaactgtcgctgatccttattgtgctggcgccgattgtctccatcgcgatccgcgtggtatcaaagcgttttcgcaacatcagtaaaaatatgcagaatacgatggggcaggtgacgaccagcgccgagcagatgctgaaaggccataaggaagtgttgattttcggcggtcaggaagtcgaaaccaaacgctttgacaaggtcagcaacagaatgcgcctgcaaggaatgaaaatggtatcggcctcgtcgatttccgatccgatcattcagctgattgcctctctggccctggccttcgtcctgtatgccgccagtttcccgagcgtcatggaaaccctgactgcgggtaccattaccgtggtgttctcatccatgattgcgctgatgcgtccgctgaaatcgctgactaacgtcaacgcccagttccagcgcgggatggcagcctgtcagacgctgttcagcatcctcgattccgaacaggaaaaagatgaaggtacacgcgtgatcgagcgcgctaaaggcgacctggaattccgtaacgtcacctttacctatccaggccgtgaagtgccggcgctgcgtgatatcagcctgtccatcccggcgggtaaaaccgttgcgctggtcggtcgttccggttcgggcaagtcgaccattgccagcctgattacccgtttctacgatatcgaccagggcgagatcctgcttgatggtcacgacctgcgggaatataccctccagtcgctgcgtaaccaggtcgcgctggtctcgcagaacgtgcatctgttcaacgatacggtggcgaacaacattgcgtatgcccgtaccgaagagtacagccgtgaagagattgagaatgcggcgcgtatggcctatgcgatggacttcattaacaaaatggataacggtctggatacgatcattggcgaaaacggggtgctgctctcaggtggtcagcgtcagcgtatcgcgattgcccgtgcgctgctgcgcaacagcccgattctgatcctcgatgaagcaacgtccgcactggatacggaatctgaacgcgctatccagtctgctctggatgaattacagaaaaaccgtacctcgctggttattgcgcaccgtctgtcgaccatcgaacaggctgacgaaatcgtggtggtggaagatggcgtgatcgttgaacgcggcagccatgcggacctgctggaacagcgtggtgtttacgcgcagcttcataaaatgcagttcggtcaatga

SEQ ID NO: 115013 - DNA, 2265 bp, Enterobacter cloacae
atggggatccacgttatcagtatgtgcgccattctggccataatcccgctctattggttacccgttttgccagatttgcatattgtctggttgctgattgccgcaggaattgcgttatccgtacagcagagaaaatggctcaggttttcaggcctcgcattgctttttatgtgctgggggatcctggcagctcaggaaagcgtgtggccgatgaactatttaacgcaagcaccgcagcaggccgaggtggtcattaccgcaacggacggcgcaacgatgcatcagggaaggattgtcagcctcaatggagaacgcgtgtgggctgccatgggcgtggcgctgtatggcaactatttgccgcgaaacgtctgcgtgggtcaacgctgggcaatgaccctgcggctcagggcggtacacggagaactcaacgatggcggctatgattcacagaaaaatgcctttgcccgacaccagacgctgagtggacggtttacccatgcggcgctcgttgaggaaggctgtagtctgcgtgcgcaatacctgacatcactacagaatactctttcagcatatcagtggggacccgtgatcctggggctggggatgggggagcggctatcggtctcgcgggagataaaaaacctgatgcgtgataccggaacgatgcatctgatggcaatctcgggattacatattgcgctggccgcttctgtcatctggtttctggcgcggggcatccagttcttcctgccgggccgctggattatctggcaaatccccttgctggcagggctgatttttgccgcgttttacgcatggctaacgggcttgcagccgcccgcgctgcgcacggttatcgcgcttgtggtactggctgcattaaaaatgagtggtcgccagtggtcgccctggcaggtatggcttacctgcgtggcggcgatcctgattttcgatccactggcggtactgtcacaaagcctggcgttgtcagcgtttgcggtcgccgcgcttattttttggtatcagtggttgcctctcccgcactggcaacgtggccggtgcctgcggccgctggcgacgctagtgtatttgcaggttggaatgctgctgcttctgttgccgcttcaggtcctgattttccatggtttcagcctctcctcgctggtggcgaacctgtttgccgttcctctggtcacgtttatctcagttccgctgatcctgctcggcatgtttctgcatctgtttccggtcgctgcgctggaaagtattgtctggctggctactgataaatctctggcagggcttttctggctattgatgcgtttaccgaatggctggcaggacgttgatgaacgctggcaatacctgacgttactgccgtggctgctggtcattggctggcgattcagggccttcagcgcagcacccgcagtctgtctggcaggcagcgtggtgctggcctttcccctctggcacagggttaaaacagacagctggtccctgcatatgctggatgtagggcaggggctggcgatggtcattgagcgtcacgggaaggccattctgtatgacaccgggctggcatggcccggtggggacagtgcgcagcagctgattatcccctggctacgctggcatcatctgaaaccggaaggggcgatcctgagccatgaacatctcgaccacgcggggggactggcatcgctaaaagctgcctggcccgcaatgtggatcaggagccccttatcctggtccggacatcttccgtgctttcgaggacagcgatggcagtggcagggtttaacgttctccgtgcactggccacccgaaaacacctcggcgaaaggtaacaaccgctcctgcgtggtaaaaatcgatgacggcgaacagagcgttttactgaccggagacattgaagcgcaggcagaactggcaatgctgagccaccgctggcgtcagcttgcgtctacactgattcaggtgccgcatcatggaagtaacacgtcatcttcaacaccgttgctacagcgcgtagaggggcaggtttcgctggcctcgatggctcgctataacgcgtggcgtttcccttctattaaagtggtccggcgctatcgaacggagggatatctctggcttgataccccgcattccgggcagatatctgtgaccttttcgcaccatagtcggcaaattcgtcgcttacgcgaacactatttaccgcgttggtatcatcagtggtttggcgcgcccgtagataacgggtag

SEQ ID NO: 115014 - DNA, 288 bp, Enterobacter cloacae
atgaccaagtcagaattgattgaaagacttgccagtcagcaaccgcatatccctgccaaggctgtggaagatgccgttaaagagatgctggagcatatggctaccactcttgcccagggcgagcgcattgaaatccgcggtttcggtagtttttctctgcactatcgtgcaccacgtaccgggcgtaacccgaagactggcgataaagtggagctggaaggaaagtatgttccgcactttaagccgggtaaagaactgcgcgatcgcgccaatatttacggtaactga

SEQ ID NO: 115015 - DNA, 1674 bp, Enterobacter cloacae
atgactgaatcttttgctcaactgtttgaagaatccttaaaagaaatcgaaacccgtccgggttccatcgttcgtggcgttgttgttgctatcgacaaagacgttgtactggttgacgccggtctgaaatctgagtctgccatcccggctgagcagttcaaaaacgcccagggcgagctggaaatccaggttggtgacgaagttgacgttgctctggacgcagtagaagacggcttcggcgaaaccctgctgtctcgtgagaaagctaaacgtcacgaagcatggatcacgctggaaaaagcttacgaagaagctgaaactgtggtcggtgttatcaacggcaaagttaaaggtggcttcactgttgagctgaatggtattcgtgcgttcctgccaggttctctggtagacgttcgtccagtccgtgacaccctgcacctcgaaggcaaagagcttgagttcaaagtaatcaagctggaccagaagcgtaacaacgttgttgtttcccgtcgtgccgttatcgaatccgaaaacagcgcagaacgcgatcagctgctggaaaacctgcaggaaggcatggaagtcaaaggtatcgttaagaacctcactgactacggcgcattcgttgacctgggcggcgttgatggcctgctgcacatcaccgacatggcgtggaaacgcgttaagcacccaagcgaaatcgtgaacgtgggcgacgaaatcactgttaaagtgctgaagttcgaccgcgagcgtactcgtgtatccctcggcctgaaacagctgggcgaagatccatgggtagctatcgctaagcgttacccagaaggtactaaactgactggtcgcgttaccaacctgactgactacggctgcttcgttgaaatcgaagaaggcgttgaaggtctggtgcacgtttccgaaatggactggaccaacaaaaacatccacccatccaaagttgttaacgttggtgatgtagtggaagtgatggttctggatatcgacgaagaacgtcgtcgtatctccctgggcctgaagcagtgcaaaaacaacccatggcagcagttcgcggaaacccacaacaagggcgaccgtgttgaaggtaaaatcaagtctatcactgacttcggtatcttcatcggcctggacggcggcatcgatggcctggttcacctgtctgacatctcctggaacgttgcaggcgaagaagcagttcgtgaatacaaaaaaggcgacgaaatcgcagcagttgttctgcaagttgacgcagagcgtgagcgtatctccctgggcgttaaacagctcgcagaagatccgttcaacaactgggttgcactgaacaagaaaggcgcaatcgtaaacggtaaagtgactgctgttgacgctaaaggcgcaaccgtagaactggctgacggcgttgaaggttacctgcgcgcttccgaagcttcacgtgaccgcgttgaagatgcaactctggttctgagcgttggtgacgacgttgaagctaagttcaccggtgttgaccgtaagaaccgtgcaatcagcctgtctgttcgtgctaaagacgaagctgatgagaaagatgcaatcgcaactgtgaacaaacaggaagatgcaaacttctctaacaacgcaatggctgaagctttcaaagcagctaaaggcgagtaa

SEQ ID NO: 115016 - DNA, 684 bp, Enterobacter cloacae
atgacggcaattgccccggtaatcaccattgatgggccaagtggcgcagggaaaggtactctgtgcaaagcgatggcggaagcattgcaatggcatcttttagattcgggagcaatctatcgcgtgctggcgctggctgcgctgcatcatcatgtggatgttgcgtctgaagaagcgctggtaccgctggctgcgcatctggatgtgcgctttgtctcgaccgatggcaaccttgaagtgatcctggaaggggaagacgtcagcggtgaaatccgtacgcaagaagtggccaatgcggcctctcaggtggcggctttcccacgcgttcgtgaagcgctgttacgtcgccagcgcggtttccgtgaagcgccggggctgatcgccgacggccgcgacatgggaaccgtggtattccccgatgcgccagtgaaaattttccttgacgcctcttcagaagaacgtgctcaacgccgcatgcttcagttgcaggaaaaggggtttagtgttaactttgatcgccttttatccgagataaaagagcgcgatgaccgcgatcgtaaccgcgccgtcgcaccacttgttcccgcgcaagacgcattagtgctggattcaaccagtttaactattgagcaagtgattgaaaaagcgctacaatatgcgcgccaaaaactggcactcgcgtaa

SEQ ID NO: 115017 - DNA, 1284 bp, Enterobacter cloacae
atggaatccctgacgttacaacctatcgcgcgggtagatggcaccattaatctgcctggttcaaaaagtgtctcgaaccgcgctctgctgctggcagctctggcaaacggcaccaccgtcctcactaatctgctggacagcgatgacgtgcgccatatgctcaatgcactgaaagcgttgggcgttcagtacgcgctgtctgacgatcgtacccgttgtgaagtcaccggtaacggcggcgcgttacattctgctgaagcgctggagcttttcctgggtaacgccggtacagcgatgcgtcctctggccgcagcgctgtgtctggggagtaacgatattgtgctgaccggtgagccgcgaatgaaagagcgtccgatcggccatctggtggatgccctgcgtcagggcggcgcgcagattgattatcttgagcaggaaaattacccgcccctgcgtctgcgcgggggattcactggcggcaatgttgaggttgacggtagcgtttccagccagttcctgaccgcgctgctgatgaccgcaccgctggcaccacaggacaccgtcatcagcattaaaggcgacctggtttctaagccgtacattgatatcaccctgcacctgatgaacacctttggtgttgaggtggaaaaccagtcttatcagcgtttcgtggttcgcggtgggcagcagtaccagtcgccgggccactacctggttgaaggcgatgcttcatccgcctcctatttccttgccgcaggcgcgattaaaggcggtacggttaaagtgacgggcattggccgcaacagcgtgcagggcgatatccgttttgctgacgtgctggaaaaaatgggcgcggtggtgacctggggcgatgacttcatctcctgtacccacggtgagctgaacgccatcgatatggatatgaaccatattccggatgcggcgatgaccattgccaccgctgcgctgtttgcgaaaggcaccaccacgctgcgaaacatttacaactggcgtgtgaaagagacggaccgcctgttcgcgatggcaaccgagctgcgtaaagtgggggccgaggtagaagagggcgaagactacattcgcgtcacgccgccggcaaaactgcaatttgcagaaattggcacctacaacgatcaccgcatggcgatgtgtttctcgctggtggcgttgtcagatacgccagtcactatccttgatccgaagtgtacggcaaaaacgttcccggactacttcgaacagctggcgcgcattagcaccctggcctga

SEQ ID NO: 115018 - DNA, 1089 bp, Enterobacter cloacae
atggctcaagtctttaatttcagttcaggtccggcaatgttaccggcagacgtgctcaaacaggctcaacaggagctgtgtgactggaacggtctgggtacgtcggtgatggaagtcagccaccggggtaaagcgtttattcaggtggcggaagaagcagaaaaggattttcgcgatctgctgaacattccctcgaactacaaagtattgttctgtcacggcggtggacgcggccagtttgcgggtatcccgctcaatctactgggcgacaaaaccaccgctgattacgttgatgccggctactgggcggccagtgcggtaaaagaagcgcacaaatattgcacgccgaatgtcatcgatgccaaagtgaccgttgacggtctgcgcgccgtgaagccgatgagtgagtggcagctttctgacaacgccgcgtatcttcactactgcccgaacgaaaccatcgacggtattgccattcacgaagagccagactttggcgaaaatgtcattgtgacggcggatctctcttcaaccattctgtccaccccgctggatgtcagccgctacggcgtcatctacgcgggtgcccagaaaaacatcggtcctgcgggtctgactatcgttattgtgcgtgaagacctgctggggaaagcccataagtcttgcccgtcaattctggattacaccgtcctgaacgacaacgattccatgttcaacaccccaccaacgtttgcctggtatctctccggcctggtcttcaaatggctgaagcaaaaaggcggtgtggcgcagatggataagatcaatcagcaaaaggctgaactgctgtacggcgtgatcgacaagagcgatttctaccgtaacgatgtcgccaaaactaaccgttcgcgcatgaacgtgccgttccagctggcggacagcaacctggataacgtgttcctggaagagtccttcgcggcgggtctgcatgcgctgaaaggccaccgtgtggtaggcggaatgcgcgcctctatctataacgccatgccgctggagggcgttaaagccctgactgatttcatgatcgacttcgaacgtcgtcacggttaa

SEQ ID NO: 115019 - DNA, 693 bp, Enterobacter cloacae
atgaaagctttcgatctccagcggatggcgtttgataaagtccctcctgagtttttaggcgaagtagcgctgcgcagcctgtacacctttgtactcgttttcctgtttctgaaaatcaccggacgtcgcggcgtgcggcagatgtcgctgtttgaagtgctgatcatcctgacgctggggtcggcggcaggggacgttgccttttatgacgatgtgccgatggtgccggtctttatcgtcttcgtgacgcttgcactgctgtaccggctggtcatgtggctgatgtcgaaaagtgagaaactggaagatctgctcgaagggaagccggtggtgattgtcgaagatggtcaactggcctgggagaatgtgcaaagcgccaatatgacggagtttgagttctttatggaactccgtttgagcagcgttgagcaactggggcaggtgcgtctggcgattatggaaacgaatggtcaaatcagcgtctattactattccgacgatgaggtgaagcccggcctgtgcatcctgccggatatgctcatcgagcgatacaaaactgtacctgaagcgggcgagtacgcctgcataaaatgtagtcatgtcgtggttatgcaggcgggcgaacatcaattatgcccccgctgtacgaatccagaatggacgaaggttagccgggctaaacgcatcacctga

SEQ ID NO: 115020 - DNA, 1761 bp, Enterobacter cloacae
atgactcaaacgtttatccccggcaaagacgccgctctggaagattccatcgctcgcttccagcagaaactgaccgacctgggctttaatatcgaagaagcctcctggctgaatccggtgcctcacgtctggtccgtgcatattcgcgacaaagactgtgcgctgtgctttaccaacggtaaaggcgcgaccaaaaaagcggcgctggcctctgcactgggtgagtattttgagcgtctgtccaccaactacttcttcgccgacttctggctgggcgaaactattgccaacggtccgttcgttcactatccgaacgaaaaatggttcccgctgaccgaaaacgatgaactgccggaaggcattctcgatgcccgcctgcgcgcgttctacgatccggaaaacgaactgaccggcagcatgttgatcgacctgcaatccggcaatgaggatcgtgggatctgcgccctgccgttcacccgtcagtctgacgagcagaccgtttatatcccgatgaacatcgtcggcaacctgtatgtgtctaacggcatgtctgccggtaatacccgcaacgaagcgcgcgtgcagggattgtctgaagttttcgagcgtcatatcaaaaaccgcattattgctgaatccatcagcctgccggagatcccggctgacgtgctggcgcgctacccgggcgtggtggaatccatcgccaaactggaagcagaaggtttcccaatctttgcttatgacggctctctgggcggcaaatatccggttatctgcgtggtactgttcaacccggcaaatggcacctgcttcgcctccttcggcgcgcacccggacttcggcgtggcgctggagcgtaccgtaaccgaactgctgcaaggtcgtagcctgaaagatctcgatgtctttactccgccaacctttgatgacgaagaagtcgccgagcacaccaacctcgaaacacacttcatcgactccagcggtttgatctcctgggatatgttcaaacaggacgcggactatccgttcgtggactggagctttgccggtacgacggaagaagaattcgccaccctgatggcgatcttcaacgcggaagatcaggaagtttacattgccgactatgaacacctcggtgtttacgcgtgccgtattattgtgccaggtatgtcggacatttatccggcagaagatctgtggctggcgaacaacagcatgggcgcgcatctgcgtgaaaccctgctggccctgccaggcagcgagtgggataaagaagattatctgaacctgatcgcccagctggacgaagaaggacacgatgatttcacccgcgtgcgcgaactgctgggtctggcgaccggaaaagataacggctggtacaccctgcgcatcggcgagctgaaagcgatgctggcgctggcgggcggcgatctggatcaggctttggcctggaccgagtggacgatggagtttaaccagtccgtcttctccgccgagcgcacaaactattaccgttgcctgcaaacgctgctcctgctttctcaggaagacgaccgcgagccattgcagtatctgaacgcatttgtacgtatgtacggtgcggatgccgttgaagctgccagcgcggcgctgagcggtgaagaaccattctacggcctgcaagcggttgacagcgatctgaaagccttcccggcgcatcagtcactgctgaatgcgtatgaaaaattgcagaaggcaaaagccgcttactggtcaaaataa

SEQ ID NO: 115021 - DNA, 858 bp, Enterobacter cloacae
gtgaaagctgacaacccttttgatctattactccccgctgcgatggcgaaagttgccgaagaagcgggtgtctacaaagccacgaaacatccgatgacgacgttctttctggccattacggctggggtgttcatctccatcgctttcgtcttctatatcacagccaccaccggcactgccgggatgcctttcggcatagcgaaactgattggtggtatttgcttctcactgggcctgattctctgcgtcatctgcggcgccgacctcttcacctcaacggtgctgattgtggtggcaaaagccagcggaagaattacctggggtcaactggggcgcaactggctcaacgtttacgttggcaacctgattggctgtctgctctttgttctgttgatgtggctctctggcgagtatatgaccgccaacggcggctgggggcttaacgtcctgcaaaccgccgaccacaaaatgcaccatacatttatcgaagctgttgctctcggcatcctcgcaaacctgatggtctgcctggcggtctggatgagctactctggtcgtagcctgatggataaagccatgattatggttctgccggttgcgatgtttgttgccagcggctttgagcacagtattgcgaatatgttcatgatcccgatgggtattgttatccgcaactttgcaagcccggagttctggactgctgtaggttcaaccccggaaagtttttcacacctgactattatgaacttcattactgataacctgatccccgtcactatcgggaacattatcggtgggggtctgttagttgggttgacatactgggtcatttacctgcgtggcggcgatcatcattaa

SEQ ID NO: 115022 - DNA, 2283 bp, Enterobacter cloacae
atgtccgagcttaatgaaaagttagccacagcctgggaaggttttacgaaaggtgactggcagaatgaagtcaacgtccgtgacttcattcagaaaaactataccccgtatgaaggtgacgaatccttcctggctggtgcgactgacgcaaccaccaagctgtgggacagcgtgatggaaggcgttaaactggaaaaccgcactcacgcgccagttgattttgacacctccgttgcttctaccatcacttctcacgatgctggctacatcaacaaagcccttgagaaaatcgtcggtctgcaaactgaagcaccactgaaacgcgcaatcatcccgttcggtggtatcaaaatggttgaaggttcctgcaaagcgtataaccgcgagctggacccaatgctgaaaaaaatcttcaccgaataccgcaaaacccataaccagggcgtattcgatgtttacaccaaagacattctgaactgccgtaaatctggcgttctgaccggtctgccagatgcctatggccgtggccgtatcatcggtgactaccgtcgcgttgcgctgtacggtatcgacttcctgatgaaagacaaatacgcgcagttcgtctctctccagtctgacctggaaaacggcgtaaacctggaagcgactatccgtctgcgtgaagagatcgctgaacagcaccgtgcgctgggtcagatcaaagagatggcggctaaatacggctgcgatatctctggtcctgctaccaacgctcaggaagctatccagtggacctacttcggctacctggccgctgttaagtctcagaacggtgcagcaatgtccttcggccgcgtatccaccttcctggatgcgtacatcgaacgtgacctgaaagcaggcaaaatcactgaacaagacgctcaggaaatgattgaccacctggtcatgaaactgcgtatggttcgcttcctgcgtaccccagaatatgatgagctgttctctggtgacccaatctgggcaaccgaatctatcggcggtatgggcgtagatggtcgtactctggtaaccaaaaacagcttccgcttcctgaacaccctgtacaccatgggtccttctccggagccgaacatcaccgttctgtggtctgaaaaactgcctctgaacttcaagaaattcgccgctaaagtgtccatcgacacctcttctctgcaatatgagaacgatgacctgatgcgtcctgacttcaacaacgatgactacgctatcgcttgctgcgtaagtccaatggttgttggtaagcaaatgcagttcttcggtgcgcgtgcaaacctggcgaaaaccatgctgtacgcaatcaacggcggcgttgatgaaaaactgaaaatgcaggttggtcctaagtctgaaccgatcaaaggcgacgtgctgaactatgacgaagtcatggaccgcatggaccacttcatggactggctggctaaacagtacgtgaccgcgctgaacgttatccactacatgcacgacaagtacagctacgaagcctctctgatggcgctgcacgaccgtgacgtcgttcgcaccatggcgtgtggtatcgcaggtctgtccgttgcggctgactccctgtctgcaatcaaatatgcgaaagttaaaccaattcgtgacgaagatggtctggctatcgacttcgaaatcgaaggcgaatatccgcagtttggtaacaacgacgctcgcgttgatgacatggcggttgacctggtagaacgtttcatgaagaaaattcagaaactcactacctatcgtaacgctatcccgactcagtctgttctgaccatcacctctaacgttgtgtatggtaagaaaaccggtaacaccccagacggtcgtcgtgctggcgcgccattcggcccaggtgctaacccaatgcacggtcgtgaccagaaaggtgcggttgcctctctgacctccgttgctaaactgccgtttgcttacgcgaaagatggtatctcttacaccttctctatcgtgccaaacgcgctgggtaaagacgacgaagtgcgtaaaactaacctggcgggtctgatggatggttacttccaccacgaagcgtccatcgaaggtggtcagcacctgaacgtgaacgtgatgaaccgtgaaatgctgctcgacgcgatggaacatcctgagaaatatcctcagctgaccatccgcgtatctggctacgcagtacgttttaactccctgacgaaagaacagcagcaggacgttattacccgtactttcactcagtccatgtaa

SEQ ID NO: 115023 - DNA, 741 bp, Enterobacter cloacae
atgtcaattattggtcgcattcactcctttgaatcctgtggcaccgtcgatggcccggggatccgctttatcactttcttccagggctgcctgatgcgctgcctgtactgccataaccgtgacacctgggacacccatggcggtaaagaagtcaccgttgaagatctgatgaaagaggtggtgacctatcgccacttcatgaacgcgtccggcggtggcgtgacggcatccggcggtgaagccattcttcaggctgagtttgtgcgcgactggttccgcgcctgccacaaagaaggcattcatacctgcctcgacaccaacggctttgtgcgccgttacgatccggttattgatgaactgcttgaagtgaccgatctggtcatgctcgatctcaagcagatgaacgatgagatccaccagaatctggttggcgtttcaaaccaccgtaccctggaatttgccaaatacattgccaacaaaggcgtcaagacctggatccgctacgtggtggtgccgggctggtcagatgatgatgactctgcacatcgtctgggtgaatttacccgggatatgggtaacgtggagaaaattgaactcctgccctatcacgagctgggtaaacataaatgggtggcgatgggtgaagagtacaaactcgatggcgtgaagccgccgaaaaaagagacgatggagcgcgtcaaaggtattcttgagcagtatggccacaaggtcatgtattaa

SEQ ID NO: 115024 - DNA, 522 bp, Enterobacter cloacae
atgtctactcgtcgtttttccactaccgcactttccgtagtgttggctttaacgtttgcaacggctccggccatggctaatcctggaaacgggaatggtggtggtcacggaaacggtggcggacaaggtaatagcggcaatcatggtaacgggaacgctggtaaccatggtaataaacacaataacggtcaggataaccctgggaaatcggataagagctttaaaaacagcaaagatgtcggtaatgatgtggatgctcgcgtgagcttcgatcatgcccgccatctggcactgaattacggcttaacgggctacgactctctgcctccgggaattgcgaaaaacctggcgcgcggtaagccactgcctccgggcattgcgaagaaaaccgtgccagccgatatgctgggtcagcttccttcctatccgggctatgaatggcgcgtagtaggtgacgacctggtcttaattgcgctgagtacggcgattgtgacttccgttattaatggcgtctttaaatag

SEQ ID NO: 115025 - DNA, 1149 bp, Enterobacter cloacae
atgaccacctatacccgcccggtgcttttgttgctctgtggcctgcttttgctgaccctggcgatcgcggtgttaaacacactcgtcccgctatggctcgcccatgaaaacttaccgacctggcaggtgggtatggttagctcgtccttttttacgggcaatctgctgggcaccttattaacgggcagccttattaagcgctttggttttaaccgcagttattatctggcgtcgctgatctttgccgtcggctgcgccggtttaggcctcatggtcggcttctggagctggatggtctggcgctttattgcgggcgtcggctgcgccatgatctgggtggtggttgaaagtgcgctaatgtgcagcggaacgtcccgtaatcgcgggcgtcttctggcggcctatatgatggtttactacgtcggtaccgttctgggacagctgatggtcagcaaactgccaacagacctgatgagcgtgctgccgtgggtgacgggcatggttctggcggcgatcctgccgctgctctttacccgcattgtgaatcaaaacagcgagcatcaggaagctacccacgtctggccgatgctgagactgcgccaggcgcgtctgggggttaacggctgcattatttccgggattgtgctgggctcgctctatggcctgatgccgctctatcttaaccatcagggcgtcagtgattccgggatcggtttctggatggcggtgatggtcagcgcggggattgtcggccagtggccgattggccgcctggcggaccgctttggtcgtctgctggtgctgcgcgtccaggttttcgtggtcatcatgggctgtctcgccatgctcagcaacgccgcaatggcgcctgcgctgttcattctgggagctgcgggctttacgctctatccggtcgcgatggcctgggcctgtgagaaagttgagcatcaccagctggttgcaatgaaccaggctttgttgctgagttacaccatcggcagtttactgggtccgacgtttaccgctatgctcatgcaaaattattctgacaatctgctgtttattatgatcgccagcgtgtcgtttatttatctgttaatgctgctgcgcaaagtgggcgaacatccaacgccagtggcccatgcatga

SEQ ID NO: 115026 - DNA, 864 bp, Enterobacter cloacae
atgggaagtggatggcatgaatggccgctaatgatcttcacggtctttgggcagtgcgtggcgggcgggtttatcgtccttgcgctggcgctgttaaaagggaacctcaatgctgaacagcagcagcgtttggtgttaagcatgtttggcctgtgggtgttgatgggcattgggtttatcgcctctacgctgcacctgggctcaccgatgcgcgcgttcaactccctgaaccgcgtaggtgcctcttcgctgagtaacgagattgccagcggggcaatcttctttgccgttggcgggctggggtggttactggcagcggtgaaaaagctgccgtcagggttacgcgcgttgtggctcatcgtcaccatggtactgggcgttgtcttcgtctggatgatggtccgggtgtacaacaccatcgataccgttccgacctggtacagcgtctggacgccgatgagcttcttcctgaccatgtttattggcgggccgctgctgggttatctgctgctgcgtgtggctggcattaatggttgggagatgcccctgctgcccgcggtctcgctgctggcgctggtaatcagtaccgttgtcgcgctcatgcagggagcggagctggcgaccattcacagctctatccagcaggcttcggcgttggtgccggattacggttcgctgatggcctggcgtgtggtgctgctgacggcggcgctggtgtgctggattgcccctcagcttaaaggttactcgcctgcgctgccgttactgtccctggcctttgtgctggtgctggcaggggagttaattggtcgcggcgtattttacggtctgcatatgacggtcggtatggctatcgccagctaa

SEQ ID NO: 115027 - DNA, 789 bp, Enterobacter cloacae
atgagcagtaacttcagacatcatctgatgagtctgtcgttactggttggaatagcggccccctgggccgcttttgctcaggcaccaatcagtagtgtcggctcaggctcggtagaagaccgggtcactcaactcgagcgtatttctaacgctcacagccagcttttaactcaactccagcagcagctttccgataaccagaatgatattgattcccttcgtggtcagatccaggagagtcagtatcagcttaatcaggttgtggagcgccagaagcaaattttgttgcagatggatagccttaacagcggcggagcagcagcacagccagcagcaggcgatcaaagcggtgcggcaacgcctgcacctgcggcagatgcctccgcgtcgtctggtgcgcctgtacagagcggtgacgcgaatacggactacaacgcggccattgccctggtgcaggacaaatcgcgccaggacgatgctatcgttgcgtttcagaacttcgttaagaagtaccctgattccacttaccagccaaatgcgaactactggctgggtcagttgaattacaacaagggtaaaaaggatgatgcggcgttttattttgcctctgtggtgaaaaattacccgaaatcaccgaaagcgcctgatgcgatgtataaagtcggcgtgatcatgcaggacaaaggcgacactgcaaaagccaaagcggtttatcagcaggtggttgcaaaattcccgggtacagacggcgccaaacaagcgcaaaaacgtttaagttcgatgggttga

SEQ ID NO: 115028 - DNA, 522 bp, Enterobacter cloacae
atgcaactgaacaaagtgctgaaggggctgatgatcgctctgcctgttatggcaatcgcagcgtgttcttctaacaagaacgcaagcaatgaccagagcggcgaaggcatgatgggtgccggcaccggtatggacgctaacggcaatggcaatatgtcttctgaagagcaagcgcgtcttcagatgcagcagttacagcagaacaacatcgtttacttcgatctggataaatacgacatccgttctgacttcgctgcaatgctggatgcgcacgcaaacttcctgcgtagcaacccgtcttacaaagtcaccgtagaaggtcatgcggacgaacgtggtactccggagtacaacatctccctgggtgaacgtcgtgcaaacgctgttaaaatgtacctccagggtaaaggcgtttctgctgaccagatctccatcgtttcttacggtaaagaaaaaccagcagtactgggtcacgacgaagcggcttactccaaaaaccgtcgtgccgtactcgtttactaa

SEQ ID NO: 115029 - DNA, 1293 bp, Enterobacter cloacae
atgaagcaggcattacgattagcttttggttttttagtactgttgacgtcagcagtgcatgccacagtaagcatcgacattaccgactggaacgactcagcgcgtccaatcggtgtcgttccgttccagtgggcaggcccgggcgctgcgcctgaagacattggcggcattgttgcagctgacctgcgtaacagcggtaaatttaaccccttagatcgttctcgtctgccgcagcagccgggtaccgctcaggaagttcaacctgctgcatggtctgcactgggtattgatgccgtggttgtcggacaggttactcctgcgccagacggcggctataacgtcgcttatcagctggtggataccggcggtgcgccgggtaccgttctggctcaaaacacgtataaggtgaacaagcagtggctgcgttacgcaggccatacggcgagtgacgaagtgtttgagaagctgaccggtattaaaggtgcgttccgtactcgtatcgcgtacgtagtacagaccaacggcggccagttcccttatgagctgcgcgtctctgattacgatggctacaaccagttcaccgtacaccgttcaccacagccgctgatgtctccggcatggtctccggacggctctaagctggcgtacgtgaccttcgaaagcggccgttccgcgctggttatccagacgctctctaacggtgctgtgcgtcaggttgcgtcattcccgcgtcacaacggtgcgcctgcgttctctccggacggtaccaaactggcgtttgccctgtctaaaaccggtagcctgaacctgtacgtgatggatattggttctggtcagatccgtcaggtcacggatggtcgtagcaacaacactgagccaacctggttcccggacagccagaatctggcctttacgtctgaccaggcaggtcgtccacaagtttataaagtgaatatcaacggcggagcagcgcagcgtattacctgggaaggttctcagaaccaggatgctgacgtcagtgccgatggtaaaacaatggtaatggtcagtactgcgggtggtcagcagcacattgccaaacaagatctggtaacggggggcgtacaagtactgtcgtcaacgttcctggatgaaacgccaagtctggcacctaacggcaccatggtaatctacagctcttctcaggggatgggatccgtgctgaatctggtttctacagatgggcgtttcaaagcgcgtcttccggcaactgatggacaggtaaaatcacctgcctggtcgccgtatctgtaa

SEQ ID NO: 115030 - DNA, 1203 bp, Enterobacter cloacae
gtgtcaaaggcaaccgaacagaacgacaagcttaagcgagcgataatcgtctccgcagtgctgcacgtaattctttttgcagcgctgatctggagttcgttcgatgagcaccttgatgcatcaggcggcggtggggggtcctccatcgacgccgttatggtggatcctggtgcgatcgttcagaactataatcgtcagcaacagcagcaggcgagctctaaacgtgctgaagagcagcgagaaaaacaggcgcaacagcaggcggaagagctgcgtgaaaagcaggccgctgagcaggaacgtctgaagcagctagagaaagagcgtttgcaggcgcaggaagcggcgaaagagcaggcagagcagcagaagcaggctgaagccgctgcgaagaaggcgcaggaacagcagaagcaggcggaagaggcggcagccaaagccgcggctgatgcaaaagcgcaggctgacgcacaggcgaaattagcggctgacgcggcgaagaaagccgctgctgatgcccagaagaaagcggaagcagaagctgcgaagaaagccgctgctgatgcccagaagaaagcggaagcagaagccgcgaagaaagccgctcaggaagcagagaagaaagctgctgccgatgctgcgaagaaagcggctgctgccgagaaggctgcggctgaaaaagcggctgccgctgaaaaagctgcggctgataaaaaagctgctgccgaaaaagccgcagccgacaagaaagctgccgctgaaaaagccgctgccaggaaggccgctgctgaaaaagctgccgctgaagcagccaccgctgacgatatcattggcgacctgagttctggtaagaatgcgccgaaaactggcggtggggcaaaagggagtaatgcagccccggcgggaagcggtaacactaagaacaacggtgcttctggcgctgagattaacgactacaagaaccagattgctgcggctatatccagcaggcttaacgataaatcattgtatacagggaaaacatgcagactgcatattaaactgcatactgatggtaccgtgctgagcgttgagtctgaaggaggcgatgacgcattatgccaggctgcacttgtggcagtgaatcaggcaaaactgccaaaacctccgtcacaggctgtctatgaagtgttcaaagacgcttcgctgaactttaagccataa

SEQ ID NO: 115031 - DNA, 429 bp, Enterobacter cloacae
atggccagatcgcgtggacgaggtcgtcgcgagctcaagtccgaaatcaatatcgttccgttactggacgtgctgctggtgctgctgctgatctttatggcgacggcgcccatcatcacccagagcgtggaagttgatctgccggatgcgacagaatcacaggcggtaagcaccaatgacgatcctccggtcatcattgaggtttccggcgtagggcagtacagcgtggtggtagagaaagatcgtatggatcagcttccgccagagcaggttattgctgaagcgcaacgacgcctggagtcaaatccgaagacggtcttcttaatcggtggtgcgaaagacgtaccatatgatgaaattatcaaagcgctgaacttgctacatagcgcgggcgttaagtcagttggcttaatgactcagcctatttga

SEQ ID NO: 115032 - DNA, 693 bp, Enterobacter cloacae
gtgactgacatgaatatccttgatttgttcctgaaggcaagccttctggttaaacttatcatgttgattttgattggtttttcaatcgcatcctgggccatcatcatccagagaacgcgtatcctcaatgccgctggccgcgaagccgaagcgtttgaagataagttctggtcgggtattgagctttctcgtctgtaccaggaaagccagggacgccgtgataacctttcaggctccgaacaaattttctatagcggtttcaaagagttcgctcgcttacatcgcgctaacagccatgcgccggaagccgtggtagaaggagcgtcgcgtgcgatgcgcatctccatgaaccgcgaactggaaaatcttgaaacgcatattcctttcctcggaaccgttggctccatcagcccgtatatcggcctgtttggtacggtgtgggggatcatgcacgcctttatcgcccttggggcggtgaagcaggcaacgttgcagatggttgcgccgggtatcgcagaagcactgatcgcgaccgcaatcggtctgttcgccgcaattccggcggtaatggcgtacaaccgtctgaaccagcgcgtgaacaaactggaactgaactacgacaactttatggaagagttcaccgcgattctgcatcgtcaggcgtttaccagcaccgagagcaacaaggggtaa

SEQ ID NO: 115033 - DNA, 405 bp, Enterobacter cloacae
gtgaatacaacgctgtttcgatggccggtacgtgtctattacgaagatactgatgccggtggtgtggtctaccacgccagctacgttgctttttatgaacgggcacgcacagagatgctgcgccatcatcactttagtcaacaggtgctgttggctgagcgagttgccttcgtggtacgcaagatgacgcttgagtattttgcgcctgccagactcgacgatatgctcgaagttcaaacagaaattacatcaatgcgcggaacttcactggttttcacgcagcggatagtcaatgcagagaatacggtactgaactcagctgaagtcctgattgtctgtgttgatccaaccataatgaagcctcgtgcgcttcctaagtctattgtcgcggagtttaagcagtga

SEQ ID NO: 115034 - DNA, 291 bp, Enterobacter cloacae
atgaatattatcgcaacgttatatgcggtaatggataagcgccccttgagggcgctttccctcattatggcattactgctggcaggctgtatcttctgggacccgtcgcgcttcgcggcgaaaaccagcgagcttgaaatctggcacggcttcctgattatgtgggcggtgtgcgcaggcgtgattcacggtgtcggctttcgtccgaaagcgcttcactggcagggcatcttctgcccactgattgccgatctggttctcctcgccggtttgattttcttcttcttctga

SEQ ID NO: 115035 - DNA, 1140 bp, Enterobacter cloacae
atgatcgattatgaagtattgcgttttatctggtggctgctgatcggtgttctgctgattggtttcgcggtcaccgatggtttcgacatgggcgtgggcatgctcacccgtttcctcggtcgtaatgacaccgagcgtcgaatcatgatcaactccatcgccccgcactgggacggtaaccaggtgtggctgatcaccgcaggcggcgcgctgttcgctgcctggccgatggtctacgcggctgcgttctccggcttctatgtggcgatgattctggtgctggcttctttattcttccgtccggtgggtttcgactaccgttccaagattgaagacacccgctggcgtaacatgtgggactggggcatcttcatcggtagcttcgttccaccgctggtcattggtgtggcgtttggtaacctgttgcagggcgtaccgttccacgtcgacgaatatatgcgtctgttctacaccggtaacttcttccagctgctgaatccgtttggtctgctggcaggcgtggtgagcgtggcgatgatcatcacccagggcgcaacctatctccagatgcgtaccgtaggtgaactgcacctgcgttcccgcgctaccgctcaggtggcggcgctggtgacgctggtctgcttcgcgctggcaggcgtgtgggtggtgtatggtattgatggatacgtggtgacgtctgctatcaaccatgctgcgccgtctaacccgctgaccaaagaggtggcgcgtcaggccggtgcatggctggtgaacttcaacaatacccctgtgctgtgggctatcccggctctgggtgtgctgctgccactgctgaccgtgctgacgtctcgtctggagaaaggcgctctggcgttcgtattctcttccctgacgctggcgtgcatcatcctgacggccggtattgcgatgttcccgttcgtgatgccatccagcaccatgatgaatgccagcctgaccatgtgggatgcaacgtccagccatatgacgcttaacttaatgacctatgttgcttgcgtgttcgttccgattgttctggcttacaccatctggtgttactggaaaatgttcggtcgtatcactaaagaacatatcgaaagcaacacccactctatgtactaa

SEQ ID NO: 115036 - DNA, 1569 bp, Enterobacter cloacae
atgttagacgtagtcgaactgtcgcgcttacagtttgccttgaccgcgatgtaccacttcctgtttgtgccgctgacgctcggtatggcgttcctgctggccatcatggaaacggtttacgtcctctccggcaaacagatttataaagatatgaccaagttctggggcaagttgtttggtatcaactttgcgctgggcgtggcaaccggtctgaccatggagttccagttcgggacaaactggtcttactattcccattatgtgggggatattttcggtgcgccgctggccattgaaggtctgatggccttcttcctcgaatccacctttgtaggtctgttcttcttcggttgggaccgtctgggtaaagtccagcatatggcggtaacctggctggtggcattaggctccaacttgtccgcactgtggatcctggtggcgaacggctggatgcaaaacccaatcgcatctgatttcaacttcgaaaccatgcgtatggagatggtcagcttcgctgagctggtcctgaacccggttgctcaggttaaattcgttcacaccgtggcgtctggctatgtgtgcggcgcgatgttcgtgctgggcatcagctcctactatatgctgcgcggccgcgacttcgcctttgccaagcgttcttttgctatcgcagcaagcttcggtatggccgcgattctgtccgttattgttctgggtgatgaatccggttacgaaatgggcgacgtgcagaaaaccaaactcgccgcaattgaagctgaatgggaaacccagccggcaccggcagcgtttaccctgttcggtgtgcctgaccaggaagcgcaggaaaaccgcttcgccattcaaattccttacgcgctgggtattatcgccacgcgctccgtcgacaaacaggtgactggcctgaaagatctgatggtgcagcatgaagagcgtatccgtaacgggatgaaagcttactcgctgctggaacagctgcgcgccggctctaccgaccaggccgttcgcgatcaatttaacgacgtgaagaaagacctcggttacggtctgctgctgaaacgctataccccgaacgtctccgacgcgacggaagcgcagatccagatggcaaccaaagactctattccacgcgttgcgccgctgtacttcgcgttccgcatcatggtgggttgcggcattatcatgctgctgatcatcgcggcctcgttctggtcagtcattcgtaaccgtatcggtgagaaaaaatggctgctgcgcaccgcgctgtacggtatcccactgccatggattgctatcgagtccggctggtttgttgcggaatatggccgtcagccgtgggcgatcggtgaggtgctgccaacagcggtagcaaactcctccctgaccgcaggcgacctgatcttctccatgctgctcatttgcggtctgtacaccctgttcctggtggctgaactgttcctgatgttcaagttcgcgcgccttggcccaagcagcctgaaaaccggtcgctaccactacgagcagtctgttgcgactactcagccggcacgctaa

SEQ ID NO: 115037 - DNA, 2637 bp, Enterobacter cloacae
atgaaagctgtatctcgcgttcatatcacgccacatatgcactgggaccgggagtggtacttcaccaccgaagcgtcacgtattcttctggtcaataatatggaagagatcctcacccgtcttgagcaggacgcagagtataaatactacgttctcgacggccagacggcggtgctggaagattattttgccgtgaaaccggaaaacaggccacgcgtgaaggcgctggtggcggccgggaagctgattatcgggccgtggtatacccagacggacaccacccttgtctccggcgagtcgattgtccgaaatctgatgtacggtattcgcgactgtctggcctttggcgagccgatgaaaattggctatctgccggactccttcggcatgtcttcccagctgccgcacatttacaacggttttggcatcacgcgcaccatgttctggcgcgggtgttccgagcggcacggtaccgataaaaccgaatttctctggcaaagccaggacggcagcgaagtgacggcacaggtgctgccgctgggctacgcgattggtaagtacttaccggaggatgaggccgggctgcgcaaacggctcgacacgtacttcgaggtgctggaaaaagcctccgtgacgaaagaaattttactgcctaacggccatgatcagatgccgctccagcagaacatctttgcggtgatggataagctgcgcgaaatctatccgcagcgtcagtttgtgatgagccgcttcgaggaggtgtttgaacacattgacgcgcaccgcgatgaactggcgacgctgaaaggggagtttattgacggtaaatatatgcgagtgcaccggacgataggctccacgcggatggatatcaaaatcgcccacgcccggatagagaataaaatcgtcaacgtccttgagccgctggccacgcttgcctggacgctgggctttgagtatcaccacggcttgctggaaaaaatgtggaaagagatcctcaagaatcacgcccacgacagtatcggctgctgctgtagtgacaaagtgcatcgtgaggtgatgtcacgcttcgagctggcggaagacatggccgataacctgacatgcttctatatgcgcaagattgtcgacaacatgccgcagagcgaggaagacaaactggtgatgtttaacctcacgccctggccgcgtgaggaagtgattaacaccacgatacgtctgcgcgccagccagttccgcctgctggacgatagggggaatgaaatcccttactgcctgcgcagcgcgcgtgaaatcgaccccggcttgattgaccggcaaattgtgcattacggcaactacgatccctttatggagtttgatatccagctcaatcagatcctgccatcaatgggttaccgcacgttctatatcgagccgcacgtggccggcaagctgctggcggcagaaaaatcgtcggaggcgttgctggaaaatgctttctgggaaataacgttaaacgacgacggcaccctgcgtctgctcgataaagcgtccgggcttatctatgaccgcgcgctggaaatagaagagagctcggatgatggcgatgagtacgactactcgccttcacgggaagagtggagactcacttccgctcagggcgagcatgaggttgaggtgatccacgaggcctggcagagcagggcggtgatccgccatcgcatggcggtgccggcggatctcgccgaacgttctgcgcgtcagcagacgggaacgcttgaggcagaactcacggtcacgctcagccataacagccgacgtatcgacgttgaggcgcgtctcggaaatcacgcggatgaacaccgtgtgcgggtgctgatcccgacgccatttaccacagacacggtgttagccgatacccagttcggttcgctgacgcgtcctgtacaggatgaagcgatggcgaactggcaggaggagggctggaaggaagcgccgctgccggtgtggaatctgcttaactacgctgtgctccaggaacggcgtaacgggatggcgctgtttaccgaagggttgcgcgaatttgaagtgactggcgagcgtcaaaaaacgtttgccctgacgttgcttcgcggcgtgggggtgcttgggaaggaagatttactgctgcgccccggcagaccgtccgggatcaaaatgccggtgcctgattcgcagatgcggggccagttaacctgtcgctttagcctgttcagttttaatggtacgcccgtcagtgctggcgttgcgcagcaggcgaagtcgtggttaacgccagtgcactgctataacaaaatcccgtgggatgcgatgaagcttaaccgcgcctctttcaccaccccttgtagctatagcctgttaacgctggcgcctaacggatgcgtactcagtgcgctgaaaaaagcggaggatcgtgacgagatgattcttcgtctgtacaaccctgcggagacccgctccggtgacgtggctttgtctgtgaaccgtgaggtccaggcctgttgcgaaacggacatgaatgaggtgcgcaaggcgcaaggggaggagggttcagccattacggggtcgttccggccatgccagtcacgcacctttagcataaaaattgaaaggtaa

SEQ ID NO: 115038 - DNA, 1917 bp, Enterobacter cloacae
atgaacctgacgactctgaccgacccccgtgctgtctgcgtgcaggcgcagtttaccagccgtgatgaggcaatccgtcagcttgcgacgcggctggtggcgttgggcaaaatagccaacgccgatacgtttctggcagacgttttccatcgggaatcgcttggcccgacggcgctgggcgaggggctggccgtacctcatggtaaatcagtggcggtaaacgaagcggcttttgccgtggccacactgcgtgagccgctggcctgggaaggtgtggacggaccggaggaggtcgagctgatttttctgctcgccattcctcccgcacaagcgggatcaacgcatattcaggtcctgacggaactgacgtctcgcctggcggatgacgagctcagggcgcgcgtgatgacggcgaccagcgcggaagcggtgcttgcggcgctggaaacagcgcctgacacacaagaaaccgccgttgcggagaatgccccgacgatcgtctgcgttaccgcctgtccggccgggatcgcccatacctacatggcagcggagtatctcgaaaaagcgggacgtaagctcggcgtcaatgtggtggtcgaaaagcagggggcaaatggtattgaggggcgcatcaccgcgcagcagttgcaggaggcaaaagcgtgtatcttcgcggcggaagtggcgatcaaagagcgtgagcgttttcaggggatgcccgccatttccgtgcccgtcgcggaacccttacgccatgcggaagcgctcattgagcgtgcgctggcgctacagcctgtatccgatgcgcgtcctgcgcacgtcgacacggacgcgaaaaagtgcgttaaaaccgaactcaagcaggcgctgctcagcggtatctcctttgcggtaccgctgattgtcgccggcggtacggtgctggcggtgtcggtactgcttgcgcaaatcctgggcttgcagcatctgttcgatcaggaaaactcgtggctgtggatgtaccgcaaactgggcggcgggatgctcggtattctgatggtgcctgttctgacggcctataccgcttactcgctggcggataaacctgcgctaacgccgggctttgcggcgggtcttgccgccaatatgatcggctctggttttctcggggccatcgtcggcgggctgattgcgggctacctgatgcgctgggtgaaaaaccacatccggctgagtagccgctacaacggctttctgaccttttatctctatccggtgattggcgtgctgggcgcaggcagcctgatgctgtttgtgatcggcgaaccggtggcctggatcaataacgccctgaccgcctggcttaacggtctgtccggcgcgaatgcgctgctgctgggggcgatcctgggctttatgtgctcgttcgatctgggcggtccggtcaacaaagcctcttacgcgttctgtctgggagcgatggccaatggcgtatacgggccttatgcgatttttgcctccgtcaaaatggtatcggcctttaccgtgacggcatcaacgatgctggctccgaacctgttcaaacagttcgaaattgaaaccggcaagtccacctggctgctggggctggcgggcatcaccgaaggggcaattccgatggctatcgaggatccgttgcgggtcattggctcatttgttctggggtcaatggtgaccggagcgattgtcggggcgatggggattgggctatccacccccggcgcgggcattttctcgctcttcttactgcatgatgccgggctgggcggcgtgatggccgctgtcggctggtttggcgccgcgctggctggcgccgcaatatctacgctcattttactgctctggcgacgccaggccatgaagagcggcacctacgtgactgaagacataccatcgtaa

SEQ ID NO: 115039 - DNA, 717 bp, Enterobacter cloacae
atgggcaataaaccgatgtaccggcagatcgccgatgcgttccgcgagaaaattaatgccggtgagttaaaacctggcgacgcgctgccgacggaatccagccttcagcaggcgtttagcgtcagccgggtcaccgtgcggcaggctttgaagctgctcgccgacgagcagatcatcgaaagtattcagggcagcggctcgtatgtaaaagaggagcgggtgaattacgatatttatcagctcaccggtttttacgaaaagttagcggatcgcaacgtcgatacgcacagcgacgtcagcgtcttcgaagtggtgaaagccgatgagcggctcgcggcaaaacttgcgctcaatccggatgataaggtctggcacgtcaagcgcgtacgcttcatcagggaaaagccggtgaatctggaagagacatggatgccgctggcgatgttccccgacctcacctgggaagtgatggaacagtcgaaataccattacattgagcagatcaaaaagatggtgatcgatcgcagcgagcaggagctggtgccagtcatgccatcggatgaggcgattgccgccctggcgctcgatccggcaaaaccgattctggaaaaagtctctcgtggctttctgaaagacggccgggtatttgaatacagtcgcaacgtgtttaacaccgacgactataaattcactctggtggctaaacgcaggcaataa

SEQ ID NO: 115040 - DNA, 870 bp, Enterobacter cloacae
atgtccgttttaattaataaagataccaaggttatctgccagggcttcaccggtagccaggggactttccactccgaacaggcgattgcctacggtacgcagatggttggcggcgtaacgccaggtaaaggcggcaccacgcacctgggcctgccggtgttcaacaccgtgcgtgaagcggtagaagcgacgggcgcaaccgcgaccgtgatctacgtaccggcgccgttctgcaaagactctattctggaagcgatcgacgcaggcattaagctgatcatcaccatcaccgaaggcatcccgacgctggatatgctgaccgtgaaggtgaagctggacgaagcaggcgtgcgcatgatcggcccgaactgcccaggcgttatcactccaggcgaatgcaaaatcggtatcatgccgggccacattcatcgcccaggcaaagtgggtatcgtgtcccgttccggtaccctgacctatgaagcggttaagcagaccaccgactacggtttcggccagtccacctgcgtgggcatcggcggtgacccgatcccgggctctaacttcatcgacatcctgaagctgttccaggaagatccacagaccgaagcgatcgtgatgatcggtgagatcggtggtagcgcggaagaagaagcggctgcttacatcaaagatcatgtgaccaagccggtggtgggttacatcgcgggtgtgaccgcgccgaaaggcaaacgtatgggtcacgcgggcgcgattatcgcaggcggtaaaggtacggctgatgagaaattcgcagcactggaagccgcaggcgtgaaaaccgttcgcagcctggcggatatcggtgaagcactgaaatccatcattaagtaa

SEQ ID NO: 115041 - DNA, 1167 bp, Enterobacter cloacae
atgaacttacatgaatatcaggccaaacagctgtttgcccggtatggcttaccggctccggtgggttatgcctgtactaccccgcgtgaagcagaagaagccgcgtctaaaatcggttccggcccgtgggtagttaaatgtcaggttcacgctggtggccgtggtaaagcgggcggtgtgaaggttgttaagagcaaagaagagatccgtgcgtttgctgaacattggctcggcaagcgtctggtaacctaccagacagatgcgaacggccagccggttaaccagatcctggttgaagcggcaaccgacatcgcgaaagaactgtacctcggcgcagtcgtagaccgtagctcccgtcgcgtggtgttcatggcgtctaccgaaggcggcgtggaaatcgaaaaagtggcggaagaaaccccgcacctgatccacaaagtggctatcgatccgctggcgggcccaatgccttaccagggtcgtgagctggcattcaaactgggtctggaaggcaagcttgttcagcagttcaccaagatcttcatgggtctggcgaccattttcctggagcgcgatttggcgctgatcgagatcaacccgctggtgatcaccacccagggcgacctgatctgcctcgacggcaagctgggcgctgacggcaacgcgctgttccgccagtccgatctgcgcgaaatgcgcgaccagtctcaggaagatccgcgtgaagcgcaggctgcacagtgggaactgaactacgtggcgctggatggcaacatcggctgcatggttaacggtgcgggcctggcaatgggcaccatggacatcgttaagctgcacggcggtgagccagcgaacttcctcgacgtgggcggtggcgcaaccaaagagcgcgtaaccgaagcgttcaaaatcattctctctgacagcaacgtgaaagcggttctggtgaacatcttcggcggtatcgtacgttgcgacctgatcgccgacggtatcatcggcgcggtagaagaagtgggcgttaacgttccggttgttgtacgtctggaagggaacaacgctgaactcggcgcgaaaaaactggctgacagcggcctgaatattattgcagcgaaaagtctgacggatgcagctcagcaggttgttgccgcagtggaggggaaataa

SEQ ID NO: 115042 - DNA, 1227 bp, Enterobacter cloacae
atgagtagcgtagatattcttgttcccgacctgcctgagtccgtagcagatgcaaccgtcgccacctggcacaaaaaaccaggcgacgcggtaacccgtgacgaagtgctggtagaaatcgaaactgacaaagtggtactggaagtaccggcttcagcggatggcattctggatgcagtcctggaagatgaaggtacgaccgtcacttctcgccagatcctgggtcgcctgcgtgaaggcaatagcgcgggcaaagagtccagcgccaaatctgaagaaaaagcgtctaccccggcccagcgccagcaggcgtctctgtccgatcagaccaacgacgcgctcagcccggcgatccgtcgcctgctggctgagcacagcctcgatccggcagccatcaaaggcaccggcgtgggtggccgtctgacgcgcgaagacatcgacaagcatctggcaaaagcgccttctgaggcgaaagcggaagcgaaagcccctgcggcagcaccagcggcacagcccgctctgggcgcacgtagcgaaaaacgcgtgccgatgacccgcctgcgtaagcgcgtggccgagcgtctgctggaagcgaaaaactccaccgcgatgctgaccacctttaacgaagtcaacatgaagccaatcatggatctgcgcaagcagtacggtgacgcgtttgaaaaacgtcacggtatccgtctgggcttcatgtccttctacgtgaaagcggtagttgaagcgctgaaacgctacccggaagtgaacgcgtctatcgatggcgatgacgtggtttaccacaactacttcgacgtcagcatggcggtttctaccccgcgcggcctggttaccccggttctgcgtgacgtggataccctgggtatggctgacatcgagaagaaaatcaaagagctggccgtgaaaggccgcgacggcaagctgaccgttgaggacctgactggcggtaacttcaccattaccaacggtggtgtgttcggctcgctgatgtctaccccgatcatcaacccgccgcagagcgcgatcctgggtatgcacgccattaaagatcgtccaatggcggtagacggtaaagttgagatcctgccgatgatgtacctggcgctctcttacgatcaccgcctgatcgacggccgcgagtccgtaggcttcctggttgccattaaagagctgctggaagatccaacgcgtctgctgctggacgtctag

SEQ ID NO: 115043 - DNA, 2808 bp, Enterobacter cloacae
atgcagaacggcgcaatgaaagcctggctggactcttcttacctctctggttcaaaccagagctggatagaacagctctatgaagacttcttaaccgatcctgactcagtggacgcaaactggcgttccatgttccagcagttgcctggtacaggggtcaaaccggatcaattccattcaaaaacacgtgattatttccgtcgtctggcgaaggatgcctcacgttactcttctgcgatttccgaccctgacaccaatgcgaagcaggttaaagtcctgcaacttatcaacgcttatcgcttccgtggtcaccagcatgcgaatctcgatccgctgggactgtggcagcaggaacgtgtggcggatctcgatccggcttatcacgatctgaccgaggccgatttccaggaaagctttaacgtaggttcctttgccatcggcaaagacacgatgaagctgggcgatctgattgacgcgctcaagcaaacctactgcggctccatcggcgcggaatatatgcacattacctccaccgaagagaaacgctggatccagcagcgtatcgaatccgtggcaggccacgcgaatttctcagcagaagagaaaaaacgtttcctcagcgaactgaccgcagcggaaggccttgagcgctatctgggcgcgaaattccctggcgcaaaacgcttctcactggagggcggcgatgcgttagtcccgatgctgaaagagctgattcgtcatgccggtaagagcggcacgcgcgaagtggtgctgggcatggcgcaccgtggtcgcctgaacgtgctggttaacgtgctgggtaaaaagccgcaggatctgttcgacgaatttgcgggtaaacataaagagcacctcggcaccggtgacgtgaagtaccacatgggcttctcgtcagatatcgaaaccgagggcggtcaggttcacctggcgctggcgtttaacccgtcgcacctggaaatcgtcagcccggtggttatcggttccgtgcgtgcgcgtctggatcgtctggacgagccgagcagcaataaagtgctgccaatcaccattcacggtgatgcggcggtcacagggcagggcgtggttcaggaaaccctgaacatgtcgaaagcgcgtggttatgaagtgggcggtaccgttcgcatcgtaatcaacaaccaggtgggcttcaccacctctaacccgctggatgcgcgttccaccccgtactgcaccgacatcggtaaaatggttcaggcacccatcttccacgttaacgcggatgaccctgaagccgttgctttcgttacccgtctggcgctggacttccgtaacaccttcaagcgcgacgtgttcattgacctcttctgctaccgccgtcacggccacaacgaagcggatgagccaagtgcaacccagccgctgatgtaccagaaaatcaaaaaacacccggcgccgcgtaaaatctacgctgacaagctggaaagcgaaaaagtggcgacgctggaagatgcgaccgagatggtcaatctttatcgcgacgcgctggatgcgggtgaatgcgtagtgaaagagctgcgcccaatgaacatgcactcctttacctggtcgccgtatctcaaccacgagtgggacgagagctacccgaacaaggttgagatgaagcgtttgcaggaactggctaaacgcatcagcaccgtgccggaagcgatcgagatgcagtcccgcgtggccaagatctatggcgatcgccaggcaatggcggcgggtgagaagctgttcgactggggcggcgcggaaacgctggcctatgcgacgctggttgacgaaggtattccggttcgtctgtccggtgaagatgcgggtcgtggcaccttcttccaccgtcatgcggttgtacacaaccagtctaacggttcaacgtacactccgcttcagcacgtgcataacggtcagggccagttcaaggtctgggactccgtgctgtcagaagaagcggttctggccttcgaatacggctacgccaccgcagaaccccgcaccctgaccatctgggaagcgcagttcggtgacttcgccaacggtgcgcaggtcgtcatcgaccagttcatctcctccggtgagcagaagtggggccgtatgtgcggtctggtgatgctgctgccgcacggctatgaaggacaaggtccggagcactcctccgcgcgtctggagcgttatctgcaactctgcgccgagcagaatatgcaggtttgcgtgccgtccactccggctcaggtttaccacatgctgcgtcgtcaggcgctgcgcggtatgcgccgtccgctggtggtcatgtcgccaaaatccctgctgcgccatccactggcggtctccagcctggaagagctggcaaacggcaccttcctgccggccatcggtgaaattgacgagctggatccgcaggccgttaagcgtgtcgtaatgtgttctggtaaggtttattacgacctgctggaacagcgccgtaagaacgatcagaaagatgtcgccatcgtgcgtatcgaacagctttatccgttcccgcatcaggcgatgcaggaagtgctgaaacagtacgctcacgttcatgattttgtctggtgccaggaagagccgctcaaccagggcgcatggtattgcagccagcatcatttccgtgaagtgattccatttgggtctgccctgcgttatgcaggtcgcccggcctccgcctctccggcggtagggtatatgtccgttcaccagaagcagcaacaagatctggtcaatgacgcgctgaacgtcgattaa

SEQ ID NO: 115044 - DNA, 717 bp, Enterobacter cloacae
atgaaactcgaattctcagtttatcgttataacccggatgtagacgatgctccgcgtatgcaggattacaccctcgaagcggaagaaggtcgtgacatgatgctgctggatgccttaatccagctgaaagagaaagatcctacgctgtcgttccgccgctcctgccgtgaaggggtgtgtggctctgacggtgtaaacatgaacggcaaaaacggtctggcctgtattacgccaatttcagcgctacagcgttctggccagaaaattgtgatccgtcctttgcctggcctgccggtcgtgcgtgatttggtggtggacatggggcaattctatgcacaatatgagaagattaagccttacttattgaataatgggcaaaatccacccgctcgcgagcacttacagtctcctgagcagcgtgaaaaactcgatgggttgtacgagtgtattctctgtgcatgctgttcaacgtcatgcccgtctttctggtggaacccggagaaatttatcggccctgcgggtctgctggctgcctatcgcttcctgatcgacagccgcgataccgaaaccgagaatcgtctggaagggctaagtgacgctttcagcgtattccgctgccatagcatcatgaactgcgtcagtgtgtgtcctaaggggctgaacccgacgcgcgccatcggccatattaagtcgatgttgttgcagcgcagtgcgtaa

SEQ ID NO: 115045 - DNA, 1767 bp, Enterobacter cloacae
atgaaactgccagtcagagaatttgatgctgttgtgattggtgcgggtggcgcaggtatgcgcgccgcactacaaatttcccagagcggccagacctgtgcgctgctctctaaagtattcccgacccgttcccacactgtgtctgcgcagggcggtatcaccgttgcgctgggtaattcccatgaagataactgggaatggcatatgtacgatacggtaaaaggttccgattacatcggtgaccaggatgccatcgaatatatgtgtaaaaccggcccggaagcgattctggagctggaccacatgggtctgccgttctctcgtctggaaaatggcaccatctatcagcgtccgtttggcggccagtcgaaaaacttcggcggcgagcaggcggcacgtaccgcagcggcggctgaccgtaccggccacgcgctgctgcacacgctgtatcagcagaacctgaaaaaccacaccacaattttctccgagtggtatgcgctggatctggtgaaaaacgccgatggcgccgtggtgggatgtaccgccctgtgcatcgaaaccggtgaagtggtctacttcaaagcccgcgcaaccgtgctggcgaccggcggcgcaggccgtatctatcagtccactaccaacgcccatatcaacaccggtgacggcgttgggatggcgatccgcgctggcgtgccggtgcaggacatggagatgtggcagttccacccaaccggtatcgccggtgcaggcgtactggtgacagaaggctgccgtggtgaaggtggttacctgctgaacaaacatggcgagcgcttcatggagcgttatgcgccaaacgcaaaagaccttgcgggccgtgacgtggtggcgcgttccatcatgatcgaaatccgtgaaggccgcggctgtgacggcccttggggtccacacgcgaagctgaaactcgaccatctgggtaaagaagtgctggaatcccgtctgccgggcattctggagctgtcccgcaccttcgcgcacgtcgacccggtgaaagagccaattccggttatcccaacctgtcactacatgatgggcggtattccgaccaaagtgaccggtcaggcgctgaccgtgaacgagcagggcgaagacgtggtcatccctggcctgttcgcggtaggcgaaattgcctgcgtatccgtgcacggcgcaaaccgtctgggcggcaactccctgctggacctggtggtatttggtcgtgcggtggggctgcatctccaggaatctattgccgagcagggcgcgctgcgtgatgcgaccgatgacgaaatagatgcctctcttgagcgcctcaatcgctggaacggtaatcgtaacggcgaagatccggtggagatccgtaaggcgttgcaggagtgtatgcagcacaacttctcggtattccgtgaaggtgacgcgatggccaaagggcttgagcagctgaaagcgatccgtgagcgtctgaagaatgcccgtctggacgatacctcaagcgagttcaacacccagcgcgttgagtgcctggagctggataacctgatggaaaccgcgttcgccactgcgatgtcggcaaacttccgtaccgaaagccgtggcgcccatagccgcttcgacttcccggatcgtgatgacgaaaactggctgtgccattccctgtatctgccagagtcggaaaccatgacgcgtcgtagcgttaacatggaaccgaaactgcgtccggcgttcccgccgaagattcgtacctactaa

SEQ ID NO: 115046 - DNA, 348 bp, Enterobacter cloacae
atggtaagcaacgcctccgcattaggacgcaacggcgtacatgacttcatcctggtccgtgctaccgccatcgttctcaccctttacatcatctatatgatcggtttcttcgcgaccagcggcacgctgacgtgggaaatctggagtggtttcttcggatcggccttcaccaaagtgttcaccctgctggccctgttctccatccttattcatgcctggattggcatgtggcaggtgttgaccgattacgttaaaccgctggcgattcgccttccgctgcaactgattattgttgttgctctgctggtttacgtcatttatggatttgttgtggtgtggggtgtgtaa

SEQ ID NO: 115047 - DNA, 480 bp, Enterobacter cloacae
atgacgcgcagttatagaaaaggaacgctgtctgacccgcatcgcagtccggaggaaggaaacaataagaacagcatgtgggcgttattcatgataagaaatgtgaaaaaacaaagacctgtcaatctggatctgaaaacgatccgattccctgtaacagcaatagcgtccattctgcaccgtgtttctggtgtgattacgtttgtggcggtcggtatcttgctgtggttactgggaaccagcctctcatcccctgaaggattcctccaggcctcagccattatgaacagcttcttcgtgaaatttatcatgtggggcattctgaccgcgctggcctatcacgtggttggcggcgttcgccatatgctgatggactttggctacctggaagagacgttcgaggccggtaaacgtaccgctaacatttcatttgtgatcactgtcgtgctttcacttctcgcaggagttctcgtatggtaa

SEQ ID NO: 115048 - DNA, 1284 bp, Enterobacter cloacae
atggctgatacaaaggcaaaactcaccctaaatggtgatgatgctattgaactggatgtgctaaaaggcacgctcggtcaggatgttattgatatccgtacgctgggttccaaaggggtattcacctttgaccctggattcacctccaccgcatcttgcgaatccaaaatcacctacattgacggtgacgaaggtatcctgctccatcgcggcttccccatcgatcagttagccaccgaatccaactatctggaagtgtgctacatcctgctgaacggcgaaaaaccgacgcaggcccagtacgatgaatttaaaaccaccgtgacccgtcacaccatgatccatgagcagattacccgtctgttccatgcgttccgtcgtgactctcatccgatggcggtcatgtgcggtattaccggtgcgctggcggcgttctaccacgattctctggacgtgaataacccacgtcaccgtgatatcgcggcgttccgtctgctgtctaaaatgcctaccatggcggcgatgtgttacaaatactctatcggtcagccgtttgtgtacccacgcaacgacctctcctacgcgggtaacttcctgcgtatgatgttctccacgccgtgcgaagagtacgaagtgaacccggtgctggaacgcgcgatggaccgtattctgatcctgcacgctgaccacgaacaaaacgcctcgacctctaccgtccgtaccgcgggctcttccggcgcgaacccgttcgcctgtatcgctgcgggcatcgcctccctgtggggaccggcgcacggcggcgcgaacgaagcggcactgaagatgctggaagagatcagctccgttgagcacattcctgagttcgtgcgtcgcgcgaaagacaagaatgattctttccgcctgatgggcttcggtcaccgcgtttacaaaaactacgacccgcgcgcgaccgtcatgcgtgaaacctgccacgaagtgctgaaagagctgggaacgaaagatgatctgctggaagtggcgatggagctggaacacatcgcgctgaacgacccgtacttcatcgagaagaaactctacccgaacgtcgatttctactctggcattattctgaaagcgatgggtattccgtcttccatgttcaccgtaatcttcgccatggcccgtaccgtgggctggattgcgcactggaacgaaatgcacagcgaaggcatgaagatcgcccgtcctcgtcagctgtataccggctacgagcagcgtgattttaagtctgacattaagcgctaa

SEQ ID NO: 115049 - DNA, 792 bp, Enterobacter cloacae
atgccagaaggtccggagatccgccgcgcggcggatagcctggaggcggcgataaagggcaaacctctgacacacgtctggtttgcctttcctcaactcaagccgtttgaatcgcagctggtggggcagacggtgacccacattgaaacgcgcggcaaggcgttactcacccacttttcccataacctgacgttatacagccataatcagctttacggtgtctggcgggtggtggaggcggacgagcagccgcaaacgacccgcgtgctgcgcgtgcggctacaaacggcggataaggcgatcctgctttacagcgcctctgatatcgaaatgttaacgccggagcagctgctgacgcatccgttcttacagcgggtcgggccggacgtgctcgacatgcgtctgacggcaagcgatgtgaaagcccggttgttatccgccacattccgcaaccggcagttttccgggctgttgctcgatcaggcatttctggcggggctgggaaactacctgcgggtggagatcctctgggaagtggggctggcgccgcagcgcaaagcgtcgcagctgagcgatgaacagctggaggcgctgtcgcacgcgttactggatcttccacggctgtcgtacaacacgcgcggcgtggtggatgagaacaagcatcacggggcgctgttccgcttcagggtgtttcatcgggcaggtaaaaagtgtgagcggtgcggcggggtgattgagaaggcgacgatctcttccaggccgttttactggtgtcctgggtgccagatgtaa

SEQ ID NO: 115050 - DNA, 741 bp, Enterobacter cloacae
atggtaaagattgatttaaacgccgatctgggggagggcagcagcgccgatgcggcgctgatgacgctggtctcctcggtgaacatcgcctgcgggtttcatgccggcgatgcgcagaccatgctggcgagcgtgcgcaatgccatgaaaaaccgcgtggcgattggcgctcaccccagctttcccgaccgggaaaactttggtcgcacggtgatggttctgccgcctgagacggtttacgcgcaaatgctctaccagatcggcgccctggaggcgatagtgcgcgctgagaatggcgtgttgcgccacgtcaagccgcacggcatgctctataaccaggcggcgaaagatccggtgctggcagacgccattgcccgcgcggtgcgggactgtaatccgcaactgattctggtaggcctggcgggcagcgagcttattcgtgccggagaacggctggggctgactacgcggcaggaagtgtttgccgatcggggatacctgccggacggtagtctggttccgcgtacgcaggccggtgcgctgatcaccgacgaaggtaaagcactggcgcagacgctggagatggtgcgcttcgggcgagtaacctcaacggaggggacaacggcaaacgttcaggctgatacggtgtgcttacacggtgacggcgagcatgcgctccagtttgcgcgacgcctgcgggcggcgttctcggaagagggcattgttgtcagcgcagaataa

SEQ ID NO: 115051 - DNA, 933 bp, Enterobacter cloacae
atgttaacgcttattcgcgcagggctttacacctcggtacaggatgccgggcgttttgggttgcgtcagtcgggcgtaagctactgcggtgcgctcgatcgcccttcgctggagattgccaacctgctggtaggtaacgcaggcagcacggcggcgttagaaattacgctgggtcagtgcgtgattgagtttggtcaggaaacctggtttgccttaaccggcgcgggctgtgacgcgatgctggacggcaaagcggtgtggaccggctggcgcctgcgggcgaaggccgggcagcgtctgacgctcaagcgtcctctgcacggcgtgcgcagctatcttgcggtggcgggggggatcgacgtgccggaggtgttgggctcatccagcaccgaccagaaagcgggaatgggcggccatgaaggacggctgctgcgtgacggcgatcgtctgcggataaagacctcaacgcgccatttcaccaccacgcagggcgtgaaacagctgctgtgggggaacgtgatccgcgccttaccaggaccggaataccatgagtttgatgaagccgcgaaagagtctttctggcgctcgccgtggaagatcagcccgcagagtaaccgcatgggttaccggcttcaggggcagccgctgacccgcacgactgaccgggaactgctttcccatggtctgttgcccggggtgattcaggtgccgggcaacgggcagcccatcgtactgatgaacgatgcgcaaaccacggggggatatccgcgtattgcctgcattatcgaagcggatcgctaccatctggcgcaaattcctctaggtcagcccattcattttgtgcagtgttcgctggaggaggcgctgaaagcccggcaggatcagcagcgttatctcgatcagctggcgtggaggctcgatggtaaagattga

SEQ ID NO: 115052 - DNA, 657 bp, Enterobacter cloacae
gtgcagcgagcgcgttgttatcttctgggtgaaaccgcggtagttctggagcttgagcctccggtgacgcttgccacgcaaaagcgtatctggcgtctggctcagcgactgcccgagctacccggcgtggttgaagctattccgggtatgaataatatcaccgtggtgctgcgtgatccgcacacgggggcgctggatgccattgagcgtctgcaacgctggtgggaggagagcgaggcgctggagccggaatcgcggacgattgagatcccggttgtctatggcggcaagggaggtcccgaccttggcgtggtggccgaacactgtggattaacggagaagcaggttgtggagctgcatagctcagtcgactatgttgtctggtttttgggatttcagccgggtttcccctatctgggcgggttatcgccccagctgcatacgccgcgccgggctgagccgcgcctgagcgtaccggcgggcagcgtggcgattggtggcgagcaaacgggaatttatccgctcgcctcaccgggaggctggcagctgattgggcacacgtccacgccgttatttgaaccaggccaggacgcgcccatactcctgcgtccgggggataccctgcgctttatcccgcagaaggagggggtatgttaa

SEQ ID NO: 115053 - DNA, 747 bp, Enterobacter cloacae
atgatgaaaaacagtgaactggaacgcctgattaacgaaaaactcaacacggcttcgtttagcgactacggcccgaatggcttgcaggtggaggggcgcgaggcggtgcaaaaaatcatcaccggcgtgacggcaagccaggcgctgctggatgaggcggtgcgtcaggaagccgatgcggtgattgtccaccacggttatttctggaaaaacgaatcaccgattattcgcggcatgaagcgcaaccgactcaaaacgctgctggcgaatgacatcaatctgtacggctatcacctgccgctcgatgcgcatcctgaactgggaaataacgttcagcttgcgcagctgctggggattaccgtgatgggcgaaattgaacctctggtgccgtggggcgaactgtcgatgccggttccgggtctggagctggcttcgtggatcgaagcgcgcctggggcgtcgtccgctgtggtgcggcgacaccgggccggataccgtgaagcgcgtggcatggtgcaccggcggcggccagggctttattgacagcgcggcgcgttttggtgtcgacgccttcattaccggcgaagtctccgagcagaccattcactcagcccgtgaacaaggcctgcatttttacgcggcgggccatcacgccaccgagcgtggcggcatccgcgccctcagcgagtggctgacggaaaataccgatctggatgtgacgtttattgatatccctaatccggcctga

SEQ ID NO: 115054 - DNA, 1413 bp, Enterobacter cloacae
atgcccacccatctggtttggtttcgcgcggatttacgcattcacgacaacttcgctctcgcggcggcctgccgcgctaaagacgcgaatgtgctggccctgtttatcgccacgcctgaacagtggcggcagcacgacatggcgccccggcaagcggcactactcagcgcgtatctgaatgacctgcaacattcactggctgaaaaaggcattccgctgatctataaagaggcccatgattttgccgcgcagcgccagacggtgcaggcaatctgccagcagcacgcagtaacgcatctttattacaactatcagtatgaattcaacgagcaacagcgggatcgtcagctggagaaaacccttgcgggcgtggtctgtgaaggctttgatgacagcgtgatgctcgcgccgggcagcgtaatgaccggtagccacgaaatgtataaagttttcacgccgtttaaaaatgcctttatcaaacgcctgaaagagggactacctgagtgcgttaccgccccgaccgtgagaggggaaacgataacggatctgccggcgatcaggctgaattatccccagcagtcgttcgatgaaacagtattccccgccagtgagaaagcagctattgaccggttgcgtcagttctgcacgcagggggcggcagagtacgaggcgcgtcgggattttccagcgactgaaggcaccagccgcttgtcggcctgtttagcgctgggcgcgctctctccgcgccagtgtttacatcgcctgctggcggaacagcctcaggccttagacgggggggcgggcgcagtgtggctgaacgaactgatctggcgtgagttttatcgccatctgatgacgtatcatcctgatttgtgtaaacatcggccctttattcgttggaccgaacaggtacagtggcagtcgaatgagaagctgcttaaagcatggcagcgtgggctcaccggcttcccgattgttgatgcggctatgcggcagctcaatgaaaccgggtggatgcataaccgcctgcgtatgattaccgccagcttcctggtgaaggatctgcttatcgactggcgaaccggagagcgttattttatctctcagctgatcgatggcgatctggcggcgaataacggcggctggcagtgggcggcctccaccggaacggatgcggctccctattttcggatcttcaatccgaccacgcagggacaacgatttgacgccgacggcgagtttatccgtcgctggctgcctgagctaaaggatgtcccggccaaagccattcatgagccctgggtatgggcggataaacagcgtgttaccctgaactatccccgtcccattgtcgaccataaacaggcgcgcgtcgccacgctggcggcgtacgaagccgcccgaaaagtttga

SEQ ID NO: 115055 - DNA, 207 bp, Enterobacter cloacae
atggatctttataaagagtttccggctcatatcattttcatgcgtcgcactttcgccgtagtggctggcgtgctggccctgccggtgatgctgttctggaaagatcgcgcacgtttctacagttacctgcaccgcgtctgggcgaaaaccagcgagaagccggtgtggatggatcaggccgagaaagcgacctgcgatttctactga

SEQ ID NO: 115056 - DNA, 1680 bp, Enterobacter cloacae
atggctgctcaggcgtttttgcttattgccagctttttactggtgctgtttgtgctcgccaggccgctgggaacagcgctggcgcgtctgataaacaacgtgccattgccgggcacgcgaaatattgaaaacgtgctctggcgcatttcaggtatcagcgatcgggaaatgaactggcgccagtacctaatggcgatactgcttctgaatatcctggggcttattgccctctttacgctgctgatgctccagggcagtctgccgttgaacccgcagcagttaccgggtttatcctggcatctggcgctgaacacggcggtcagctttgtcaccaacaccaactggcagtcttacgctggtgaaaccacgctcagctacttcagccagatggccgggttaaccgtgcaaaactttctttctgcggccagcggtatcgcggtgatcttcgccctgacgcgcgcgtttgcccgtcagaatgtcagcaccctcggcaacgcctgggttgatgtcacgcgcatcaccctttggatcctggtgcctgttgcgctgattattgccctgttctttattcagcaaggcactctgcaaaacctgctgccttataccccttacacctcgcttgaaggggccagggaactccttcctatggggccggtggcgtcgcaggaagcgatcaagatgctgggcaccaacggcggcggcttcttcaacgccaactcatcgcatccgtttgaaaacccaacggcattaaccaattttgtacagatgctggcgatcttcctgatccccgccgcgctctgcttcgcctttggcgatgtggttaacgatcgccgccagggacgtacgctgctgtgggcgatgtcgttgatcttcgtggtctgcgtagcactggtgatgtgggccgaatggaacggcaacagccacttcatgcagctgggggctaacagcaatatcaacctggaaggcaaagagagccgcttcggcattcttgccagcagcctctatgcggtggtcaccacggcggcctcctgcggggcagtgaacgccatgcacgactcttttaccgcgctcggcggcatgatcccgatgtggctgatgcagattggcgaggtagttttcggtggggtcggttcggggctgtacggcatgctgttgttcgttctgctcgccgtgtttatcgccgggctaatgatcggtcgcacgccggagtatctcggcaaaaaaatcgacgtccgcgaaatgaaattaaccgcgctggcaattctggtcacccccacccttgtgctgctcggtaccgcgctggcgctgatgaccgacgccgggcgcaacggcatctttaacacgggcattcacggctttagcgaagtgctttacgccgtttcgtctgccgccaacaacaacggcagcgcctttgcaggattaagcgccaactcgccgttctggaactgtttgctggcgttctgcatgttcatcggacgtttcggcgtgattattcccgtcatggcgatcgctggaacactggtgaataagaagatccagccgaccaccaccggtacgttaccgactcacggcgcgctgttcgtcggcctgctgattggcaccgttttgctggtgggtgccctgacctttatccccgccctcgcgttaggcccggttgcggaatatctctctttacgctga

SEQ ID NO: 115057 - DNA, 2049 bp, Enterobacter cloacae
atgagtcgtaaacaactggccctgctcgaaccgacgttagttcgtcaggccctcatggatgcggtaaaaaaactgagcccgcgcgtgcagtggcacaacccggtgatgtttattgtctggactggaagtttactcaccaccgcactggcgattgccatgggaacgggacagctttcagggaatgcaacctttaccggcgccatcagcctgtggctgtggtttaccgtgctgttcgccaactttgccgaagcgctggcggaaggccgcagtaaggcgcaggccaacagcctgaaaggggtaaaaaaaaccgcctttgcgcgcaaattacgcgaacctaaatacggcgcgcagatggaccacgttccggcggatgaactgcgcaaaggtgacgtggtgctggtggaagctggcgacatcatcccctgcgacggtgaggtgatcgagggcggcgcgtcggtagacgaaagcgccattaccggggaatccgcaccggtgatccgtgagtcgggcggagatttcgcctcagttaccggcggaacgcgcattctttccgactggctggtgatccagtgcagcgttaacccgggcgaaacctttctcgaccggatgatcgccatggtggaaggcgcacagcgtcgtaaaacgccgaacgagatcgccctgaccattctgctggtggcgctcaccattgtcttcctgctggcaacggcgaccctgtggcccttctccgcctacggcggtacagcggttagcatcaccgtactgatcgccctgctcgtctgtctgatccccaccactatcggcggcctgctttccgcgattggcgtggcggggatgagccggatgctgggcgcgaacgtcatcgccaccagcggacgcgccgttgaagcggcgggtgacgtagacgtgctgctgctggataaaaccgggaccatcaccctgggcaatcgtcaggcctctgactttctacctgctcccggcgtggatgaaaaaacgctggctgacgcggcgcagctttcctcgctggccgatgaaacgccggaaggccgcagtatcgtgatcctcgccaagcagcgctttaacctgcgccagcgcgacgttcagagcctgcacgccacgttcgtgcccttcacagcgcaaacccgaatgagcggaattaacattcaggaccggatgatccgtaaagggtccgttgatgccattcgccgtcatattgaagccaataatggacacttcctcccggaagtcgaccacctggtggaaagcgtggcgcgtcagggagcaaccccgctggtggtggcggaaggtgcaagcgttctgggggttatcgccctgaaggatatcgttaaaggcggtattaaagagcgtttcgcccagatgcgtaagatgggcattaaaacagtgatgatcaccggggataaccgtctgactgcggcggccattgccgccgaagcgggcgtggatgatttcctttccgaagcgacgccggaagcgaagctggcactcattcgccagtatcaggcggaaggccgtctggtggcgatgaccggcgacggcaccaacgacgccccggcgctggcgcaggccgacgtggcggtggcgatgaactccggtacccaggcggcaaaagaggcgggcaacatggtggatctcgactcgaacccgaccaagctgatcgaagtggtacatatcgggaagcagatgctgatgacgcgcggctcgctgaccacgttcagtatcgccaacgacgtggcgaagtatttcgccatcattccggcggcttttgcggcaacctacccgcagttgaatgccctgaacgtgatgcacctgcactctccggcctcggccattttgagcgcggtgatcttcaacgcgctgattattgtctttcttattccgctggcgctgaaaggggtgagctataagccgctgacggccgccgccatgctgcgccgtaacctgtggatttacggtctgggtgggctggtggtgccctttattgggatcaaggttatcgacatgctgttaacgctgttcgggctggtttaa

SEQ ID NO: 115058 - DNA, 576 bp, Enterobacter cloacae
atgacgatgttacgtcccgctatactgttgtttattctgctgtctctgattaccggcgggctttacccgctgatgactaccgcgctgggccagtggtggtttaaagatcaggccaacggctcgctgattatccagaacggtgaaaaccgcggctcgcgtctgattgggcagaactttacggacccgcgctacttccagggacgcccttccgccactgcggaaagcccgtataatccaatggcctccggcggcagcaatctggctggcagtaatcctgacctggacaaagccgttgctgaacgcgttgccgccctgcgcgccgcgaatccgcaggccagccgtgaggtgccggttgagctgatcaccgcttccgcgagcgggctggattacagcctgacgccggatgcggtggtgtggcagatcccacgcgtggcagccgcccgtcagctgaccgtcgagcaggtgagccagctggtcgcagaacatacgcaaaagccgctggtcagcttcatcggcatgccggtagtgaacattgttgagctgaatctggcgctggacgcgctaaggaagaactaa

SEQ ID NO: 115059 - DNA, 2688 bp, Enterobacter cloacae
atgaccgacgagcccatgcgcccggatccggacaggctgcttgaacagacggctgaagcccaccgcggcaagctgaaaattttcttcggcgcctgcgcgggcgtcgggaaaaccttcgacatgctgacggaagcccagcggcttcgggcgcaggggcttgatattctcatcggcgtggtggaaacccacggtcgcaaagagacggctgcgctgctgaaggggctggcgacgcagccgccccagcgtatcagccaacgcgggcggctggtcacggagtttgatcttgatgccgccctcgcccgccgccctgccctgatcctgatggacgaactggcgcacagcaatgcgccaggctcccgccatccgaagcgctggcaggatgttgaggagctgcttgaggcaggcattaacgtcttcaccacggtgaatgttcagcatctggaaagcctgaacgacgtagtgagcggcgtaaccggtatccaggtgcgggaaaccgtccccgatccgttttttgattctgccgatgaagtcgtactggttgacctgccgccggacgatctacgccagcgcctgcacgaaggcaaagtgtatattgccggccaggccgaacgcgccatcgaacattttttccgcaaaggaaacctgattgccctgcgcgagctggccctgcgccgcaccgccgatcgcgttgatgaccagatgcgcgcctggcgagacctacagggacaagagcgcgtctggcacacgcgggacgccattctgttatgcattggtcacggcagcggcaacgaaaaactggttcgcaccgccgcccggctggcagcgaaatttggcagcgtctggcacgcggtctacgtcgaaacgccgcagctgcatggcctgccagaaaatcagcgtcgcgccattttgagcgcgctgcggctggcgcaggagctgggtgccgaaaccgccaccctttccgaaccgcaggaagataaagccattctgcgctacgcgcgcgagcacaacctgggcaagattgtcattggacgtcgacagcatcgccgctggtttagccgcgaatcttttgccgacaggctggcccgccgcgcgccggatcttgatttagtcatcgtcgcgctggatgacaagcccgcccctctgcccaaccgtacgccggatgctcgcacctttggcgataaatggcgcattcagatccggggttgcctggtggccgtggtcctttgcgccctgattacggtgattgccagccagtggctcatcgccttcgacgccgccaatctggtcatgatttatctgctcggcgtcgttgtggtcgcgctcttttatggccgctggccgtcggtgctggcaacggtgatcaacgtcatcagcttcgaccttttttttatcgctccgcgcgggacgcttgctgtctcggacgtgcagtacattctgacctttgccgtgatgcttaccgtcgggctggtgatcgggaatctgacggcaggcgtacgctaccaggcacgcattgcccgctatcgcgagcagcgcacgcgccatctgtatgaaatgtcaaaatcgctggcggttggccgcacgcagcgggatatcgtgcagaccagcgagcagtttatccgttcgacctttcatgccagtaacctgattttgctccccgacgaacaggggcgccttcgcccgctgacctccccttcggggatgacgccctgggatgaagcgattgcccgctggagtttcgataaggggttacctgccggcgccggcaccgacacgctgcccggcgtgccttaccagatcctgccgctgcgcagcgcggataagaatcacgggctggtcatcgtcgagccgtctaacctgcgtcagctgatgatcccagagcagcagcgcctgctggaaaccttcaccctgctggtcgccagcgcccttgaacggctggcgctcaccgccagcgaagagcaggcgcggctggcaagcgagcgcgaaagtattcgcaattcgctgctggcagcgctgtctcacgatttgcgcaccccgcttaccgtgctgtttggccagtccgaaattctgacgctggatctggcagcggaaggatcaaagcacgcgatgcaggccagcgaaattcgccagcacgtgctgaataccacgcgcctggtgaacaacctgctggacatggcgcgcattcagtccggcgggtttaacctcaaaaaagagtggctcacccttgaggaggttgtcggcagtgcgctgaagatgctggagccgggtctcggcgggcgacatattgagctggacatgccggaacccctgacgttaatccatgtggatggcccgctgtttgagcgcgtgctgattaatctgctggaaaacgcggctaaatacgccgggacaaaggcccggctggggattgctgccagggtggataaacgtgtgctgcggctcgacgtctgggataacgggccgggtattccggccggtcaggagcgcgccatattcgaaaaatttgcgcgcggtaataaggaatccgccattccgggcgttgggctgggtctggcgatctgccaggcgattgtcgacgtgcatggtggcaccatttccgcagagaaccgcccggaaggtggggcacgcttttgtgttacacttcctcttgaaaccccaccagaacttgatgaattaccagaggatttgtga

SEQ ID NO: 115060 - DNA, 678 bp, Enterobacter cloacae
gtgattaaggttctgattgttgaagatgagctcgctatcagccgatttctgcgtaccgcgctggaaggcgacggcttgcgcgtgcatgaagccggtacgcttcaacgggggttaattgaagccgccacccgcaagccagatctggtgatcctggatctgggacttccggatggcgacggcatcgattttattcgtgaggtgcgtcagtggagccagatgcccattctggtgctctctgcccgcaccgaagagacggataaaatcgccgcgctggatgccggagcggatgattatctgatcaaaccgtttggcattggcgagttacaggcccggcttcgtgtggcgctgcgtcgacacagtgccacgtccccttccgatccggtgtacgcctttggcgatatccgcgtcgatcttgccgcccgccgcatcgtgcgtggggaagaagagatccaccttacgcctatcgaatttcgtctgctggccgtgctgctcaataaccacggaaaagtgttaacgcagcgacagctgttaagccaggtctggggaccgaatgctgtcgagcatagtcactatttacgcatttatatgggacaccttcgccagaaacttgaagccgatcccgcgcgtcctcgtcatttattaacagaaaccggtatcggatatcggtttatgttctga

SEQ ID NO: 115061 - DNA, 2199 bp, Enterobacter cloacae
atgaaaacgttaaaaattgccgtcagccgtgcctgccctgaatgctttaccacttcgcgcgacatcgtggatatcaccgcatcagattatattgatgtggcagccgtggttctggccgtcagcgatattttcaatggcgccatagaagaaatagaagccacgggattcggcatcccggtgtttattgccacgcataaagaagaaagggttccggctgaatttctgtcgcgtattcacggcgtttttgagtactccgacaccagcaatgcgtactacggacgccagcttgaagcggctgcgcagaagtacgaaacccagctccgcccgccgttcttccgcgcgctggtcgattacgtccagcaggggaacagcgcgtttgactgccccggacatcagggaggccagttcttccgccgccatccggccggaaaccagtttgtcgatttctttggcgaaacgcttttccgcgccgatctgtgcaatgccgacgtggcaatgggcgatctgctgatccacgaaggcgcgccatgcatcgcccagcagcatgcggcaaaagtctttaatgcggataaaacctacttcgtgctgaacggcacctcctcttccaacaaggtggtgctcaatgccctgctcacgccaggcgatctggtgctgttcgatcgcaataaccataaatctaatcaccacggggcgctgttacaggcgggcgcgacgccggtgtatctggaaacggcgcgcaacccgtacggatttatcggcggtatcgacgcacactgtttcgacgagagctacctgcgggagctggtgtcagaggtcgcgcctggccgtgcgcgggatgaacgtccgttccgtctggcggtgatccagctgggcacctacgacggtaccatttataacgcccgtcaggtggtggataagattggtcacctgtgcgattacattctgtttgactccgcctgggtgggttacgagcagtttatcccgatgatggccgactgctcgccgctgctgctggagctgaacgaaaacgatccgggcattctggtgacccagtcggtgcataagcagcaggcgggcttctcgcaaacctcgcaaatccataagaaggacagccacataaaaggccagccgcgctatgtcccgcataaacgcctcaacaacgcctttatgatgcacgcctccaccagcccgttttatccgctgtttgccgccctggatatcaacgcccgcatgcacgaggggcaaagtgggcgcaacatgtggatggactgcgtggtgacgggtattgaagcgcggaaactgatccttcagaactgtcagtttattcgtccgttcgtgccggagacggtggatggccgtccatgggaaagctgggatacggcagagattgctaccgatctgcgcttcttccatttcgttccgggcgaacgctggcacgcctttgagggatatgccgagcatcagtattttatcgatccctgcaaactgctgctgactacgccgggcatcaacgcccgcaccggtgagtacgatgatttcggcgtgcccgccaccatcctcgccaacttcctgcgtgaaaacggtatcgtgccggaaaaatgcgacctcaattccattctgttcctgctcaccccggcggaggacatgggcaaattgcagcagctcgtcgcccagctggtgcgcttcgaaaaactgctccagagcgatgtgccgctgaaagaggttctgccctctctttataagcaacatccggaacgttatgcggattataccctgcgtcagatttgtcaggagatgcatgacctctacgcccgccataacgtgaagcaactgcaaaaagagatgttccgcaagtctcacttcccacgcgtcatgatgaacccgcaggaggcgaactatgcctatctgcgcggtgaggtcgagctggtgtccctgcgcgacgcggaaggccgtatcgccgcggaaggcgcgctgccttacccaccgggggtgttgtgcgtggtgccgggagaagtctggggcggttccgtgctgcgctatttcgccgcgctggaagacgggatcaatctgctgccgggttttgcgccggagttacagggggtttacgtcgaggagtgtgacggtcgcaaacaggtgcgctgctacgtcatcaaacaacctgccgctcagccatcgctgctgaaaggagaaaaattatga

SEQ ID NO: 115062 - DNA, 1314 bp, Enterobacter cloacae
atgagtaaggccaacaagatgggcgtggtgcaactcactattctcaccatggtgaatatgatgggttcggggatcatcatgctccccaccaagctcgctgaagtggggacgatttcgattatctcctggcttgttaccgccgtgggttcgatggcgctggcgtgggcgtttgccaagtgcggtatgttcagccgcaagtccggcggcatgggcggctatgccgaatatgcgtttggtaagtccggtaactttatggcgaactatacctatggcgtgtcgctgctgatcgccaatgtggcgattgccatttccgctgtcggttacggcacagagctgtttggcgcgacgctgaccccggtgcaaattgggctggcgaccatcggcgtgctctggatctgcaccgtcgctaactttggcggcgcgcgcatcaccggacagctcagcagcatcaccgtctggggcgtcatcatcccggttgtcggcctgtgcatcatcggctggttctggttcagcccgacgctgtacgccaattcctggaatccgcatcacgtaccgttcttcaccgccgtgggatcgtccatcgccatgacgctgtgggccttcctcgggctggagtcggcctgtgcgaatgcggaagtggtggaaaacccggagaaaaatgtgccgatcgcggtactcggcgggacgctgggggcggcggtgatctatatcgtctcaaccaacgtgattgcgggaattgtgcccaacatggatctggctaactccacggcgccgttcggactggcgtttgcgcagatgtttacgccggaggtagggaaagtgatcatgggactgatggtgatgtcctgctgcggctcgctgctgggctggcagttcaccatcgcccaggtattcaaatcttccgctgacgaaggttatttcccgaaaatcttctcccgcgtcaccaaagcggatgcgccggtgcagggtatgctggcgattgtgattttccagagcggtttgtcgctgatgaccatcagcccgtcactgaacagccagtttaacgtgctggtcaacctggcggtggtgacgaacatcattccgtacattctgtcgatggcggcgctggtgattattcagaaggtggcgaaggtggatccgcgcaaagcccgggcggccaatatcgtggcgctgattggggcgatttacagcttctatgcgctctactcgtccggtcaggaggcgatgctgtatggggcgatggtgacctttatgggctggacgctgtacggtctggtgtcgccgagatttgaattgaagaacaaacatagctaa

SEQ ID NO: 115063 - DNA, 1641 bp, Enterobacter cloacae
atggcaaatcacagccgtgcaggacaacctgcacaacaacgcgatttgattaacgtcgctcaactgaccgcgcagtactacgtgctgaagccggtagtgggcaacgcagaacacgcagtgaagtttggtacatctggccaccgcggtagtgcggcgcgccacagctttaacgaaccgcacattctggccattgctcaggccatcgcggaagagcgcgccaaaaatggcgtcaccggtccgtgctatgtagggaaagatacccacgccctgtctgaacctgcttttatctccgtgctggaagtgctggcggcgaacggcgtagacgtgattgttcaggagaacaacggttttacgccaacgccagcggtttctaacgctattctggtacacaacaaaaaaggtggcgcgcaggctgacggcattgtgatcaccccgtcccacaacccaccggaagatggcggcatcaagtacaacccacctaacggtggcccggcggataccaacgtcacgaaagtggtggaagatcgtgccaacgcgttactggctaacggtctgaacggtgtgaaacgcatctcgctggatgaagccatggcctccggccacgtgaaagagcaggatctggtgcagccgttcgtggaagggctggcggatatcgtcgatatggccgctatccagaaagccggtctgaagctgggcgtggatccactgggcggctccggtattgaatactggaaacgcattgccgagcactacaagctggatctgaccatcgtgaacgatcacgtcgatcagaccttccgctttatgcacctggacaaagacggcgcgatccgtatggactgctcctccgaatgcgcaatggctggcctgctggcgctgcgcgacaagttcgatctggcgtttgccaacgacccggactacgaccgccacggtatcgtcaccccggcagggctgatgaacccgaaccactacctggctgttgcaatcaattatctcttccagcaccgtccgcagtggggcaaagaggtcgcggtgggtaaaacgctggtctcttccgctatgattgaccgtgtggtcgacgcgctgggtcgcaagctggtggaagtgccggtgggctttaagtggtttgttgatggtctgcacgacggcagcttcggctttggcggtgaagagagcgcgggggcatccttcctgcgcttcgacggcaccccatggtcaaccgataaagacggcatcatcatgtgcctgctggcggcggaaatcaccgcggtcaccggtaagaacccgcaggaacattacaacgagctggcggaacgttttggtgcgccaagctataaccgtattcaggctagcgccacgtctgcgcaaaaagcagctctgtcaaaactctctccggagatggtcagtgccagtaccctggcaggtgacccgatcaccgcgcgtctgacggcggcgccgggtaacggcgcatccatcggcggcctgaaagtgatgaccgaaaacggctggttcgccgcgcgtccatccggtacggaagatgcgtacaaaatctattgcgaaagtttcctcggcgctgagcaccgtcagcagattgagaaagaagcggtagagattgtcagcgaagtgctgaaaaacgcgtaa

SEQ ID NO: 115064 - DNA, 546 bp, Enterobacter cloacae
atgaaaacaatcgaagttgatgacgaactctatcagtatattgccagccagacgcggcatattggggagagcgcgtccgacattttacggcgcatgctcaaaatttccgccgcctcacagcccactcctgtcactaaagatgtcgtgtctcagccgagcgttgttgcacaagtaaaacctgccgtcatgccggcaaaagacaaagtgcgagcgatgcgcgagctgctgctgtccgatgaatatgccgagcagaaaaaggcggttaaccgctttatgctggtgctgtctacactttactcactggataacaacgcatttgcagaagcgacagagtcgctgcacggtcgcacgcgcgtttacttcgcaggcgacgagcagaccctgctgcaaaatggcaaccaaaccaaacccaaacacgttcccggtacaccatactgggtgatcaccaacaccaatacgggccgtaagtgcagcatgatcgaacatatcatgcagtccatgcagttcccggcggaattgatcgaaaaggtttgcggtacaatttaa

SEQ ID NO: 115065 - DNA, 774 bp, Enterobacter cloacae
atgaaattgaatacccgagcgcaaactgcacaatcgccgaacaataattctcccatcgtactggttcacggcctgtttggtagcctggataatctgggtgtgcttgcgcgcgatttagtggccgatcacgcgatcctccaggttgatatgcgcaatcacggtctttctgggcgctcggaggagatgacctacgcagccatggcgcaggatctgcgggacaccctcgatgcgaataatatccagaaagcgacgcttatcgggcattcaatgggcggcaaagcggtgatggcgctcactgcgctggcccctgagcgaatttccgggctggtggtcatcgacgttgcgcccgtcaattacgacgttcgccgtcacgatgagatttttgccgccatcaatgcggtcaccgaagcgggtgtcgcaacccgccagcaggcggctgccgttatgcgtgagcatcttgatgaggaaggcgtggtccagttcctgctgaaatcgtttgttgacggacaatggcgctttaacgtcccggtattgtgggatcagtattcgcatattgtgggctgggaaaccgtccccgcctggccgcaccctaccctttttattcgcggcggcaactccccttacgtcactgatgcataccgtgacacgctgctggcgcaattcccgcaggctcgcgctcacgttattgcgggtgccgggcactgggtacacgcggaaaaaccggatgccgtcctgcgcgccattcgccgctatcttactgatacagcgaattga

SEQ ID NO: 115066 - DNA, 288 bp, Enterobacter cloacae
atggccaaagaacaaacggaccgtacgacactagatctgttcgcgaatgagcgtcgaccgggacgaccgaaaacgaatccgctttcgcgcgatgaacagctgcgtatcaataaacgcaaccagcttaaacgcgataaaaatcgtgggcttaagcgtgtcgaactgaagctgaatgccgatgccgtcgatgcgcttaacgagttagctgacgcgcgcaacatcagccgcagcgaactgatcgaagagatgctgatcgcccagcttgagacgttacgcggcaaggcgtga

SEQ ID NO: 115067 - DNA, 531 bp, Enterobacter cloacae
atggcaatcatcggcattttctttggcagtgataccggcaatactgaaaatatcgcaaaaaacattcaaaaacagctcggtaaagacgttgctgatgtgcatgacatcgccaagagcagcaaagaagatctcgagggctatgacatcctgctgctgggcatcccgacctggtactacggtgaagcacagtgtgactgggacgatttcttcccgacgctggaagaagtagacttcaacggcaagctggttgccctgtttggctgtggcgatcaggaagactatgctgagtatttctgtgatgcgctgggcactattcgcgacatcattgagccacgcggtgcggcgatcgtcggtcactggccaacggcgggttaccatttcgaagcgtccaaaggtctggcagatgacgatcacttcgttggcctggccattgatgaagaccgtcagccagagctgaccgctgagcgtgtagaaaaatgggttaagcaggttcgtgaagagctgaacctggacgatatccttaacgcctga

SEQ ID NO: 115068 - DNA, 447 bp, Enterobacter cloacae
atgactgacaacaataccgcattaaagaaagctggcctgaaagtaacgcttcctcggttaaaaatccttgaagtgcttcaggggccagacaatcaccatgtcagtgcggaagacctttataagcgtcttatcgatatgggtgaagagattgggctggcaaccgtctatcgtgtgctgaaccagtttgatgacgcgggcattgttactcgtcataatttcgaaggcggtaaatccgtgttcgagctgactcagcagcatcaccacgatcacctgatctgcctcgactgtggcaaggtcattgaatttagcgatgattccattgaatcacgccagcgtgaaatcgccgcccgtcatggcatccgcctgaccaaccacagcctgtacctgtacggtcactgcgctgaaggcgattgccgcgaagacgaccacgcgcacgacgcgaaataa

SEQ ID NO: 115069 - DNA, 330 bp, Enterobacter cloacae
atgatgaaaaaaatggtaatcgttgcgctgctggcatcggggctggtggcgtgtgcgcaggatcaggcgcagaaagaagactcccgtctgaaggaggcgtatagcgcctgcatcaatacagcacaaggatcgccagagaagattgaagcctgccagagcgtgctgaatgtgctgaaaaaagagaaagcgcatgagcagtttgcgacgcaggaaaatgttcgcgtgatggattaccaggcctgtatccaggcgcggaaaagcggtaacgatcaggaagtggcgaagcgttgcgataagatctgggacgagattcgcaataacaataaataa

SEQ ID NO: 115070 - DNA, 1398 bp, Enterobacter cloacae
atgcgtacgttcagtggcaaacgtagtgcgctggcgctggctatcgccggtgtgacagcaatgtcgggcctggtggttgcgccagaggcaaaagcagcaggtttcatcgaagattccaccctcacgggcggtatttattactggcagcgtgagcgtgaccgtaaagacgtcactgaagataaatacaaaaccaacctttctcactcgacctggaacgctaaccttgatttccagtcgggatatgccgccgatatgttcgggatcgatattgcagcgttcaccgcaattgaaatggccgaaaatggcgacagcggccatccgaacgaaattgcgttctcctccagcaataaagcctacgacgaagactggtccggcgataaaagcggaatcagcctgtataaagcggctgcaaaattcaaatatggtccggtctgggcgcgtggaggttatatccagccaaccggccagacgctgttagcaccgcactggagctttatgccaggtacctatcagggtgcggaagccggtgctaattttgactacggcgatgcgggggcgttgagcttctcctatatgtggaccaacgagtacaaagcgccgtggcacattgagatggacaagttctatcagaatgataaaaaaaccaaagttgattatctccactcgctgggggcgaagtacgacttcaaaaacgatctggtgctggaagctgcttttggtcaggctgaaggctatatcgatcagtactttgctaaagccagctacaaatttgatatcgcgggtagcccgctgagcaccagctatcagttctacggtacgcgcgacaaagtcagtgatggcagcgtaaatgatatctatgacggcaccgcgtggttacaggcgttgaccttcggctacaaggtaggtcaggttgatttacgtctggagggaacatgggtcaaggcagaagggcagcagggctacttgctgcaacgtatgacgccaacctacgcctcttccaatggtcgtctggatatctggtgggataaccgctctgacttcaacgccgacggcgaaaaggcggtcttcttcggcgcaatgtatgacctgaagaactggaacctgcctggctgggcagtgggtgcgtcctacgcgtacgcctgggacgcgaagccagcagatatggctacgccagacgcctactacgatccgaattaccgtctgaaagagtcttcatacagtctggatgcgatttacacccttcaggagggccgtgcgaaaggcacgatgttcaaactgcacttcacccagtatgacaaccactccgatatcccgagctacgcgggcggttacggcaacatcttccaggatgaacgtgacgtgaaattcatggtcattgcgccattcacaatcttctga

SEQ ID NO: 115071 - DNA, 1668 bp, Enterobacter cloacae
atgagtgaggcagaagcccgcccgagtaactttattcgtcagatcatcgatgaagatctggccagtggtaagcacaccacagtccacacgcgtttcccgccggagccaaatggctacctgcacattggtcacgccaaatcgatctgcctgaactttggtattgcgcaagattaccaggggcagtgcaacctgcgtttcgatgacaccaacccagtaaaagaagacatcgaatacgttgagtcgattaaaaacgacgtgcaatggctgggcttcaactggtctggcgatatctgctactcctcagactatttcgatcagctgtatgcctatgcggttgaactgattaacaaaggtctggcatacgtcgacgaattgtctggtgacgaaatccgtgaataccgcggtacgctgactcagcctggtaaaaacagcccgttccgcgatcgtagcgtggaagagaacctggcgctgtttgaaaaaatgcgtgccggtggcttcgaagaaggtaaagcgtgtctgcgtgccaaaatcgatatggcgtctccgttcatcgtgatgcgcgatccggtgctgtaccgcattaagttcgctgaacaccatcagaccggtaacaagtggtgcatctacccgatgtacgacttcacccactgcatcagcgatgcgctggaaggcattacgcactctctgtgcacgctggaattccaggacaaccgtcgtctgtacgactgggtgctggataacatcaccattcctgtgcatccgcgtcagtacgaattctctcgtctgaacctggaatacaccgtgatgtccaagcgtaagctgaacctgctggtcaccgacaagcacgttgaaggctgggacgacccgcgtatgccgaccatctctggcctgcgtcgtcgtggctacacctcggcgtccattcgtgagttctgcaaacgtattggcgttaccaagcaggacaacaccatcgaaatggcgtctctggaatcctgcattcgcgaagacctgaacgaaaacgcgccgcgcgcgatggcagtgatcgatccagtgaaactggtcatcgaaaactatccgcagggtggaagcgaactggtctcgatgcctaaccatccgaacaaaccggaaatgggcacccgcgacgtgccgttcagcggtgaaatctggatcgatcgcgccgacttccgcgaagaagcgaacaagcagtacaagcgtctggtgctgggcaaagaagtgcgtctgcgtaacgcctatgtgatcaaagccgagcgcgtagagaaagatgcggaaggtaacatcacgaccatcttctgtacgtacgacgcagagacgctgagtaaagatccggcggatggccgtaaagtgaaaggtgtgatccactgggtgagcgcgcagcatgcgctgccggttgagatccgtctctacgatcgtctgttcagcgtacctaacccaggcgctgcggaggacttcctggcggttatcaaccctgagtcgctgattatcaagcaggggtatgccgagccgtctctgaaagccgctgaagccggtaaagcgttccagtttgaacgtgagggttacttctgcctggacagccgttacagcacggcggaaaaaccggtatttaaccgtaccgtcggtctgcgtgatacctggactaagatcggcgaataa

SEQ ID NO: 115072 - DNA, 1950 bp, Enterobacter cloacae
atgaatattttaggttttttccagcgcctcggtagggctttgcagctccctatcgccgtgctaccggttgcagcgttgctgctgcgattcgggcaacccgatcttcttaacgtgccgtttatcgcccaggcaggcggcgcaatttttgacaacctggcgctgattttcgccatcggtgtggcgtcaagctggtcaaaagacagcgctggtgccgcggcactggcaggggctgtcggttacttcatcctcacgaaagcgatggtaaccatcaaccctgaaatcaatatgggtgtgctggcaggtatcattaccggcctggtgggtggcgccgtgtacaaccgttgggcaggtatcaaacttcctgacttcctgagcttcttcggcggtaaacgttttgtgccgattgcgacgggctttttctgtctgatcctcgccgccatctttggctacgtttggccaccggtgcagcatgctatccatgcgggtggcgagtggatcgtgtctgcgggcgcaatgggcgcgggcatcttcggtttcattaaccgtctgctgatcccaaccggtctgcatcaggtactgaacaccatcgcctggttccagattggtgagttcaccaacgcggccggcgcggtattccacggtgatatcaaccgcttctacgcaggcgacggcaccgcgggcatgttcatgtctggcttcttcccaatcatgatgtttggtctgcctggcgcggcgctggcaatgtacctggctgcgccgaaagcgcgtcgctcaatggttggcgggatgctgctgtccgttgcgatcaccgccttcctgaccggcgtgaccgagccactggaattcctgttcatgttcctggctccgctgctgtatctgatgcacgcgatcctgaccggtatcagtctgttcgtcgccacccttctgggtatccatgctggcttctccttctccgcaggcgccatcgactatgtgttgatgtacaacctgccggcggcaagcagcaacgtctggatcctgatggtgatgggcctgatcttcttcgttatctacttcgttctgttcagcgcggttattcgtatgtttaacctgaagacgccgggccgcgaagatacgaaagatgatgttgtgaccagtgaagccaacagcaataccgaagagggtttaaaccagctggcaaccaactacattgccgctgtgggtggcaccgacaacctgaaagcgatcgatgcctgtattacccgtctgcgtctgaccgtaggtgactccgcgcgcgtgagcgatgcaatgtgcaaacgcctgggtgcgtctggtgtggtgaaactgaacaaacaaaccatccaggttatcgtgggtgcgaaagccgaatctatcggcgatgaaatgaaaaaagtggttgcccgtgggccggtcgctgccgcctcaacggataacgcgccagtggctgacgcgccggttgcaaaaccgcaggctgtgccaaacgcggtgaccatcgctgcgctggtttctccggtgacaggtgacgttgttgcgcttgagcaggtgcctgacgaagcgttcgccagcaaagcggtcggtgacggcgtggcggtgaaaccaacggacaaaaccgtggtctctccggctgccggtactatcgtgaaaatcttcaacaccaaccacgcgttctgcctggaaacggaaaaaggcgcggagatcgttgtccatatgggtatcgataccgttgcgctgaacggtcagggctttactcgtctggtggaagagggtgctgaagtggcggcaggtcagccgattctggaaatggatctggacttcctgaacgccaacgcgcgctccatgataagcccggtcgtgtgcagcaacatcgacgacttcagcggtctggtgatccaggcgcaggggcaggtggttgcaggccagacgccactgtatgagattaaaggcaagtaa

SEQ ID NO: 115073 - DNA, 801 bp, Enterobacter cloacae
atgagactgattcccctggcaacagctgaacaagtcggaaaatgggctgctcgtcatatcgttaaccgcatcaacgcgttcaaaccaacagccgatcgtcctttcgttctcggtcttccaaccggtggcacgcccctgaccgcgtataaagctctggttgaaatgcacaaagcgggccaggttagctttaaacacgttgtgaccttcaacatggacgaatatgtcggcctgccgaaggaacatccggaaagttaccacagctttatgcaccgtaatttcttcgatcacgttgatattccggctgaaaacattaacctgctgaatggaaacgcgcctgatattgacgcagaatgccgtcagtatgaagaaaaaatccgttcctacggtaaaatccacctgtttatgggcggcgtaggcaacgatggtcatatcgcgttcaacgaaccggcatcttcactggcttcccgtacccgtattaaaacgctgacccatgatacgcgcgtggctaactcccgcttctttgacggcgacgtcaatcaggtgcctaaatacgcgctgaccgtaggcgtgggcacgctgctggatgccgaagaagtgatgattctggtgctgggcgcggtgaaagcgcaagcgcttcaggctgccgttgaaggcaacgtgaaccatatgtggacgatcagctgcttacagctgcatccaaaagcggttgtcgtgtgtgacgaaccgtccaccatggagctgaaagtgaaaacgctgaaatacttcaacgagctggaagctgagaacatcaaaggtctgtaa

SEQ ID NO: 115074 - DNA, 1149 bp, Enterobacter cloacae
atgtacgctttaacccacggtcggatttataccggccatgaaattctggatgaccatgcgattgtaatcgccaatggcctgattgaacgtgtttgcccgctggcggaactgccgccggagatcgaacagcgttccctcaatggagcagtaatctcccccggtttcatcgacgtacagcttaacggctgcggcggtgtccagtttaacgataccgcagaggcggtatcggttgaaacgctggaaatcatgcaaaaagccaacgagaaatcgggctgcaccagctatctgccaacgctgatcaccagcagcgatgacctgatgaaacagggtatccgcgtcatgcgcgaatacctggcaaaacatccgaatcaggcgctgggcctgcacctggaaggaccatggctgaatatggtcaagaaaggcacccataacccaaactacgtgcgcaaaccggatgccgagctggtggattacatgtgcgccaatgccgatgtgatcaccaaagtaacgctggccccggaaatgaccggcacggacgttatcagcaaactggccgccgccgggattgtggtgtctgcgggccattcgaacgcgacgctgaaagaggcgaaggccggtttccgcgcaggcattacgtttgccacacacctttataacgcgatgccctatattactggccgcgaaccgggactggttggcgccattctggatgaaccagacgtctactgcggcattatcgccgacggcttgcatgtcgattacaccaacatccgcaacgccaaacgcctgaaaggcgacaagctctgccttgtgacggatgctaccgctccggcaggggcgaatattgaccagttcatttttgctggtaaaacaatatactaccggaatggactgtgtgtggatgagaacggcacgctgagcggttcttctctgacgatgatcgaaggggtacgtaacctcgttgaacattgcggcatcgcgcttgaggaagtgctgcgcatggccacgctttatccggcgcgcgccattggcgtcgataaacagctcggcggtattgcgccaggtatggttgcaaacctgacggcgttcacacacgattataaaattattaagaccatcgttaatggtaacgaggtcgtcactgagtaa

SEQ ID NO: 115075 - DNA, 1221 bp, Enterobacter cloacae
atgacaccaggcggacaagctcaaatcggtaatgtcgatctcgttaaacaacttaacagcgcggcggtttatcgcctgattgaccagcacgggccaatctcacgcattcagatagccgaacaaagccagcttgctcccgccagcgtgacaaaaattacacgtcagctcattgagcgcggcctgatcaaagaagtcgatcagcaggcctccaccgggggccgccgcgcgatttccatcgtcacggaaacccgcaattttcaggccattggcgttcgcttaggacgtcatgacaccacgcttacgctctacgatctgagcagcaaggccattgccgaagaacactacccccttcctgagcgcacgcaggagacgcttgaacacgcgttgctgaataccattgcgcatttcatcgaaagctgtcagcgcaagatccgtgaactcatcgccatctcggtgattttgcccggcctggttgacccggaaagcggcgttattcgctacatgccgcatattaaggtagagaactgggggctggttgaggcgctggaaaagcgcttcaagctgacctgctttgttggtcacgatattcgctcgctggcgctggcggagcactactttggtgcgagccaggactgcgaagactctattctggtgcgcgttcaccgtggtacaggtgcgggcatcatctcgaatggccgcatttttattggccgtaacggtaacgtaggcgagattggtcatatccaggtggaaccgcttggcgagcgctgccactgcggtaactttggctgtcttgaaaccgttgccgccaatgccgccattgaacatcgcgttcgccatctgctggagcagggttaccagagccgcgtcacgctggacgattgtaagatcggcgccatctgcaaagcggcaaacaaaggcgatgcgctggcctgcgaagtgatcgaacaggtaggacgccacctgggtaagaccatcgccattgccatcaacctgtttaatccgcagaaagtggtgattgccggcgagatcgttgaagccgaaaaagtgttactgcccgccattgaaggctgcatcaatacccaggcgctgaaggcatttcgccagaatttgccggtggtgcgatctacgctcgatcaccgctcggcaattggcgcattcgccctggtaaaacgtgccatgctcaacgggatcctgctgcaacatttgctggaatcctga

SEQ ID NO: 115076 - DNA, 753 bp, Enterobacter cloacae
atgagcattaagaatgtaatttgtgatatcgacggcgtgctgatgcacgacaacgttgccgtgccgggtgctgcggagtttcttcaccgcatcatcgacaaaggaatgccactggttcttctcacgaactacccttcacagactggtcaggatctggcaaaccgctttgctaccgcaggcgtcaacgtcccggacagcgtgttctatacctctgcgatggcgaccgcggatttcctgaagcgtcaggaaggcaaaaaagcctatgtcgttggtgaaggtgcgctgatccacgagctgtataaagcgggcttcaccatcaccgacgtgaacccggactttgtcatcgtgggcgaaacgcgctcctttaactgggagatgatgcataaggcagcctactttgtcgccaacggtgcgcgttttatcgccaccaacccggacacgcacggtcgtggtttttatcccgcctgcggtgcgctttgcgccggtatcgaaaaaatctcgggtcgtaagccgtttgttgtcggtaaaccgagcccgtggatcatccgcgccgcactgaatacgatgcaggcacactcagaagaaaccgtcattgtgggcgacaacctgcgtaccgatattctggctggcttccaggcggggcttgaaaccatcctggtgctttctggcgtttcacagcttgatgacattgatacgatgccgttccggccaagctggatttacccttctgtcgacgaaatcgacgttatttga

SEQ ID NO: 115077 - DNA, 1665 bp, Enterobacter cloacae
atgtgttctatttttggcgtactggatattaaaactgacgcgggcgaactgcgtaaaaaagcactcgaattgtcccgcctgatgcgccatcgcggtccggactggtcaggcgtatacgccagcgataaagcgattctggctcatgaacgtctctccattgttgatgtcaacgctggcgcacagccgctgtataacgagaaaaaaacgcacgcgctggctgttaacggtgaaatttacaaccatcaggcgctgcgcgccgagtacggcgatcgctacgcgtttcagaccggctcagactgcgaagtgatcctggcgctgtatcaggagaaaggcccggagttcctcgacgatctgcaaggtatgttcgccttcgcgctgtacgacagcgaaaaagacgcttacctgattggccgcgaccatatcggtattatcccgctgtacatgggacacgatgagcacggcaacttctacgttgcctcagagatgaaagccctggtgccggtgtgccgcaccatcaaagagttcccggcaggtagctacctgtggagtaaagacggcgagatccgcccgtactaccagcgcgactggtttgattatgaggcggtgaaagacaacgtgacggacaaagccgaactgcgtcaggccctggaagagtcagtgaaaagccacctgatgtcagacgtaccttacggcgtactgctctccggcggtctggactcctccgtgatctccgcgatcaccaagaaattcgccgcacgtcgcgtggaagatcaggagcgctctgaagcctggtggccgcagctgcactcctttgccgtgggtctggaaggggcacctgacctgaaagccgcccaggaagtggcaaatcatctcggcacggtgcaccatgaaattcacttcaccgtacaggaaggtctggatgcgatccgcgatgtgatctatcacattgaaacctatgatgtgaccaccattcgcgcctccacaccaatgtatttgatgtcgcggaagatcaaagcgatgggcatcaagatggtgctctccggcgagggttctgacgaagtgtttggcggttacctctatttccacaaagcgccaaacgccaaagagctgcatgaagaaacggtgcgtaagctacaggcgctgcacatgtttgactgcgcgcgcgccaacaaagcgatgtccgcctggggtgtggaagcccgcgtgccgttcctcgataagaaattccttgatgtggcgatgcgcatcaacccgcaggacaaaatgtgcggcaacggcaaaatggagaaacatatcctgcgagaatgttttgaatcctacctgccggcgagcgtggcgtggcgtcagaaagagcagttctcggatggcgtgggttacagctggatcgacaccctgaaagaggtggcggcgaaacaggtttctgatcaacaactggaaactgcgagcttccgtttcccgtacaacacgccagcctcgaaagaagcgtatttgtaccgtgagatctttgaggagctgttcccggttccaagcgcagcagagtgcgtaccgggtggcccatcggtcgcctgctcttctgctaaagccattgaatgggatgaatcattcaaagcgatgaacgatccgtcaggacgcgcggtgggcgttcaccagtctgcctataaataa

SEQ ID NO: 115078 - DNA, 1176 bp, Enterobacter cloacae
atgacactcctgaacaccgaagttgccgttgttggcggcggtatggtcggcggcgcactggcgctggggctggcgcagcagggatttgacgtaaccgttattgaacaggcggctccgccggcattcgatcctgccagccaaccggacgtgcgtatttccgccatcagcgcggcctctgttgatctgcttcgcgggctgggcgtctgggaggcggtgctggcgatgcgcgcgcacccatacagccgtcttgaaacctgggagtgggaaaatgctcacgtgtcgtttgatgccgccgagctgaaactgccgcgcctgggctatatggtggaaaacaacgtgctccagcaggcactctggcaggcgctggaggcgcacccgaaggtgacgctgcgcgttccggactcgctgaaagccctgcatcgtcatgatggcgggtatctcctgacgctggacaacgacgatgagctggccgtgaagctggtggtgggggcggatggcgcgaactcgcaggtcaggcagatggcaggcattgggatccatgcctggcagtaccagcagtcctgcatgctgatcaccgttcagtcagaaaacgcgccgggcgaaagcacctggcagcattttacgccgaacggcccgcatgcattcttaccgctgtttgataactgggcctcgctggtgtggtacgacaaaccggcgcgcattcgacagttgcaggggctgtccatggatcagttgcagcgcgaaattcgccagcacttcccgagtcgtctgggtaacgtgaccccggttgccgccggcgcattcccgctgatgcgacgccatgcgttacagtatgcccgtgaaggactggtgctggtgggggacgcggcgcacaccattcatccgctggcggggcagggggtgaatctgggataccgtgacgtcgatgcgttactggatgtgctgggtaacgctcgcgcccacgcggaagcctgggccagccatcaggtactgaagcgctaccagacgcgccgtatggcggataacttcattatgcagtcggggatggatctgttctatgccgggttcagcaatgatgttggtccggtgcgtatagtgcgcaatattggattgatggcggcggagcgtgccggtggtctgaagcgtcaggccctgaaatatgccctcggactctga

SEQ ID NO: 115079 - DNA, 1425 bp, Enterobacter cloacae
atgactaaaaaactccatataaaaacctggggctgtcagatgaacgaatacgattcatcgaagatggccgatctgctggataccacccacggataccagctgactgaaaatgcgaaagaagccgatgtgctgctgctgaacacctgttcaattcgtgaaaaagcacaggaaaaagtttttcatgtgttaggccgctggaagcttctcaaacggaaaaatccggacctgattattggcgtgggtggctgcgtcgcatcgcaggaaggtaagctgatccgccagagagccccctatgtggatatcgtttttggccctcagaccctgcaccgcctgccagagatgattaatcaggttcgcggcagccgtagcccggtggttgacgtgagcttcccggagatcgagaaatttgaccgtctgccagagccgcgcgctgatggcccgaccgccttcgtctccatcatggaaggctgcaacaaatactgtacttactgcgtggtgccttacacccgcggtgaagaagtgagccgcccggcagacgatatcctgtttgaaatcgcgcagcttgccgcgcagggcgttcgtgaagtgaacctgctgggtcagaacgtgaacgcctggcgcggggaaaactacgacggtaccaccggcagctttgctgaactgctacgtctggtggcggcgattgacggcatcgaccgcattcgctttaccaccagccatccgatggaatttaccgacgacattattgacgtctatcgcgatacgccagagctggtgagcttcctgcacctgccgatccagtgcggttctgatcgcgtgctgaacctgatgggtcgtccacatacggtgctcgagtataagtccaccatccgcaagctgcgtgaagcgcgcccggatatccagattagctccgactttatcgtcggcttccctggcgaaaccgctgatgactttgagcgcaccatgaagctcatcggcgaggtgaatttcgacgtcagctacagctttatcttctctgcgcgcccgggcacccctgcggccgatatggttgacgatgtgccggaagaagagaaaaagcagcgtctgtatattctacaggagcgtatcaaccagcaggccaacgcctggagtcgtcgtatgctcggtactgtccagcgtattctggtggaaggcacctcccgtaagagcgtcatggaactgtctggtcgaaccgaaaataaccgcgtggtgaattttgaaggcaccccggacatgatcggtaagtttgtggacgtcgagattgtcgaagtactcacgaactcgctgcgcgggaaggtggtacgcactgaggacgaaatgggtctgcgaattgcacagactccggaatccgttatctctcgcacccgcaaagtcaacgactctggcgtgggtatttaccagccttga

SEQ ID NO: 115080 - DNA, 1047 bp, Enterobacter cloacae
ttgaacatagatacgcgtgaaattagccttgagccagcagacaacgctcgcctgctgagcctgtgcgggccgtttgatgacaacatcaaacaacttgagcgacgtctgggtatcgaaatcaatcgtcgcgataaccatttcaaactcaccggacgcccaatctgcgtcaacgccgcggcggatattctccgcagcctgtatgttgataccgccccgatgcgcggtgagatccaggatattgaacctgaacagatccacctggccattaaagaggcgcgcgtgcttgagcagagcgcggagagcgtgccggactatggcaaagccatcaacatcaaaactaaacgcggcgtgattaagcctcgtaccccgaaccaggcgcagtacatcgccaacattctcgaccacgacatcaccttcggtgtaggcccggcgggtacgggtaaaacctatctggcggttgccgctgcggttgatgcgctcgagcgtcaggagatccgccgtatcctgctgacccgccctgctgttgaagccggtgaaaaactgggcttcttgccgggtgatttgagtcagaaagtagatccctacctgcgtccgctgtatgacgcgctgttcgaaatgctcggcttcgagaaagttgaaaagctcatcgagcgtaacgtgattgaagttgctccgctggcctacatgcgtggccgtacgcttaacgacgcgttcatcattctggatgagagccagaacaccaccatcgaacagatgaagatgttcctgacgcgtattggctttaactcgaaagcggttatcaccggtgacgtcacccagattgacctgccgcgtaacaccaaatcgggtctgcgtcacgccatcgaagtcctggccgaggtagaggaaatcagctttaacttcttccacagtgaagacgtggtacgccatccggtcgtcgcgcgtatcgttaacgcttatgaggcctgggaagaggcagatcagaagcgcagggccgaactggccgcagaacgtaagcgcgaagcgcaggagcatgaacagaaatga

SEQ ID NO: 115081 - DNA, 468 bp, Enterobacter cloacae
atgagtcaggtgatcctcgatttacagctggcctgtgaagataattccgacatgccagaagaggcacagtttcagaaatggctggatgccgttatcccccagtttcaggaagaatcagaggtcacgattcgcctggtggatgaagcagaaagccatgagctcaacctgacctaccgcgggaaagataagccgaccaacgtgctctctttcccgttcgaagcccctccgggcattgagatgccgctgctgggcgatctgatcatctgccgtcaggtggttgagcaggaagccaaagagcagcaaaagccgctggaagcgcactgggcacacatggtggtgcacggtagcctgcatcttctgggttacgaccatattgaagatgacgaagcggaagagatggaatccctcgagacagagataatgcttgctctgggctatgaggatccgtacattgccgagaaagaatag

SEQ ID NO: 115082 - DNA, 879 bp, Enterobacter cloacae
atgagcgacgacaattcacacagtagcgacacgacaaccactaaaaagggatttttctccctcattctgaaccagcttttccacggcgaaccgaaaaaccgtgatgaactgctggagctgattcgtgattccgggcagaacgaccttatcgacgaagatacacgcgaaatgctcgaaggggtgatggacatcgccgaccagcgtgtccgcgacatcatgatcccccgctcgcagatgattaccctgaaacgcaaccagacgctggacgagtgcctcgatgtgattatcgaatcggctcactcacgtttcccggtcatcagcgaagacaaagatcacattgaagggattttgatggcgaaagatctgctgccgtttatgcgcagcgatgccgaagccttcagtatggaaaaggtgttacgcccggccgtggttgtgccggaaagtaaacgtgtggatcggatgctgaaggagtttcgctcccagcgctatcacatggcgattgttattgatgaatttggtggcgtttccggtctggtcacaatcgaagatatccttgagctgatcgtgggcgaaatcgaagatgagtatgacgaagaagaggatatcgacttccgtcagctgagccgccacacctggaccgtgcgcgcgctggcctccattgaagacttcaacgatacctttggcaccagcttcagcgatgaagaagtggacaccattggtggtctggtgatgcaggccttcggccatcttccggcccgcggtgaaaccgttgacatcgatggttaccagttcaaggtcgcaatggctgacagccgacgtattattcaggttcacgtcagaatgccggacgactcaccggtgccaaaactggaagattaa

SEQ ID NO: 115083 - DNA, 1539 bp, Enterobacter cloacae
atggcatttgccccactctttgaacgccagcgcgtccgtttgctgctggcgctgttactcggagccagcggtacgctggctttttctccttacgatatctggccggccgctattctctccctgatggggctacagggtcttaccctgaaccgtcgtccggtacaggccgcggccattggctacttctgggggctggggctgttcggctctggtatcaactgggtctacgtcagtatcgcgcaatttggcggaatgccggggccggttaacgtcttcctggttgtgctgctcgccgcctatctctcactctacaccggcctgttcgcgggcatcctgtctcgcctgtggccaaaaacgacctggctgcgcgtggcgatagcggcacccgttgtctggcaaatcaccgaatttctgcgcggctgggtactgaccggcttcccgtggttgcagttcggctatagccaggtagacggcccgctgaaaggcctggccccggtcatgggcgtggaggcgatcaacttcctgctcatggcggtcagcggccttctggtgctggctctggtgacacgtaactggaagccgctggttgccgcgttgatcctgtttgccctgcccttcccgctgcgttatatccagtggtttacgctggagcccgcgcgcgccacgcaggtttctctggtacagggcgatatcccgcagtccctgaaatgggatgagaatcagctgctgaacacgctgaaaatctacgccaacgccactgaaaaggtgatgggcaaatcgcagctcatcatctggcctgagtctgcgatcccggacctggagatcaatcagcagcccttcctgaagatgatggacgatctgctgcgcgcgcgcggcagtacgctgatcaccggaattgtggatgcgcgtctcaatcagcagaaccgctatgacacgtacaacacgatcattacgctcggtaaggacagcgaatacagctatacctccaccaatcgctacaacaaaaaccaccttgtaccgtttggcgaatttgttccgctggagtctattttgcgcccactggcaccgttctttgatttgccgatgtcctcattcagccggggcccttacgttcagccgcagctgcatgcgcacggttttgccctgacggccgccatttgctacgagattatcctcggcgagcaggtgcgcgataatttccgcccggacaccgactatctgctgaccatctcaaacgatgcgtggttcggtaaatcgattggcccgtggcagcacttccagatggcgcgaatgcgttctctggagctggcacgtccgttgctgcgcagcaccaataacggcattaccgccgtgattggtccgcagggtgaaatccaggccatgatcccgcaatttacccgtgaggtgctgactactaacgtcacgccaactaccgggcttacgccttacgcgcgcaccgggaactggccgctgtggattttgaccttgctcttcggctttggcgcagtactgatgagcctgcgtcagcgtcgtaaataa

SEQ ID NO: 115084 - DNA, 906 bp, Enterobacter cloacae
atgcaattacgtaaactggccacagcaatgctggttatgggaatgtctgcgggggttgtccacgctgaagacgctccggcagcaggaagcactctcgacaagattgccaaaaacggcgtgatcgtggtcggccaccgtgaatcttctgtcccgttctcttactacgacaacacgcaaaaagtcgtgggctattcacaggattactccaacgccatcgttgaagccgtgaagaaaaagctgaacaaacctgacctgcaagtgaagctgatccccatcacttcacagaaccgtattcctctgctgcaaaacggcacatttgattttgaatgtggctcaaccaccaacaaccttgaacgtcagaaacaggccgctttctcggacaccatcttcgttgtgggcacccgcctgctgacgaagaaaggcggcgacatcaaagattttgctgacctgaaaggcaaagcggttgtcgtgacctccggtaccacgtccgaagtgctgctgcacaagctgaacgacgagaagaaaatggacatgcgcatcatcagcgcgaaagaccatggcgactccttccgtaccctggaaagcggccgtgctgtcgcgtttatgatggatgacgccctgctggcgggcgaacgcgcgaaagcgaagaaaccagacaactgggaaatcgtcggtaccgcccagtcgaaagaagcctacggctgtatgctgcgtaaaggtgacgaggacttcaagaaactgatcgatgacaccatcgctcaggcgcaaacctccggcgaagcggcaaaatggttcgacaaatggttcaagaacccaattccaccaaaaaacctgaacatgaactttgaactgtctgacgacatgaaagcgctgttcaaatcaccaaacgacaaagctcttaactaa

SEQ ID NO: 115085 - DNA, 741 bp, Enterobacter cloacae
atgtcaattgactggaactggggcatctttctgcaacaagccccgttcggcaacaccacctatctcggctggctgtggagcggctttcaggttaccgttgcgttatcgataacggcgtggattatcgcgtttcttgtcggttcgctgttcggtattctgcgtaccgtccctaaccgttttctctcttcgattggcacgctctatgtggaactgttccgtaacgttccgctgatcgtgcagttctttacctggtatctggtgatcccggaactgctgccggaagatctcggcatgtggtttaaggccgagctggatcctaacgtacaattttttgtctcctctatgctgtgtctggggctgttcaccgctgcgcgcgtctgcgagcaggtacgtgccgccatacagtcactgccgcgcgggcaaaagaatgcggcactggcaatgggcctgactctgccccaggcctaccgttacgtactgctgcctaacgcttaccgcgtcatcgttccgccgatgacgtccgagatgatgaacctggtaaaaaactcggctatcgcctcaaccatcggtctggtggatatggcggcacaggcgggcaaactgctggattactccgctcacgcctgggaatccttcacggcgatcacgctcgcctatgttctgattaacgctttcatcatgctggtgatgaacctggttgaacgcaaagtacgcctgccgggcaatctggggggcaaataa

SEQ ID NO: 115086 - DNA, 675 bp, Enterobacter cloacae
atgtacgattttgactggagttccattgttccctccatgccctatctgctggatggactggcaatcaccttaaagatcaccgttatcgccattatcgtcggtattgtctggggcaccctgctggcagtgatgcgcctgtcgagctttaagccgctcgcctggtttgccacggcttacgttaacgtattccgctccattccactggtcatggtgctgctgtggttttatctgattgttcccggctttttacagaacgtactgggactgtcgccaaagaccgatatccgcctgatctctgccatggtggcgttttccatgtttgaagccgcctactactcagagatcatccgcgcaggtattcagagtatctctcgcgggcagtccagcgctgcgctggcgctcggtatgacgcactggcagtccatgaagctcattattttgccgcaggcgtttcgcgccatggttccgctgctgctgacgcagggcatcgtcctgttccaggatacctccctggtctacgtgctgagtctggcagacttcttccgtaccgcctccaccattggcgaacgtgacggaacgcaggttgagatgatcctcttcgcgggcggggtctattttgtgattagtttaagcgcatcgctgttggtcagctggctgaagaaaaggacggtataa

SEQ ID NO: 115087 - DNA, 726 bp, Enterobacter cloacae
atgatttccctgaaaaatgtttctaaatggtatgggcactttcaggtgctgaccgactgctcaacggaagtgaaaaaaggcgatgtggtggtggtatgcggcccgtccggttccggtaagtcgacgcttatcaaaaccgttaatgggctggaacctgtccagcagggcgagattgtcgttaacggtaccaaagtaaatgaccgcaaaaccaaccttgcccagcttcgctctcacgtagggatggtgttccagcattttgagctgttccctcacctgtccatcattgagaacctgacgctggcgcaggtcaaagtgctgaagcgcgacaaaaaagcggcgcgcgaaaaggggctgaagctgctggaacgcgtcgggctgtctgcgcatgcgaataagttcccggcccagctttcgggcggccaacagcagcgtgtggcaatcgcgcgtgcgctgtgcatggatccggtggcaatgctgtttgatgagccgacgtccgcgctcgaccctgagatgatcaacgaagtgctggacgtcatggtggagctggcgcacgaagggatgaccatgatggtggtgacgcacgaaatgggcttcgcccgtaaagtggccaaccgcgtgatcttcatggatgaagggaaaattgttgaagactcaccaaaagaagagttcttcgcaaatcctaaatctgaacgtgcaaaagacttcctcgccaaaatcctgcattaa

SEQ ID NO: 115088 - DNA, 942 bp, Enterobacter cloacae
atggcacagccaattattctcgactgcgatccgggtcatgatgacgcgatcgcactcgtccttgctcttgcttcccctgaactggacgtaaaagctgtcacctcctccgccgggaaccagacgccggataaaaccttgcgaaacgtgttgcgcatgttgacgctgctgaaacgcaccgatattccggtcgcaggtggcgccgttaagccactgatgcgcgagctgatcattgcggataatgttcacggtgagagtgggctggatggcccggcgctaccggagccgaatttcgcaccgcaaaactgcactgccgtcgagctcatggcgaaggtgctgcgtgagagcgcagagcccgtgacgctggtggcgaccggcccgcagaccaacgttgcgctgctgctgaacagccatcctgaactgcacagcaacatcgcccgtatcgtcatcatgggcggggcaatggggctggggaactggacgccagcagcagagttcaacatcttcgttgacccggaagccgcggaaatcgtcttccagtcgggcctgccgattgtgatggcggggctggacgtgacgcatcgggcacagattatgacagacgatattgaacgcttccgcgccgtgggcaacccggttgcaacgaccgtggccgagctgctcgacttctttatggagtatcacaaagccgagaagtggggcttccacggcgccccgctgcatgacccatgcaccatcgcctggctgctgaagccggaaatgtttaccacggtcgagcgttgggttggtgtggaaacacaggggaaatatacccagggaatgacggtggtggactattactcgctgacgggaaacaagccgaataccacggtaatggtggatatcgatcgggaagcgtttgtggatttgctggcggagcggctgccttattattctgcggcctga

SEQ ID NO: 115089 - DNA, 486 bp, Enterobacter cloacae
atgatgaacaaggttgctcaattttaccgtgaactggtagcgactctgacggaacggctgcgtaacggcgagcgtgatatcgacgcgctggtcgaacaggcacgcgcacgcgtgacgcaaacgggtgagttaacgcgaaccgaagtggaagaggtgacgcgcgccgtgcgccgtgacctggaggagttcgcgcgaagctatgaagagagccaggacgagatcgccgacagcgtttttatgcgggtcatcaaagagagcctgtggcaggagctggcggatattaccgataaaactcagctggaatggcgtgaggtgtttcaggatttaaaccaccacggtgtctatcacagcggcgaagtagtggggttggggaacctggtgtgtgagaagtgccaccaccatatcgccgtttatacgccggaggtgctgtcgctgtgtccgaagtgcgggcacgaccagttccagcgtcggccatttgagccgtag

SEQ ID NO: 115090 - DNA, 2583 bp, Enterobacter cloacae
atgcaagagcaataccgcccggaagagatagaatcaaaagtccagcaacactgggacgagaagcgcacctttgaagtaaccgaagacgagagcaaagagaagtattactgcctgtcgatgcttccctatccttctggtcgactacacatgggccacgtgcgtaactacaccatcggagacgtgattgcgcgctaccagcgtatgctgggcaaaaacgttcttcagcctatcggctgggatgcgttcggcctgcctgctgaaggcgcggcggtgaaaaacaacacggcaccggctccgtggacgtacgacaacattgcgtacatgaaaaaccagctgaaaatgctgggctttggctatgactggagtcgcgagctggcaacctgtaccccggaatactaccgctgggagcagaaattctttaccgagctgtataaaaaaggcctggtgtacaagaagacctctgccgttaactggtgcccgaatgaccagaccgttctcgcgaacgaacaggttatcgacggctgctgctggcgctgcgacaccaaagtagagcgtaaagagatcccgcagtggtttatcaaaatcaccgcctacgctgacgaactgctgaacgatctggataatctggaccactggccagataccgttaagaccatgcagcgcaactggatcggccgttccgaaggtgtggaaattaccttcaacgttgagaactacgaccagaccctgaccgtctataccacccgtccggacaccttcatgggcgcgacctacctggccgtggccgcaggtcacccgctggcgcagaaagcggcagaaaacaatccggaactggcgaccttcatcgacgaatgccgcaatactaaagtggccgaagccgacatggcgacgatggagaaaaaaggcgttgataccggctttaaagccattcacccgctgacgggcgaagcgatccctgtctgggcagccaacttcgtactgatggaatacggcacaggcgcagtgatggccgtgccgggtcacgaccagcgcgactacgaatttgccaccaaatacggcctgaccatcaagcctgttattcttgccgctgacggctctgagcccgatctctctgagcaagcgctgactgaaaaaggcaccctgtttaactccggtgagttcagcggcctgagcttcgaagaaggcttcaacgccatcgccgacaagctggcctccctgggcgtgggcgagcgtaaagtgaactaccgtctgcgcgactggggcgtttcccgtcagcgttactggggtgcgccaatcccaatggtgactctggaagatggcaccgtgatgccaacgccggaagatcagctgccggtgatcctgccggaagacgtggtcatggacggcatcaccagcccgatcaaagccgatcctgagtgggcgaaaaccaccgtcaacggtcagccagcgctgcgtgaaaccgacaccttcgacacctttatggaatcctcctggtactatgcgcgctacacctgcccgcagtacaaagaaggcatgctggattccgatgcagcaaactactggctgccggtagacatctacatcggtggcattgaacacgccatcatgcacctgctctacttccgcttcttccacaaactgatgcgtgacgcaggcctcgtcaactccgacgagccggcaaaacagctgctgtgtcagggtatggtgctggcagatgcgttctactacgttggcgcgaacggcgagcgtaactgggtttctccggttgatgcgattgtggagcgcgacgagaaaggccgtatcgtgaaggcgaaagacgccgaaggtcatgaactggtgtataccggcatgagcaagatgtccaagtcgaaaaataacggtatcgacccgcaggtaatggttgagcgttacggcgctgacaccgtgcgtctgttcatgatgttcgcctccccggcagatatgacgctggaatggcaggaatccggcgttgaaggggcaaaccgcttcctgaaacgcgtctggaaactggtgtacgagcacacctctcagggtgatgcgccagcgctgaacgtggctgcactgagcgaagatcagcaggcgctgcgtcgtgatgttcataaaaccattgcgaaagtcaccgatgatattggtcgtcgtcagaccttcaataccgcaattgcggctattatggaactgatgaacaagctggcgaaagccccgcaggacggcgagcaggatcgcgccttaatgcgtgaagcgctgctggcggtcgttcgcatgcttaacccgttcacgccgcacgttagcttcaccctgtggcaggagctgaaaggcgaaggcgatatcgacaacgcgccgtggccagtggcggatgaatccgctatggtggaaaacaccacgctggtggtggtgcaggttaacggtaaagtgcgcggtaaaattaccgtcgcggtcgacgcaaccgaagaacaggttcgcgagcgcgcaagccaggagcatctggtcgcgaaataccttgagggcgttaccgtacgtaaagtgatctacgtacctggtaaactgctgaatctggtcgttggctaa

SEQ ID NO: 115091 - DNA, 570 bp, Enterobacter cloacae
gtgcgacaactggcaacaatactcttatctctggcggtgctggtcaccgctggctgcggctggcacctgcgcaacaccacggcagtgcctgctcagatgaaaacaatgatcttcgactcatccgatccgaacggaccgctgagccgggccattcgtaaccagctgcgtttgaacgatgttgagctgatcgagaagggaaccctgcgtcaggatgttccttcgcttcgcgtcctgaaatcaacgctgtcacaagatacggcctcgatcttccaggatgggcggacggcggaatatcagatggtgcttaccgttgatgcggccgtcttgatgccaggtaaagatatttaccctatcaataccaaagtctaccgctcgttcttcgataacccgcagacggcgctggcaaaagacgccgaacagcagattatcatcaaagagatgtacgataaggccgcggaacagctgatccgcagactgcctgccattgccgcgtcgacgaaaaaaggcgctgacgtcatcgaaacaccggatgccagcacgccggatatgccaacgtctctgggtaactga

SEQ ID NO: 115092 - DNA, 1032 bp, Enterobacter cloacae
atgatcaggttgtatcctgaacaactccgcgcgcagctcaacgaagggctgcgcgcggcctatctgctactcggcaatgaccccctgttacttcaggaaagccttgatgcggttcgccatgcggcagccgcgcagggtttcgatgagcatcatacgttccagatcgataacagtaccgactggaacgctatcttctcgctttgtcaggccatgagcctgtttgcctctcgtcagacaatccagatcctgctgccagagaatggacctaacgctgctatcaatgaacagctggccatgctggtaagtttgttacacgacgatctgctgcttatcgtacgcggcaacaaactcacaaaagcgcaggaaaacgcggcctggtttacccggctagcccccagtgcggtgctggtcacctgccagacgccagagcaggcgcatctgccaaaatgggttgccgcgcgagcaaagcagcacaatttgcagctggatgaggccgccagtcagctcctgtgctactgctacgaaggcaaccttctggcactggcgcaggcgctggacaggctcgccctgctgtggcccgatggtaagctgacgctgccgcgcgtggaacaggcggtgaatgatgccgcgcactttacccccttccactgggttgatgcgctgctgtcggcgaaaagtaagcgtgccctgcacatcctgcaacagctgcgcctggaagggagtgagccggtcatcctgctccgtacgctccagcgcgaattactgctgctgaacaaccttaaacgccagtcagcacacacgcccctgcgcgccttattcgacaaacatcgcgtctggcaaaaccgtcgggcgatgaccacggaggcgataaaccgcctgagccaggagcagttgcgtcaggcagtacaacttctgatgcgcgccgaactgacgttaaaacaggattacggccagtctgtctgggcggagctggagagcctctctttgctgctctgccataaggcgctggcagacgtatttatcgatgggtga

SEQ ID NO: 115093 - DNA, 666 bp, Enterobacter cloacae
atgggtgatatgcattctttacaggcaatgtatggcgggaccttcgacccggtacactatgggcatcttaagccggtagaaatcctcgcgaatttgattgggttgcagcgggtaatcatcatgcccaacaatgttccgccgcaccgtcctcagccagaagcaaccagcgagcagcgtaaagcgatgctcgcgctggctatcgccgataagcctctcttcacgctggatgagcgtgaactgcgcagggataccccttcctggacatcgcaaacgctgcgggagtggcgcgctgagcaagggcccatgaaaccgctggcgtttattatcggccaggattccttgctcaactttcccagctggtaccagtacgaaaccattctggaaaacagtcatctgctggtctgccgccgtccgggctacccgctgaccatgcgcgacgcacagcatcagcagtggcttgacgcgcatctgacggacaatatagaagacctgcacagtctccccgccgggaaaatttatctcgctgaaacgccgtggtttgatatttccgcaaccctcatccgcgagcgtctccagcagggtttagactgtgacgatctcctcccctcgcccgtgctggcctatatccacgcacacggtctgtatcagaaaagtacagatgtctga

SEQ ID NO: 115094 - DNA, 318 bp, Enterobacter cloacae
ttgcagggtaaagcactccaggattttgttatcgacaaaattgatgacctgaaaggtcaggacatcatcgctatcgacgttaagggtaaatccagcatcaccgactgcatgatcatctgcaccgggacctcaactcgtcacgttgtttcgattgctgaccatgttgttcaggaatcgcgcgcggcagggctgcttccgctgggcgttgaaggtgaagcgaccgctgactgggtggttgtcgatctcggcgatgtgattgtccacgtcatgcaggaagagagccgtcgcctgtatgagctggaaaaactctggggttaa

SEQ ID NO: 115095 - DNA, 468 bp, Enterobacter cloacae
gtgaagttgcaactggtcgccgtcggcaccaaaatgccggactgggtacaaaccggttttactgagtatctgcatcgttttccaaaagatatgccgttcgaactggtggagatcccagcaggaaagcgcggcaagaacgcagatatcaaacgtattctcgataaagagggagaactgatgctggctgccgcaggcaaaaaccgcatcgtgaccctcgatattccgggcaaaccctgggatacgccgcagctggcgcacgaactggagcgctggaagcaggatggtcgggacgtcagtctgttgattggcggaccagaggggttatctcccgcctgcaaagcggcagcagaacaaagttggtcactctcggcgctgacgctgccccacccgcttgtacgggttctcgtggcagaaagtttgtatcgcgcatggagcatcactaccaaccacccttatcaccgcgagtaa

SEQ ID NO: 115096 - DNA, 1902 bp, Enterobacter cloacae
atgaaactacagaattcttttcgcgactatacggctgagtccgcgctgtttgtgcgccgggcgctggtcgcctttacggggattttgctgcttaccggcgtgctgatcgccaacctctataatctgcaaattgtccgctataccgattaccagacccgctcaaacgaaaaccgtatcaagctggtgcccatcgcgcccagccgcggcattatctacgatcgtaacggcacgccgctggcgcttaatcgcaccatctaccagatagagatgatgcccgagaaagtggataacgtgcaggatacgctgaacgcgctgagaagcgttgtcgacctgactgatgacgatatcgctgcgttcaaaaaagagcgcgcacgttctcaccgcttcacctccattccggtaaaaaccaacctgacggaagtgcaggtcgcccgttttgccgttaaccagtaccgtttccccggtgtggaagtcaaaggctataaacgccgctactatccttacggctccgcgctgacgcacgtcattggttacgtctccaaaatcaacgataaagacgtcgaacgccttgataaagacggcaagctggctaactacgccgcaacccatgatattggcaagctggggatcgaacgttattacgaagacgtgctgcacggtcagaccgggtatgaagaggttgaagttaacaaccgtggccgcgtgatccgtcagctgaaagaggttcccccgcaggcggggcatgacgtctatctgacgctcgacctgaagctacagcagtatatcgagacgctgctggcgggtagccgtgctgcggttattgtgaccgacccgcgtaccggcggcattctggcgatggtttcgatgccaagctacgatccgaacctgttcgtggatggcatctccagcaaggattactccggcctgctcaacgatccaaacacgccgctggtgaatcgcgcgacgcagggggtttatcctccagcttcaacggttaaaccgtatgtcgccgtgtctgcgctaagcgcgggcgtcatcacccgcaataccagtctgtttgaccccggctggtggcagttacctggctctgagaaacgctaccgcgactggaaaaaatggggccacggccatctgaacgtgaccaaatcactggaggagtcggcggataccttcttctatcaggtcgcctacgacatgggtattgatcgtctgtctgaatggatgagcaaattcggctacgggcattacaccggtatagatttggcggaagagcgttccggcaacatgccaacccgcgaatggaagctgaagcgctttaaaaaaccctggtatcagggtgacaccattccggtagggatcggccagggctactggacggcaacgccgctgcaaatgaacaaggcgatgatgatcctcattaacgatggcgttgtgaaagtgccgcacctgctgcaaagcaccgttgaagacggcaaaaaagtgccgtggatacagccgcacgagccgccggtgggtgacattcattccggctactgggaaatcgcgaaagacggcatgtacggtgtagccaaccgtcctaacgggacggcgcacaaatatttcgccggcgcaccgtataaggttgccgcgaaatcaggtacggctcaggtcttcggtctgaaagcgaatgaaacttataacgcacataaaattgccgaacgtctgcgtgaccacaagctcatgacggcgtttgccccttatgataacccgcaggttgcggtggcgatgattcttgagaacggcggcgcaggcccggcggtgggtaccatcatgcgtcaaatcctcgaccacatcatgctgggtgacaacaacaccgaactgccagctgaaaacccggcagccgctgcggcggaggaccaataa

SEQ ID NO: 115097 - DNA, 1113 bp, Enterobacter cloacae
atgacggataatccgaataaaaaatcgctgtgggacaagatccacatcgaccctgccatgctgctgatcctgctggctctgctggtctatagcgccctcgttatctggagcgccagcggccaggatatcggcatgatggagcgtaaaatcggccagatcgccatgggtctggtcattatggtggtgatggcgcaaataccgccgcgcgtgtacgagggctgggcgccctatctctatattttctgtatcattttgttggtggcagtagatgctttcggcgccatctcgaaaggggcgcaacgctggctggatctggggattgtccgcttccagccgtcggaaatcgccaaaatcgccgtcccgctgatggtggcgcgctttattaaccgcgacgtctgccccccgtcgttgaaaaataccgccattgcgctggtgctgattttcctgccgacgctgctcgtggccgcacagccggacctcggtacttcaattcttatcgccctctccggcctgttcgtcctgttcctgtccggcctgagctggcgtctgatcggtatcgccgtggtgctggttgccgcgtttatccccatcctctggttcttcctgatgcatgattaccagcgtcagcgcgttatgatgctgctcgatcccgagaccgatccgctgggcgcaggctatcatattattcagtcgaagattgcgattggctccggcggcctgcgcggtaaaggctggctgcacggtacgcagtcgcagctcgaatttttaccggaacgccacaccgactttatctttgccgttctggctgaggagttagggctggttggcatcctggtgctgcttgcactctacgtgctgctgatcatgcgaggtttgtggattgccgcgcgcgcgcaaaccacctttggtcgcgtgatggcaggcggattaatgttgattttgttcgtttatgtcttcgtaaatattggtatggtgagtggtattctgccggttgttggcgtaccgctgccgctggtgagttacgggggctcggcactgatcgtgttgatggccgggtttggtatcgtcatgtcgatccatacccacaggaaaatgttgtccaaaagcgtataa

SEQ ID NO: 115098 - DNA, 1107 bp, Enterobacter cloacae
atgcgtaagcagtggctggggatctgcatcgcagcaagtttacttgccgcctgtacaagtgatgatggtcagcaacaggcaaccgtcgcgccgccgcagcctgcggtctgtaatggcccgattgttgagattagcggtgccgatcccgtttatgaaccgctgaacgccagcgtgaatcaggattatcagcgcgacggtaaaagctataaaatcgttcaggatccttcccgtttcagccaggctggctttgctgccatctatgacgctgagcccggcagcaatctgaccgcgtcgggtgaaaccttcgatccgatgcagatcacggcggcacacccgacgttgcctgtcccgagctatgcacgcatcactaacctggcgaatggccgaatgatcgtggtgcgtatcaacgatcgcggtccttacggcaccgatcgcgtgatctccctgtcccgcgcggctgccgaccgtctgaacacctcaaacaatactaaagtgcgtatcgacccgattatcgtggcgcaggatggttcactgtctggcccgggcacggcctgtaccacggtcgcgaaacagacctatgccctgcccgctcgcccggatctgagcggtggtatggggggcgcttcaacgccggcagagcccgcacagccgcagggtgaagtgcgtgctatcagcaacgatacgctgcaaagtgaagacgcgacaggcgccccggtgaaaagcagtggtttccttggcgcacccaccacgttagcgccgggcgtgattgaatcaaatgaacctgccccagcgcctgcgcccgtcgctgctgcacccgctacacaacccgccccggtgaccgcgcctgctgctacgcagacggcggcgcctgcgacggcgagcggcagctacgtggttcaggttggcgccgtcagcgatcggacccgtgcagagcaatatcagcagcgtttaagcaagcagtttggcgtgccaggccgcgttgagcaaaacggtgcggtatggcgtatccagatgggtccatttgccagcaaatcgcaggcagcgtccctgcaacagcgtttgcagagcgaggcgcagctccagtcgtttatcgctgttgcaaaataa

SEQ ID NO: 115099 - DNA, 1212 bp, Enterobacter cloacae
atgaagaccactttttctgctcgttttgtgcagcgcatggcgctcaccacggccctttgcgctgctgcgttctccgcagctcacgcggacgacctgaacatcaagaccattatccctggcgttccgcagatcgacgcggaatcctacatcctgattgattacaactccggcaaagttctggcagaacagaacgccgatgcccgccgcgatccggccagcctgaccaaaatgatgaccagctatgttatcggccaggccatgaaagcaggcaaattcaaagaaaccgacctggtgactatcggtaacgatgcgtgggcaaccggcaacccggtgttcaaaggttcatcgctgatgttcctgaagccaggcatgcaggttccggtctctcagcttatccgtggcatcaacttgcagtccggtaacgacgcctgcgtggccatggccgattttgcagcgggcagccaggacgcgtttgtgggcctgatgaacagctacgtctccgccctgggcctgaaaaacagccacttccagaccgttcacggcctggacgccgagggtcagtacagctccgcgcgtgacatggcactgatcggtcaggcgctgatccgcgacgtgccaaacgagtactctatctacaaagagaaagagttcaccttcaacggcattcgtcagaccaaccgtaacggcctgctgtgggacaacagcctgaacgtcgacggcatcaaaactggccacaccgataaagccggctataacctggtggcctccgccactgaaggccagatgcgtctgatctctgccgtgatggggggacgtacgtttaaaggccgcgaaacggaaagcaaaaagctgctgacctggggcttccgcttcttcgaaaccgtgaacccgctgaaagccggtaaagaatttgcctctgaacctgtctggtttggcgataacgaccgcgcttccctgggcgtggacaaagatctctatctgacgatcccacgcggtcgtatgaaagatctgaaagccagctacgtgctgaataccaccgagctgcacgccccgctgcaaaagaatcaggtcgtgggtaccattaacttccagctggatggcaaaaccatcgatcagcgcccgctggtggtgctggaggaaattcctgaaggcaatttcttcggcaaaatcattgattacattaagctgatgttccatcactggtttggttaa

SEQ ID NO: 115100 - DNA, 264 bp, Enterobacter cloacae
atgaaaaccaaacttaacgaactgcttgaattccctaccccttttacttacaaagtaatgggtctggcgaaacctgagctggttgatcaggtggttgaagtggtacagcgccatgcgccgggtgactactctccatcagtcaaaccgagcagcaaaggtaactaccactcggtctcaatcaccatcactgcgacacacattgagcaggttgagacgctgtacgaagagctcggcaatatcgaaattgttcgtatggtgctgtag

SEQ ID NO: 115101 - DNA, 642 bp, Enterobacter cloacae
ttgtaccaggataaaattcttgtccgccatcttgggctacagccttacgagccagtctctcaggctatgcatgaatttaccgatatgcgcgatgacaccacccctgatgaaatctggctggttgaacacttgccggtgtttactcaaggccaggcaggaaaagccgaacatttattgatgacgggtgatatcccggtgatccagagcgatcgcggtggacaggtaacctaccacggcccgggccagcaggtaatgtatgtcctgcttaacctgaaacgcagaaagctgggcgtgcgtgagctcgtgaccttactggaacaaaccgtggtgaacacgctcgctgagtacggtatcgatgctcaccctcgcgccgatgccccgggcgtctatgttggagagatgaagatctgttcgctggggctgcgtatccgtaaaggctgctcgttccacgggctggcgctgaatatcaatatggatctgacccctttccagcgcatcaacccatgcgggtatgccggtatggaaatgacgcaaatgcgccagtgggtcgataccgccacccctgagaatatccgccccgtgcttctgaagaagtttttagcgctgcttaacaatcctgactacgaatatattgctgcttaa

SEQ ID NO: 115102 - DNA, 954 bp, Enterobacter cloacae
gtggagcctactaatttaccagccaaacgcctgaatgaaaccagcggcgaagataagccgcaaattttccggactttacgtaatattgatctcaatttattgactatttttgaggcggtatatgtccacaaaggtatcgttaatgctgcgaaaattcttaatctcacgccctccgctattagccagtcaattcaaaaattgcgcgcgatatttcccgatcccttatttattcgtaaaggccagggcgtaacccccaccgcgtacgccacccatctgcatgagtacatcagccagggtctggaatcgattctgggcgcgctggatctcaccggcagttacgataagcaacgaaccatcaccataggcacctctccctctgtgggcgttctggtcatgcccgctatttaccaggctgttaaacagcatgcgccacagctgctgatccgcaacgtgcccgttaacgatccggaaactcagctggcacaattccagacggacctgatcatcgacagcaacagcttcgcggccagggcattagggcataacgttctctataccgactctctggcgctcgtgtgtcgtcagaatcatcctgcattgggcgcagctttgacgcctgaaaatttgcgtcattacgaacatgcaacctttatgtccgagggacagggtccggatccgctgcgccagcgtattgacgaactgttcccggaccgtctgatcagcttcagcagttacaatatgtttacccttgcggccctgattggcagcagcgatttgctctgtattatgcctgtgcgtctcttcactctgcttcaaaagtgctggccgctggagagcattccattgagtcaacttacgacggaatctgttgaaatctcactgcattacaacaagctaagcctgcgcgatccggtgctggaaaacgtcattaacgtgatccgccaggcgttctga

SEQ ID NO: 115103 - DNA, 966 bp, Enterobacter cloacae
atgagtaaacccattgtgatggaacgcggtgttaaataccgcgatgccgataaaatggcccttatcccggttaaaaacgtggctacagagcgcgaggcgctgttaagaaaaccggaatggatgaaaatcaaacttccggccgactcttcgcgtatccaggggatcaaagcggcgatgcgcaaaaatggccttcactctgtctgtgaagaggcctcctgccctaaccttgctgaatgtttcaatcacggtaccgcgacatttatgattctgggtgccatctgcacccgccgctgtccgttctgtgacgttgcccatggccgtcctgttgcgcctgacgcaaacgaaccgcaaaaactggcgcagacgattgccgatatggcgctgcgttatgttgttatcacctccgttgaccgtgacgatctgcgcgatggcggtgctcagcattttgctgactgtattaccgccatccgcgaaaaaagcccgaacattaagattgagacgctggtgccggacttccgtggccgtatggatcgcgcgctcgatatcctgaccgcgacgccaccagacgtattcaaccacaacctggagaacgtaccgcgtatctaccgtcaggtacgtcccggtgcagactacaactggtcactgaagctgctggaacgctttaaagaagcccatccgcatattcctaccaagtctggcctgatggtcggcctgggtgaaaccaacgctgagatcattgaagtgatgcgcgatcttcgccgccacggcgtcaccatgctgacgctgggccagtacctccagccaagccgtcaccacctgcctgtacagcgttacgtgagcccggatgagttcgatgaaatgaaagccgaagcgatggcgatgggctttacccatgccgcgtgcggtccgtttgttcgctcctcttatcacgccgatatgcaggcgaagggcgaagaagtgaaataa

SEQ ID NO: 115104 - DNA, 204 bp, Enterobacter cloacae
atgggtgagattagtattaccaaactgctggtggttgccgcactggtcgtcctgctgttcggtaccaagaagttacgcacgctgggtggagacctaggtgctgccattaagggctttaagaaagcaatgaacgatgacgacgcggcagcgaagaaaagtgccgaagatgacatcactgcacagaagctttcacacaaagagtaa

SEQ ID NO: 115105 - DNA, 789 bp, Enterobacter cloacae
atgtatgttgcagtagggcagttcgcggtgacgccggactggaatgaaaacgcggaaaaatgcgtctccctgatgcatcaggcgaagcaaaaaggggcgtcgttgctggtacttcctgaggcgttactggcccgtgatgatggcgatccagacctgtcggtaaagtctgcgcaaacgctggaaggggcgtttctgaaacgactgctggccgaaagcgttggcaacacgctcaccaccatcttgacggtccatattccgtcctcgccggggcgcgcggtaaacacgctggtggcgatacgtgagggtgccatcgtcgcgagctacgccaaacttcatctgtatgatgcgttcagcgttcaggagtcgcgcctggtcgatccggggagtgtaattccgccgctgattgaggtcgagggtgttaagattggcctgatgacctgctacgatatccgttttcccgagctggcgctgaacctggcattgcagggggcagaggtgctggttctgcccgccgcgtgggtcaaaggaccgcttaaggagcatcactgggcgacgctgctggcagcacgtgcgctggataccacctgttacgtggtagccgcgggtgaatgtggtaacaaaaatatcgggcagagcagggttgtcgatccgctgggggtgacggttgcggcagcagcggagacgcctgcgttattgctgacggagataatttccgcccgaatagcgcttgcgcgtcagcaattacctgttctgcgcaaccgcaggtttgcgccaccgcaattaatgtga

SEQ ID NO: 115106 - DNA, 384 bp, Enterobacter cloacae
gtgttacaactacttatagccgtttttattggtggaggcacgggtagcgttgcgcggtggctcttaagcatgcggtttaaccccctgcatcaggccattccgatggggacactggcggcaaatctgatcggggcgtttattattgggatggggctggcctggtttaatcgcatggccaacatcgaccctatgtggaaggttctgattacaactggtttctgcggcggcttaacaacgttttctaccttctctgcggaggtagtatttctgtttcaggaaggccggatgggctgggcgctgaccaacattgccgttaacatgcttggctcgtttgcgatgactgcgatcgcattctggttattttcctccgccagcggacattaa

SEQ ID NO: 115107 - DNA, 210 bp, Enterobacter cloacae
atgtctaagattaaaggtaacgttaagtggtttaatgagtccaaaggattcggtttcattactcctgaagatggcagcaaagacgtgttcgtacacttctctgcaatccagtctaatggtttcaaaactctggctgaaggtcagcgcgtagagttcgaaatcactaacggtgccaaaggcccttctgctgctaacgtaatcgctctgtaa

SEQ ID NO: 115108 - DNA, 699 bp, Enterobacter cloacae
atgtatcctcagattattcccaggaacgggatggtaattaggaataacacccatgctgttaagcgttcattcaagtattctgtgttaaggtctgcaccgaatactaaatatggtaatggcattgtgattgtacgaattaaatttcccctgattttattgtttattattgggcagttatcgtttgcgtctgcggttaatgcagacagcaatacagcggataaaggctggttcaccaccttcacggataacgtcgcgcaaacatggaatgagcctgagcattacgatctctatattccggccattacgtggcatgcacgttttgcctacgataaagaaaaaactgaccgttataacgagcgtccgtggggggccggcttcggtcagtctcgctgggatgaaaaaggtaactggcatggcctgtacctgatggcgtttaaggactcctacaataaatgggagcctattggtggctacggctgggaaaaaacctggcgtccgttatcagacgacaacttccgtctggggctgggctatacggcagggttcacggcgcgtgataactggaaatacattcctgttccggtactgctgccgcttgcctccatcggctatggtccggcaacgtttcaaatgacctacataccgggtacctataacaacggtaacgtttactttgcctggatgcggtttcagttttaa

SEQ ID NO: 115109 - DNA, 3117 bp, Enterobacter cloacae
atgattgccgctgtgattcgcgcctcgttgcgtaaccgcctgctggtgatcctggctgcgctgatgatggccggctggggctggtgggcggtgcagcgcgcgccgctggacgcgttgcccgatctgtctgatgtgcaggtcattatcaaagcgagttaccccggaaaagcgccgcaggtgattgaagatcaggtgacctggcccctgacaacctccatgttgtctgtgccgggagctaaaaccgtgcgtggtttttcaatgtttggtgacgcttatgtgtatgtgctgtttgaggatggcaccgatctctactgggcgcgatcccgggtactggaatatttaagccaggtacaggcgcagtttccgccgggcgtgaaggtgtcgctggggccagatgcgacgggcgtgggctggatctacgaatatgcgctgatcgaccgtagtggaaaacacagcctggcagatctgcgggcccttcaggactggacgcttaagttcgagcttaagacggtaccgaatgtatctgaagtggcaagtattggcggaatggtgcgtcagtatcagatcgtggcggacccggcgaagatgcgcgcgctgaatattacccacagccagctatccggcgcggtgcaggccgccaataaagagagcggcggcgccctgctggagatgggcgaagcggagtatatggtgcggacaacgggctatttgcgctcgctggaggattttcgcaatgtggtgatcgccacccgcgatggcgtacctgtcctgctgaaagatgtcgccaccattggcattggcccggagatccgccggggcgtggcggagcttaacggtgaaggggaggtcgctggcggcgtgatcgtgatgcgctacgggcagaacgcgctggaaacgcttcgtgcggtaaaagcgaaactgagcgagctgcaaaaaacgctgccgcagggcgtcgagattgttccggtctacgatcgttccacgctgattgaggaatcggtcaaaacgctgacgcacaagctgctcgaagagtttgccgtggtggtactggtgtgcgcgctgttcctgttccacctgcgctccgcgctggtggcgatggtctctctgccgctggggatcctcggtgcttttgtggtgatgcactatcagggcattaacgcgaatatgatgtcgctcggcgggatcgccattgccatcggggcgatggtggatgcggcaattgtgatgattgaaaacatgcacaaggtgctggagcagtggcggcatgataatccgggcaaggagcccgcgccgggggaatactggcgtctggcggaaaaggcggcggttgaagtgggaccagcgctgttttgcagcctgttaatcatcacgctgtcatttataccggttttttcgctggaagcgcaggaggggcgaatgttctcgccgctggcgttcaccaaaacctggtcgatggccgtggccgccgggcttgggatcaccctggtgccggtgctaatgggctttttcattcgcgggaaaatcccggatgagaaggcaaacccgatcaaccgcctcctgatccgcctgtatgagccgctgctggacaaggtactgaccttcccgaaaatgacgctggcactggcatgtctgctgctgatcgccacgctctggccgctgagccgcctgggaagcgaatttatgccgccgctggatgaaggggatttactctatatgccctccacgctgccggggatctctgctcgcgaggcatcgcggctgcttcagcagacggaccgcttgatcaaaagcgtaccggaggtcgcgagcgtttttggcaaagccggtcgcgcggagtcggcaaccgatcccgcgccattaaccatgctggaaacaaccattcactttaagccccgcgagcagtggcggccaggaatgacgccgcaaaagctggtggaggagcttgataaaaccgtgtcgctgccgggtattgccaatgtgtgggtgccgcctgtccgtaaccgcctggacatgctggcaaccgggatcaaaagcccggtcggcattaaggtgaacggcaataatattgccgacattgagcgcgtgtcccggcagattgagcaggtggtgaaggacgttcctggcgtctcctctgcgctggcggagcgtctggaaggcggacgctacgtggatattcgtatcgaccggcaaaaagccgcgcgctacggcgtttccgtcgatgaactgcaaagcctggtctccacgctggtcgggggtgaaaacattggcgaggtgatccagggacgcgagcggtatcccatcaacctgcgttatccccgcgatttgcgtgataacgtcgacacgttgcgggtgttgccggtagtgaccgccagcggtagccaagtggcgctgggggaattggccgatatcgtcgtgacggaaggcccaccgatgctaaaaagtgaaaacgcgcgcctttccagctggatctacgtggacttgcgcgggcgcgatctgaagtccgccgtggatgaaatgcaaaaacgggtggaggagaaggtggtattgccgcagggcgtgtctctctcctggtccgggcagtttgaatatctgaaacgggcgaccgcgacgctcaaaatagttttacctgtcacgctgatgattatattcgtccttttatggttaaccttcaggcggatatcaaatgtcctgataataatggggatattgccgttcgcgcttattgggggcgtgtggttactgtggctgcttgaatataatttgtcagtggcgggggccgttggctttatcgccctttccggagtggcggcagaattcggcgtaattatggttctttatttgaatcatgcgctcgataaatatcacaggctggagccagaagggggaaatacggtgctgatgcgggcgatccacgaaggtgccgtgctgcgcgtgcgtccgaaggtgatgacggtcgccactattatggcaggactgctgcccatcatgtgggggcgtgggagtggctcggaggtgatgcaacgtattgccgcgccgatgattggtggcatggtaacggcaccgttattgtcgatgttagttattcccgcactctacaaattgttacatcaacgttaa

SEQ ID NO: 115110 - DNA, 1200 bp, Enterobacter cloacae
atgaaaaaaacaacgttaatggcgattgccatcgcgatagctgccgctggcggctattttgtcggaaagaagcagacgcatcagccggctgcggctgcacaaccctctgaacgtaaggtgctttactggtacgaccctatggtgcccggtcagcgcttcgataagccgggtaaatccccctttatggatatggatctggtcccgcgctacgccgatgaagcacaggcggcgtcgggcgtggccatcagcactcaacagcagcaaaacctggggatgaaaaccgccaacgttgagatgcgccagctggtttcgccgttctcggcctttgccacggttgcaacggatgaacgtaacgtctcggtggtgtcagccccggccaatggcgtggtgtcaaaattgtttgttaatgcgccacagcagcaggtgaaagccggagaggcgctggcgcaactgtggatcccgcaatggaccaccgcccagcaggagtatctcgcggttcgtcagcttggcgatgccgcattgacccgcgccgcacgcgagcggctggcgttgcagtttatgccggaagaggtcattcgtttgctggagcgtagcggtaagccgcagaccacgctcaccctgcgcgctgaccgggcgggctatgtggtgaagctggacgtgcgggaaggggcgcaaatcaccgcaacggcgccgctgtttgagatcgccagcctcgatccggtctggctggtggtcgattacccgcaaacccaggcgcagtctctggcagtgggcagcaacgtggtagcaacgtcagaaagctggccgggggagcaattccacggcacggtcagcgaattgctgccgcagatggaggcgaccacgcgaaccctgaaagcccgtatcgtgctggaaaataccgcacataagctgaagccaggcatgtacctctccgtcaggcgtgcggaagagatgaaaggcccgccggtgctggcggtgccggaagaggcggtgattaacagcggagagtctgcgcgtctgctgctggccaccggggacggttatttccagcctgtgacggtgacaaccggcctgacggcgcagggctggacggcgatcctgtccggggtcaaagagggcgataaggtggtgacgtccgggcaattcctcattgattccgaagccagcctgcgtagcgtgatgccggaggtgacgccatga

SEQ ID NO: 115111 - DNA, 186 bp, Enterobacter cloacae
ttgcagcgtcaacggctggcggtactgacggcgcaatatcgctctggacagtcggcgcttccggccctgctggaggcgcgtcgtggcgtactggatacggaactggcggtgaaccaggcggagcgcgaaatggcgcgaacctgggctgccgtgaactggctgatcccgcaggagctggcgcaatga

SEQ ID NO: 115112 - DNA, 1047 bp, Enterobacter cloacae
atgaaacaacacacactgagcctgtggctcggtggggtgttgttcggcctgttaacctccgccgcgcaggcggagccgtggacgctcgaacacaccctgaccgaagcccagcgctactcggcagaactctctgccagccgtaatgaagcgcaggcgctggatgcgatggcggattccgccacgcaattacctgacccaaaactgaaattcggtatcgaaaacgtgccggtacagggcagcaacgatcggcggctgacgcgcgaagggatgaccatgcagaaggttggcatcatgcaaagctacgtcagctcagagaagcgggaacgtaaagcgcagacctttcaggcgcaggcgcgaagcgtgctggcaaaatccgaggccgtccgcgccgcgcttcagcgtgataccgcccaggcctggctggatctggcgctggcccagcaggcgctgaacacggccagaacgctggtccgcgaaacggaacgccagcggggcgtgcagaaggcgagcgtcggggcgggaagcgccacgccggacagcgtactggccctgcaaatgatcctcagcgccatgcgcgacaaagagacgctggcgcagcgggatgtgcagctggcgcaaagccgtctgctggagcttacggggcacgcgattacggcggttcgcggtccgctgccgcgctatcagcgtcttcctgccgatgaaaaaacgttgcaggaggggatcgtcaggcacccggaagtggaggccgcacgacgtgaagccgagaccgcgaaagcgcgttcagcgcaatctgccgtggcggcgatacccgatgtggatgtggaggtctattacgcccaccgcgccgaaggctatgacgatatggctggcgtgatgttcagcgtggatctgcctttgttccagtcaaaacgtcaggacaaggattacgccgccgatgtttcccgctcaatgcaggcggtggatcaactgacgctgctcaaacgtgaacacattgcccaggtgcaaacgctggtggcgcagtatcaggctgcgcaaacggtgtggtag

SEQ ID NO: 115113 - DNA, 294 bp, Enterobacter cloacae
atgcgtactatattcctttccgcgctggttggcgcgtccgtctctttcgcttcttataccgttcaggcaaaccagacctggcagggccacggcgtggttcagtcgatctctgacagcgccgtcatgctccggcacgaggccataccggaactaaaatggccagcaatgaccatgccgtttactttatctgccggcgccacgctgaatgacgccaaaccaggggatgaagtgaccttcacgcttgagcgtgcgggtgacggtttccagattatctcgctgacgccagcacgctaa

SEQ ID NO: 115114 - DNA, 402 bp, Enterobacter cloacae
atgcacgccagctggacatatcgcctgcgctttatcaaaaaacatctgctgatgtttttgctggcgtttggctggctgttgatccagagtcaggtggccgtcgcctcccatcaatgttcaatggatttgcgcggcgaggtggccaccatccagcatatggagatgatggcgcaaccggggccgcattatgctgccggtgcttcaccgctgtgtgaaaaacattgtgtgccggatcaggtacaaaaagatcctgcccagccgcatctggtggcgctgcctgccgccatgaccctgaccttaacgaccccagagtgctcgtctgcaagccattctgcgtggtccgttacccctcctgctgtggggccgccggcaacgatccgctactgccggtttcgggagtaa

SEQ ID NO: 115115 - DNA, 1368 bp, Enterobacter cloacae
atgcttacttttctcgaactcctcattggagtcgtggtcattgttggtgtagcacgctacatcattaaaggttactcagccaccggcgtgctatttgtcggcggcctgacgctgctgatcattagcgcgctaatgggtcatcaggttttacccgccagcgaagccagcaccggatataccgctaccgatattgtggaatatataaaaattctgctgatgagccgcggcggcgatctgggcatgatgatcatgatgctctgcggatttgctgcctatatgacccatatcggcgcgaatgatatggtggtaaagctggcttctaagccgctgcaatatattaattccccctatctgctgatggtcgcggcctatttcctggcctgtctgatgtcattagccgtttcctcagcaacgggccttggcgtgctgttaatggcaacgttgttcccggtaatggttaacgtcgggatcagccgtggcgcagcggcggctatttgcgcctctccggcggcgattattctctcccctacttccggtgacgtagtgctggccgcaaaagccgcggaaatgtcgttgattgacttcgccttcaaaaccacactgccgatctccatcaccgctattctcggcatgggcgtggcgcatttcttctggcagcgctatctcgataagaaagagaacgtcagccacgaaatgatggacgtcagcgaaatcaccactaccgccccggcgttttattccatcctgcccttcacgccgattattggcgtgcttattttcgacggcaaatggggcccgcagctgcacatcatcactatcctggtgatctgtatgctgctggcggccatcctggagttcgttcgtggttttaatacccagaaagtgttcacgggtctggaagttgccttccgcggtatggcggatgccttcgcgggcgtggtgatgctgctggttgccgcgggggtgtttgcccaggggctgagcaccatcggctttattcagagcctgatctctatcgccacctcgttcggctcggccagtattatcctgatgctggtgctggtggtgctgaccatgctggcggcgatgacgaccggctccggtaacgcgccgttctacgcctttgttgagatgatccctaagctggcgcactcctccggcatcaacccggcttacctgtccattccgatgcttcaggcctccaacctgggccgtaccatttctccggtatcgggcgtggtggttgcggttgcggggatggcgaaaatctctccgtttgaagtggtaaaacgcacgtcagtgccggtgctggttggcctgattatcgttattatcgccaccgaagtgctggttcccggcgctgcctaa

SEQ ID NO: 115116 - DNA, 810 bp, Enterobacter cloacae
atgttcaggaaggatatcgttatcccgtctggcgcagtagcgcttgcactctgtgtcttctcaattcaggcagatccgcttaagccaacccagtacggcgatttcgatcgctacgttctggccctttcctggcaaaccggattttgccagagcatggtcgaacgtaaccgtgacgaaccggaagagtgtcgcctgcaaaaagagagcagcaacaaaaccgattttctgaccgtccacggcttatggcccgcgctgccgaaatctattgccgctcgcggagtggatgaacgccgctggatgcgcttcggctgtgccactcgtccggttccgaatatgccggaagcaaaagccagccgcaaatgtgacgccgcagagaccggactatcgctaaccggcgcggcgaagctgaacagcgtgatgcccggcgcgggcggcaactcctgccttgaacgttatgaatacgcgaaacacggcgtctgctttggttttgatcccgacgcttacttcggcaccatggtgcgcatgaaccaggaagtgaagcacagcgcggcaggaaaatttctggcggaaaattatggcaaaaccgtccgccgcagcgacttcgatgcagccgtggccaaaagctgggggaaacagagcgtaaaagcgttcaagcttacctgccacggcaatccggcttatctgaccgagatgcagatctcgctgaacgccagcaccatcaacaacccgctctctgccggctcctttgcgccacagccgcatccgggcaactgcggcaaacagtttgtcattgataaagccggttactga

SEQ ID NO: 115117 - DNA, 324 bp, Enterobacter cloacae
atggctaaaaaactgattgcactgtgcgcctgcccgatgggcctggcacataccttcatggcagcccaggcgctggaagacgcagcgacggaagccggttatgaggtaaaaattgaaacccagggcgcggacgggatccagaatcgcctgaccccacaggatattgccgacgctgacattattatccacgccatcgcgatcactccggaagacaatgagcgcttcgaaacgcgcgacgtgtatgagattacgcttcaggacgccattaaaaacgcggcaggcaccctgaaagagatcgaagagatgattgcagcagaacaataa

SEQ ID NO: 115118 - DNA, 1251 bp, Enterobacter cloacae
atggctattaaaaaacgcagcgcggttcgcccggacagtcacgagggtgacacacttgccatcaaatccgcaccggttgccgccagtgcgtctttctggaaagagcttccacagcacattatgtcggggatatcccgcatggtgccaacgcttatcatgggcggggttatcctcgccatttcacagctcatcgcctacgtctggctggagatcccgcctgacaccggtattctcgacgcgcttaactcaggcaaattcaccggtttcaatctctcggtattgaaatttggctatctgaccgaatcgttcggcgggctgctgttcagcttcgccatcccgatgtttgccgcctttgttgccaactctatcggcggaaagctggccttcccggccgggtttatcggtggccttgtcgccacgcagccgacgctggtgctgaactttgatgcggaaaaactgacctggcttgccaccaaacccgtgccctccacgtttattggcgcgctgattatcgccatagccgcaggctatctggtcaaatggctgaatagccgtattaacgtaccgcagtatctgctggcctttaaaagcacctttctgatcccaatcctctcggcgctgtttgtgatgctggcgatgtattacatcatcacgccgattggcggctggctgaatgcaggtatgcggaccgtactgctggcggcgggtcaggcgggctccatgatgtacgccatcgggatggcggcggccacggcgatcgatctcggcggccccattaacaaagcggcgggatttgttggcctggggctgacaaccgatcatgtcctgcccatcacctcccgcgccgtggcgattgttattccgcccattggtctggggctggccacgctgattgaccatcgtctgaccggcaaacgcctgtttagtccgcagctttatccgcaaggcaaaacggccatgttcctcgcctttatgggcatcagtgaaggggccatcccgttcctgctggaaaatccgcttgcgacgctgccggcgtatatggcgggtgcgatcgcgggtgcgatgaccgccaccgcgctcggtgccgtgcagtggttccctgaatcggcgatctgggcgtggccgctggtcaccaatctgggggcgtacatgctcagtattgtggtcggggcggcgatcaccgcgctgttggtcgtgattattcgtaacagtctgcacaagcgcggaaaactcgctatcgacacgctgtaa

SEQ ID NO: 115119 - DNA, 1113 bp, Enterobacter cloacae
atggaattactgagaaggcttcatgcctggctggctgcggaaaaactggacggcgtgctcatctcttcgcgccagaataaacagccgcatctgggcatttcaaccggttcgggatatgtgctggtgacacaaaccgcggcacatatcctggtggatttccgttactacagcgatatcgcttcacgagcggcgggctatgagatgcacctgcttaacacggagaacccgtttgcgcaggcggtgaatcagattattgcgaaggaagatctcacccgtcttggctttgagggtgaatacgtgagctggcaaacaggcgtgctgtggcacgatacgctaaataccaacctttgcagcacctcgctagacgcgctgcggcagataaaaaccgctgacgaaatcgaccgtatccgtgcagcgtgcggcattgccgaccgcgccgcacagcacatccggcgtttcattcagcccggtatgcgcgagcgtgaagtcgctgccgagctggagtggtttatgaagcaggagggtgcggacaagccctctttcgacaccattgtcgccagcgggccgcgcggtgcgctgccccacggcaaagcctctgacaaagtgattatgcctggcgagatgatcacccttgatttcggcgcccaacaccaggggtattgctcggatatgacaaggacctttcttgtcgccgggcaaaacacgccgccggaggagcaccctctctatgcggtgtaccagatcgttctggcggcacaacaggcggccattgatgccatccgccccggcgtttcctgtcatcagatcgatagcgccgcacgttccgtgattgaacgtgcaggttacggtccgcagttcgggcataacaccggtcatgccattggtattgatgtccatgaaaatccacgtttttcccctaccgaccgcaccccgttgcagcccggcatggtgctgaccgttgagccggggatctaccttgaacaccagggcggggtacgaattgaagatgtggtgctggtgacggaaacgggcgccgaggtgctttataccctcgacaaacggctattgctgacgggagaacaagagtggacagagatttactgcacgccctga

SEQ ID NO: 115120 - DNA, 1041 bp, Enterobacter cloacae
gtggacagagatttactgcacgccctgagcgaagcagacgccattgcggcctcagagcaagaggtgcgcgacatcctgctcagtgaggcgcaaaaataccataaagaggttcagtttgatgggctgggttccgtgcttatccgcgtcaaccagagccggggcccgaaggtgatggtctgcgcccatatggatgaagtcggttttatggtgcgtagcgtctcgcgcgaaggggccattgatgtcctgcccatcggcaacgtgcgcatgatggcccgtccccttcagccggtgcgcatcaccacgcgtaacggggaaaaaataccgggcctgctggatggagatctgaaaggagaaaacgttgacaatttgcgtgtcgacattggcgcgacgtcggcggaggaggtgttcgccgccggtatcgacgcaggcgaccgcgtgacgttcgatacaccctttcagacccttccccacaatcgggtgatgggtaaagccttcgacgatcgtctcggctgttacctgctgattgcgctgctgcacgagctgcaccagacgccgctcgactgcgagctttggctggtggccagctcaagtgaagaggtcggcctgcgcggcggccagaccgccacgcgcgccattcatcctgatatcgcgctggtgctggataccgcctgctggtcaaaaaatttcgattatggcagcgccaaccatcgccagatcggtgcgggcccgatgctggtgctgtacgacaaaacgctcatcgccccagccaaactgattgcgctggctgagacgatcgcgcgctcgcaagggatcccgctgcaaaaagacatgttcagcaacggcggaacggacggcggggcgatccatctctccggcactggcgtgccgactcttgtgcttggtcccccgacccgacacgggcactgcgcggcatccattgccgacgaaaaagacattcatcacacccaacaactgcttgtcgcgcttgtggcatgcatgaaccgtgagaccgtggatcatctgacggacttcagatgctga

SEQ ID NO: 115121 - DNA, 2496 bp, Enterobacter cloacae
atgctttcaattgaatttttctgcccactgcccaacggcctgcatgcgcgtccggcctgggcgttaaaagagcagtgcagcgcatggcgcagcgacatccgttttatcaacagacggcttaacactcacgcggatgccaaaagctcgctggcgctgatcagtaccggtacgctgtttaatgacagctgcgtgctggaaattaacggcagcgacgaggagcaggcccgacgcgtgctggaggcgtatctcaccggcgcgtttatcgacagcgacagtattccctccggcgacgcgccgcacgttgcgcatcccctgccccgttcgcttgtaaggcttgctccccaccttcagcacggcattacgctcgccagtggcatcggggctggcactctgcgaggctggcagagcgataacctcaaacgttattgtcagatccccgcctcgccggaagatattacccgcctggaacacagcctggcgacgctggctgaacagctcaaccaccgtctgcgcgggctggacggcgagagtaaaaccattctcagcgcgcatctttcgctgatccaggatgaggagtttggcggcaccatacgccgactgatcgccgaggagcggctaagccttgcggaggcgatcattcgtaacatggagctgatctgcgacaagctgtcgctctccgccagcgactacctgcgtgaacgcgtcagcgatattcgcgacatcagcgagcagcttcttaacattacctggccggagttacagcaaacctccgcattcaccctcagcgcccccaccattctggtggcggaagatctgacgcccagccagtttctcagcctcgacacgcagtacctgaaaggcatggtacttgaaaaaacaggccggacgtcgcacacgctgatcctggcacgcgcggcctccgtgcctgtgctgagtggtttaacggtcgcctcgctggcgccgttgatgggaaaagaggtcattctggacggcatctgtagcgtgctggtcgttgaacccaacgacgcggtgaatgattactacagcgtggcgcagcgccttgccgaccgacgccaccagcagcagatcaaagatgcgggtcttccagcgctcacccgcgacaacgtaccggtagagattgccgccaacatcggcagcgcgctggaagcgcccggggcgtttacctgcggcgcgcagggtatcgggctgtttcgcactgaaatgctgtatatggacagagactccgcgccggacgagcaggagcaattcgaagcctatcagcaggtgctgctctccgcgcagggcaagccggtcatctttcgcacaatggacatcggcggcgataagcagatcccttacctgaacataccccaggaagaaaacccgttcctcggctatcgtgccgttcgtatttatcccgaatttgccgatctcttccgcacccaactgcgcgcgatcttacgcgcaggtgccagcggcaatgcgctgttgatgatcccgatggtgcacagtctcgatcagattttatggatcaaacaggagctgcaaaacgttcgtgacgccctggcctcacaggggttacgtcacaccgcgcacctgccgctggggatcatggttgaagtgccttcagtctgctttatcatcgatcacttctgcgaagaggtggatttcttcagtatcggctcgaacgatatgactcagtatctctacgctgtcgatcgcaacaacccgcgcgtttcggcgctgtataaccccatcacaccatcttttttacgcatggttcgccagatagtcaccgcagcgcatcgtcacgggaaatgggtcggcatttgcggggaacttggcggagagcagcgctacctccctcttctgcttggtctgggcttagatgagttcagcatgagcgggccgcgcatccctgcggtaaaaacccagctgcgtcagctggacatggcggcctgccgggcgctggcagataaggcctgcgacagccgcagcgcagaggaaattgaagccctgctggcggatttcacaccggaagcgccgccgcgtcccttgctggcgctggagactatcgtggtcaatgagccgctgacctcaaaagagcaggtgcttcagttcttatgcggaaatcttgcgattcatggcaggaccgaaaacccgctggagcttgaagaagatctctggcagcgcgaagagattgtcaccaccgccgtcgggtttggcgtggcgatccctcacaccaaatcgcaatggatacgccactccagcatcagcattgcacgcctggacagggcgattgactgggagtcggatttgggcgacgtcgagctggtgatcatgctgacgctcggcgctcaggaagggattaatcacgtgaaggtctttccccagctggcgcggaagctggtcaataaaacgtttcgcgagtcgctgtttgcagcaacgacgccgcaaagtatcctggatctgctgaacgctgaaatcacgttctga

SEQ ID NO: 115122 - DNA, 855 bp, Enterobacter cloacae
atgcgcgcaaccctgttgcccgccgatcagcagttttttgccgatctgttgagcggcctggtgctcaacccacagcagctggggcgagtctggtttgctcatcgtggcgcgtctgacgctgtcggaagcgtgagccgcgactggccacggcttgacgtcgttcttcgcggggaatatggcaacagactggttgccgggcagcagaccctccgccagggggaaatgctgttccttcccgcccaggccgccagcgtcccggtgtttgaacgaccggtcatgctgctgagcatcctttttgcgccgtcgtggctggggctggtgtttcatgattcccgtcacggccaatcggtgcctgcacagcgacacgttgagcttcctcaccctgaacgaggcgaatgtgctgcgatgctgatggccctgacgcacctgagcgcttccccgcaggatcaggccattattcaaccgctggtgctgagcctgctgcactggtgccggaaagtggtgtcttcgctgcctgaaccgggactgtcgcgcggggatttcctctatcagagcatttgtaactgggtgcaggaaaactatgctgaatccctgtcgcgggacagcgtcgccgcgctgtttaatatttcggctaaccatctgtcacgcctgttctcccaacaggggacgatgagttttgtggattacgttcgttgggttcgtatggcgaaggcgagaaccatcctgcaaaaataccacctgccggtgggggaagtggcgaagcgctgcggctatgccgatagcgactattttagccgtctgttccggcgccagtttggcctgacgccgggggagtatcgcgcacgctttcagtga

SEQ ID NO: 115123 - DNA, 621 bp, Enterobacter cloacae
atgtacttttaccaaccgtctcaggggcacggcctgccgcacgacccgctgaacgccattatcggtccacgtccgattggctggatctcatcctgtgataaggccggtcaactgaaccttgccccgtacagcttctttaactgctttaactatcgcccaccgatcattggtttttccagcaacggctggaaggatagcgtgcggaatattaccgaaacgggggagtttgtctggaacctcgcaacgcgcgatctggccgaggcgatgaatgaaacctccgccacgctccctcatggcgaggatgaatttacctttgcaggcctgacgcccgtagccagccagcttgtgagctcgccgcgcgtggcggaaagcccggtgaatttcgagtgtcgattgtcacagtgcattcagcttaccggcgcggatgggacgccgattgatacctggctggtgctcggcgaagtcgtgggcgtccatatcgccgaaagtttgctggaagaggggatttaccagaccgcgaaagcgcagcccattctgcgtgcgggtggaccgacggcctactacgccatcagtgacagccatcgcttcgacctggtacgcccggatgcgcgcagggggtga

SEQ ID NO: 115124 - DNA, 411 bp, Enterobacter cloacae
atgtccagacctacgattatcatcaatgaactcgacgcagaacgtattgaccgactgttggagaaaccagaattcgcctcgctgccggtagccgatgcgctgaacgaagagctcgaccgggcgcagatgtgtacgcctgagaccatgccgcatgatgtggtcaccatgaacagccaggtgaagttccgcaacctgaccaccggagaggagctcactcgtacgctggtctatccggcgcagatgaccgatagcagcacgcaactgtcggtgctggcacccgtgggcgcagcgctgcttggactgcgcacgggcgataccatccactgggaactcccgggcggcgcctcagctcacctggaagtgcttgagctgctctaccagcccgaagccgctggcgattacctgcgttaa

SEQ ID NO: 115125 - DNA, 1239 bp, Enterobacter cloacae
atgaaagctctcacctatcacggtccacatcatgttcgggtcgataatgtccccgatccgggcatcgaacagcctgacgatatcatcctgcgcgtaacggccacggcgatctgtggttctgatttgcatctttatcgcggaaaaattcccaaggtccagcacggcgatatctttggtcatgaatttatgggcgaggtggtggagtgcgggagcgaagtgaaaaacgtgcagaaaggtgaccgggtggtgatcccgtttgtgattgcctgcggtgactgcttcttttgccagatgcaacagtacgcggcctgcgaaaacacgaatcgcgggcagggcgcggcgctgaacaaaaagcaaattcccgcccctgccgcgctgtttggctacagccatctttacggcggcgtgccgggcggacaggcggagtatgtgcgcgtcccgaaaggcaacgtggggccgtttaaagtgccccagctgctgtctgacgacaaagcgcttttcctgtcagatattctgcctaccgcctggcaggcggtaaaaaatgcgcagatccagaaaggctccagcgtcgccgtattcggggccgggccggtggggttactgaccattgcctgcgcgcggcttctcggcgcagagcagattttcgtggttgaccatcatccctatcgactgcggtttgcccaggagcgctacggcgcgatcccgattaactttgatgacgataacgacgcggcggagaaaatcattgagcaaacggccggacagcgcggagtggatgcggtgattgatgccgtcgggtttgaggccaaaggcagcaccacggaaacgatcctcagtaacctgaaaattgaaggcagcagcggcaaagccctgcgccagtgcattgctgcggtgcggcgcggcggcgtggtcagcgtgccgggcgtgtacgccggttttattcacggcttcctgtttggcgatgccttcgataaagggctgagctttaagatggggcagacccacgtccatgcctggctgggagagctgctgccgctcatcgaaaaagggctgcttaccccagaagatattgtgacccactatcttccgctggctgatgcggaacgcgcctataagatcttcgaaaaacgggaggaggagtgccgcaaggtgatcctggtgcctggcgcagacaccccggaggcagcgcagcagaaagtgaagggactggtgaatgccttccccggcggcgttgtgtga

SEQ ID NO: 115126 - DNA, 429 bp, Enterobacter cloacae
atgtatcaaacaatcattatgccggttgatgttttcgaaatggaactgagtgataaggctgtacgtcacgcggaatttctcgcgcagcaggacggagttattcatcttctgcatgttttaccgggctctgccagcctgagcctgcatcgtttcgctgctgatgtgcgtcgttttgaagagcatttacagcatgaagccgagacacgcctgcaaaccatggtcgggcacttcagcatcgatccttcccgcatcaaaacccacgtccggttcggtagcgtgcgcgacgccgttaatgagctggcgggggaattaaatgccgacgtggtagtgattggttcacgtaacccttccatcaccactcacctgctggggtcgaacgcctccagcgtgatccgccacacccacattccggtgatggtcgtgagataa

SEQ ID NO: 115127 - DNA, 1566 bp, Enterobacter cloacae
atgctcgacgctaacatgaaaacccagctcaaggcctaccttgagaaactgaccaaacctgttgagctgattgccacgctggacgacagcgcgaaatcggcagaaatcaaagcgctgctgacagagattgctgagctgtcgccgaaggtgaccttcaaagaagacaacacgctggcagtccgtaagccttctttcctgatcgccaacccagggtctgaccaggggccgcgtttcgcgggctctccgctggggcacgaatttacgtccctggtgctggcgctgctgtggaccggtggtcatccgtcaaaagaagcgcaggcgctgctggagcagatccgcgatatcgacggtgattttgagtttgaaacctattactcactctcctgccataactgtccggacgtggtgcaggcgctgaacctgatgtcagtcctcaacccacgcattaagcacacggcgattgacggcggtacgttccagaacgaaatcaccgagcgcaacgtgatgggcgttccggcggtttacctgaatggtcaggagttcggccaggggcgtatgaccttgaccgaaatcgtcgccaaagtggataccggcgcagaaaaacgtgcggcggaagagttgaaccaacgcgatgcgtacgacgtactgattgttggctccggcccggcgggcgcagcggcggcggtgtactccgcacgtaaagggatccgtaccggtctgatgggcgagcgtttcggtggtcaggttctggataccgttgacattgaaaactacatttccgtgccgaaaaccgaaggccagaagctggccggggcgttgaaagcgcacgtcagcgactacgacgtggatgtcattgatagccagagcgccagcaaactggttccggccgcggtcgagggtggtttgcaccagattgaaacggcgtccggcgcggtgctgaaggcgcgcagcgtgatcattgccaccggcgcgaaatggcgcaacatgaacgtcccgggcgaagatcagtatcgcaccaaaggcgtgacctattgcccgcactgtgacggcccgctgttcaaaggtaaacgcgtagcggtgatcggcggcggtaactccggcgtggaagctgctatcgatctggcgggaattgttgaacacgttaccctgctggaattcgccccggagatgaaagcggaccaggtgttgcaggataaggtgcgtagcctgaataacgtcgatattgtgctcaatgcccagacgacagaagtgaaaggcgacggcagcaaagtgaccggtctggaataccgtgaccgcgtgagtggcgatattcacagcgtggcgctggcagggatctttgttcagattggcctgctgccaaacaccacctggctggaaggcgcgattgagcgcaaccgcatgggcgagatcatcattgatgcgaaatgcgaaaccagcgtgaagggcgtatttgcggcgggcgactgcaccaccgtgccgtacaaacagatcatcatcgccactggcgaaggtgcgaaagcgtcgctgagctcgtttgattatctgatccgcaccaaaaccgcataa

SEQ ID NO: 115128 - DNA, 564 bp, Enterobacter cloacae
atgtccttgattaacaccaaaattaaacctttcaaaaaccaggcgttcaaaaacggtgagttcatcgaagtaactgagaaagataccgaaggccgctggagcgtgttcttcttctatccggctgacttcaccttcgtttgcccgaccgaactgggcgacgtggcagaccactacgaagaactgcaaaagctgggcgtagacgtttactctgtttctaccgatacccacttcacccacaaagcgtggcacagcagctctgaaactatcgcgaaaatcaaatacgcgatgatcggcgacccgactggcgccctgacccgtaacttcgacaacatgcgtgaagatgaaggcctggcagaccgcgcgaccttcgttgttgacccgcagggcattatccaggctatcgaagttaccgctgaaggtatcggccgtgatgcatctgacctgctgcgcaaagtgaaagcggctcagtacgttgcttctcacccaggcgaagtgtgcccggcgaaatggaaagaaggcgaagcgacgctggctccatctctggacctggtcggcaagatctaa

SEQ ID NO: 115129 - DNA, 921 bp, Enterobacter cloacae
atggccaacctctacgacctaaaaaaattcgatctcaatctgttagtcatcttcgaatgcatttaccaacatctcagtatcagtaaggctgccgagacactttatatcacgccatccgccgtgagccagtcgctgcaacgtctgcgtggccagctcaatgaccccctgttcatccgctcaggtaagggaattacgccgaccacggtgggcaccaacctgcatcatcatcttgaacagaatctcaaccaaattgagcagacgatcaacatgatgcatcactcggacatcaagaaaaagttcgttatctattgctctcaaatgatgtcgcccggctatatgctcgaaccaatgaagctgctaatgtcagaggaaaattacgagatagaacaacgagatatgcttatctctccggaatccgcagaggacctgctcgcctaccgtaaagccgacctgatctttactattgccccaattaagaatcgctctgtggtgtgttctcactttgccacggtgccaatagcgttaatctgccgagaaaaccatccaagactcgccgatacggtcagtcttgaagcgttataccgggaaaaattcaccttttaccagagtgcgcacccgggcgttaaagagttccagaatcgtgccaatgaccttttcccggaaagagatattgcttttcgcacggactccatcatttcgctaatctccatggtcagttcatctgatctgttaggctttatacccgtatcaatctatgaagcctataaagagacgttaaaaataaaacggatcgccgacccatttgaattgcccgaaatacatgtctatatgctttacagccgttcatcgctgaacagcagcgttttttcaacgttcattgagaaaatgcataaactctgtctttccgctccatctgcgtaa

SEQ ID NO: 115130 - DNA, 1224 bp, Enterobacter cloacae
atgtcgatctataaaatccctttacaggaaaatgttttagacgcttcagcggaacgcatagactggacgctaaacaatttctccagggtatgcgtttccttttccggtggaaaagattctaccgtgatgctgcatctcgttgcccagcaagcacggcaattaaagcgaaaaatagatgtcatctttctggactgggaagcgcaattctcctcaaccattcagcatgttgacacgatgagaacgcagtatcgggatgttatccatcagttctggtgggtagcgcttccgctcacgacccagaacgccctgtcacagtttcaacctgaatggcagtgctgggaacccgggacaaactgggttcgccagccaccggaagatgccattaccgattatcactatttcgatttttatcagcagggaatgacgtttgaagtcttcgtgcgagagtttgccgaatggtatgcgcaaaaacgtcctgccgccgtcatggtggggatccgcgccgatgaatcctacaaccgctttctggctatcgcgtcggcacgtaagcagcgcttttctgacgataaaccctggacgaccgtcgcaccgggcgggcacacctggtatatctaccctttgtacgactggaaaaccgccgacatctggacgtggttcgcgaaatcgaaatgttgctataacccgttatacgacctgatgtacaaggcgggggtgccgccgcgttatatgcgcatctgcgaaccgtttggcccggaacagcgtcagggcttgtggctctatcatgtcattgaacccgaacgctgggcggcgatgtgtgagcgtgcctgcggggtgcgcagcggcggtatttatgccgggcacgataaccatttttatggccaccggaagatcctgaaaccagaccatcttggctggcgcgaatacgccatgctgctactcgacagcatgccgcaaaatacggcggaacattaccgcaataaaatcgcggtttatctccactggtatcaaaagcgaggcatgaacgatattcccgatacgcaggagggtgacattggtgcaaaagatatcccctcctggcgacgcatttgtaaggttttactcaacaatgactattggtgccgggcactttcgtttagcccaaataagcccaaacactatcagcgctacagcgacagagtgaaagcaaaacgcaaggaatgggggattttatgcaacaacgaataa

SEQ ID NO: 115131 - DNA, 627 bp, Enterobacter cloacae
atgcaacaacgaataatcaccgaaatggaaacgtaccttcaggcactttctgaggaagagcgaatagccgctattaatgcgtttcgtcaggcattacatgaaatcagcccttttcgcgatcagcccgtcgattgcgtattgtggataaaaaagacaaacatcagcgctaacgattacaacccaaataacgtcgcgccaccggaaaagcggctgctcagcaagtcactggagctggatggattcacacagcctatcgtggtgacggaaaatgcgccacagcactacgaaattgtcgatggttttcaccgccatgatatcggcagtaaccgggcgaccctgaagcgccagcttaagggttaccttcctgtcacctgcctgcgtaaagcgcggcaggaaaagttcgaccgcatggctgcgaccattcgccacaaccgcgcgcgcggacgccaccagatcaacgccatgtcagaaatcgtgcgcgagctggtgcttatgggctggagtgagcagaaaattggccaggagttgggtatggacagcgatgaagtactgcgtctgaagcagatcaacggtctgctcgaactcttcgcagaccgtcgtttttctgaagcctggacggtgaaatag

SEQ ID NO: 115132 - DNA, 1161 bp, Enterobacter cloacae
atgagcaataacccgttgatcccacagagtaaacttccaaatctcggcacgacgatttttacccagatgagcgccctggcgcagcagcacaacgccattaacctctcacaaggtttcccggattttgacgggccgaaatatttgcaggagcgtctggcgtaccacgtggcgcagggagccaaccagtacgcgccgatgaccggcgtgcaggcgttgcgtgaagccattgcggataaaacggctgagctgtatggctataaacctgatgcgaacagcgatatcacggtaaccgcaggggcgaccgaagcgctgtatgcggcgataaccgccctggtgcgtacgggcgatgaggtgatttgttttgacccgagctacgatagctacgccccggcgattgaactggccggcggcgtagtgaaacgcgtggcgctccagccgccgcattttcgtccggactggcaggcgtttgccgcgctgctgagcgataaaacccggctggtgatcctgaatacgccgcacaacccatcggcgacggtgtggcagaagagcgattttgccgccctgtggcaggccatcgccgaacgtgaaatctatgttctgagcgacgaggtgtatgagcatatctgcttcgccgaagaggggcatgccagcgtgctggcgcatccgcagcttcgtgagcgtgcaatcgcggtatcgtcatttggcaaaacctaccatatgaccggctggaaggtcgggtactgcgtggcgcccgccgccatcagcgctgagctgcgtaaagtgcatcagtatctgacgtttgcggtgaacacacccgctcagctggcgctggcggatatgctgcgcagcgaacccggacactaccgtgagctaccggatttctaccgtgcgcgtcgggatcggtttgtggctgcgttgagcaaaagccgtctggagattttaccctgtgaagggacctatttcttgctggccgactacagcgcgatttccgatctggacgacgtgagtttctgccagtggctgacgaaagaggtgggcgtggcggccattccgctgtcggtgttctgcgccgatcccttcccgcataagctgatccgactttgctttgcgaagcaggaatcgacgctgctggcagcggcagcgcggttaaacgcgctctga

SEQ ID NO: 115133 - DNA, 615 bp, Enterobacter cloacae
atgacagacaacctgcaactcacacacctggtcgaggcctgccgctggattggcgctaaaggctgggcgcccgctaccggcggcaatatgtccgtgcgtcaggatgaacacctgtgctggctgagcgaatccggaaaagataaaggcagcctgaccaccgccgattttctacaggttgaaatcgccaccaaccgtgcgccgtctggccgtaaaccgtcggcagagaccgggctgcataccctcatctatcgcctgtttcccgaggctaacgccgtcctgcacgttcacactgtcaatgccacggtgctgtcgcgtctggtcaacgaggccgagctgaagatcaccggtttcgagatgcaaaaatcccttaccgggcagaccacgcaccaggatacggtggccatcccggtgtttgataacgaccaggacatcgacgccctcgcctcgcgcatcgcccattacgcgcaggaacgcccgcttaattatggttttcttctgcgcggtcatggcttaacctgctggggacgcgacgtggccgaagcccgccgtcatctggaagggttagaattcttatttgaatgcgaaatgcgtttacgacaatgggagagagtatga

SEQ ID NO: 115134 - DNA, 690 bp, Enterobacter cloacae
atgattcgcgcgattgtgacggatattgaagggaccaccagcgatatccgttttgtccatgatgttttgttcccctacgcgcgtgagcggctggcggccttcgtgaccgcgcagcagtacgccgagccggtcaaatcgattctggacaacctgcgcgatgaaatcagcgctccgcatgccagcgtcagcgatctcatcaacgtactgtttacctttatggatgaagaccgcaaatcgacggcgctcaaagccctgcaaggcatcatctggcaggacggttacgtcaacggtgactttaccggacacctctatcctgacgtactgcccgcgctggaaaaatggaaggcgcaagggattgatctctatgtttattcctctggctccgtcaccgcgcagaaactgttatttggctacagcgacgaaggtgatattactcatctgttcagcggctattttgatacccacattggcgccaagcgcgagatgcagtcttatcaaaatattgcggcgcaaacgggcattgccccgtcgcagatcctgtttctgtcggatattcatcaggagctggacgcagctgagcaggcgggttttcgcaccctgcaactgattcgcggtgaagatgacggcgcaagccatcatcatcagatccaccagtttgacgagattaatccggagcaaatcccttcatga

SEQ ID NO: 115135 - DNA, 543 bp, Enterobacter cloacae
atgagcgcattgaccatttattccgataaagacgccagtcaacaccagtggcacagcgccgacgccgccgagattgcccaacagctcaacgccaaaggcgtgcggtttgaacgctgggcggcggatcgcgatttagggcacgatcccgcgcctgaagccgtgatcgcggcctatcagcatgcgatcgacaagctggtggcagagaaaggttaccagagctgggatgtgatcagcctgcgcgccgacaatccgcagaaagaggcgctgcgcgcgaagtttctgaacgaacacactcacggtgaagacgaagtgcgctttttcgtggaaggggcgggattgttctgcctgcacatcggcgatgaagtgtatcaggtgctgtgcgagaaaaacgacctgatttccgttcccgcgggcacgccgcactggtttgatatgggctcagagccgaactttacggcgattcgtattttcgataacccggagggttgggtggcgcagtttaccggggatgcgattgcggatgcatacccacgcctaaaataa

SEQ ID NO: 115136 - DNA, 1671 bp, Enterobacter cloacae
atggcaaaaaatccaataataatacgacaaaacttgaggattggcgaactcgatgccgaatccgatacacaattacttgatgaatgctttgtagatagtggatatctatcaaaattactagatactaatgatacatcgtctattgttgtaggaagaactggagcagggaaaagcgcattattgcacaaagtaatgaataaagcatatagatacaagaagcttgatcctaacgatatatcaatccgttttcttgagcactctgatattatttctttttttgaagcgctagacataaatttagatttattctataaaatactctggcgacacatacttataatggagtttttaaaaatacgtcatgatataagcagcgagagtgacacaagaaatttcctcaccagcttagctagttttttaagaaaagatgaaatcaggaaacgcgcattagaatattttagagaatggggtgataaattttggattgacacagacacacacctgagagaaataacaaaaaaacttgagaatgacactaaagccaaaataggagcagcacttcatggcattgaattaaatgctgaggcagccaagagaatatctgaggaagataagcatgaaataaagaaaagagcttctgaggttgttagtggaatgcaaattcaaaaattaaatgaagttctcgatatgcttgcagaacattcattctcagatcttcaaaagaaacattacattgttatagatcagcttgatgaaaactgggccgaaaacaacactcgatataaattcataagagcattaattgaagagataaaagtattcagacgtatcaagaacgtcaagataatagctgctttaagacatgaccttcttaaatctgtattcaatatcacaagaggctctggatttcaagaggagaagtacgaatcatatattcttgatcttcaatggaccgcaaatcaacttaatgagttagtttcaaagagaatccaagaggttttcaaaaaacaatatacaagagaaaacgtcgaaattaatgatcttttcccatcccccaaaggagggagtaagggaatgttgccaatcgagtatattatagagagaacactatatcggccaagggatgttttacagttcgtaaatgaatgttttaaaatagcactcaacagagaacgaatctcctgggattccattcataaagctgaaagtgtttattcagaaaaaagattgcgttctttaaaagaagaatggggagatatatatccatctttcgaagaaactatagaaatcctcagagaggttccagaaaaattcacccgaacacttattcctaaaaacaacatagaatctgtagcatcggaactcgccattcaaaatactaatgacccatgcgcaatcatcgcttctaaaatgctcaatagcgaagtaagagaatctgatgtcattaacgagatatttttatgcttatacaatattagtgcgataggattcaaagttagccccttaactccatataaatggtctttcagagatagtggtcctgtaaataaagctgaaataaagagggcaagtcatatcaaagtacataaaatgttgcataaagcattagatataaaaattgcgatatctgatatttataataaagatgatagagatgacgagatagattga

SEQ ID NO: 115137 - DNA, 240 bp, Enterobacter cloacae
atggcctcagtttactcggatgaataccagcgtgttatcaatgcgttgaagaaagctcgtaaagagaaggggattactcaggcccagcttgcggaggctttagggaaaccccaatcgtttatcgctaaagtggaaagtggtgaacgcaggttagacgtggtggagtttgtgcatctggcgagattacttagcttaagtaacgaagaggtccttactattttacaatctttaatatgttaa

SEQ ID NO: 115138 - DNA, 273 bp, Enterobacter cloacae
atgcgtcagcagaactggcactcagccgatattatcgccgcactaaagaaacatggaacaagcctcgcagccttgtctcgaaaggctgggctttcatcatccacactggcaaatgcgcttacccgaccatggcctaaaggtgaattgcttatcgctcaggcgctagacattccgcctgatgtgatatggccggaaagatattttgatgaaaagggagcgccagtatttcgtcagatgaggaatacaaaaaagagaaatttgtcttcaacatga

SEQ ID NO: 115139 - DNA, 480 bp, Enterobacter cloacae
gtgacgctcgatcctgacacagacttaaaactggagcgcgtggtggatgcaccgcgcgacctgctgtggctctgctggaccacgccggaccacatcaaaaacttcttcatccctgcaccgcataaggtgatcgactgcgacctcgatctgcgcgtgggtgggcggttcaataccatatttgaggtggatgggcagcggatggataaccggggcgtgtttcttgaaatcgacccggggaacaagctggtctttaccgacggttataccgagggctggaagcctgccgaaaagccgtttatgacggcgatcctgctgctggaggacgttggggagggcaaaacccgctacacggcgattgcgcgtcatccgacgaaggaaatccgtgagcagcatgagcaaatgggcttccacgaggggtggggcgtggtgctggatcagctggtggggtatgtgaagtctcttcaaccccctctcccttga

SEQ ID NO: 115140 - DNA, 1017 bp, Enterobacter cloacae
atgcagacattacagacgaccagcctgcgggtggcggataatcagctctttattctcgaccagcaggcgcttccacaggagaaacgctggctggatgcctcgacggtcgaggcgctggtcgggcacatccacgccctgcgggtgcgcggcgcgccgctgattggactctctgcaagcctgctgctggcgctgttagcggaaagcggcaaaagccgcgacgagctggcggtggcgctggaaaccctgcgcgcctcccgcccgacggcggtgaacctgatgaataacctcgatcgcatgaagattgcgctgtggcaggaagattatattccggcgctggtggctgaagcgctgcggctgattgacgaagacaaacggctctgtgacgctattgccagtgcgggcagcgcgctggtgaagcccggcagccgtctgctgacccactgcaacaccggcgggctggcgacggcgggcgtcggtaccgcgctgggggtgattgctcgcgcgcatcaggaaggcaaggtaagcaacgtctgggtggatgaaacccgtccgctattgcagggcggcaggctgaccgcgtgggaactcggcgagctgggcgtaccgtatcagctgattaccgactccatggccgccagcctgatggcaaaagggcaggtggacgccgtgtgggtgggtgcagaccgcattgccgccaacggcgacgtggcgaacaaaatcggcacctattccctggcggtgctggcgaagtttcacggcattccgttctacgtcgctgccccgcaaacgaccctcgacccggactgcccgaacggtgacgcaatcccgattgagcagcgcgcggccagtgaagtgacgggcgtggcggggagctttggcgcggtgcagtgggcgccgcaagaggcgcaggtctataacccggcgtttgacgtcacccccgcctcgctgattagcggctgggtgctggatacaggcgtggtcacaccggacgaggtagcgaaagggaaatttgcctga

SEQ ID NO: 115141 - DNA, 1200 bp, Enterobacter cloacae
atgtcgcaataccgtacctttaccgctcaggacgccgtggagtatgccaggcagtttggcggacttgacgatccttcatcgctggtagaggcgcaggaaatcggcgacggcaacctcaacctggtctttaaaattttcgaccgcgcgggcgtgagccgcatcgtcgttaagcaggcgctgccctatgtacgctgcgtcggcgaatcctggccgctgacgctggatcgtgcccgtcttgaagcgcaaaccctggtcgagcattaccagcacagcccgcagcacacggtgaaaatccaccactttgacccggaactggcggtgatggtgatggaagatctctccagccatcgcatctggcgcggcgagctgattaacaacatttactacccccaggcggcgcgtcagctgggggaatatctggctcacaccctgtttcacaccagcgatttttatctgcatccgcacgataaaaaagcgcaggtagcgaaattcatcaacccggagatgtgcgagatcaccgaagatctgttctttaacgatccgtaccagatccacgcgcgcaacagctacccggccgagctggaaaacgacgttgccgccctgcgcgacgacgcccagcttaaaatcgccgtggcctccctcaagcaccgctttttctcgcacgccgaagccctgctgcacggagacattcacagcggttcgatttttgtggccgacggcagcctgaaggccatcgacgctgagttcggctattttgggccgattggctttgacgttggcaccgccatcggcaacctgctgctgaacttctgcggcctgcctgggcacctcggcattcgcgatgccgccgccgcgcgcgagcagcgcctgaccgatattcaggaactgtggaacaccttcgcggagcgcttccaggcgctggcaaacgagaaagcccgcgacgcggcactcagcgcgccgggctatgcctccgcgttcctgaaaaaggtctggcatgacgccatcgggttctgcggcaccgagctgattcgccgcagcgtcgggctttcacacgtggcggatatcgataccatccaggatgaagccatgcgccacgaatgcctccgccatgcaatatccctcggtaaagcgctgattgtcattgccgaccgcatcgacagcgcggaagagctggtggcgcgagtgcggcagtacagttga

SEQ ID NO: 115142 - DNA, 1242 bp, Enterobacter cloacae
gtgtctcaattaccccctcccgaatacagccgcaatatgcggctgattggccatagcgaccagggcggtcgtccggacggtgtacagctgatggtgcaccgtggtttcgcctatatcggtcatatggtgtcgcagggcttttccattgttgacgtgcgcgatccgaaaaaaccaaaagccgcaggttacgtgcccgcgccgccgggtacctggaacgtacacctccaggcgcacgacgatttgctgctggtgatcaacgcccgggatctgtttgccgatgcgcgttttgccgatgagaaggtctactacacccgccaggtgggggagaccgtcagcgacgtgcaggataaaggctggagcgccgggcttcgcgtctttgatatctccacgccggacaggccacgcgaaatcggctttctgtcgctgagcggcatcggcattcaccgcatctggtacgtcggtggccgctgggcctacgtttcagcgctgatcgacggctttaccgattacattttcctgactatcgatctggcggacccgcgtaagcctgaagtcgcggggcgctggtggctgcccgggatgaaccaggccgaaggtgagaagccggactggccggaaggaaaacgttacgccctgcaccatgcgattattgccggcgacaccgcctacggcagctggcgcgacggcggcctgacgctgctggacgtgaaggaccgcgcgcagccgaagctgattagccatcgcaactggagcccgccgtttggcggcggaacgcacaccgcgctgccgctgccggaccgcgacctgctggtggtgctggacgaagcggtgctcgacaatcaggaagacggcgaaaagctgatctggctgtttgatatccgcgagccgtcgaacccggtcagcatctcgaccttcccgcagccggatgaaaccgactacgtggcgaaaggggcgcatttcggcccgcacaacctgcacgaaaaccggccggggagcttcgtcagctcaacgctaatttttgcgacgtatcagaacgcgggcgtgcgggcgtacgatatttcgaacccgtatcgaccggtggaaacgggggcgctggtgcccgccgcgccggagaagatgatggatacgcggcccaaccgcccgcaggtgatccagtcgtgcgacgtgtttgtggatgcgcaggggattatttacagcacggactataacggcgggatgtcggtgattgagtatctggggtga

SEQ ID NO: 115143 - DNA, 1065 bp, Enterobacter cloacae
atgaaaaagattgcgctctctttggtagctcttggattactcacttctttgccgggcctggcggctacccccgcgccggttccggccgccattgccagccatgacggccccattcgcattgcggtgatccgcaacctgggctcggacgacaacaccacgcagtttgttgccggggcgattcaggaagggaaaaagctcggctttaaggtcagcacgtttttaagtaacggggacgacgccagattccaggatttcgtgaaccaggccatcagccagaaatacgacgggattattctctctcaggggcgcgatccgtactccaccgcgctggtaaagaaggcggtggatgccgggattaaagtttcggtgtttgataccgccgtgaacggcgagatcccgggcgtaaccgttacccagcaggacgatgcctccctgaccaacctctcttttggtcaactggcgaaagatttcaacggcaaggccaatatcgtcaagctgtgggtcgcgggcttcccgccgatggagcgccgtcaggcggcctacaaagaactgcaaaaacagtatccggagattaaagagctggagtccatcggcgcggtctcctctgacgtgcagggcgacaccgccaacaaggtgggggcgatcctcgcgaaatacccgaaaggtaaaatcgacgccatctgggggacctgggatgccttcagtcagggcgcgtataaggcgctgaaagagaacggccgcaccgagatcaagctctacagcatcgacatctccaaccaggatctccagctgatgcgcgagccgggtagcccgtggaaggtgagcgtggcggtagatccgaagctgattggcgcgaccaacgtacgcctgatcgccaataagattgccggagaagcgacgcctgccacctacgatttcaaggcggcggctattccgcaggcgctgctgaccgcccagccgggtgcggtgaacgtggcgtctctggggaaaatcattccgggctggggccagacggaagattttatcgcgccgtggtttgcgacgcttgccgctaaaaacaagtaa

SEQ ID NO: 115144 - DNA, 996 bp, Enterobacter cloacae
gtgagcaaggccctttcagtgatcgcggcggcgtctggccgtcagcagattttcgattttctctacaggtggggcatgctgttgaccgtcgtcgcgctggtggcggtgtttggcctggcgtcggacagcttcctcgatccgaacaacatcatcaacattctgcgcgcgattgccatcgtgacggtgattgccatcggcgtctcgatttcgctgaccgtcggtgggttcgatctctcggtggggtcaaccgcgtcgctggcgaacgcgctggtgatttcgcttttcgtctggcacggcttcggcaccaccgagtcgattctgctgacccttgcgctctgcacgctggtcggcctgtttaacgcctttctgatcgtcatcctgcgcattccggacatgctcgcgacccttgccagcctgtttgtcatccagggcgtggcgatgacctacagctacggcgggtcgattaccgagaacatggtgctgccgagcggcgacatggcggaagggaccattccggcggcgttcagcctgctggggcaggtgccgaccattgtgatcgtcatgctggtggtgacgattctggcgcagttgggcctgtcgctgaccacccacggacgccggatgtacgccattggcggcaacccggaagccgcgcgtctctccggtattcgcaccacgcgctacaaggtggcggcctacgtgatcgcctcgctgctggcgggattgggcggaattttgctggcttcgcgtatcggttcatcgcaggtgaatgcggggggcggctacctgatggatgcggtggcggcggcgtggatcgggttctcgctggccgggtccggcaagccgaacgcgctgggcacgctggtgggggcggtgatcctcggcgtgctgtcgaacgggctggtgatgctctccgtgccgtattacgccatggacattataaaagggctggtgctcgcgatggcactggcgattacttacatacaaaaacgctga

SEQ ID NO: 115145 - DNA, 1503 bp, Enterobacter cloacae
atggtttccagtcgccttgagatgcgcggtatcagcctggccttttccggctttcaggccctgtcgcgcgtggatttcaccctgaacggcgggtcggtgcatgcgctgaccggcgccaacggcgcggggaaatcgacgctgatggcggtgctgtgcgggacgcacgatcgttatgaaggcgaaatttgcattaacaaccagccggtaagtatccgcgagccgctggacgccaaacggctgggtatccaccttgtgcagcaggaggtggatgttgcgctcattcccgggttaagcattgccgaaaacatcatgctcgaccagctggcgcatccggggcatcgctacagctggcgcgacatccgccagcaggcgcggcaggcgctggcgcagctggatgtttcgctcgacgtacgccgctccatcgacagttgcacgctggctgaaaaacagcagattttgctggcgcgggcgctgtcgcaccactgccgttttctcatccttgatgagcccaccgcgccgctggacgcgcacgagagtgagcgtctgtttgcggtagtaagacgtctgcaacagcagggtatcggcgtggtgtttatctctcaccgcattcacgagctgaaggccatctgcgacaccctgacggtgctgcgcgacggcaggctgattgagtccggcccgatggcggatctgagcggcgaagcgattgttgagaagatgctcggccacgagctgagcgatatctatccgcccccgcgcccgccgcacggtgaggagacgctgctgcgggtggaagggctgcacgacgatgcgctgctgaaagatatctccctgcacctgcgcaaaggtgaaatcctcggcattgccgggctggcgggggcggggaaaacggaactctgcaaggcgctgtttggcgccagcaaaagccgcgtcgcgcgcggcgagctgaaccatcaggcctggaaaccgcgcgatccggcagactcggtactgcgcggtctggcgctggtgccggaggagcggcgcaaagagggcatttttatcgacgagccggtgagcatgaaccttgccgtgtgtgccgataacagcttctcgcgctggagcctgtttggtcatcgtcaggcgtggcgctgggcagaagaggtgatcgcccgcgtcggtgtgcgcacgcgcgggccggggcaggtgctgcgtcggctttccggcggtaaccagcagaaggtcgccatcggcaaatggctgcgcaatgacgccagcgtgctgatattcgacgagccgaccaaaggcgtggacgtgaaggccaaaaccgatctgtttcagctgatcgacggcctggcgcgcgagggcaaaggggtcatttacgcctcgggcgagttcgccgagctggtcgggctgtgcgaccgcatctgcgtgctgtgggacggacgcatcgtggcggaaatcgccggagccgaggcccgggaagagacactactttattattcaaccggaggaacggcgtcgtga

SEQ ID NO: 115146 - DNA, 1089 bp, Enterobacter cloacae
atgagcaacaccgatatccgcgtcgtgcccggcccggcgaactacttctctcatccgggaagccttgcccacctggatgatttctttactccggaacagctttcccgcgcggtgtggatctacggcgagcgggcaatcgagggcgcacgcccttatctgccgcagagttttaacgcgacgggggcaaaacatctgctgtttaagggccattgcagcgagcgtgacgtcacccatctggtgaacgagtcgggtagtgaaaccagcgtggtgattggcgtgggcggcggtgcggtaatggataccgtcaaggccgtggcgcgtcgtctgggcgtgccgttcgtaggcattcccactatcgccgccacctgcgcggcgtggaccccgctctccgtctggtacaacgatgccggtcaggcgctacagtttgagatttttgacgacgccaactttctggtgctggtggagccgcagatcatccttaacgccccggcggaatatctgctggcgggcatcggcgatacgctggcgaagtggtacgaagcggcggtgctcgcccctcaatctgagagtctgccgctgaccgtgcgtcttggcctgaacggtgcgctggcgatccgtgacgtgctgctggcacgcagcgaagaagcgcttgcggatcagcagcgcggcgaacagacgcaggcgttccgggacgtggtggatgcgattattgccggaggcggaatggtcggcggtctgggtgagcgctatacccgcgtggcggcggcgcacgcggtgcacaacggcttaaccgtgctgccgcagacggaaaaatacctgcacggcaccaaggtggcctacggcattctggtgcagagcgccctgctcggtcaggacgacgtgctggcgcagctggtggcggcgtaccagcgcttcaatctgccgaccacgcttcgcgagctggacgtcgatattcacaaccgcgacgagctggataaggtcattgcccacaccctgcgcccggtggagtcgattcactatctgccggtgacgttaacgcctgaggttctgcgcgccgcgtttgcgaaggtggaatccttcagccgttaa

SEQ ID NO: 115147 - DNA, 744 bp, Enterobacter cloacae
atgcagatcgatttaacaggtaaaaaggcgctggttactggcgccagtcgtgggctgggtcgggcgattgcgctgtcgctggcacgcgccggtgccgatgtggttatcacctacgaaaaatccgtcgataaagcccagcaggttgtcgatgagatcaacgcgctggggcgacacggcgaggcgattcaggccgacagcgccagcgcgcaggcgattcaggatgcggtcacgcaggcggcgcgctccctcggcgggctggatattctggtcaataacgccgggattgcgcgcggcggcccgctggagtccatgaccctggcggacatcgacgctctgatcaacgtcaacatccgcggcgtggtgatcgccattcaggaagcgctggtgcatatgtctgacggcggacgcatcatcaacatcggtagctgtctggcgaaccgcgtggcacagccggggatcgccgtctactcgatgaccaagtctgcccttaactccctcacccgaggtctggcccgcgatttaggcccgcgcggcattaccgtcaacctggtccaccccggcccgaccaacagcgatatgaacccggaagacggcgagcaggctgactctcagcgtcagcttattgccctgggccattacggccagccggaggatatcgcagcggcggtcaccttcctcgccagcccggctgcggggcaaatttccggcaccggtctggatgtcgacggcggtctgaacgcctga

SEQ ID NO: 115148 - DNA, 297 bp, Enterobacter cloacae
atgaagattgtctggtcaaagaatgcaaagaaagagttttccaaaatcgatggccgatatcagcgaagaatcaaagcaaaacttgctgagctggacgatcgctcagctccccggcccgatatcaaaaaaatatcggcaacagaaaatcatttccggctacgcgttggcgattaccgcattctgattacacttcgggacgatcccgataaccattgttatgttttggccgtcaagcgcagaacatcaacgacctaccttcacgaggagaaagccccctatggctgttcagctaattaa

SEQ ID NO: 115149 - DNA, 405 bp, Enterobacter cloacae
atggctgttcagctaattaaggacgatgacggaaaagcgcagtacgtcgttattccctatgatgaatactttcgtatgtgcttacagatggcagaaattgacgacgaaaccgatgatgatctagaggatattgaagtcgaacacgattgttatgatgacgtaggattacctggtgaagtatgcgacatcatgcatagcgagaacgtcagcctacaggccgcctggcgcattttacgcggcatgtcccagcaggaggtggcggagaagcttgacatcagccagtccgccgtatcacagcttgaggcgctggactcccgaccgcaaaagcgcacccgcgaaaagctggcggcaatttacggctgtaaacaggagcagatcagcctctatttaccaaaagagggttaa

SEQ ID NO: 115150 - DNA, 198 bp, Enterobacter cloacae
atgttcgacaccctttccaaagcaggtaaatacctgggccaggccgctaaaatgatgattggcgtgccggattacgacaactacgtcgagcatatgcgcgtcaaccacccggaccagacgcccatgacctacgaagaatttttccgcgaccgtcaggacgcccgctacggcggcaagggcggggcgaagtgctgttaa

SEQ ID NO: 115151 - DNA, 2106 bp, Enterobacter cloacae
atgaacaactcagggaaataccttacgtgggcggtgctctccgtggtgggagcctttgccctgggctatatcgccctcaaccggggggagcagatcaacgcgctgtggatcgtcgtcgcctccgtctgcatttatctgatcgcataccgtttttatggccgctatatcgctaagacggtactgggcgtagacggcacgcgcatgacgccggccgtgcgtcataacgacggtctggactacgtgccgaccgataaaaaagtgctgttcggtcaccatttcgcggcgattgccggggcaggcccgctggtggggccggtactggccgcgcagatgggctacctgccagggatgatctggatcctcgcgggggtggtgctggcgggcgcggtgcaggacttcatggtgctgttcgtctccacccgccgcgacggtcgttcactgggtgagctggtgaaagaggagatgggcgcaaccgccggggtgattgcgctggtggcgacctttatgatcatggtgatcatcctcgcggtgctggcgatgatcgtggtgaaagccttgacccacagcccgtggggaacctataccgtcgccttcaccattccgctggcgctgtttatggggatctatatccgctatctgcgtccggggcgcattggtgaagtttcagttattggcctggtgttcctggtgtttgccattatctccggcggctgggtagcggaaagcccgacctgggcgccgttcttcgacttcaccggcgtgcagctgacctggatgctggtgggctatggctttgtggcggcggtgctgccggtgtggctgctgctggccccgcgtgactacctctccaccttcctgaaaatcggcaccatcgtcgggctggcgatcggcattctgattatgcgcccgaccctgaccatgcctgcgctgaccaaatttattgacggcaccggcccggtctggaccggtaacctgttcccgttcctgtttatcaccatcgcctgcggcgcggtgtcgggcttccacgcgctgatcgcctccggaaccacgccgaagatgctggcgaatgaaaatcaggcctgcctgattggctacggcggcatgctgatggaatccttcgtggcgattatggcgctggtttcggcctgtattattgacccgggcgtttactttgcgatgaacagcccaatggcggtactggccccggccggcaccgttgacgtggttgcctctgccgcgcaggtggtcagcggctggggctttacgattacccctgaaacgttgacgcatatcgctaatgaggtcggcgagcagtcaattatctcccgcgcaggcggggcgccaacgctggcggtgggcatggcctacattctgcacggcgcgctgggcgggctgatggatgtctcgttctggtatcacttcgccattctgttcgaggcgctgtttattctgacggcggtggatgccggtacgcgtgcggcgcgctttatgttgcaggatctgctgggggtgatctccccgaacctgaagcgtaccgattcactcccggctaacctgctggcgacggcgctgtgcgtgctggcgtggggctacttcctgcatcagggcgtggtcgatccgctcggcgggattaacaccctgtggccgctgttcggtatcgccaaccagatgctggcgggcatggccctgatgctctgtgccgtagtcctgttcaagatgaagcgccagcgttacgcatgggtggcgctggtgccaacggcgtggctgctgatctgtaccctgaccgcgggctggcagaaagccttcagcccggacaataaggtgggcttcctggcgatcgccaacaagttccaggcgatgatcgacagcggtaagatcccggcacagtacaccgaatctcaactgtcgcagctggtgtttaacaaccgtctggacgccgggctgaccatcttctttatggtggtggttgtggtgctggcgttgtattctctgaaaaccgcgctggcggcgttgaaagtcgacaaaccgacggcgaaagagacgccgtatgagccaatgcctgagaacctggacgagattgtcacccaggcgaaaggggcgcattaa

SEQ ID NO: 115152 - DNA, 414 bp, Enterobacter cloacae
atgatctggaaacgtcatttaacgctcgaggagctgaacgccaccagcctgaatacgatggtggggcaccttggcatcgtctatacccgcctcggggacgatacgctggaagcagagatgccggtggatgcccgcacccaccagccgtttggcctgctgcatggcggcgcctcggcggcgctggcggaaacgctgggctcaatggccggttttctgatgacccgtgacgggcagaacgtggtgggcacggaactgaatgccacgcaccaccgcgcggtctctcacggtaaggtacgcggcgtgtgtcagccgctgcatctgggccgttccagccagagctgggagatcgtggtgttcgacgagcaggggcggcggtgctgtacctgtcggttgagtacgatggtgttggggtaa

SEQ ID NO: 115153 - DNA, 753 bp, Enterobacter cloacae
atggtttttgatttcaccggtaaaacggtctgggtgacgggcgcgggtaagggcattggttatgcgaccgcgctggcatttgtggaggccggggcgcaggtgaccgggttcgatctggctttccctcacggcgaatatccgtttgccaccgaaacgctggacgtggcggatgcggcgcaggcgagtgacgtctgcgggcgtttgctcagcagccttgagcggctcgatgtgctggttaacgcggcgggcattctgcgtatgggcgcgacggatcagctctcgcaggaggactggcagcagacctttgcggtcaacgtcggcggcgcgttcaacctgttccagcagacgatgggccagttccgtcatcagcaggggggggcgattgtgacggtggcctctgacgcggcgcacacgccgcgcatcggcatgagcgcctacggcgcgtcgaaagcggcgctgaaaagcctggcgctgaccgtcgggctggaactggcgggcagcggcgtacgctgtaacctggtgtcgccgggttcaacggataccgacatgcagcgcaccctgtggaccagcgatgatgcggaacagcggcgcattcgcggctttggcgagcagttcaagctcggcattccgctcggtaaaattgcccgtccacaggagattgctgcgaccgtgctgttcctggcatccgatgccgccagccatatcaccttgcaggatatcgtggtggacggcggctccacgctgggggcgtaa

SEQ ID NO: 115154 - DNA, 855 bp, Enterobacter cloacae
atggccattccaaaattaaccgcatacgcgctgccaaccgccgccgaactgccgaccagtaaagtgaactgggcgtttgaaccggagcgcgccgcgctgctgatccacgatatgcaggagtacttcctgaacttctggggcgaaaatagcgacatgatgcagcaggtagtggcgaacatcgctaaactgcgcgcgtactgcaaagagcacaatattccggtgtactacaccgcgcagccgaaagatcagagcgatgaagaccgcgccctgctgaacgatatgtgggggccgggcctgactcgctcgccggagcagcagcgcatcgtcgctgagctgaccccggacgaagcggacaccgtgctggtgaagtggcgctacagcgcgtttcaccgctcgccgctggagcagatgcttaaagagaccgggcgcaaccagcttttgatcaccggcgtgtacgcccacatcggctgcatgaccaccgccaccgacgcctttatgcgcgacatcaaaccgttctttatcgccgacgcgctggcggatttcacccgcgacgagcacctgatgtcgctgaaatacgtggcaggacgttcgggccgcgtggtgatgaccgacgaactgctgccgtccgttccgacaacgaaagccgcgctgcgtgagctgatcctgccgctgctggacgagtccgacgagccgatggatgacgaaaacctgatcgactacggtctggattcagtgcgcatgatggcgctggccgcccgctggcgcaaagtgcacggcgacattgatttcgtgatgctggcaaaaaatccgaccctcgatgcctggtgggcgctgctctcccgcgaggtgaagtga

SEQ ID NO: 115155 - DNA, 1611 bp, Enterobacter cloacae
atgaccatcccttttacccgctggcctgaggagtttgcccgccgctaccgtgaaaaaggctactggcaggatcggccgctgacccacatcctgacggaccatgcggacaacgatgcggtcgcgataattgacggcgatcgccgcatcacctaccgcgcgtttaatcaggcggtgacgaatctggcgtctgtccttcaggcgcaggggctgcatcgcggcgagaccgcgctggtgcagctcggcaacgtggccgagttctacatcaccttcttcgcgctgctgcaaatcggcgtcgcaccggtcaacgcgctctttagccatcagcgcagcgaactcaacgcctacgcggagcagatcaaacccgccgtgctgattgccgatcgcgaccacgcgctgttcgcgggcgatgattttctcaatacctttgtggatacgcatcgctcggtacgcgtcgtgctgctgcgcggcgataagggcgaacacgcgctggaggcggcgattgcgcgcccggcggacaatttcatcccaaacccgacgcccgccgacgaagtggcgttcttccagctctccggcggcagcaccggcacgccgaagctgatcccgcgtacgcataacgattacgactacagcattcgccgcagcaacgaaatctgcggtatcactgcgcgcacccggtatctgaacgcgcttcccgcggcgcataactacgccatgagctcgccgggatcgttaggcgttttcacggcgggcggctgcgtggtgctggcgaacgatccgagcgccacgctctgcttcccgctgattgagcagcatcagataaacgtcacctcactggtgccgcccgcggtcagcctgtggttgcaggcgattgccgacggcgcggggaacgcccagctgaaatccctcgaactgctccaggtaggcggcgcacgtctctccgccacgcttgcggcacgtattccggcggaaattggctgccagcttcagcaggtgtttggcatggcggaagggctggtgaactacaccgccctcgacgatgcgccggagcgcatcatcaatacccagggccgcccgatgtgcccggacgatgaagtgtgggtggcggacgaggacggcaacccgctgccgcgcggggaagtcgggcgtctgatgacgcgcggcccttacaccttccgcggctatttcaatagcccggaacacaacgccagcgcctttgatgccaacggtttctactgctcgggcgatctgatcgccatcgatgagcagggttacatcaccgtgcaggggcgcgagaaagatcagatcaaccgcggtggcgagaagatcgccgccgaagagatcgaaaacctgctgctgcgccacgacgcggtgatccacgccgcgctggtgagcatggaggacagcctgctgggcgaaaaaagctgcgcgtacctggtggtgaaacagcccctgcgcgcggtggaggtgcgccgcttcctgcgcgagcagggcgtcgccgaatttaagctgccggaccgcgttgagagcgtggatgcgcttccgctcacgccggtcggcaaagttgataagaaacagttgcgcctgtggcttgctgaacgcgcccggggctga

SEQ ID NO: 115156 - DNA, 1176 bp, Enterobacter cloacae
atggatacgtcattggctgaggaccttcagcacaccgcgaccacgctgcaatcagacagctttttctttatgtcgccctatcgcagttttaccacgtcaggctgttttgcccgtttttctgaacccgccgtcggcggtgacgatccggcgggcccctttcagcagaaattagctcaggctttccagaatgcgaaaaacagcggcattgcccatccggtgatggtaggggcgatccccttcgatacccgcaaaccgtcatcgctgtttattccgcaacgctggcaaaccttctcccgcccggcgcgtcagcagtccgcacgctacgcctccggcgcgcagacgctgaacgtgcaacaacgcaccgagatcccgccgcagccggttttcgaggtgatggtcgctcgcgccgcgtcgctcaccgccacgccgcaggtgaataaggtggtactgtcgcgcctgattgatatcgccaccgacaaacagattgatagcagcgcgctgatggagcgtcttatcgcccagaacccggcgagctttaacttccacgtaccgctggaagacggcggcgtgctgctgggcgccagcccggaactgctgctgcgtaaagagggcgcgcactttagctcgctgccgctggcgggctctgcgcgccgtcagccggacgatgtgctggatcgcgaagcgggcactaagctgctggcctccgaaaaagaccgtcacgagcacgacctggtaacgcaggcgatgaaaaccattctggaaccgcgcagccatcatctgaccatgccggcttccccgcagctcatcaccaccccgacgctgtggcatctggcgacgccggtagaaggtgacgcgcgtgaaaacgagaacgccctgacgctggcctgtctgctgcacccgacgccagcgctgagcggcttcccgcatcaggcggcaaaagagctgattgccgagctggagccgttcgatcgtgagctgttcggcggcatcgtcggctggtgcgacagcgaagggaacggcgagtgggtggtaactatccgctgcgcgcgactgcatcaaaataccgttcgcctgtttgccggcgcgggcattgtgcctgcttcctctccggtaggcgagtggcgcgagacgggcgtgaagctctccaccatgctcaacgtgtttggtttgcactaa

SEQ ID NO: 115157 - DNA, 960 bp, Enterobacter cloacae
gtgaaactccctgccgtttgccgtaatgcctttcttttaacaggactttttgttttaggactaacctcagcgacggccgccgactggccgcgtcaggtcacagacagccgcggcgtacatacgcttgagagcaaaccgacgcgcattgtctccaccagcgtgaccctaaccggctccctgctggccattgacgccccggttattggcagcggagccaccacgccaaacaaccgcgtggcggatgcacagggctttttacgtcagtggggcgatatcgcgaaacagcgtaaggttgcccggctgtacatcggcgagccgagcgccgaagccgtcgcggcccagatgccggacctgattttgatcagcgccaccggcggggattccgcgctggcactctacgatcagctttccgccatcgccccgacgcttatcattaactacgacgacaaaagctggcaggaactgctgaccaagctggggacgatcaccgggcaggaaacacaggccgcagatcgcatcgctgccttcgataaacagctcgcccaggtgaagcagcagatgaaactgccgccgcagccggtgaacgccatcgtctacaccgccgcggcgcacacggcgaacctgtggacgacagactcggctcagggcaagctgctgcaccagctgggcttcacgctggcggcgttacctgatggattgcacacctcgaaaagccagggcaagcgtcacgacattattcagctgggcggggaaaacctggcgacggggctgaacggcgaagggctgttcgtgtttgccggcgaccagaaagacgtggacgcgatttacgccaatccgctgctggcgcatctgccgtcggtcaagaacaagcgtgtctgggcgctgggaacggagacgttccgcctggattattacagcgcgatgttggtgttgcagcgtttgaattcaatttttaaataa

SEQ ID NO: 115158 - DNA, 1227 bp, Enterobacter cloacae
atgaatcaaaaatcctggctgctcaacctcagcctgctgaaaacgcacccggcgtttcgagcggtttttatcgcccgctttatctccattttatccctcggcctgctcggggtcgccgtgccggtacagatccagaccatgacccactccagctggctggtggggttatccgtcaccttaaccggcggggcgatgtttatcggcctgatggtgggcggcgtgctggcggaccgctacgagcgtaaaaaactgatcctgctggcgcgcggcacctgcggggtgggctttttcgggctgtgtctgaacgcaatgctgccggagccgtcgctgatggcgatttatgccctgggcctgtgggacggcttttttgcctcgttaggcgtgacggcgctgctggcggccacgcccgcgctggtcgggcgcgaaaacctgatgcaggcgggggcgatcaccatgctcaccgtgcgcctcggttcggtgatttcgccgatggtcggcggtctgctgctggcgaccggcaacgtggcgtggaactacggccttgccgcggcgggaacctttatcaccaccctgacgctgctgcgtctgccgctcctgccacccccgccgcagccgcgcgagcatccgctgaagtccctgatggccgcgattcgtttcctgttcagcaacccgctgattggcggcattgcgctgctcggcggcctgctgacgatggcgagcgccgtgcgcgtgctgtacccggcgctggcgggcgagtggcagatgagcgcctcagagattggcgtgctgtacgccgccattccgctcggcgccgcgtgcggggcgctgaccagcggaaacctggcgcagagcgcgagaccggggttaatcatgctggtggcgacgctggcctcgtttatcgcgattggtttcttcagcctgatgccggtgtgggcgctgggggtgatgtgtctggtgatttttggctggctgagcgcggtcagctctcttttacagtacaccttgatccagacccagacgccggaagggatgctcgggcgcattaacggcctgtggacggcgcagaacgtcacgggcgatgcgattggcgcagcgatcctcggcgggctgggggcgataatgaccccggtggcgtcggcgagcagcagcgggtttgtgttagccgtggttggcgtaattttattggcggttttggtggagttgcgtcggttcaggcagaacctgtag

SEQ ID NO: 115159 - DNA, 1005 bp, Enterobacter cloacae
atgtcgttttcctcttccgcggtgcgcgccgtagccgtgcccgttttattgctgctgttgatccttgcgattgcactcagtttgctggttggcgcgaagccgctgcccgcgtccgttattgtcgatgcgctctccggtacctgccagagcgccgagtgcattatcgtgctcgacgcccgcctgccccgcacccttgccggcctgctggccggtggcgcgctcgggcttgccggtgccctgatgcaaaccctcacccgcaacccgctggcggaccctggcattctcggcgtgaactctggtgccagtttcgccattgtgctcggcgcggcgctgtttggtttcacctctccgtctgaacagctggtgatggccttctgcggcgcgctggccgcctcgctggtggtggcctttaccggcagccagggcggcggacagctcagcccggtacgtctgacactggcgggcgtggcgctcgcggcggtgctggaaggcttgtccaacggcatcgccctgctcaacccggacgtgtatgaccagctgcgcttctggcaggccggttcgctggatatccgtacccttgataccctgaaagtggtggcattcccggtgtttatctctgccgccgtagcgctgtgtttaagccgggcgctcaacagcctgagcctcggcagcgacaccgcgaccgccctcggcaaccgcgtggcgcgcacgcagctgacgggcctgcttgtcatcaccgtgctgtgcggcagcgcgaccgccgtcgtcgggccgattgcctttatcggcctgatgatgccgcacatggcgcgctggctggtgggggcggatcaccgctggtcactaccggtcacgctgctggcgacccctgccctgctgctgtttgccgacgtactgggccgcctgctggtgccgggtgaattgcgcgtctcggtggtcagcgcctttatcggcgcgccggtgctgatcttcctggtacgacgcagacgcgggggtggcgcatga

SEQ ID NO: 115160 - DNA, 993 bp, Enterobacter cloacae
atgatggccccgtcccgtcgattactcaccagcgtcgccctgctggtcgtcgccagtctgctgctggcggtctggagcctgcaaagcggtgccgtaacgcttgatttcgcgcaggtctttcatgctctcaccggcagcgcgccgcgtaacatcaccatggtggtcaccgaatggcgactgccgcgcgtggcgatggcgatcctggttggcgcagcgcttggcgtcagcggcgcaatattccagtcgctgatgcgtaaccccctcggcagcccggacgtgatgggcctgaataccggcgcgtggagcggcgtgctggtggcgatggtgctgttcgggcagcatctcacggccattacctttacggcgatggcgggcggcattctcacctccctgcttatctgggccctggcctggcgcaacggcatcgacaccttccgcctgatcatcatcgggatcggtatccgcgcgatgctgatggcgtttaacacctggcttctgctacaggcgtcgctggaaaccgcactctccgccgggctgtggtacgccggttccctcaacggtctgacgtggggaaaaacctggcccgccgcgccgctgattatcctgatgtttattggcgcgctgctgctggtcaggcgcatgcggctgctggagatgggcgacgacagcgcctgcgcgctgggcgtgagcgtagagcgctcgcgcctgatgctgatgctggtggcggtcttgctgaccgcagcgtctaccgccatcgccgggccgatctcgtttattgcccttgtcgcgccgcatatcgcgcggcgacttagcggcaccgcgcgctggggattaacccaggcagcgctgtgcggcgcagtattactgctggccgccgatctctgcgctcagcggctgtttacgccttatcaactgccggtgggcgtggtgaccgtcagcctcggcgggatttacctcatcgtcttgctcgttcaggagtcacgcaagaaatga

SEQ ID NO: 115161 - DNA, 795 bp, Enterobacter cloacae
atgacagattcaacaccccgcttgcgcggcgaaaacttgaccctcggctacggtaaaaaaatcattgcccgggacttatccgttgccattccggacggccacttcaccgccattatcgggccaaacggctgcggcaaatcgacattgctgcgcacgctgagccgcctgatgtcgccggttgagggcagcgtgttcctcgacggggagcagatccagcgcttcgccagcaaagaggtggcgcgccgaattgggctgctggcgcagaacgccaccacgccgggagacatcacggtgcaggagctggtctcgcgcggacgctatccgcaccagccgctgtttacccgctggcgtaaagaggatgacgaggcggtgaaccgagcgatgcaggcgacgggtattaccgatctggcccagcagagcgtggacaccctttccggcggacagcgccagcgcgcgtggattgcgatggtgctggcgcaggagacctccatcatgctgctggacgagccgacgacctggctcgacatcagccatcagattgacctgctggagctgctgagcgaactgaaccgtacgcaggggtacaccctggcggcagtgctgcacgacttaaaccaggcgtgccgctacgcgacgcatctgattgcgctgcgcgacggcgagattgtggcgcagggcgcgccgaaagagattgtgacgccggatctgatcgcgcggatctacggcatgcgctgcatgattattgaggatccggtggcgggtacgccgttggtggtgccgttgggtcggcggtaa

SEQ ID NO: 115162 - DNA, 3858 bp, Enterobacter cloacae
atgaaccgtctccctcttgtcgccgcccagccggggatctggatggcagagcagctttcctccctgccaaacgcctggagcgtcgcgcactacaccgagctgaaaggcgctatcgatgcgtcattgctggcaaaagccatcgctgaaggcatgatgcaggccgacaccctgcggatgcgttttgccgaagataacggtgaggtgtggcagtggatcgatgaggccatgctcctgccggagccgtccatcgtgcgcgttgactcccacgacgccgccgtggcgctgatggaggccgatctcaaccagaacctgcgcgtcgacagcggtcagccgctggcgtttcaccagctgatccaggtgggagaaagccactggtactggtatcagcggtatcatcatctggtggtggatggcttcagtttcccggctattacccgtcagatcaccgccatttacgctgcgtggcagaaaggtgaatccacgccggcctcgccgttcaccccgttcgccgaggtggtggaggagtatcagcgctatcgcgacagcgaggcgtatcagcgcgacggtgctttctgggccgaacaacgcaaacagcttccttctccggtctcgctctcttccgcgccgctgccgggacgcgccgccaccaccgatatcctgcgcctgaaaattgcgatggacggccgtgcgttcagccagcttgcacagaaggcaggccaggcgcagcgtaccgatctggcccttgcgctggtggcgctgtggctgggccgcctgaccggacggctggactacgccgccgggtttatctttatgcgccgcatgggctccgccgcgctgaccgcgaccggaccggtgctcaacgtcctgccgctggcggtgaatattcgcccgcaggagagcctgccggaactggcgctgcgcctggcgaaccagctgaaaaagatgcgccgccatcagcgttacgacgccgagcagatcgtgcgcgacagcggacgtgccgcaggcgacgaagccctttttggtccggtgctgaacgtcaaggtgttcgattatcagctgaatatcgacggcgtggaggccattacccacacgctggcaaccggcccggtgaacgatctggagctggcgctgttcccggacgagcagggcggactgagcattgagatcctcgccaacgggcagcgttacgacgaggcgacgctgaaggggcacgcggcgcgcctgaacgcaatgctgacgcagtttgccgccaatccggacctgcgctgtggcgacgtggaaaccgtatcagagcaggaatacgcccggctggcgcgcatcaacgataccgggctggcgctgccgtccaccacgctggcggatcttgtggcggagcaggcgagcaaaacgccggacgcccccgcgctggcggatgcccatactgaactgaactaccgccagctgcgcgagcaggtggtcgcgctggcaaacctgctgcgcgcgcgcggcgtgaagccgggcgacagcgtggcggtggcgctcccgcgctcggtgttcctgaccctggcgctgcacgggattgttgaagcaggcgccgcctggctgccgctggataccggttacccggatgaccgtctgcggatgatgctggaggacgcgaagccgtcgctgctcattaccaccgacgagcagcttccgcgctttaacgatctgccgatcgccacctttagttacaacacactattaccggccaccgatgctgaacctctgcgactggcgaagccggagcagaccgcgtacatcatatttacctccggttcgacggggcgtccaaaaggggtgatggtcggccataccgccatcgttaaccgcctgaagtggatgcaggatcattatccactggcggcgcatgacgtggtggcgcagaaaacgccgtgcagctttgacgtgtcggtgtgggagttctggtggccgtttatcgccggggcgaagctggtgatggccgagccggacgcgcaccgcgatccgcaggcgatgcagggcttcttcgcagaatatggcgtaaccaccacccacttcgtgccgtcgatgctggcggcgttcgtcgcctcgctgacgccggaaaacgtcgactgttgcaggacgctgaagcaggtgttctgtagcggcgaggcgttgccgactgcgctgtgtcgcgagtgggaacagctcacccatgcgccgctgcacaacctctatggcccgaccgaagcggcggtggacgtcagctggtatccggcgtacggccccgagctggcggcggtggaaggcaacagcgtgcctatcggcttcccggtgtggaatacggggctgcgcattctggacgcgatgatgcgcccggtgccgttcggcgtggcgggggatctctatctcaccggcattcagctggcgcaggggtatctgggacgccccgaccttaccgccagccgctttatcgccgatccgtttgcccccggcgagcgaatgtaccgcaccggggacgttgcccgctggctggacaacggcgcggtggaatatctgggccgcagcgacgatcagctgaaaatccgcggccagcgcattgagctgggcgaaatcgaccgggcgatgctcgcgctgccggatgtggcccaggcggtggcgcacgcctgcgtgttcaaccaggcggctgccacgggcggcgatgcccgccagctggtgggatacgttgtctctgaatccggcttaccgctggatcgcgacgcgctgcttgcatcactcaaagcccagctgccgccgcatatggtgccggtggtgctgctgcaaatcagcgcgctgccgttaagcgccaacggcaagctggatcgcaaggcgctgccgctgccggagctgaccagcaaaacttccggtcgcgcgcccgagacgcaaactgaagtcaccgtggcgcaggcgttttctgccctgctgggctgcgcggtgaacgatatcgaggccgatttctttgccctcggcggccactcgctgctggcgatgcgccttgcggctcagctcagccgtgcgttcagccgcaaggtcacgccggggcagattatggtcgcctcgacggtgagcaagcttagcgccctgctggactcgcagatgagcgacgagcaggcgcagcgtctggggtatgaaaccgttctcccgctgcgtgaaagcaacggccccacgctgttctgcttccatccggcgtccggctttgcctggcagtttagcgtcctggcgcgctacctcagcccgcgctggtcaatcgtcggcattcagtctccccggcctgaggggccgatgcagcagtgtgcggatctcgatgcggtgatcgaacatcatctgaacacgttgcgtaagcaacagccgcaggggccgtattatctgttcggctattccctcggcggcacgctggcgcagggcattgcggcgcgtctgcgcgagcagggtgaagacgtagcgttcctcggcctgctggatacctggccaccggaaacccagaactgggcggagaaagaggccaacggcctcgatccggaggtgctggcggaaattgagcgcgaacgccaggcgtttatcgctgcccagcaggggcagggctccagcgagttgtttaacgctatcgaaggcaactacaccgacgcggtgcggctgctcaccacggcgcacagcgcgcggtttgacggtaaagcgacgctgtttgtcgccgagcgaacgcgaaccctggatccgcaggccgcgtgggcgccgtgggtgggtgagctggaggtatacagccaggactgcgcccacgtggatattatttcaccgcaggcgtttgaaaagattgggccggtactgaaggaaatttttggatag

SEQ ID NO: 115163 - DNA, 213 bp, Enterobacter cloacae
atggaattcagcaatcctttcgataatccgcagggacagttcgccattttgcaaaatgaccaggggcagtacagcctgtggccgcagcagtgcgagttgcccgcgggctggcgcgtggtctgcgaaccgcaatctcaggaggcgtgccagcagtggctggcggaacagtggcagtcgcttgagccgtcttattttgcgggggagcgcgcatga

SEQ ID NO: 115164 - DNA, 1278 bp, Enterobacter cloacae
atgcaaatagttatcaataatattatcaataaaatttgctctgaaacaaaaaagactgttaaacatggggttataagggtgacggcgttaacaaccggaagtgaagcgtggtggcaggcgaaagacgggccggaacgggaacgtcatcaggaaaactatcgcgtgacattctggtggcgggacccggcgggaacgcagaaaacgtcgacggttaaacgcgtctggctctacgtcaccggtgtgaccgatcaccatcaaaatgcccgtccgcagtcccttgaacgtatcccggataccgacgtctggcagtggcagggcgagttcagccccgaatggcgcggcagctactgttttatcccctccgacaatgaaaacgattttgccagcgcagtgtttgaaggcgatcagccggaccgcatggcgctgcgcgaaggctggcgcaaactgttgccgcacgcggtgtccgacccgctgaacgcccagagctggcgcggcgggcgcgggcacgcagtctcggcgctggagatgccggaggcgcccgtacagcccggctggaaccatcccgataccccttacaaaaagcctgtctgcattgagtggcacagcgcgcgtctgaagaaccgtcgccgcgtgtggatttttaccaccggggatgaaagccccgagcgcccgctggcggtgctgctcgacgggcagttctgggccgaaagcatgcccgtctggcctgcgctggcgtcgctcacccttgaaggcaaactgccgcctgcggtctatgtcttaatcgacgtgattgacaccgcacaccgcagccgcgagctgccgtgtaaccctgatttctggctggcggtgcaggacgaacttctcccgcaggtgaaaagcatggccccgttcagcgaccgcgccgaccataccgtggtggcgggtcagagcttcggcgggctctcttccctctatgcgggcctcaactggccgcagcgttttggctgcatcctcagccagtccggatcctactggtggccgcaccgcggcgcgcagcaggacgggctgctcatcgaacaactcaaagcgggtgacaaaaccgctcgcgggctgcgcatcgtccttgaggccgggcgcaacgagccgcttattttgcgcgcaaaccaggcgatcctcgccgaactacacactcagcaaccggttttctggcgtcaggttgacggcggacacgatgcgctttgctggcgcggtgggctgacgcaggggctgatgaccctctggcagccgcttattcaataa

SEQ ID NO: 115165 - DNA, 2250 bp, Enterobacter cloacae
atgaataagaagattcactctctggccttgctggtcaatttagggatttatggtgtcgcgctgcccgtcatggcagacgacaacaccgcctccgcgcagcatgaagacaccatggtgatcaccgccgccgagcagaatttgcaggcgccgggcgtgtcgaccatcaccgccgacgagatccgcaaaaacccgcccgcgcgggacgtggcggaaatcatccgcaccatgccgggcgttaacctgaccggcaactccaccagcggccagcgcgggaataaccgtcagattgacattcgcggcatgggcccggaaaacaccctgatcctgatcgacggcaagccggtcaccagccgcaactccatccgtctgggctggcgcggcgagcgtgatacccgcggcgataccggctgggtcccgccggagatgatcgagcgcatcgaagtgatccgtggcccggctgctgcccgctacggtaacggcgcggcgggcggcgtggtgaacatcatcaccaaaaaatttgacgaccagtggcacggctcctggaacacctacctgaatgcgccagagcataaagacgaaggttccaccaaacgcactaacttcagcctgagcggcccgctgggcggggatttcagcttccgcatgtacggtaacctggataaaactcaggccgacgcctgggacattaaccagggccatcagtctgaccgtaccggcacatatgccgacacgctgccggcaggccgtgaaggggtcgagaataaagacatcaacggcgtggtgcgctgggactttgcgcctatgcagtccctggagtttgaggcgggatacagccgccagaacaacctttacgcgggcgatacccagaataccaacaacgacaacagctccagcgggctggtgaagaagaactacggtaaagagactaaccgtatctatcgtcagaacttcgccgtgacctggaacggcggctgggataacggcattaccaccagcaactgggcgcagtacgagcacacccgcaactcacgtctgggcgaaggcctggcgggcggtctggaaggcctgttcaacagcaataaattcaccgataccgacctggccgacgtgatgctgcacagcgaaatcaacctgccgattgatttcattgtgaatcaaaacctgacgctcggcaccgagtggaaccagcagcgcatgaaggactcgacctccttcacgcaaacccagcagggcggcaccattccgggcatgagcgaagaccgtagcccgtacacttcagcggagatcttctccctgtttgccgaaaacaacatggagctgaccgacagcaccatgctgacccctgccctgcgcttcgaccaccacaccattgtgggtaataactggagcccgtccctgaacctgtcgcagggtctgggggatgacttcaccctgaagatgggcatcgcgcgcgcctataaagcgccaagcctgtatcagaccaacccgaactacctgctgtacagtaaaggccagggctgctacgccagttccgacggcgtgggctgctacatgatgggtaacgacgatctgaaagcggagaccagcatcaacaaagagattggtctggagtggaaacgcgatggctggctggcgggtgtgacctggttccgcaacgactaccgcaacaagattgaagcgggctacgcgccgattggccagacgtccaccggcaaagtcaccaccgatatctaccagtgggaaaacgtgccgaaggcggtagtagaaggtctggaaggctccctgaacgtgccggtcagcgacaccatcaactggaccaacaacatcacctacatgctgcaaagcaagaacaaggagaccggcgatcgtctgtcgatcatcccggagtatacgctgaactctaccctgagctggcaggtacgtcaggatgtctcattgcagtcgaccttcacctggtatggcaagcagcagccgaagaagtacaactacaaaggtcagccggtgaccgggtctgagaaagacgaagtcagcccgtacagcatcgttggcctgagcgcgacctgggacgtgaccaaaaacgtcagcctgaccggcggcgtggacaacgtcttcgacaagcgccagtggcgtgcgggtaacgcccagaccacgggtaataccaccaccggcgcgtatatgtacggtgcgggcgcgtatacgtataatgaaccgggccgtacctggtatatgagcgtgaatacgcgtttttaa

SEQ ID NO: 115166 - DNA, 690 bp, Enterobacter cloacae
atgcacaccacccacagcacattttctctcgccggccacaccctccaccgcatcactttcgaccccgccacctttaccgacgccgatctcctctggctcccccaccacgcccagctcgctgacgccggacgcaaacgcaaggccgaccacctggcaggccgcatcgccgccgcgcacgccttacctgaccacaccatgcccgccatcggccccagcggggaaccgctctggccgcaaggtatttccggcagcatcacccacagcggcacgcaggcgatagccgtcgtcacgcaatacccggcgcttatcggcatcgactgtgaaacgatcctctccgaaaacgaagccagggaaatcaaagacggcattattgatacgcaggaagaacctgtgctttcccgcctgggatacccgttcgccctcgccctgacgctggtcttcagcgccaaagagagcctgtttaaggccctctttccgcaggtacaggcctggatgggttttgactgcgcccgcgttaccaagctcgacgacaagacgctcacgctggcgttgacccgtcaactggcaggctttgaagaaggcaccgccttccgcctgcactggcagcagcacggcgaacaggtcatcaccctgctgtcacacgctcctggcgacgagccttcacgctggtcaccacaaacgtcacgataa

SEQ ID NO: 115167 - DNA, 840 bp, Enterobacter cloacae
atgttgacgctgcttctcgaaccgttccagtttgcgtttatgaacaacgcgctgctgatttcactcatggtggccgtgccctgcgcgctgctgtcggtttttctggtgctgaaaggctgggcgctgatgggcgacgccatgagccacgcggtgtttcccggcgtcgtgctggcctggatgatgggcctgccgctggcgctgggtgcattcgtggccggtcttttctgcgcggtcgccaccggatatctgaaggataacagccgcatcaaacaggatacggtcatggggatcgtcttttccggcatgttcggcgccgggctgatcctctatatcgccgtcaaacctgaggtgcatctcgaccacattctgttcggcgatatgttgggtattaacgggatggacattctgcaaagcggtctcgtcgcggggctgattgcgctggtgattggcctgaagtggcgcgattttctgctgttctgctttgactatcagcaggcgcaggcgagtggcctgcgcacccgctggctgcactacggcttactgtgcatggtttcgctgaccatcgttgcgacgctgaaagcggtggggatcattctgtcgatttccctgctgattgcgcccggcgccgtggcggtgctgattacccgacgctttcacatggcactgctggtggcggtcgccgtttcagcgctggtgtcggtaagcggcgtttatgcctcgttttatctcgacagcgcgcctgcgccgaccattgtggtcctgttcgcgatggtgtttatcgtgacgtttgtggtgaccagcgtgaaggctcgtcgccaggagcgtgtgacagcagggtga

SEQ ID NO: 115168 - DNA, 852 bp, Enterobacter cloacae
atgaacgtgcttctcgaacccttcggctacgagtacatgctcaacgcgatgtgggtctcggcgatggtgggcgggctgtgcgcgtttctctcctgctatctgatgctcaaaggctggtcgctgatcggcgatgcgctgtcgcactccatcgtgccgggcgtagcgggggcctacatgctcgggctgccgttctcgctgggggcgtttttatcgggcgggctggcggcgggcagcatgctgtttctcaaccagcgcagccgcctgaaggaggacgccattatcgggctgatcttctcctcgtttttcgggctggggctgtttatggtctcgctcaacccgacctcggtgaacattcagaccatcgtcctcggcaatattctggctatcgccccggaagatatcgtccagctggcgattatcggcgtggtgtcgatagttatcctgctgttcaaatggaaagatctgatggtgaccttttttgatgagaaccacgcccgcgccatcggcctgcgtcctgaacgcctgaaaattctcttcttcacgctgctggcggtctctaccgtggcggcgctgcaaaccgtcggcgcatttctggtgatctgtctggtggtcacgcccggcgcgaccgcgtggctgctgaccgaccgcttcccgcgcctgctgatgattgcggtcgccattggcagcatcaccagcttcctcggcgcgtgggccagctattacctggacggcgccaccggcggcattatcgtggtcgcccagacgctgctgttcctgatggcgttcgtctttgcgccgaagcacggactgcttgccagccgccgtcgggcgcgggaggcacacccatgttga

SEQ ID NO: 115169 - DNA, 807 bp, Enterobacter cloacae
atgcacgaggggattgttgtaaccgacgtgaccgtgacctaccgcaacggccacacggcgctgcgcgacgcatcgttcagcgtgccgggcggatcgattgccgccctggtgggggtgaacggttccggcaagtccacgctgtttaaggcggtgatggggtttgtgcgggcggcgagcggcactatctccattctggggctgccgcctcaccgggcgctgcgtcagaacctggtcgcctacgtgccgcagtcggaagaggtcgactggtcgtttccggtgctcgtcgaggacgtggtgatgatgggccgctacgggcatatggggtttatgcgtcgtcccaaagaatgcgataagcagatcgtcaccgacgccctgaagcgtgtagatatgctcgagctgcgccatcggcagattggcgagctgtccggcgggcagaagaagcgcgtgtttctggcccgtgcgattgcccagcagggcgaggtgatcctgctcgacgagccgtttaccggcgtggacgtcaaaaccgaagccaggatcatcagcctgctgcgggagttgcgcgacgagggtaaaacgatgctggtctcgacccacaatctgggctcggtcacggaattctgcgattacacggtgatggtcaaaggcaccgtgctggcgagcggcccgacggatatcacctttaccgccgagaatctcgagcgcgcctttagcggcgtgctgcgccacgtggtgctcagcggctcggaagatcgcattattaccgatgacgaacgccccttcgtcacgcaccgtcaggaggccaaatga

SEQ ID NO: 115170 - DNA, 912 bp, Enterobacter cloacae
atgcatccacggcaaggattgaagcgtttgttgctcggcgcgctgctcatgaccgcgactactaccggcgcgctggcggctgaaaagttccaggtcatcaccacttttaccgttattgctgatatggtgaaaaacgtggcgggggatgccgctgaggtcacctccatcaccaaaccgggcgcggaaattcacgaataccagcccaccccgggcgatatcaaacgcgcgcagaaggcacagctgatcctggcgaacggcatgaatctggagctgtggttccagcgcttttatcagcatctgaacggcgtgccggaggtgattgtcaccaaaggcatcaccccgatgggcatcagcgaagggccctataacggcaagcccaatccgcacgcgtggatgtcgccggacaacgccctgatttacgtcgataacatccgcgacgcgctggtgaagtacgatccggccaatgcgcagacgtaccagcgcaacgcagaagcctacaagcagaagatcaccgccactctcgaaccgctgcgtaagcaggttgcggagatcccggaagacaagcgctggatggtaaccagcgaaggtgccttctcctatctggcgcgggatctggggatgaaagagctttacctgtggccgatcaacgccgatcagcagggcacgccccagcaggtgcgcaaggttatcgacatggtgaaaaaacatcacattccggcggtgtttagcgaaagtacggtctcggataagcccgcccgtcaggtggcgcgtgaaaccggcgcccactatggcggcgtgctgtacgtcgactctctgagcgcggaaaacggcccggtgccgacctatatcgatctgctgaacgtcaccacccgcacgctggtgcagggcatccgtgacggcatgaaggagtaa

SEQ ID NO: 115171 - DNA, 561 bp, Enterobacter cloacae
atgccggttaatgaaagaattcaccccacttcgggaaccccgattaatccgggcgggatccgacagctcacaattggtgaaatcgcccttgcgaagacgctttacggttacagcatccgttatcatctggtgtgggtacacagggaaagctatcttccttttaatctgcaacccgttgatgtggcgatgagtcccaacggggagatgtggtacagagaggaaacgtattcgccggatttttcgctagaggatgacattgttaaaaaacatcgattcatgcatgagatgatgcatgtctggcaaactcaaaaagggatgtttgtcagaacaagaggattattttccggtattgctgactatacttatagcttagataaagtagatttattgcattatgggttagagcagcaagcgtcaattgtaagcgattactggttattgaaatactttggtttggagaggaatgaagaattattacaatacagagacttaaaacttagggaaagcttgtatttccttctgcaaaaatacaaaaatgtcttaaagggatttccaggatga

SEQ ID NO: 115172 - DNA, 357 bp, Enterobacter cloacae
atgaaaaacatatttgtcatctttatcctctgcattttaatcactggatgcccgggaggtaatcgcgcccccaaaaatagatttacatttattaatggtaaccgcctatgttttagcatagataaaaatgacgtcctgaacttttacactatttattcaagtaaagatcataaaatcactatcgtaacagggtcgggatataataatttagacatctcctacccggatacatgtttaaatataaaatgggaaaatggtcgtacttacgttattcattacggattaaacaataaaaaatatgtacaccaattcgatgttgataataacggaaaacaaatcaacttaggagaattataa

SEQ ID NO: 115173 - DNA, 501 bp, Enterobacter cloacae
atgtcattacccgcttacttatttctcttcgatgagaacggaatgcaggttcagggcgactgtatgatgccaggccgggaaggtgctattgaaatcatgaacagcagttatggcattaagcaggcagtggacagtcataccggaaatatgaccggaacacggcagcatagtccggttaccgtgcataagcaattggataaagtgagcccttatcttgccgttgccgcctgcgagggcagacggctgcaaaaagccattatcaaatattatgaaattgttgaagcgggagcagaaagagagatctacaccattacgcttgatagcgtggtgatctcatctctggatttcacgcatgtttattacccgggcagctcagccccgaatatgcatgaagttgttgggcttcgattccggggcattcagtggaattatgtgaaaggtaatattctttatggcgatgcatggatgaaacccgctcagaaagagaagagtaacgcataa

SEQ ID NO: 115174 - DNA, 450 bp, Enterobacter cloacae
atggctgcgaagaattctatgccagagcgggctattgcccaaacagaaaatgcagatctagagattcagcaagaaaatcgcgagaagctacgcaaaaaacgcatccgggcgttgcatgacgagccggttcactctgcgtatcttcatgaaagaggagaggcggattacgcctgtgtggaactttatactcgaatggagcgcaactatctgccgttaaccggcgcgtggttaacccgcgcagggtttaaagcaggaatagcagtgaagatccgcgtgatgccggattgtattgtgattacgccgcaaaattcccgtgagctgtggggctgtctggaaggcgtcagtgcaacgtataccaacaaactgaagatgatgaagtggctggagacgtttccgggagcgttaattgatacgggggatttgcccgtgaacgaaagtggaaaagggtag

SEQ ID NO: 115175 - DNA, 2034 bp, Enterobacter cloacae
atgacagacctttcacaggacagagaaaaagacaaaatcaacccggtcgttttttatacgtccgccgggctgattttgttgttttccctgacgaccattttctttcgtgatttttctgccgagtggattgggcgcaccctgaactgggtgtcgaagaccttcggctggtactatctgctggcggcgacgctctatattgtcttcgtggtctgcattgcctgctcgcgcttcggttcggtgaagctcgggcctgagcagtccaagcccgaattcagcctgctgagctgggccgcgatgctgtttgccgcgggcatcggcatcgacctgatgttcttctccgtggcggaaccggtcacgcagtatatgcagccgccggaaggggcagggcagacgatggaggccgcgcgccaggcgatggtctggacgctgttccactacggcctgacgggctggtcgatgtacgccctgatgggcatggcgctcggatactttagctatcgttataatttgccccttaccatccgctccgcgctgtacccgattttcggcaaaaagatcaacggccctattgggcacacggtagacatcgcggcggtgatcggcaccatctttggtatcgcgacaacgctcggaattggcgtagtgcagcttaactacgggctgagcgtgctgtttgacatcccggattcgatggcggcgaaggcggcgctgattgcgctgtcggtgattatcgccaccatctcggtgacctccggcgtggataaagggattcgcgtgctctccgagctgaacgtcgcgctggcgctggggctgatcctgttcgtgctgtttatgggcgacacctcgttcctgctcaatgccttagtgctcaacgtgggtgattacgtgaaccgctttatgggcatgacgctgaacagcttcgcctttgaccgtccgacagagtggatgaacaactggacgctcttcttctgggcgtggtgggtggcgtggtcgccgtttgtcggcctgttcctggcgcgtatttcgcgtgggcgcaccatccgtcagttcgtgatgggcacgctgatcatcccattcacctttaccctgctgtggctgtcgattttcggcaacagcgcgctgcacgagatcatccacggcaatgcgacttttgcccaggaagcgatggcgcacccggagcgcggcttctacagcctgctggcgcagtatccggcgtttacctttagcgcgtccgtagcgaccattaccggcctgctgttctacgtcacctcggcggactccggcgcgctggtgctggggaacttcacctcgaagctcaaggacattaacagcgacgcgccgaactggctgcgcatcttctggtccgtcgccatcggcctgctgacgctcggcatgctgatgaccaatggtatctcggcgttgcagaacaccactgtgatcatgggcctgccgttcagcttcgtgatcttcttcgtgatggccgggctgtataaatcgcttaaggtggaagactaccgccgcgtcagcgccagccgcgacaccgccccgcgtccgctgggcgcgcaggacaggctgagctggaagaaacgcctctcgcgcctgatgaactaccccggcacgcgctacaccagccagatgatggagacggtctgtttcccggcgatggaagaggtggcccaggagctgaagctgcgtggcgcctacgtggagctgaaaaacctgcccccggaagagggcgaaaatctggggcacctggatctgctggtgcacatgggcgacgagcagaactttgtctatcagatctggccgcagcagtattcggtgcccgggttcacctaccgggcgcgcagcgggaagtcgacctactaccggctggagaccttcctgctggaaggcagccaggggaatgatttgatggattacagcaaggagcaggtgatcacggacattctggaccagtatgaacggcacctgaactttatccatctgcacagggaagcgccggggaatagcgtgatgtttccggatgtttga

SEQ ID NO: 115176 - DNA, 588 bp, Enterobacter cloacae
atgcccaaagtggggatgcagccgatccggcgcaggcagctaatcgatgccacgctggaagcaattaatgaagtgggaatgcatgacgcaaccatcgcgcaaatcgcccgtcgggcgggcgtgtccacggggatcatcagccactatttcaaagataaaaacggtctgctggaagcgaccatgcgtgacatcaccggtcagctgcgcgacgcggtattaagccgtttacgcgccctgccggacggcagcgcagagcagcgattgcaggcgattgtcggcggcaattttgatgaaacccagatcagcggcgcggcgatgaaggcctggctggccttctgggccagcagcatgcatcagccgatgctctaccgtttgcagcaggtcagcagccgccgattgctctcaaacctggtgtacgagttccgccgcgagctgccgcgtgaacaggctgaagaggcgggctacgggcttgccgcactgattgacgggctatggctgcgcgctgcgctcagcggcaaaccgctggataaaaccctggcccagtcgctcaccagccactttatcagccagcatttaccgaccgattaa

SEQ ID NO: 115177 - DNA, 1473 bp, Enterobacter cloacae
atgtcccgaatggcagaacagcagctttatatcagtggtggttatacatcggccaccagcggtcgtaccttcgagaccatcaacccggcgaacggtgaagttctggcgaccgtgcaggcggccgggcgcgaagacgtcgaccgcgccgtggaaagcgcaaaacgcgggcaaaaaatatgggcggcgatgaccgccatggagcgctcgcgcatcttgcgccgcgccgtcgatatcctgcgcgagcgcaacgacgagctggcaacgctggaaaccctcgacaccggtaaagcgttttctgaaacctcaaccgtcgacatcgtcaccggcgcggatgtgctggagtactacgcggggctgatcccggcgctggaaggcagccagatcccgctgcgcgacacctcgttcgtctacacccgccgcgagccgctgggcgtggtggcgggcatcggcgcgtggaactacccgatccagatcgccctgtggaaatccgccccggcgctggcggcgggcaacgcgatgatcttcaagccgagcgaagtaactccgcttaccgccctgaaactggcggagatctacaccgaagcaggcgtgccggacggcgtgtttaacgtcctgccgggcgtgggcgcagagaccggccagttcctgaccgagcatccgggcatcgccaaagtctccttcaccggtggcgtggccagcggcaaaaaggtgatggcgaactcggcggcctcgtccctgaaagaggtgacgatggagctgggcggtaaatctccgctgatagtgtttgacgacgcggatctggatctcgcggcagatatcgccatgatggcgaacttcttcagctccggtcaggtgtgcaccaacggcacccgcgtgttcgtgcccgcgaaggtcaaagccgcgtttgagcaaaaaatcgttgagcgcgtgggccgcatccgcgcgggcgacctgttcgatgaaaacaccaactttggcccgatggtcagcttcccgcaccgcgacagcgtgctgcgctacatcgccaaaggcaaagaggaaggcgcgcgcgtgctgtgcggcggcgacgtgctgaagggtgacggctttgacaacggcgcgtgggtggccccgaccgtgttcaccgactgcaccgacgaaatgaccatcgtgcgcgaagagatcttcggcccggtgatgtccattcttacctatgacactgacgaagaagccattcgccgcgccaatgataccgactacggtctggcggcgggcatcgtcactgccgatctgaaccgcgcccacggcgctattcatcagctcgaagcgggcatctgctggatcaacacctggggcgaatccgccgcagagatgccggtcggcggctacaaacactccggcattggccgtgagaacggcgtcatgacgcttcagagttacacccaggtgaagtccatccaggttgagatgggtaaattccagtccatattttaa

SEQ ID NO: 115178 - DNA, 1665 bp, Enterobacter cloacae
ttgcaatttgactacatcattatcggagccggctctgccggcaacgttctggcaacacgactgactgaagatccgaacaccaccgtcctgctgcttgaggcgggcgggccggactaccgctttgacttccgcacccagatgcctgccgcgctggccttcccgttgcagggcaagcgctacaactgggcgtatgaaaccgagcctgagcctttcatgaacaatcgccgcatggaatgcggacgaggtaaagggctgggcggctcgtcgctgatcaacggcatgtgctacgtgcgcggcaacgcaatggatctggataactgggcgaaagaaccgggtctggagcactggagctacctcaactgcctgccctattaccgcaaggcagagacccgcgacgtggggccgaacgactaccacggcggcgacggtccggtgagcgtcaccacctctaagccgggcgtgaacccgctgtttgaagcgatggtagaggcgggcgtgcaggcgggctacccgcgcaccgacgaccttaacggctatcagcaggaaggctttggcccgatggaccgcacggtcacgccgcagggccgacgcgccagcaccgcgcgcggctatctggaccaggccaaaccgcgcccgaatctgaccatccgcacccacgccatgaccgatcacattatctttgacggcaagcgcgcggtgggcgtcgagtggctggaaggcgaaagcaccattccgtcaaaagcgacggcgaagaaagaggtgctgctgtgcgcgggcgccatcgcgtctccgcagatcctccagcgctccggcgtgggcaacgctgaactgctgaagcagtttgatatcccgctggtacatgatttacccggggtgggtgaaaacttgcaggatcatctggagatgtaccttcagtatgaatgtaaggagccggtctccctctaccctgccctgcaatggtggaaccagccgaagattggcgcggagtggctgtttggcggcacaggcgtgggcgctagcaaccacttcgaagcgggcggatttatccgcagccgcgaggagttcgagtggccaaacattcagtatcacttcctgccggtggcgattaactacaacggctcgaacgcggtgaaagaacatggcttccagtgccacgttggctccatgcgctcgccgagccgcggccacgtgcgcatcaagtcgcgcgatccgcaccagcatccggcgatcctgttcaactacatgtcccacgagcaggactggcaggagttccgcgacgcgatccgcatcacccgcgagatcatgcaccagcctgcgctggacaagtatcgcggtcgtgaaatcagcccgggcatcgaatgccagaccgacgaacagctggacgagttcgtgcgcaaccacgccgaaaccgccttccacccgtgcggcacctgcaaaatgggctacgacgaaatggcggtggttgacggcgaaggccgggttcacgggctggaagggctgcgcgtagtggatgcgtcgattatgccgcagattatcaccggcaacctgaacgccaccaccattatgattggcgaaaagattgccgacgccattcgcgggcgcgagccgctggcgaagagcacggcggcgtattatgtggcggatggggcgccggttcgccgctga

SEQ ID NO: 115179 - DNA, 495 bp, Enterobacter cloacae
gtgagcgttgaggccactgcgcactgggtgctgggaaaggtgctggatgacgacctggtgccctttgccgttatcgatctgcgcaccgaaaaggcggtagggctggtcagctatatggcgatagaacgctttcagggctcggttgagatcggccacgtcacctggtcgcgcagaatgaagggcacccgcgtgggtaccgaagcggtgtggctgctgctgaaaaatgcctttgagcatcaatatcgccggctggagtggaagtgcgattcgatgaacatcgcctcacgcaacgcggcggagcggctggggtttgtcctggaagggcgcctgcgccagaagctggtgcgtaaaggacgcaaccgcgacagcgatatgctttcgattattgacggcgaatggccgcagcgcgatgcagagctgcgcgcctggctggcggcggagaattttgacggggaaggacggcaggttaagcggcttgaagcatttcggcaataa

SEQ ID NO: 115180 - DNA, 1569 bp, Enterobacter cloacae
atgaataaaaaactgctgccgttactggtgctggctgcgctctcaagcgctgctcacgccgctaccccgcccaacacgctggttgtcgcccagggtctggatgatatcgtgagccttgacccggccgaagccaacgaactttccagcatccagaccgtaccgagtttatatcagcgtctggtacagccggaccgcgataacccggaaaaaatcaccccggttctggccgaaagctgggaagcggacgcggcagcaaaaaccctgaccatcaaacttaagcccgatgcaaaatttgcctccggcaacccgctgcgcccggaagatgtgatcttctcatatacccgcgccgtgacgctgaacaaatccccggcgtttatcctcaacgtactgggctgggacgccagcaacatcgccagccagctcaagaaagtggacgaccataccctcacgcttcgctggacggcggacgtcagcccgtcggtagcgctgaatatactctccacgccgattgcctccatcgtcgatgaaaagcaggttgcggcgaacgtgaaggataacgacttcggcaacgcgtggttaaaaatgcactctgcgggcagcggcgcgttcaaaatgcgcgtttaccagccgcatcaggccatcgtgctggaagccaacgaatccgcacccggcggcgcgccgaagcttaaaagcatcatcattaaaaacgtccccgatcccgcttcccgccgcctgctgatccagcagggtgatgcggacgtggcgcgcgatctgggtgcagaccagataatcgccctcagcggcaagccgggtgtgaaggtgcttagcatcccttctgccgagcaaaactatctggtgtttaacaccggcaacagcgctaacccgctgctgaataatccagcgttctgggaagcctcgcgctggctggtggattatgaaggcatcaccaaagatctgctgaaaggccagtattttgttcatcagagcttcctgccggtcggcctgccgggcgcgctggaggataatccgttcacgtttgacccggcaaaagcaaaagcgatcctcgccagggcgggcatcaaagacgcgcatttcacgctggacgtagagaataaaccgccgttcatcaccatcgcgcaatccatgcaggcgagcttcgctcagggcggcgtgaaggtggatctgctgcccgcggcgggtagccaggtgtacgcccgcgtgcgtgcgaaacagcatcaggcggccatacgtctgtggatcccggactacttcgatgcacactccaacgccagcgccttcgcatggaatgacgggaaatccagcaccgtggccgggcttaacggctggaaaattccggagctgaacaacgctacgctggcggcggttgccgagccggatccggcaaaacgtctggatctgtataagaagatgcaggaacagttacagcataactcgccgtatgtgttcgttgaccagggcaaaacccagatcgtggtgcgcgataacgtgaaggggtatcagcaggggctgaacgcggatatggtctggtacgatcgcgttacgaagtag

SEQ ID NO: 115181 - DNA, 1014 bp, Enterobacter cloacae
atgccacatctttccacccgcgtgcttcagggtctgctgactctcctgctcacgctgttcgggctactgctggtcacgtttgcgctctctgccttttccccggtcgatcgcgtattgcagatcgtcggcgatcacgccagccagtccacttacgatcaggttcgccaccagcttgggctggatcggcctcttcccgtacagttctggcactacctgcaaaacctcgctcacggtgatttaggcaccgccagcgctaccggtcagccggtattgcaggacctgctgcacgcctttcccgccacgctggaactggcaacgctggcgctaattatcggcacggtactcggcgtgattgcgggtgtactgtgcgcccgctacgccggttcgccactggacttagcgatcagaacgctcaccctgctcggcaattcggtgccaatattctggctcggactgctgatgctggctctgttctacgcgaaactacagtggagcgctggccccggcaggctggacgacatctggcaattcaccgttgagccacgaaccggatttgcgctggttgatacctggctttccggcgaccgcgaggcgttccgcaacgccatcagccacctggtgctgccggtactgctgctggcctactactcgctggcaagtatcacccgactgacgcgctccgcctgtctgagcgagatgaacaaagagtacatattgctcgcccgcgccaagggcgctggagagatgaccatcctgctgcgtcacgtgctgccgaacattcgcagtaccctattgacggtgattgcgctggcctacaccagcatgctggagggcgcggtattaaccgaaaccgtcttctcgtggccgggcatcgggcgctacctcaccacggccctgttcgccggtgacaccaccgccgtgatgggcggcacgctgctgattggcgtctgctttgttctgatcaataaccttaccgacctgcttgtgcgggcgaccgatcccagggtgcgctaa

SEQ ID NO: 115182 - DNA, 834 bp, Enterobacter cloacae
atgccgttttatctcttcttacgccgcctgcgccgctcccctgccgcgttttgcgggctgatcgccatcgcgctgctggtgcttattgccctgctagcaccgtggcttgcgccgcatgaccccaactggcaggacgccgccgcgcgtctgcaaccacccaacgcgcagcactggctgggtaccgatagctatgggcgggatctgctctcccgattaatctacggcacccgtccggcactggggctggtggccttagtcaccgttattaccctccccgccggtctgctggtggggattttgtcaggctactacggcggctggatggagcgcatcctgatgcgctttaccgacgtggtgatgtcgatgccgcgcctgatcctcgccttcgcgtttgtcgcgatgctcggccccggtctggtgaacggcgcgctggcgctggccttaacgacctggcctgcctatgcgcgccaggcgcgcagtgaaatccagcgtctgcgccacagcgattatctggccgccgcggagatgatgggcattcgcggcccgcgcctgctggtcggccatattctgcccctgtgcctgccctccgcgattgtacggctggcgctggatctggccgggatcattctggccgccgccgggctgggcttccttggcctgggcgcacgtccaccgatggcggaatggggcgcgatgatcgccgacggcatgcaggtcatttttgaccagtggtggattgccgccattccaggcggggcgattctgtttgccagcctggcctttaacctgctgggcgatggcctgcgcgacgtactggagccacagcatgactga

SEQ ID NO: 115183 - DNA, 837 bp, Enterobacter cloacae
atgactgaacaccgcgtcatcgtcgatgcgctgaatatcgactaccccgccgcgcgcgtggtccacaacctgagctttacgttaggcaacgagcggctggcgctggtgggagaatccggctccggcaagtccatgtctgcccgcgccctgatggggctggtgcgcaagcccggcatcgtgagcgctaagcggcttaacgtgcttggcaacgacctgctgaccctgaacagccgccgctggcaggcgctgcgcggcaacggcattgcgatggttctacaggacccgcgctacgcgctaaacccggtgaaaaccgtcgccgcccagcttgatgaagcgctgaccctccatcagcgcctgccccgcgccgaacgcctggcgcgcattcacgatatcatccgcgccgtggggctgaacgagcacgtgctccagcgctatcccggcgaactctccggcggcatgggccagcgcgtgatgatcgccattgcgctcgtcaacaacccgcaggtgctgatcgccgacgaaccgacttccgcgctggacgcacgcctgcgcaaccagatcctggagctgctggtacagcagtgcgaggcgcggcagatggcgatgctgttaatcagccacgacttgccgctcgtcgcggaacactgtgaccgcgtgccggtgatgtatcagggtgagaaagttgatgaaatggcggcgagccagttgccgcaggcaacccatccctacacgcgcacgctctggacctgccgcccgaacgccgggacgtttggccagatgctgccgacgctcgaccgttcgcaaccgtggaaggaggccgacaatggcactcgttga

SEQ ID NO: 115184 - DNA, 705 bp, Enterobacter cloacae
atggcactcgttgaggttaaccagctccgggtgagttttagtgaaaaaacggcggtttccgccgccagttttgcgatcgaaaaaggcgaaaccttcagcctgatcggtgaatccggctgcggcaaatcgactcttctgcgcgtgctggcggggctgctgcgcgagtggaatggccacatttccgtcctcggggaaaatttacggccaggacgacgttttgaaggcgcgcttcgccgtaacgtgcagatggtgttccaggatccgtgggcgtctttgcacccgaaccacaccattgcccgcaccctgtcggagccgttaaacatccacggcgaaccccaggttgccgaaaaggtggcggatgcgctgcaacaggtgggtctggctgccgacgccagcaggcgttacccgcatcagctttccggcggacagcgtcagcgcgtggccattgcccgcgcgctgctgctgcgcccgcagcttctgctgctggatgaaccgacctcggcgctggatatgtcggtacaggcggagatcctgaacctgctcaaccgcctgaaggcgcagcacggcatgacctacctgctggtgagccacgatgcggacgtgattgcgcatatgtccgaccgggcggcatttatggcgcacgggaagatccagcgggtatttgaccgtgaagcaatgttgcggggggagcacaggatggggtaa

SEQ ID NO: 115185 - DNA, 474 bp, Enterobacter cloacae
atgaacggtacaatcacaacgtggtttaaagataaaggctttggatttatcaaagatgaaaacggcgacaaccgctattttcatgtgattaaggtcgccaaccctgatctgattaagaaagatgcggcggtgaccttcgagccaaccaccaacagcaaaggcctttccgcgtatgcggtgaaggtgatcccggagagtaagcatctttatattgcgggcgagcgcgtgaagctcacctcaattaaatccttcgtggtgttcagcgaggaagagcccgttgagaccaaaatcgacaaagagaatgcggtgctgtcggtggggctgctgatgaacagcatcaaacccaaaaccgagaaaaagccgggcgaaatgcgcacggtgaagaagctggcgatcactaccttccagaacacgacgctgatcttcactgaagatgagatcgacatcgatgccacggtgaagctgctgaagtaa

SEQ ID NO: 115186 - DNA, 771 bp, Enterobacter cloacae
atgcaaaaagtggctctcgtaaccggctccggtcaggggattggcaaagcgatcgcgcttcgcctggtgaaggatggttttgccgttgctattgcggattacaacgaagagacggcgaaagcggtcgcggatgagatcacccgtaacggcgggaaggccgtcgccgtgaaggtggacgtctctgaccgcgagcaggtgttcgcggcggtggaaaaagcccgcaccgcgctgggcggttttaacgtcatcgtcaataacgccggggtggcgccgtccacgcccatcgaatccatcacgccggagattgtcgacaaggtctacaacatcaacgtgaaaggggtgatctggggcattcaggccgcgattgacgcgtttcgtaaagaggggcacggcggcaaaattatcaacgcctgctctcaggcgggccacaccggcaacccggagctggcggtctacagctccagcaagttcgcggtgcgtggcttaacccagaccgccgcgcgggatctcgcgccgctggggatcactgttaacgcctactgcccggggatcgtcaaaacgccgatgtgggcggaaatcgaccgtcaggtctccgaggcggcgggtaaaccgcttggctacgggacggaaacctttgccaaacgcatcacgcttggccgtttgtccgaaccggaagacgtggccgcctgcgtctcttacctcgccgggccggattccgactacatgaccggtcagtcgctgctgattgatggtgggatggtgttcaactaa

SEQ ID NO: 115187 - DNA, 1680 bp, Enterobacter cloacae
gtgaacagtgagaaacagtcacgtcagtgggcgcacggcgccgatatggttgtcggccagctggaagcgcagggtgtgaagcaggtgttcggcataccgggcgcaaaaatcgacaaggtctttgactccctgctggactcctccatcgagattatcccggtgcgtcacgaggcgaacgcggcgtttatggcggcagcggtagggcggctaaccggtaaggccggggtcgcgctggtcacctccgggccgggctgctccaacctgatcaccggcatcgccaccgccaacagcgaaggtgacccggtggtggcgctgggcggggcggtgaagcgggcagataaagcgaaactggtgcaccagagcatggataccgtcgccatgttcagcccggtcaccaaatacgccgtcgaagttaattcaccggacgcgattgccgaggtggtgtcgaacgcgtttcgcgctgccgagcagggcaggccgggcggggcgtttgtcagcctgccgcaggatattgtcgaccagcccaccacgggggcgattttacccgccagcaccgcggcgctgatgggcccggcgccggagtcagccatcaacgacgtggcgaagcttatcgcgaaggccaaaaacccggtcatcttactcggcctgatggccagccagcccgccaacagcgccgcgctgcataagctgctggagagaagccgtattccggtcaccagcacctatcaggccgccggggcggtgaatcaggaacacttcacccgcttcgccggacgcgtcggcctctttaacaaccaggcgggcgaccggctgctgcatctggcggacctgattatctgcatcggctacagcccggtggagtacgagccgtccatgtggaacagcggcgacgccacgctggtgcacattgacgtgctgcccgcttatgaggagcgcaagtatgttcccgatctggaactggtcggggatattgccgccacgctgaatctgcttgccagtcgaatcgagcacaaacttgaactcagccagcgcgcctcggaaattcttgtcgatcgccagcatcagcgggacctcctcgaccgtcgcggcgcatcgcttaaccagtttgccctgcatccgctgcgcattgtgcgcgccatgcaggacatcgtgaataacgacgtaacgctcaccgtcgacatgggcagcttccacatctggatcgcccgctacctctacagcttccgggcgcgtcaggtgatgatctccaacggtcagcagaccatgggcgtggcgctgccgtgggcgattggcgcgtggctggtcaacccggggcgcaaggtggtctcggtctccggggacggcggctttttgcagtcgagcatggagctggaaaccgccgtacgcctgaacgccaacgtgctgcacatcatctgggtggataacgcctacaacatggtggccatccaggaagagaaaaaataccagaggctttccggcgtcgagttcggcccggtcgatttcaaagcctatgccgacgcgttcggtgcgaaaggctttgccgtcgagagcgcggacgcgcttgagccgacgctgcgtgcggcaatggatgtcgatggcccggccgtggtggccattcccgtcgactacagcgataacccgctgctgatgggccagctccatctcagccagattttgtga

SEQ ID NO: 115188 - DNA, 783 bp, Enterobacter cloacae
atgatgatgcattcatctgcatgcggctgtgaggcgagtttatgcgagaccctgcgtgggttctcggctcagcatcctgacagcgtgatctatcagacatcgctaatgagcgccctgctaagcggcgtctacgaaggggagacgaccatcgccgacctgctggcacacggtgattttggtctcggtacctttaacgagctggacggtgaaatgattgccttcagcagccaggtgtaccagctgcgcgccgacggcagcgcccgcgccgcgaagccggagcaaaaaacgccgttcgcggtgatgacctggttccagccgcagtaccgcaaggccttcgacgggccggtcagccgtcagcagatccacgacgtgatcgacaagcaaatcccctccgataacctgttctgcgcgctgcgcatcgacggcaatttccgccacgcgcacacccgcaccgtaccgcgccagacaccgccgtaccgggcgatgaccgacgtgctggatgaccagccggtgttccgctttaaccagcgcgagggcgtactggtcgggttccgcaccccgcagcatatgcagggcattaacgtggcgggctatcacgaacactttatcaccgacgaccgtcagggcgggggccacctgctcgactatcagctggagaacggcgtgctcaccttcggcgaaatccacaagctgatgattgacctgcccgccgacagcgcgtttttacaggccaacctgcaccccagcaaccttgatgcggctatccgcgccgtcgaaaactaa

SEQ ID NO: 115189 - DNA, 882 bp, Enterobacter cloacae
atggaacttcgttatctgcgctattttgtcgcggtagcacgcgagcgacacttcaccagggcggccaaagcgctgggtatttcacagcctcctctgagtcagcagatcaaacggctcgaagaggaagtgggcacgccgctgttcaggcgcctgacgcggggcgtggagctgaccgaagcgggagaggccttctatgaggacgcctgtaagatcctggcgctgagcgatgccgcgctggagaaagcccggggcatcgcgcgcgggctgaacggcagcctgtcgattggcatcaccagttcagatgcttttcatcccaaaatcttcgccctgattcgccagtttcaggtgcagaacatggctgtgcaggttcaccaggtggaagccaatatgtcgtcgctgacgacgatgctggcggagggtgagctggatatcgcctttgtgcgcctgccgtgcgaaagcagtaaggtgttcgaattaaaaatcctcgatcgggagccgatggtggtggcgctgcatcgcgatcatcctctggcggcatgtggcgatctggcgctggatgagctgcgggatacgccggtggtgctgttcccccaggaggtagcaccggggctgtatgaccgcgtttacggcagctgcgagcgggccgggatcgatatgcaacacacgctgcaatcttcacaactttcctcttccctgagcatggtctccgctggcggcgggttcgcgctggtgccgaaatccatggccgctatttctccgccgaatgtcacctaccatgcgctgcgctcgccggagctttataccgatatcgcgctctgctggcggcgctttgagcgttcgcggacggtgaagcggtttctggcgatgatgagcgaggagtag

SEQ ID NO: 115190 - DNA, 669 bp, Enterobacter cloacae
atgactaccgctgatttcaaacgccctaaactagaactcccaaacggggcagataaactgctgctgcactcctgttgcgctccgtgttctggtgaggtaatggaggcgatccaggcctcagggatcgactacaccatcttcttctacaatccgaacattcatccgcagaaagagtatctgattcgtaaggatgagaatattcgctttgccgaacagcacggcgtaccgtttattgatgcggattacgatacagataactggtttgagcgcgccaaaggcatggaatgggaacccgagcgcggcattcgctgcaccatgtgttttgacatgcgctttgagcggactgcgctttacgccgctgaaaatggcttcaacgtgattagcagctcactgggcatctctcgctggaaaaatatgcagcaaatcaacgactgcggtcagcgagccgccgcccactatccgggtatggtctattgggactataactggcggaaacagggcggttcgtcgcgcatgattgaaatcagcaagcgcgagcagttctaccagcaggaatactgcggctgcgtttattcactgcgtgacagcaacctgcaccgcaaatcccagggccgtcctctcattcagatcggtaagctttactacggtaaagaagacgaccaggcctga

SEQ ID NO: 115191 - DNA, 300 bp, Enterobacter cloacae
gtggtcagcagccagtgtgacgtggcctggatcagccaggcgatattaatcgcgttgttgagcgtcagcggcttatccgtcgaccgcacctgcatggtgctaatgtgcgggctggggcgaatgtcccagtgcagatctttaatgctgtcgatcctgtccgaccgtcaggcggatcgcctgatggagtgggacatacgcaacggcgtgatccagcgctatggccgcaggcacgggattgcggtgcccgtcagcgatgtggtggtgccgctgctggcggcggggagcgaggggccggggtga

SEQ ID NO: 115192 - DNA, 492 bp, Enterobacter cloacae
atggctattcccgcttatttatggcttaaagatgacggcggcgccgatataaaaggctctgtcgatatatatggacgtgaaggtagcatcgagattatcgccttaaatcacgccataatgcagcccacggacaagcataacggcaaggcgacaagtcttcgcatccattccccctattctttcgataaagagatcgacgcttccagcccctatttgtacaaggctgttagcacgggccagaagctaaaatccgcagagataaagttttaccgtatcaacgatgctggtcaggaagtggaatatttttccacccttctggaaggcgtgaagatcgccagcgtctgtccaatgatgcttgatatcaaagatcctgactatgagaagcataaccatcttgagctggtagagctgctctatgaaaaaattacctggcgctacgtggacggtaacatcatgcattcagatagctggaatgaccgtaagacggcataa

SEQ ID NO: 115193 - DNA, 357 bp, Enterobacter cloacae
atgggatggaagtatgagcaatcaactggcaagatgtataaagacggcaaattaattgagacaggatattccggtgcccttaccaataaaaataatccggaccgtcagcatgtgaagggtctgggtccattgccgcgcggaacatataaaattgcgggacattcgaattctaaaggacccattaccattatccttgagcaaacttcgggagagagttttggtcgttcagagttccgcattcatggtgaccataagtacggtccagccggatttgcttcggaggggtgcatcattctctcactgtcaacgcgacgtaaaatccttcgtgacggcggtgagcttgaggtagtgcgatga

SEQ ID NO: 115194 - DNA, 435 bp, Enterobacter cloacae
atgaaatacccaatcgttctgctgctttgtgcgctcactgtcccagccattgcagccagcactgactggccatcagcacttcatggaatcgcctcaggtgacacacactggattgagcaagccccaacgctggctgccacggctgacgccaggcaggcgcaactgctggaggatgctttggccgcagcgctcacaacaaacaccagcgccacactgaaagcgctccagaccattgacgcgggaaagtggccgcacatggttggcagcgatatcgtctgcacgccgcctctagagaaatcccccgccgaagtcgacgcgttctatcagcgcacccgccgggcgctgctggatacggttgagggtgctcagtgcctctggatcctggaagcaacaatggaagagctaaacgctgagaaagcccgtcagggtaagtaa

SEQ ID NO: 115195 - DNA, 891 bp, Enterobacter cloacae
atgtctgactatccaaccattgcgctgacaggacccggtgcgattgggaccaccatcgccgcggtgctgcatgaagcgggccgcacgccgctgctgtgtgggcgcaccgcgcatccggaactgcgcctgcgtcatgatgagggtgaaattgtggtgcccggtccggtactcaccgatcccagcgtcattacgcgccccgttgaccttgtttttttggcggtcaaaacgacgcaaaatgccgacagcgccgggtggctgcgcgctctgtgcgatgaaaacaccgtggtctgcgcgctgcaaaacggcgtggagcagaaagcccagcttgcgcctttggtcaatggcgcaacggtgctgccctcggtggtctggttccctgcccagcgcgagccggatgcctccgtctggctgcgcgccaaaccgcgccttacgctgccggacgtgccgcaggcgcagcgggtgggggaggcgcttcgcggcacgcgctgtgacgttgaactctcggctgatttccccaccgtcgcctggcgcaagctgctgcaaaacgcggtcgccgggctgatggtgctggccaatcgccgcgccgggatgttcaggcgcgaggatatcagcgaactggcgctggcctacctgcgcgaggggctggccgtcgcccgcgccgagggggcgaagctggccgatgacgtggcgcaggagattctggcgaactttcagcgcgcgccagtggatttgggcacgtcgatcctcgccgaccgtcaggcggatcgcccgatggagtgggatatccgtaatggcgtcatccagcgctacggccgcaggcacgggattgcggtgcccgtcagcgatgtggtggtgccgctgctggcggcggggagcgaggggccggggtga

SEQ ID NO: 115196 - DNA, 1122 bp, Enterobacter cloacae
atgcctttacccgacttcaaatcctctgaaccttataccctcggcattgagctcgaactccaggtggttaacccgccgggttacgatctgagccaggactcctctgccctcatcgccgccgtcaaagacgacatcaaagggggggaagtcaaacacgacatcaccgaaagcatgctcgaaatcgccaccggcgtgtgccagaccatcgaccaggcagcggcgcagttttcagtgatgcagcagagcatcctgcgcgcggcggaagatcagcatatccagatctgcggcggtgggacgcatccgttccagaaatggcagcggcaggaagtgtgcgacgacgagcgctataacgtcacgctggagcgctttggctatctgattttgcaggcgacggtgttcggccagcacgtacacgtcggctgtcggaccggggacgacgccatttacctgctgcacggcctgtcgcgctttgtgccgcactttatcgccctggccgccgcatcaccgtatatgcagggcacggacacgaagttcgcctcatcgcgtctcaacatcttctcgggcttcccggataacggtcagatgccgtgggtcaacagctggcaggagttcgaggggctgttccgccgcctgagctccaccagcatgatcgacagcattaaggatctgcactgggacatccgccccagcccgcacttcggcaccgtcgaggtgcgggtgatggatacgccgctaacgctcagccacgccattaacatcgccgggcttattcaggcgacgtcgcactggctgctgaccgcgcggccgtataagcatcaggaacgggattttctgctctatcgctttaaccgttttcaggcctgtcgctacgggctggaaggcattctgacggacgtacataccggcgagcacaaaaccgtggcggaagatatcgcctggctgctcgagcaggttgcgccgtcggccgagaagctcggcgcgacaagcgcaatcaatgagattgccctgctgttaaagcagggcaagagcgaggcgcagcgcatgcgggactttatcgccgatggcggctcgctgatttctctggtgcagaagcactgtgagctgtgggcgacgagtccgtaa

SEQ ID NO: 115197 - DNA, 3156 bp, Enterobacter cloacae
atgctgacgtttttcatcaaacgcccgcgctttgcgatggtgattgcgctggtcatcaccctgctgggggccatcgcgctgaggattattccggtggagcagtacccgcagatcaccccgccggtcgtgaatgtgtcagcgtcatggccgggcgccagctcggctgacgtggcggaggccatcgccacgccgctggaaacccagctgaacggggtggatcatatgctctatatggagtccaccagttcggacgagggtagctatagcctgaacattacctttgcggcaggcaccgacccggatctcgccgccatcgacgtgcagaaccgcgtggcgcaggccgtggcgcagctgccgaccgaggcgcagcaaaacggcgtgcaggtgcgcaagcgcgccaccaacctgatgatgggggtaagcctttactcaccgaacaacacccacacgccgctgttcgtcagcaactacgccagcacccaggtgcgcgaggcgctgtcgcgtctgccgggcgtcgggcaggtacagatgtttggcgcacgggactacagcatgcgcatctggctgcgcccggaccgcatgaacgccctgaacgtgaccagcgatgacgtggcgcaggcgctgcgcgagcagaacgtgcagggggcggcaggccaggtcggcacgccgccggtgtttaacggccagcagcagaccctgaccattaacgggctggggcgcttaaatcaggccgacgactttgccaacatcattatccgcgccggggagatgggtcaactggtgcgcctgaaggacgtcgccaccatcgagcttggctcgcgcagctatagctctggcgcgcagctgaacgggcacgactccgcctacctcggcatctacccgacgccgtccgctaacgccctgcgcgtggccgatgcggtgcgcgcggagctggaacggttatccacgcgcttcccggacgatctggtctatgaagtcaaattcgacaccacctcgtttgtggccgccaccatcaaagagattggcgtctcgctggcgctgacgatgctggcggtggtggtcgtggtgtccctgttcctgcaaagctggcgcgcgacgctgattgttgcccttgccattccggtgtcgctggtgggcaccttcgcggtgctctatacgctcggctactccgccaatacgctgagcctgttcgctatcattctggcgctgaccatggtggtggatgacgccatcgtggtggtggagagcgtcgaaacgctgatggcggaagggcagagccgtacggcggcgaccgcgctggcgctgcgccagatcgccgggccagtgattgccaccacgctggtgctgctggcggtgtttgtgccggtggcgctcctgccggggattgtcggcgagctgtaccgccagttcgcggtgacgctctcgactgccgtcacgctctcaagcctggtggcgttgactcttacgcccgccctgtgcgcgctgttgctgcgcccgcgaccggagaaacctgcggcactctatcgcgcctttaaccacgggctggacgccacgcgcggtttctacacccgcatcgtgaacgttttaaacctgcgcccgtggctggcgctgctggccaccgcaggcgcggcggcggtggtggtattcagctttatgtcgatgccaaagggcttcctgccgcaggaggatcagggctacttcttcgccagcgtccagctgccggaggcagcctcgctggagcgcaccgaagcggtgatgaccaccgcgcgcgagctgatcgctaacaacccggcggtagaagacgtgattcaggtctccgggtttaacatcctcaacggcaccagcgcatcgaacggcgggtttatctccatcatgctcaaagactggagcgagcgtccgccgctggatgaggtgatgggcatccttcagcgccagctgctggccctgccggaagccaccatcatgacctttgcgccgccgacgctgccggggctgggcaacgcctccggcttcgacctgcgcattcaggcgcaggcggggcaaagtccggcggagctggagcgcgtgacgcgtgaggtgctggcgaaagccaaccagcacccgcagctgagccgcgtgttcaccacctggagcagcaacgtgccgcagatgacgctcaccgttgaccgcgagcgcgcggcccgcctcgacgtgccggtgtcacgcatcttcagcagcctgcaaaccgcctttggcggcacgcgcgccggggatttcagcgtcaacaaccgcgtctaccacgtagtgatgcagaacgagatgcagtggcgcgagcgcgcggagcaaatcagcgagctgttcgtgcgcagcaacagcggcgagcgggtgcgtctgagcaacctcatcaccatcaccccgaccgtcggcgcgccatttatacagcagtacaaccagttcccgtcggtatcggtgagcggctcggcagcggaaggggtgagcagcagcaccgcaatggcggcgatgggcgagattctggcggaaaacctgccagccgggtacgactacgcctggagcggcatgtcgtatcaggagcagcagaccggcaatcaggcgatatggatcgtgctggcggcggtggtgatggcgtggctgttcctcgtcgcccagtacgagagctggacgctgccggcgagcgtgatgctctcggtgctgttcgccatcggcggggcgctggtctggctgtggctggcgggctacgccaacgacgtgtatgtgcagataggtctggtgctactgatagccctcgccgccaagaacgcaattcttatcgtggagtttgcccgcgcccggcgcatggatggaatggcgattgtcgatgccgcacgggagggggcatcgcgccgcttccgcgcggtaatgatgaccgccgtgtcgttcattatcggcgtcctgccgatgatgctggcgaccggggcgggtgcccagagccgccgcatcatcggcactacggtgttcagcggcatgctggtggcgaccgtggtggggatagtgttcatcccggcgctgttcgtgctgttccagcgcctgcgcgagtggggccacggccttacggactcgtcgcccacagctcacagtgcttctgcaccagagaaatcagcgagccgccatcggcgataa

SEQ ID NO: 115198 - DNA, 1065 bp, Enterobacter cloacae
atgaaattcccactcctgttcgcgctcctcgcctgcaccctgccacccgcattcgccgcggccattcccgtgcgtgtcgccaccgtggagcagaccgcccacgccgccgagcgtcagatcccgggtcgcattgaagctatccacaccgttgaactgcgcgcccgcacggaaggcgtcatcaccagaatccacttccgcgacgggcagtacgtgaaaaaaggcgacgtgttgttcgaactggacgacgccgagccgcgcgccgccctgcgtctggcgcaggccgaagtgagaagcgccgaagccacgctgcgtcaggcgcagcagcagctgtcacgcttcgaaagcctgggcagcagcaacgccatcagccgccacgacgtggacaacgcccgcatgcagcgcgacgtagcgagcgccgcgctggagcaggcgaaagcccggctcgacacccgcagcgtcaccctcaactacacgcgcattacctcaccgattgacgggcgcgtggggcacagcaactttcacgtcggcagcctggtgaatcctgccagcggtgtgctggtggaggtggtacagctcgatcccatccgcattgcctttgcgctggaagagggcacgtttgccactaaagccggacagcatgcggatatcagcgccatgaagcaggcctggcaggcgctgattgacagcaacggccagcgcatcagcggggaactcacctccgtggacaaccgcatcgacccgcgcaccgccagcgtgatgctgcgcgccgagttcgccaacccgcgccatcagctgctgcccggcggcaacgtgaacgtctacctgcgtccgtcaagtgagcaaccagtgctgactctgcccgccgctgccgtacagcagaatggcgacgggttcttcgcatgggtggttaacgccgaggataaagccgaaatgcgtccgctgaaggtcgccgtacagatcggccagcagttccagattgcctccggcctgaagcccggtgagcgagcgattactgacggtgcgcagcgcgtgcagccaggcgttgccgtccagatactgaattaa

SEQ ID NO: 115199 - DNA, 2709 bp, Enterobacter cloacae
atgaccaaaaaaaatttctcgcagaatatgccacccgcaggcgggcaggcgtaccagcagaccgtagagcaggtgcttgctcaggcgcagagccaggctaatggcctggaccgtgccgaggcgcaggcgcgtttacagaagcatggcccgaacgcgctgccggagaaaaaaggcaagccgggctggctgcgttttctcgcgcattttaacgatgtcctgatttacgtcctgctggcagccgccgtattaacggcagtaatgggacactgggttgatacgctggttattctgggcgtggcggtaatcaatgccttaattggccacattcaggaaagtaacgcggaaaaatccctgaagagtattcgcaatatgctctccagcgaggcgcgcgttattcgtaacggcaaccatgaaactatcccgacgacggaaatcgtcccgggcgatattattgtgttgcgcgcaggagatcgtataccggcggatatgcgcttaatcgaagcgcataatttacgcgtggaagaggcaattctgaccggtgaatccaccgtggtggataaacacacgaacccgctgaacggcgaattaccgctgggcgaccgcacgaacctggtcttttccggtacgacggtaagcgcgggcggcggcgttggcgtggtcattgccacgggccaggagaccgaactcggccacatcaaccagatgatggcgggcattgaaaaacaccgcaccccgctgctggtgcagatggacaagctgggtaaagcgatcttcgccatcattctggcgatgatggccgcgctgtttgtcttcagcctggtgttccgcgagatcccgatgggcgagctgctgctctccctgattagcctggcggtagcctccgtaccggaaggtctgccagcgattatctccatcatcctctcgctgggcgtacaggcgatggcgcgcaagcgggccatcatccgcaagctgccgacggttgaaaccctgggcgcgatgaccgtggtctgctcggataaaaccggcaccctgaccatgaacgagatgacggtgaaagccatcatcaccgccgacacctgctatcgcgtggacggcaacagctacgagccggtgggcaacatctacctcgaaggcagcgacgagccggtgcagatccagccgggcaccgtgctggagcagtatctgcgcaccatcgacctgtgtaacgacagccagctgattcaggacgagcgtggcctgtggggcatcaccggcgggccaaccgagggcgcgctgaaggtgctggcggccaaggcccacctcgagccggtcgtgaccacgctggttaacaagatcccgttcgactctcagtacaagtacatgagcacccactaccagattggcagtgaggagcagattttgattaccggcgcgccggacgtgattttcgccctgtgtgagcagcagcagacccgcaacggtgcgcaagcctttgaccgcgcgtactgggaaacggagatggagcgctatgcgcgtcaggggctgcgcatggtcgccgcggcgttcaagccagcgaacggcgagcaggcattaactcacgacgacctgagccacggtctgatcttcctcggcattgccgggatgatggatccgccgcgtccggaagcgattgaggcgattaacgcctgccagcaggcggggatccgcgtgaagatgatcactggggatcacccgcagacggcgatgagcatcggccagatgctggggatcaccaacagcgagcaggcggttaccggctaccagctggagaagatggacgacgccgagctggcggaagcggcggtgaagtatgacatcttcgcccgtaccagcccggagcataagctgcgcctggtgaaagcgttgcaggacaaaggcgaaatcgtcggcatgaccggtgacggcgtgaacgatgccccggcgctgcgccaggcggacgtgggtatcgcgatgggcatcaaaggcacggaagtgaccaaagaggcggcggacatggtcctgacggacgataacttcgccaccatcgccagcgcggtgaaagagggacgtcgcgtttacgacaacctgaagaagaccattctgttcatcatgccgaccaacctggcgcaggggctattgattgtgattgcgctgctggcggggaacatcattccgctgacgccagtgctgatcctgtggatgaacatggcgacctccgccacgctctccttcggcctggccttcgaggccgccgagcgcaacattatgcgccgcccgccgcgtcagaccgggcagcacgtgatggacgcctacgccgtctggcgcgtggccttcgtcggcaccatgattgccatcgccgcctttgcgctggaagcctggctggccccgcgcggccacagcgcggagttcatccgcaccgtgctgttgcagatgctggtctgcgcccagtgggtatacatgattaactgccgcaacaccgacgggttctccctgaaccgcggcctgctggcgaacaaagggatctggctggtaacgggcgtactgttcctgctccaggcggcgattatctacctgccgtttatgcagatgctgttcggcaccgaagcgctgccgctgcgctactggttcgtgacgctggcggtggcgggcgtgatgttcttcgtcgtcgaaatcgagaagcgactgacccgcaggttccgtaaggctgcataa

SEQ ID NO: 115200 - DNA, 249 bp, Enterobacter cloacae
atgaaacacccgttagaatcgctgctcaccgcagggggcattttgctgatggccctgctctcctgcctgctgttacccgcgccgtcgctgggtctggtgctggcgcagaagctggttcagacctttcatatggtcgatctgaatcagctgtacaccattctgttctgtctgtggtttttggtgctcggcgccatcgaattctttatcctgcgtttcatctggcgccgctggttttcactggcgtcgtaa

SEQ ID NO: 115201 - DNA, 1569 bp, Enterobacter cloacae
atgaagagggtatggagtgggttgctgctggggatcggcgcgctgcccgccgtggcggcaacgtgcgagcagtcgtcccggcagggcgatgttcagggaaagtttgatgccagcggcgaagtctgcttctccctgcccgagctggatgaaaattacgtttccgccacgctgcatggcgtgacggatgcgcgcctgctggatgggcaaaaccgtcgcatccgcacgctgatcgaaaacggtcctgcggacggggaacacacgctgctgtttgccctgccggtgaaacagaacacctcgctggtgctacacggcgaagctggcaagccgtggcgttttcagtggcggatgaaagagacctctccgttaccacgcgtgcagatgctggcgccagaaagcccgacgctgaaggcgctggcaaacgtcatttctgccggtggaagtaccgaggcgttctggcaggcgcagcgtcgacagggaacgccgatggtggagccggtagatgcgagccataagcgggtgacctttctgtggcgcggcgcgcgggataacgtcttcattctcggctctccggcgggggatcacgatccgctgttccgtctgggcaacagcgacgtctggttccgcagctacgtggtccccgctgatacggtgatgcagtacaagctcgcccccgatgtgccgatcgttgaaggctctgcccgcgatcaacgccgcgccatcctggtaagcgcgcaggccgatccgcttaacccgaatagctttggggagcagaagaccgatcgctggaatcgctattctctgctcgatctcagcccggcgcgctactgctccgttcgggctacggcacagccgctgttacacgggacgttgagccgccagaggctgagcagcaacatcctcggcaatgcccgcgacgtgatgatctaccaaccgcgcggcgcacagcctgcacgctggacgctcatccttttcgacggacaggtttatcaggacgaataccattttgccaacgtgctggacggtctgattgcccgacatcacctgcctccgattaacgtggtgtttatcgacagcctcgatcacgcccgtcgcggcaacgagctgccgccgaacccggattttgctgactttatggcgcacgagctgctgccgtggctgcgggggaagggcatcggcatgcagcggcagaaaaccgtactggcaggatcaagctacgggggaattgcctcttcatgggtggcgctgcgctatccgcgcctgtttggcaacgtgctgagcctttccggttcttactggtgggcaccagaaggtgacgctcccggctggctgacgcgtcagtaccaacagtctccaccgtatccggtgcgcttctggttacaggccgggaagtttgaaaccacgggaccgggcggcggcatctatcgcaccacgcaggattttgaacaggtgctgaggaataaaggctaccgcgtcagcttccacccctcatccagcggccacgactacgcggcctggtgtgaagcgctgatccacgggatgcgcgatctcactggcttacgacgccagtga

SEQ ID NO: 115202 - DNA, 2145 bp, Enterobacter cloacae
atgtttaaaaataataagataatgcagctctggctgctgagtctggcgacgaccagcgtcgcggctcaggcagaaacgaaagaagaaacgattacggtgacgcagggcgtgagtgaagagcccactgcgcccgtaaaaggcattgtggcgacgaaaacgctctccgccaccaagaccagcgcggagatcgtgaagacaccgcagtcggtatcggtgatcacccgcgatcagatgaacatgcaggacgtcacctccgtttcgcaggcgctgcgctactcggcgggcgtgtttaccgagtaccggggctcgtctaaccgtaacgacgaggtgtttgtgcgcggctttagctacgtgccgaaattcctcgacggcttaagctttggcgcaacggcttcctcacagacgggcacagttgacccgtggctgctggagcgcgtggagctggtgcgcggcccggcgtcggtgctgtttggacaggtgaatccgggcgggttaatcagtatgaccagcaagcgcccgacggcggaggccattcacaacgtgcagttccgcaccggcaataacgatctcgccgaaggtgcgtttgatttcggcggcaagctgagcgacgacggccgcgtgctgtatcgcgtgaacggtatcgcccgtacgcagcataatcaggtggacgattataaagagacgcggatggcgatcgccccggcgatcacctggtacccgaacgatcagacccgctttacgctgctgaccagctaccagaaagatccggatgccggataccgcaacttcctgcccgcgtatggcacggtgaaaagagccgacgggaagtacatcccgcgcgactttaacgtcagcgatccgaattacaatcaatcctggcgcgagcagacgatgattggctacgagctggaacaccagttcgccgacaacctcaccttccgccagaacgcccgttacgccaccatcaagcagaaatatcgttatctggtttacgccaacagcgcggccaacagcacggtgttgacccgtcgcgcccagcgtgaagagcgcacgaccaacgaatttggccttgataaccagctggaatatctgctggagaccggaagcgtcaaccacaccctgctcggcgggtttgattacaagaccagtaaggataaacagctgctggcgcgcgggagcggctcacagtatgacctcgactggacaaacccggtttacggcgtgaacgtggatgaaagtaccttcaaaacggccaccgacgagcagcaaaatctcgaccagatgggcctgtatcttcaggatcagatgagctggaacaactgggagtggctggtttccgggcgctacgactggagcgaagtgcgtactaacgactacaccgacaacagctttacgcagcagaacgacagcaaatttacctggcgcactggcctgctgtacgcgtttgattctggcctgtcgccgtacatcagctacagcacctcgtttgaaccgaacctgcaaaccaaccgtgcgccgggcgttgcgccattcaggcctactaccggggagcagaccgagattggcgtgaaatatcagccggtcgacaccacgctgatgaccctggcgctgtacgatttgactcaggacaacgtagcgacctataacagcgctgaaggctggttcgaaaatgcgggcaaggtgcgttcgaaaggcgctgaagcggaaatccacgccacgctgatggataacatcaacctgattggctcctacacttacaccgatgcaaaaaccgaaagcaccacggtggcgggaactgaaggcaaaacgcctgcgcgcattccagcgcatatggcatcggcgttcgccagctataccgttccgggcggagcgctgaagagcctgaccgctggcgtggggatgcgctacatcggcaccagctacggcgatgcgaagaacaccttcaaggtgccatcggtggatctgtatgacgcgatgctgcgctacgatctgggcgagatgaaccgcagcctgaaaggggcaagcgtgcagttcaacgtcaataacgtggcagacacgaagtatgtggcgtcatgcgcaagcgatacggcgtgcttctacgggattggccggacggtgacggcgacggtgaattacagctggtaa

SEQ ID NO: 115203 - DNA, 342 bp, Enterobacter cloacae
atgacgatttccgctcaggtcattgatacgattgtcgaatggattgatgacaatctacaccagccgttacgcatcgaagagattgcccgccatgcgggttactcaaaatggcatttacagcggctgtttatgcagtacaaaggcgaaagtctggggcgctacatccgcgaacgcaagctgctgatggcggcgcgcgatctgcgtgagtcagacgagcgcgtgtacgatatctgcctgcgctacgggtttgactcgcagcagacgtttacccgcatctttacccgcaccttcaaccagccgcccggggcgtatcgcaaagaaaaccacggtcgggcgcactga

SEQ ID NO: 115204 - DNA, 1104 bp, Enterobacter cloacae
atgaaaaagcctctattcatctgcgtggtgttagtcatgattattgcttcagctgccagtttaccgtttgtactgaatgccggatttggccagccaccgcagggtgcgcagctctctgaagtggaagcctctccgcactatcgcgacgggcaattccataacacgctccctacgccgggctttaccgggcaacaaaatatgctggtggcgtggtggcagttccttacccgtaaaaccgaaaacgcccgtcctgcgcagccgctgccgctggtgaaaaccgatctggcgagcctgtcgcctgaacaggacacgctggtgtggctcggccactcctcctggtatatgcagctggcggggaaacgcatcctgatcgatccggttctgagtagctacgccgcaccgttctccttcctcaataaagcgtttgcgggggagtacccgtggcgtgcggagagcatgccggagatcgacctgctgattatctcccacgatcactatgaccatctggattacgccaccatcaaggcgctgctgccgaaggttaagcgcgtggtcaccccgctgggcgtggggtcgcatctgcgctattgggggatgaaccctgagattatcgacgagcgggactggaaccagtcggtgcatatcagcgatacgctgacggtgcacgttctgccggcgcgccatttttccgggcgcggcattaagcgtaaccagaccctgtggggcagctttatgtttgtcaccccagagcgaaaggtctactacagcggagactccggttacggcccgcacttcaaagcgattggcgagcagtttggcggagttgacttagccatcatggaaaacggccagtacgaccaggactggaagtacatccatatgcacccggcagaaacggcgcaggcctcggcagatctcaatgccaaagcggtcgtgccgggacataacgggcgttttgtgctggcgaaacatacctggaacgatccactgatccagctggcgaaagccagtaaggataaaaactaccggctgctgacgccggagctgggcgagcccgtgcgggtgagtgataccacgcaacaatttcgcgagtggtgggaataa

SEQ ID NO: 115205 - DNA, 591 bp, Enterobacter cloacae
gtggcacgtccgaagagtgaagataaaaaacaggccttactggaagcagcaacggctgcgtttgcgcagtcaggtattgccgcctcaacggcgttaattgcccgtaatgcgggcgtcgctgaagggacactgtttcgctactttgctaccaaagacgatctgctgaatgccctctacctgcatctgaagcaggatctctgccagaccatgctggcgaatctcgatcgcaccatcaccgagccaaaagagcatacccgcaatatctggaacagctatgtagactggggcattcgtacccccctggcgcatgcggctatccgccagattggcgtcagtgaaaagctgaacgccgaaaccgagcaggcggtgaaagacatgttcccggaactgcatgaactgtgtcgtcgttcgatccgcccggtgtttatgtctgacgagtttaagaccttcggtgatgcaatgttcttatcgctggctgaaaccaccatggagtttgccgcccgcgatccgtcccgtgccgtcgattttaaagcgctgggctttgaagccatgtggcgcgggcttgctgaggaagataaccatggacagtaa

SEQ ID NO: 115206 - DNA, 369 bp, Enterobacter cloacae
atggacagtaaatccttgcaggaacatgccagacgcgtcgcgctggagatgccttttaccgaacattgctggccgtttggcccggagtatgaagtgtttaaggtgggcgggaaaatttttatgctgatggcgaccgcacacggtcgggcccacgtcagcctgaaatccgatccggaaaaatcgctgctcaatcagcagatctaccgtggcgtggagcccggttaccatctgaataaaaaacactggatctcactttatggcacggacgacatcacgcctgaactggtcaccgacctgattacggattcgtggaatctggtcgttgataaactgccgaaaaaagatcagaagtggattcggccagcctga

SEQ ID NO: 115207 - DNA, 654 bp, Enterobacter cloacae
atggatattatttctgtcgccctgaaacgccactctaccaaggcgttcgacccagccaaaaaactgaccgcagaagaagcggaaaaaatcaaaacgctgctgcaatacagcccgtccagcaccaactcccagccgtggcactttattgttgccagcactgaagagggtaaagcgcgcgtggcaaaatccgcggcgggcacctatgtgtttaacgaacgcaaaatgctggatgcctctcacgtggtggtgttctgcgcgaaaaccgcgatggacgatgcctggcttgagcgcgttgtcgatcaggaagaggctgacggccgtttcgccacaccagaagcaaaagccgcgaaccacaaaggccgctgctattttgccgacatgcaccgcgtggatctgaaagatgacgaccagtggatggcgaagcaggtttacctgaacgtcggcaacttcctgctgggcgtggccgcgatgggcctggatgcggtacccatcgaagggtttgacgccgcgatcctcgacgaagagtttggcctgaaagagaaaggcttcaccagcctggtggtggtcccggtcgggcatcacagcgtggaagatttcaacgccacgctgccgaaatctcgcctgccgctgagcacgattgtgactgaatgctaa

SEQ ID NO: 115208 - DNA, 288 bp, Enterobacter cloacae
atgagcaaaaagattattgactgggacgaactcagagctgaactgttaagcgattcagaagttcaggcttcctttgatgcagaagagcgcaaggaacgcctgcgggagatgctggcgcaatggcgcaatcatgctggtctgacgcgcgcccaggtggcggagcggatgggcgtcagcgcaccgacggtatcacgaatggaagcaaatattacccgggcgagtctcgatacattaacgcgttatgcgctggtgtgcggggtaaagcatccgcagataacgctttactga

SEQ ID NO: 115209 - DNA, 330 bp, Enterobacter cloacae
gtgttcagacttatcgttcatgcggcagtcagggaggagatcctctcattgcctgcgggagtacaggcgaagctgattcgccagcttgataaattacgcaacaacccgacagtattgcgtgaacctgacagcaaacccttacccaatggtttgttcgaaatccgaaccgtcgggctgatccatactcgtgggatctacgtttatcagcgggaaagaaccatttttctgctgcgggtgtttatcaagaagacgcaaaaaacgccctctgctgaactccgtctggcactgaaacgacaacaggagatgttggatgagcaaaaagattattga

SEQ ID NO: 115210 - DNA, 870 bp, Enterobacter cloacae
atgacgctgatgtctgaacctgtcacctctctccaggatgacacccgcaagcagctgggcgcgtttttgcgagcccggcgcgaaagcctcgatccgcagcgcctcggcttaccgcgcagcggccgccgccgcacgccgggcctgcgtcgggaggaggtggcgatgctcgcggatgtcggcgtgacctggtacacctggctggagcagggccgggacgtcaatccgtccagcgcggtgatggccgccatcgcaaaagcgctgcaatgcaccccgaccgaagcccggcatctttttgtgctcgccggtttgccgccgggcgaagccccgctggcggtgtgctgcgaggggatcagcgaaggcacgcgtcgcctgctggataccctgatgccgaaacctgccagtattcagaaaccgaatttcgatatcgtggcgtggaacgacagcttcggccacctgatgggcgtcgatttcaacgccatcccgccggaagatcgcaactgtatttacctgttcctcacccatccggcgtggcgcgcgcggctcggcaaacgtgacgacgtgctgccgattttcgtctcctacttccgcgcggccatggctgagcaccgtggcgacccgctctgggaagcgaagctggcgcgtttttttgcggtgtccgaagagttcaaaaccctgtggcaccagcgtaacgacgtgcgcggcgtggagaaccagctcaagctgttcacccatcccgagctgggggattttcatctccagcagatgtactggtactccgcgccgcgaaacggatcgcggctgctggtctatttacccgtggatgaggcaggggagagggcgatggcgtggctggcggagcaggggaaataa

SEQ ID NO: 115211 - DNA, 1437 bp, Enterobacter cloacae
atgaatacgtcagttgtttcaccgggtcgtgcgggcctgatactgctgttaaccggccagatgctgccgctgattgatacctcaatcaccaacgtggcgctggattccatcacccattcattacacgccaccgccaccgaactggagctgatcgtcgccctctacggcgtggcctttgccgtctgcctggcccccggcagcaagctgggcgataaccttggccgccgtcgcctgtttatgtggggcgtggcgtgttttggcctggcctcgctgctgtgcggcatggcgggcaatatcgaacagttgcttggcgcgcgcattcttcagggcgcgggcgccgcgctgatcatgccgcaaattctcgcgacgttgcatgtgacgttaaaaggatcggcacacgccagagcgatcagcctgtttggaggtatcggcggaattgcgtttatcgtcggccagatgggtggcggctggctggtgtcggcggacatcgccgggctgggctggcgcaacgccttctttatcaacgtgccgatttgtctggtggtgctggcgctgagccgtcgctacgtgccggaaacccgccgcgacacgccgtcgcgcattgactggaccgggactgtcctgctgacggcaatactgtgctgtctgctgttcccgatggcgctcggcccgcagtggcactggtcgtggccgctgaaggccgcactgctggcgattgtgccgctgggctgtttgatggtgctgaacgcgcgcaaaaaagagcgtgagaatgcccacccgctcatcgcgccacgcctgttacagctgcgcagcatccgctttggcgtgctgatcgggatactctttttcagcgtctggtccgggttcatgttctgtatggcgctgaccatgcaaagcggtctggggatggcgccgtggcagtccgggaacagctttatcgcgcttggcgtcacctattttatttctgcctggttcgccccacgcctgattgcccgttacagcaccagcgccatcctgctgaccgggcttgcgattcagcttgtcggcctggtggcgctgatcgccacgttccgtcactggggaatgcagaataccgcgctgacgctggccccggccaccgggctggtgggttacgggcaggcgctgattgtaaacagcttctaccgtatcgggatgcgcgatattcagcctgacgacgcgggggccgcgagcgcgattttaagcacgctgcaacaggctgcgctggggcttggcccggccattttcggcgcgattttgctgcacgggctgcaaaatcatcacggagattatacccaggcggtcaacgtcttcctgatggtggaaacggccatgatggtggtgctggcgctggtcacgctgcgtatgcgtcatcgtctgtgtttaccggtcgtcaaggcctgtccggcgacaaaataa

SEQ ID NO: 115212 - DNA, 1245 bp, Enterobacter cloacae
atgcaggaattaattgctcaggttgaagagttagggattgaaattaatcacaccacctctttagtgattatctttggtattatttttcttacggccattatcgttcattttattctgcacaaagtggtgctgcgcgcattcgagaaacgcgcccaggccagcagccatttatggttgcagatcattacgcagaacaaattatttcaccgtctggcgtttaccctccaggggataatcgtcaacgttcaggcggttctgtggctgcaaaaaggcagcgaagcggcggaattactcaccacctgcgcgaaattgtgggtgatggtttatgccctgctctccttcttctcgttgctggacgtgattttcaatctgtcgcagaaaatggccaccgcctcgcagctgccgctgaaggggatattccagggcgttaagctggtgagtgccattctggtggggatactgattatctccctgctgatcggtcagtcacccgccattctgataagcggcctgggtgcgatggctgccgttctgatgctggtctttaaagacccgatactgggcttagtggcgggcattcagctctccgccaacgacatgctcaagctcggcgactggctggagatgccgaagtacggcgccaacggcacggtgaccgacatcggcctgaccaccgttaaagtgcgcaacttcgataacaccatcaccaccatcccgacctgggcgctggtgtccgatgcgttcatcaactggagcggcatgtccgcctccggtggtcgccgcatcaagcgtagcctgaatatcgataccaccagcattcatttcctcgacgagcaggagcagcagaaactgattcaggcgaaactgctgaagccgtatctggcggcgcgtcatgaggaaattaacctgtggaatcagcagaacggcgaaggggaatcggtattaaacctgcgcaagatgaccaatatcggcaccttccgtgcctacctgaatgaatatctgcgtaaccacccgcgcattcgcaaagatatgacgctgatggtgcgccagctcgcgccggatgccaacgggctgccgattgaaatatatgcctttaccaacacggtgatctgggcggaatacgaagatattcaggccgacatcttcgatcatattttcgcggtggtagatgaatttggcctgcgtattcaccagtcgccaaccggaaacgatattcgctcgctggctggcgtcatcgccagataa

SEQ ID NO: 115213 - DNA, 972 bp, Enterobacter cloacae
atgtcaattcagaaaatcgctcaactggccggggtatccgtagcaacggtctcccgcgtactgaataacagcgataccgtgaaggcgaaaaaccgcgagcgcgttttgcaggcgatccaggagagtaactatcagcccaatctgctggcgcgtcagctgcgcactgcccgcagctatatgatcctggtgatggtctcgaacatcgccaacccgttctgcgccgaagtggtgaagggcattgaagccgaggcagaaaagaacggctatcgcattctgctttgcaactccggctcggatattgagcgctcccgctcgggcttaagcctgctctccggcaaaatcgtcgacggcattatcaccatggatgcattctcgaaactgccggagctggccgcgctgattggcaacgcgccgtgggtgcagtgcgctgaatacgccgatgcgggcgcggtctcctgcgtggggattaatgatgttgatgcctcccagcacgttgtcagccagcttgccgacgggggacgcaaacgcattgcgctcatcaaccacgacctcagctacaaatatgcccgtctgcgcgagcgcggctataagagcgtcatacacctgcgggatctggattatcaggcggtggagtacgccagtgagctcagctctggtgcgggcatggcggcgatgcaaaatctgttaaaagcaaacccgccggatgcggtgtttgccgtttccgatacgctggcggcgggggcgctgcgcgccattcagcaggcagggctgcgggtgccagaagatatcgcggtggtcggctttgacggcactgagctggcggagatgatttcactcaccactattgaacagccgtcgcgggatatcgggcgcaaggcggtcaatctgctgttaaataagatcgacaacccggatgcgcccacggaaagggtcatgatggactggcgctttatttcccgcgccagctcctga

SEQ ID NO: 115214 - DNA, 1167 bp, Enterobacter cloacae
atgatttcgccgcagggggcagccatgattaacgtcgggattatcggcagcgggtttattggcccggcgcatatcgaggcgctcaggcgtctcgggtttgtgcaggtggtcgcgctctgtgacggctcgctcgttaaggcgcaggaaaaggcgcaccagctcaatgtgccgcacgcctgtgccagcgtggaggaactgctcgcgctccctaatctgcacgcggtgcacaactgcacgccgaaccacctgcacgcggagattaaccgccagatcctgcgtgcgggcaagcacgtgttttccgaaaagccgctgtgcatgacgccggacgaggcgcgcgagctggtggcgctggcggagcaggcaggcgtggtgcatggcgtgagttttgtctatcgccagtttgcgatggtgcgccaggcggcgagcatgatgcgtgcgggcagcctcgggcggctgtttgcttcgcacggcagctatttacaggactggatgctgctggaaaccgactacaactggcgggtggatgccgcgctcggcggcgcgtcgcgggcggtggcggacatcggctcccactggtgcgatacggtacagtatgtgaccggcaggcgtattaccggggtgatggctgatttatccaccgtctggccgacgcgcaaggccagcgcgggcggtcatcagaccttctcccatgacgagcaggcggagtatgaagacaaaccggtcaccaccgaagactttggctcggtgctgttccgctttgacgacggcagcaagggcagctttagcgtctcgcaggtgagcgcggggcgaaaaaatcgcctgacctttgaaattaacggcagcgagcagtcggtggcgtgggatcaggaaatcccgcagcagctgtgggtcggccatcgcgccagggcaaaccagatactctgcgacgatccgggccttatgaaccgtgacgtggccgacagcgcccacttccccggcgggcacattgaaggctggccggatgcctttaaaaatatgatggcgcagttttaccgtgccgtgcaggcgggcgcgatgccggataatccgcagtttgccaccttccacgatggcgcctgtgtgatgtatatcattgatgcgattatgaaaagtcatcagcagcagcgctgggtgcgcgtggaatactga

SEQ ID NO: 115215 - DNA, 1026 bp, Enterobacter cloacae
atgaggacaatgaaaggacctggcatttttctgtcgcagtttattggcggggaagcgcccttcaacacgctcgacgggctggcaggatgggcggcggggaagggttacaaagcggtgcagatcccctgcaaccatccgcatatctttgatgtggagaaagccgcagagagtcaggcctactgcgatgaaatcgcgggcaagctggccgcgcacgggctggtcatcagcgagctgtcgacccatctggaagggcagcttgtggcggtaaacccggtttacagcgaggcgtttgaccacttcgcccctgcttccgtgcgcggtaacgaggcggcgcgtcaggcgtgggcgacggaaaagctgaagcaggcggcggtcgcctcggcccgattaggcctgaaagcgcacgccaccttctccggatcgctggcctggccgtttttctatccgtggccgccgcacaacgagcagcgctttcaggaggcgttccaggcgctggcaacccgctggcggccgattctggataccttcgacgagcagggcgtggacgtctgctttgagctgcatccgggggaagatctgcacgacggcgtcaccttcgagcgttttctggcgctggtcgacaaccatccgcgctgtaatattctctacgatccaagccatatgctgctccagcagatggactatctgacctttatcgatatctaccatgcgcgcattaaagcgttccacgtgaaggacgccgagttccgccccagcgggcgcagcggcgtctacggcggctaccagccgtggatcaaccgcgccggacgcttccgctcgcccggcgacggacagatcgactttaagggcattttcagcaagctgacccagtacgactacgacggctgggcggtgctggagtgggagtgctgcctgaaggatggcgataccggcgcgagtgagggcagcgaatttatccgccgtcatatcatcccggtttccggacgggcgtttgatgatttcgccgcagggggcagccatgattaa

SEQ ID NO: 115216 - DNA, 1236 bp, Enterobacter cloacae
atggtgtcaactgagagtagtgaaaaggcgataacgcagcaccggctgctggtgccgcgtctgtcgctgatgatgtttctgcaattttttatctggggtagctggtcggtcacgcttggcctggtgatgacccggcacaacatgtctttgctgattggcgacgcgttctctgccggacccatcgcttccattctttcgccgttcgtgctcgggatgctggtggaccgcttctttgcctcgcagaaggtgatggcggtgatgcacctcgcgggcgcggcgatcctctggttcgtgccgggggcgctgattgctgagaacggcgcgctgctgattggcctgctgtttggctacacgctctgctatatgccgacgctggcgctgaccaacaacattgcgtttcacagtctggcgaacgtggataaaaccttcccggtagtgcgcgtgttcggcaccatcggctggatcgcggcgggcattttcatcggcgtcaccggcgtggcgtccagcgtcaccatcttccaggtggcggcggtcagctccgtgttgctggcgatctacagcctgacgctgccgcacacgcccgccccggcgaaaggcctgccggtaaaggtgcgggatctcttctgcgcggacgccttcgcgctgcttaaaacccgccacttcttcgtcttctccgtctgcgcgatgctgatctccgtcccgctcggcacctactacgcctacaccgcctcgtatctggcggatgccgggattgccgacgtcagcaccgccatgtccttcgggcagatgtctgagatcgtcttcatgttggtcatccctctgctgttccgccgcctgggcgtgaaatatatgctgctgatcggcatgctggcgtggttcgtgcgttatgccatgttcgcgctgggcgtcagcgaggaggggcgcattctgctgtatctcggcattctgctccacggcgtctgctacgatttcttctttgtcgtcggctttatctacaccgaccgcgtggcgggcgaaaaggtgaaaggtcaggcgcagagcatgatcgtgatgttcacctacggcatcggcatgctgctcggctcgcagatttccggcgcgctctacaaccgtctggtggcagggcagaccgtgccgcaggcgtgggtcacattctggtggatcccggcggtggctgccgcggcgatcgcgctgattttccttctcacgtttaagtatgacgatgacaaggcgtaa

SEQ ID NO: 115217 - DNA, 1389 bp, Enterobacter cloacae
gtgaaagacgcgtcatccgcttcaggccatggtagcgctgaagcttcgtcggatcagagtccgacgctgcaacgtggtttgcaaaatcgacatattcagttaattgcccttggcggcgcgatcggtaccgggctgtttctcggcatcggccccgccattcaaatggctggcccggcggttctgctgggttacgctatcgccgggattatcgccttcctgatcatgcgccagctcggcgagatggtcgttgaagagccggtgtccggctccttcgcacactttgcctataaatactgggggccgttcgcaggcttcctctccggctggaactactgggtgatgttcgtgctggtgggcatggcagagctgaccgccgctggcatctatatgcagtactggctcccggacgtgccgacgtggatttgggccgcggccttcttcatcatcattaacgccgttaaccttgtgaacgtgcgcctgtatggcgagaccgagttctggtttgcgctgatcaaggtgctggcgattattggcatgatcggctttggcctgtggctgctgttctccggtcacggcggcgagcgtgcaagcatcgacaacctgtggcagcacggcggctttctggcgaccggctggaaagggctgatcctgtcgctggcggtcattatgttctccttcggcgggctggagctgattggcatcaccgcggctgaagcgcgcgatccgcacaaaagcattccgaaagcggtcaaccaggtggtgtaccgtatcctgctgttctatatcggctcgctggtggtgctgctggcgctctatccgtgggtggaagtgaaatctgacagtagcccgttcgtgatgatcttccacgatttgaacagcaacgtggtggcttcggcgctcaacttcgtcattctcgtggcgtcattgtcggtttacaacagcggggtttactccaacagccgcatgctgtttggcctctccgtacagggcaacgcgccgaagttcctcacccgcgtcagccgtcgcggcgtgccgatcaattcgctgttcctttctggcgctatcacctcgctggtggtgctgattaactatctgctgccgaaagaggcgtttggcctgctgatggcgctggttgtcgccacgctgctgctgaactggatcatgatctgcctggcgcaccttcgcttccgcgcggcgatgcgacgcaaggggcgcgagacgcagtttaaagcgctgctctatccggcggggaactacctctgtatcgccttcctcggcctgattctggtgctgatgtgcaccatggatgagatgcgcctgtcagcgatgctgctgccggtgtgggtggtgttcctgtttatcgcgtttaagctttcacgcaaaaagtag

SEQ ID NO: 115218 - DNA, 1974 bp, Enterobacter cloacae
atgggcagacccctcaaatccgtatttaaaaaagaacatcgcgacgatatcagtaaccgcagcgctaacccggtattctccgaggttgcagaggtgttcctctcccgccgccgttttctccagatgggggccgtagcgggggccgccgtatcattcccgtatctgatcacacccgaaaatgccattgccgcggtatcgaagtcttccgcgctggcaaaagcggtttccctgggctttaccagcatcgacgtctccacggaagacacggtcagggtgccagaaggctatattgcccgcccgttctatcgctggggtgatccgacgggaatcaaagacaacatgccggcatttaagccggacgccagcaataccacagacgaacaggctgtgcaggcgggtatgcaccacgatggcatggcgtggtttagcctgccgcagggggcgcaaaacccggaacatggcctgctggcgctgaaccatgaatacatcgataacgggatgctgtttaccgacggtacggcgaactggagcctcgataaagcccgcaaggggcagaacgcgatgggcgtgtcggtggtggaagtgaaaaaaacgggcagcggctgggaggtggtgcgtccgtcttccttcgcccggcgtattaccgtcaatacgccgatgcagcttaccggcccggcgcggcatcaggatttaatgaaaaccgccgccgatccgcagggggaacgcgttctgggcaccatgcagaactgcgccaacggccacacgccttggggcacctatctcacctgcgaggagaactggtcggacatttttgtgaaaaaagccgatctcaatccgctggaaaaacgctacggcattagcgacagcgatgagtcctatcgctggaacgaggtggatgagcggttcagcgtcgataaaacccctaacgaacccaaccgtttcggctgggtggtggagatcgatccctacaacccgacctccaccccgcgcaagcacaccgcgctgggccgcttcaagcatgagggggccgccgtcacgctcgccgccgataatcgcgtggtggtctacatgggcgacgaccagaagtttgagtacatctataagtttgtctccgacaaaaaatacgatcccgcgaaccgggaagccaatatgcagctgctgacgtccggcacgctgtacgtcgccaggttcaaccaggacggaagcggcgactggctgccgctgatcttcgggcaaaatggcctggataaaagcaacgggtttgaaagccagggcgatctgctgatcaaaacccgcctggcggccgacgcggtgggggcaacgaaaatggatcgtcccgagtggattgccgtcgatccgcacgccagcggcagcgtctactgtacgctcaccaacaacagcgatcgcggtaaagaggggaaggcaccggtcgatgccgctaacccgcgcgccaacaacgtgtttggtcacatcatgcactggcacgaagagggtgccgatcctgccgccgcacgctttaagtgggatattctggttatggccgggcgtaccgacggcgacgatccgaaggccaaaggctccatgcagggcgcggcattcggcagccctgatgggttgtcgttcgatcaccagggcgtcctgtggatccagaccgacgtctcctccagcaccatcaataagaaagcgtacgaggggatgggcaataaccagatggtcgccaccattccgggcaccaacgagtatcgccgttttctgaccgggccgcgcggatgtgaaatcaccggcattgcgtttacgccggacaaccgcacgctgtttatcaacattcagcatccgggggagggcggggatgatattaccgacccggccaatccgcgcgctgtttccaactggccagacgccagcccgaacgggcgtccgcggtcgtcaacggtggtgattaccaaagcggacggcgggatcatcgggtcgtga

SEQ ID NO: 115219 - DNA, 2184 bp, Enterobacter cloacae
atgaacaacaccacaatgcacaaaacgctgctggcgattgccatcggcgcggttacacactccgcttttgcggcggatgagaaaaaagaggacaccatcgtggtccagtccacggcggggagtgatttcaaacccggtggtgaccagctgcttccagccttcctcgagggccaggtggcgaacggcgggcgcatgggtatgctcggtcagcagaacgccatggacgtgccgttcaacatcatcagctacacctcgaagctggtggaagatcagcaggcaaaaaccattgctgacgtggttgccaacgacgcgggcgtgcaatttgttcagggttacggcaacagcgcggaaaccttccgcattcgcggcctgaagtttgacggcgacgatatgacctttggcggattgtccggggtgctgccgcgtcaggtggtggatgcccagatggttgaccgtatcgagattttcaaaggggccaactccctgatgaacggcgccgcaagctccggcgtgggcgggatgatcaaccttgagccaaaacacgcgggcgacaccccgcaggcgaaagtgggcgttgactacacctcggattcccagattggcaccacgctggatgcgggtcgtcgctttggcgataacgaccagtttggcgcgcgcgtgaacctcgtgcatcgcgaaggggaaaccggcgtgccgaacgaccgccgccgcaccacgctgctctccaccggcctggattacaaaggcgaccgcttccgcacctcgctggacctgggctaccagaaaaaaaccttccacggcagcccaaccagcgtcaacatctcggcggtggactttgtgcctgagccgccgaagaacgatcgcaacttctcgcagaagtgggcctacagcgatatcgaaaacgagttcgggatgtggcgcagcgagtatgacatcaccgatagctggacggcatataccggtctcggcgcgcagcacgcgcacgaagaagggatctacagcgcgccgaagctcctcgataagagcggtaatgcgacggtcagccgccttgataccaaccgcatcagcgattccgtcagcggcatggcgggcattcgcggtaacttcactaccggcttcgtctcgcacaaggtgaacgtcgggtattcggcgatgaccaaaaacgaaaaaatcgcgtggaaaatgtcggccgcggcggataatccgaccaccaacatctaccacaacaccggcgttgatatgccggacagcagtaacttcagcggctcaggcggtaaatacagcgatccgctgaccagcgggcgcacccgcacgcagggctggctgctgagtgataccctgggcgtgctggatgacaagctgctgttcaccgcaggcgcacgtcatcagaaagttgtcatccgcgggtacaacaaaatcaccggcgcggaaaacgacgcggacggtttcgacggcagccgctggatgccaacctacggcgtagtctataaaccgtgggaggaaatttccctctacgccaaccacaccgaggcgttacagcccggtgaaactgcgccgaacactgctactaactacggccagagcaccggtatcgtgcactctaagcagaacgaagtgggcgtaaaggcggactttggccgcgtgggcggctccctggcgctgtttgagatcaaaatgccgtcggcgatccttgacgacagcggtcactacggcctggatgcagaacagcgtaaccgcggcgtggagctgaacgtcttcggcgagccaatgcttgggatgcgtctgaatgccagcgccacctggttgcaggccgagctgaccaaaaccaaaaacggcgtcaatcagggcaacgatgcgatcggtattccgagcttctacgccgtgctgggcgcagagtacgatatcaagccgattgaaggcctgacggcgaccgcacgcgttaaccactccggcacgcagtatgccgatcttgcgaacaccaaaaagctggacagctacaccacgctggatctgggcatgcgctatcgcttcgcggtgaaccacaatgaaaaccagatgaccgtgcgggcaggcatcgacaacgtgaccaacgagaactactggtcaagcgtggatgattccggtacttacatcactcagggcgagccgcgtacctttaaggtctcggttggctacgagttctaa

SEQ ID NO: 115220 - DNA, 276 bp, Enterobacter cloacae
atgaaaaaaacgactgctattttgatgggcgctgcatttctgtttaccaccaatacctttgcggctgaactgctgacgaaaaacgagtttgagaaagtggaatcacagtatgaaaaaatcggtacggttagcacttccaatgaagtctcggtagacgacgcgaaaaaagagctgatcgagaaagccgataaagaaggtgctgatgttctggtgctgacttccggcaacaccaacaacaaaattcacggtgccgccgatattttcaagaaaaaataa

SEQ ID NO: 115221 - DNA, 699 bp, Enterobacter cloacae
gtgacagcgccagaccagacaggttttccctcgtgcgtgcagcacatctcacacgatattacaggcattaagcttgaacccattgtcgccctctcatcttcgcgcacggtgggggccgaagtgctcagcgtgctgtcgccgcatcagcaaaacgaaagctttttccaggactggtccgccgcccgggcgcttatgctgctggaagcacagatcgccgcgttaaaaaaccccttcccctgtgacaaccttttcataaatttgccgataaccgttctgaccataccggaaatgttccagcgtttactgcaacttaacagcccaccgctgaacattgaactcgtggagcctgcctcgttctttacactctcagacccggcgcgtctgagggtgagttgtgcgcttcagcagttgaccgcgcgaggacaccggatctggctggatgatattgatgaagcgtcaggacaagcatttttatcctgccgcctgccattaagcggaataaaaatcgataagttcgctttctggcgtttacgtgaaactcaggcgctgacacagctggtcaccctttgttcaaaaatcgctgcgaatgtgcttattgaaggcattgaaacagaacgggaccgtacttgcgcgcttcatgctggcgcgcgcttcggtcagggatattattggccatcctggagatggcaggaggactga

SEQ ID NO: 115222 - DNA, 717 bp, Enterobacter cloacae
atgcgaatgacagtgcgccgttaccggcgtcgtcggacaggaagtgattcactgggttctacgcactcgccttttgctctcccattttttgatcgtctcgaatatttgagccagtcaatcaaccagacccgcaaaaccgatgctccctttatcattctggtcacacaggataattttttccgttccggtttactgagcgggcagtcgcccctgagcaattgctgcgactattccacgctggaagccgccctcagtgatttaaatcactggccttcatcgcgtctggtaatagacattgagagccgcgcctcgccgctcatcgacctgctggaccgattacgccgccacagcctgttcgccccctacctgacaccctacctgctcgtccgcgccgatgattatgatgctcgcctgttttgtaaagcggctggcccttttcatgtgcttgaacgccagctaaaggcgctggctatgcaacaaaccttgctggaagcaccgtcacccgccggcaaccgcaaagagtggttttcacgggatgaatggccgatcttacaggcgctgtcgcaggggagctccttgcggcagatcgcgcagttacagaaccgcccctacagccgcattatttaccgtctcagctgcatcctggcgaaacttgggctgaatcatcgtcatgagttgctacatcttctcaacaacctctcagatttcacgtattaa

SEQ ID NO: 115223 - DNA, 633 bp, Enterobacter cloacae
atgaaaccggcatccgttatcattatggacgaacaccctatcgtcagaatgtcgatagaagtcctgctacagaaaaataaaaacatccaggtcaaactgaagtcaggcgacagccacgaggtgcttgactgtatacgcaaccaccccattgacctggtcattctcgatattgaaatgacgggcacggatgggttcgtattactgaaaagaatcaggaacttaaataaagacattaaggttcttttcctctcttcgaaatctgaagccttctacgcaggacgcgccatccgcgccggggcaaatggttttgtcagtaagcgaaaagatctgggggaaatttataacgcggtggaaatgatcctgacgggctattccttcttcccctcagaaacattgagttttataaaccatcagggctcgcggacgggcgccgctgtggatatgccattatcaaatcgtgaagtgacggttctgcgatatctggcgaacggattatctaataaggagattgcggatcaattattacttagcaacaaaacaattagcgcccataagtctaatatcttttccaagctgggcgtgcaaagtatcgttgaattaattgattacgcgaaggcgcacgaattactataa

SEQ ID NO: 115224 - DNA, 522 bp, Enterobacter cloacae
atgcgaaacggaatgcggtatttagccgtcgcgctctttgcgctttgctcccctgcacacgcagagacggcgcttggggaaattaacattcagctctacggcaatatcgtggattttacctgcgtggcggagggggacgacagcaataaaaccgtcacgctcggcacctggcccacgaaacagcttcgcacaacggggagccggacgcagcctgtaccgttcaccctgaagctgaccggatgtccgccgggggcggcttcggtcacatttacggggaagatggacgggcatgataatagcctgctggcgctgaatgatgccagcgcggccagcaacgtggccgtggagatcctcgaccgggataaaacgcgcctcgcgttgcagcagaccagccagacggtggcggtagatgcgcagggaaatgccgaactgtcgttttatgccaattatatcgccacggcggataacccgcagccgggacgggctgacgccgatgcaactttcatgattaattataattaa

SEQ ID NO: 115225 - DNA, 1008 bp, Enterobacter cloacae
gtgaataaaatccattatctggggctatccctgctggcgttttttccgctatctgaggccttcgccgcggtctgcgtcaatgaaaatggcgtgccgacggaggtgtattacgacctgacggataaatttaacagctccaataaccaggtggggcagattgtcacgctcagcgagaagtcccagtgggtgggcgtcaacgccgtctgccctaagggaacgtccgggaacaccaccaagcgcagctatgttaccgatttccctgttacgggcaccagcgatggctaccagtatctgaagctaaacgactatctggacggggcgatgaaaattaccgacagctacgctggcacgttttatccgcccaaaagctacatccagatggggagccacccgaatgtgtctaaaaacaaaccgtttggcgtacaggattccagcctcgtcttccggcttaaagtgacccgacgctttatcaatatggtggtgatcccccgggcgaccatgttccgggtttacgtcaccacgacctcctcggatccgctcaccacgccggtttataccatcagctacagcgggactattcaggtgcctcagagctgtgaaatcaatgccgggaatgtggtggagttcgatttcggagacatcggcgcctccctgttcagtaaagcaggcatcgggaataagccggaggggatctcagcgcaaagcaaaaccatcgccatcaaatgcaccaacgtcgaggcgaacgccatgctcatgatgcgtgttgaagcggagaaggtttcaggcagtgcgctggtttccgataacgcggatgtgggttttgtgattgccaacagtaatggcgtgccgctgacgcccaacaacctgaccagcaaaatcccgttccgtctggacgacagcgctcaggcgcaggtggggatccgcgcgtggcccgtcagcgtaaccggtaaaaaacctgccgaggggcgttttacctctcgcggctatttacgcgtcgactacgactaa

SEQ ID NO: 115226 - DNA, 2559 bp, Enterobacter cloacae
atgaacactcaatggcgttactgcccggttgcgctggcactgatggcaacgctctggccactcgctggctggggcgaaagctactttaacccggcgtttctctccgatgacacggcgaacgtggcggatttgtcgcgttttgaaaaaggccaccagcaggcaccgggcgtctatcgcgtcgatatctggcgtaacgatgagtttatcggcacgcaggacgtgcggtttgagcaagctgacaacacgccgccggtcgcgggtggtttgtcgccgtgcattacgcgcgcgatgctcgatcgctttggcgtcaatatcgccgccttcccggaactgagcaacgtgcagggcgatacctgcgttccgctcaccacggctattccgggcagcgaaacggcgttcaacttcgcctcgttgcgcctgaacgtcagcctgcctcaggtggcgatgcaaaacagcgcccgcgggtatattccgcctgaacagtgggatgaaggcatccccgccgcgctgctgaactacagctttaccggcaaccggggcagcgacgacgacagctactatctgaacctgcaaagcgggttgaactatggcgcctggcgattacgcaataacggcgcgtggcgttataccgaaagcaacggccagcggcacagcagctggcaaaatattggtacctgggcgcagcgtacgatcatcccgctgaaaagcgagctggtgcttggcgacagcaacaccggtaacgatgtcttcgacagcgtcggttttcgcggtggtcgcctctattcgtccgacagtatgtacccggacagcctgcaaggttacgcgcctaccgtgcgcggaatcgcccgcacccctgccaaagtggtgatccgccagaacggatacgtgatttaccagagctatgtgcagccgggggcttttgcgataactgatcttaacccgacctcctcaagcggtgacctggaggtgacggtggaagagaaggacggcagccagcagcgctacaccgtcccgtattccaccgttccgctgctccagcgtgaaggacgctggaaatacgatctggtggcaggggactatcgcagcggcaacagcgagcaggacacgccgttctttactcagggtacgatgattgcgggtcttgccgacggctacacgctatacggcggaacgcagctggcctcgcgctataccgccatcgccattggcgcgggtaaaaacctcggtgactggggagcggtttcacttgatctcacccatgcccgcagccagcttgccgatgacagccgccatgaagggcagtccctgcggttcctgtacgcaaaatcccttaacggattcggcaccaacttccagctgctgggctatcgctactcgaccaaaggcttctacaccctcgacgatgtggcctggcgcacaatggaaggctaccagtatggcgacgatcaggacgatgacggcgtgccggacgtgcagagctatcacaacctgacgctgaataaaaaagggcgtttccagctcaatatctcccagtctctcggcgattatggctcggtgtacgtgtcgggcagccagcagagttactggggcaccagcgaatccaacgtctggtatcagcttggctacgcgggcggggtgaaaggggtcagctacgccttatcctggtcgtggaacaaggccgtcggcattgacggaaccgaccggatcgcctcgttcaacgtctccgtcccgttcagcctgttcacccgtcacggctaccgtcgcgataacgcgatcgaccgggcctatgccacagcctctgccagccgtaacagcgacggtgataccagttggcagaccgggatcagcggaacgctgctccaggatcgtaacctgaactacagcgtcacgcagggtcacaccagcaataacggtgccagcggcagcgccagcgctaactggcaggcgacgtacggcacgctgggcgtgggctacaactacgcccgggatcagcacgacctcaactggcagctctccggcggcgtggtagggcattcagacggcatcacattcagtcagccgctgggcgataccaacgtcttgatcaaagcgccgggcgcgtcaggcgtgagcgtcgaaaaccagaccggcgtcaaaacagactggcgtggctatgcggtgatgccgtacgccacggtgtaccgttacaaccgcgtggcgctcgacaccaacactatgagcaacaacaccgacattgaaaataacgtttccagcgtcgtgccgacgaacggtgcgctggtgcgcgccagttttgacacccgcatcggcgtgcgtgcgctgctcaccgtgaagcgtgatagccagcctgtaccgtttggggcggtggtgcgtgagacgcagagcggcgtaaccagcatggtgggagatgacggtcagatttacctgagcgggctgccgctgagcggagaattgctgattcagtggggagacgggaaacagtcccagtgtcgtgcgccctacagcctgccagaacaaagcctgcaacaggcgatcacacttaaggggatccgctgtgaataa

SEQ ID NO: 115227 - DNA, 693 bp, Enterobacter cloacae
atgaacaccctgattaaacctggactgtttttagcttttattttgatgatggtttctgccagcgcgaatgcgtccggcggaattgcgctgggcgcgacgcgcgttatttatccggccgatgccaaacaaacgtcgctggcgatcaccaacagcaataaacaagagcgctatttaattaacgcgtggatagaaaatgccaacgggcaaaaggaaaaaacctttgccgtcacgccgccgctgtttgtcagcgagccggccagcgaaaacaccctgcgcattatctacgcaggcccggcgctgcctgccgatcgcgaatcactcttttacatgaacgtcaaagcgattccctccgtcagcaaaaaacatcaggacggcaacaacgtcctgcaactggctattctgtcacgtatcaagctgtttgttcgcccggctaacctggcgatgccgccggaagaggcgctctcacagctgcgctttgagcgcgtcggcaaccatcttaaggtgagcaatgcctcgccgtattacgtcacgctggtcaatctgaagctcggcggtcagacgctggataacctgatggttgctcctaaaagctcggcgcagcaggtgctgcctgccgctgcgagcggcacgctctcctggcagagtgtgaatgactatggcgccattacgccggcgcgtagcgtcagcctgtga

SEQ ID NO: 115228 - DNA, 543 bp, Enterobacter cloacae
atgacaaggactgggatactgctgtgtgcccttgcgattgcctcagcggtaaacgcacataccgtggtcatagacggcggcaaagtacacctcaggggagagctggtgaacggcggctgcgccgtggccccggacagccagaatatgcgcgtggatatggggcaataccgcacaaacgccttttccggcgtcggcagcttttccacggttaatgtgcctttcaccgtacgtctgctggattgcagcgtggacgtctcccgcaccgtggggatccagttccagggagtgacaccggcagaagatccgcaggttttcctggcgacatcgcggccgggggaaaatgcggtcagcagcggtgtcgggctggcgctttttgacgaacagcaacgtcagatcatcccgaacgcgacggcggtgagctggttacccattgacacccgcgagctggtatttcatttcagcgcccgctaccgggcaatttccgaacaccttgtaccaggcactattcagtcgaatgtctggtttacgttgatttatccctga

SEQ ID NO: 115229 - DNA, 564 bp, Enterobacter cloacae
atgaaactcagcaacattgcttctactgttattgcaactctggccctggtcgcgggtgccgctcacgcagaagatactaccacgcctgtatctgtaaacggtggtacggtgcattttaaaggtgaattagtgaatgccgcgtgctcagtgaatactgactcttcagagcagacggttaatcttggccagtaccgtaccgcgaaattcactaaagtaggtgacaccacctccaatattccgttcaccatcgaactgaacgactgcgatcctgcggtagcgaaaaccgctgctgtcgcgtttaccggccagatcgacgccaccgacaaaacgctgctggcggtaagctccggtaataacgacaactccgcgaagggcgtgggtattgagatcctcgacagcaaatcctccacgctgaccccggacggcgccaccttctctgcggcgcagaacctgattgaagggactaacaccctgaacttcaccgcgcgctataaagccacggcggcgaccaccgagccaggccaggcaaacgcggacgcaacattcgtaatgaaatacgagtaa

SEQ ID NO: 115230 - DNA, 867 bp, Enterobacter cloacae
atggcagcaaagattattgacggtaaaacgattgcgcagcaggtgcgctctgaggttgcggaaaaagtgaaggcgcgtaaagccgccggatttcgcgcccccgggctggccgttgtgctggttggcagcaacccggcttcgcaaatttatgtcggcagcaaacgcaaagcgtgtgaagaggtggggttcgtctcccgctcttacgatctgccggaaaccaccagcgaagcggaactgctggaactgatcgacactctgaatgccgataaagagatcgacggcatcctggttcagctgccgctgcctgcgggcattgacaacgtgaaggtgctggagcgcatcgcgccggacaaagacgttgacggtttccatccgtataacgtaggccgactgtgccagcgcgcgccgcgcctgcgtccgtgcaccccgcgcggcatcgtgacgctgctggagcgttataacatcgatacctatggtctcaacgccgtggtgattggcgcctccaacatcgtgggccgcccgatgagcatggagctgctgctggcgggctgtaccaccaccgttacccaccgcttcactaaaaacctgcgtcaccacgtcgaaaacgccgatctgctgatcgttgcggtcggcaagccgggctttattccgggcgagtggatcaaagagggcgcaatcgtcgtggacgtgggtattaaccgtctggaaaacggcaaagtggtcggcgacgtggtgtatgaagatgccgcagcgcgcgcatcctatattactccggtcccgggcggcgtaggcccgatgacggtagcaacactgattcagaataccttgcaggcgtgcgaggagtatcacgacgtagaggacgcgtaa

SEQ ID NO: 115231 - DNA, 213 bp, Enterobacter cloacae
atggcaactttttctttaggtaaacacccgcacgttgagctgtgcgatctgctgaagctggaaggctggagcgaaagcggcgcgcaggcaaagatcgtcatcgccgacgggcaggtaaaagtagacggctcggtggaaacccgcaagcgctgcaaaattgtcgcgggtcagaccgtgagcttcgcaggacaaagcgtgaccgtgacggcctga

SEQ ID NO: 115232 - DNA, 1500 bp, Enterobacter cloacae
atgagcctgatatcagggtttgttaaatcgctgtctaagttatcgatgattggtcgcgccttaatgctgccaatttcactgcttcccgctgcgggcctgctgctggccttcggcgataagttccatctgccgctgatgatgaacgccggcggggttatctttgataacctgccgatgctgttcgccatcggctctgccgtcggactggcttcggaatccggcattgccgcactctctgcggcggtctccgtgtttgtcaccaacatcaccatcagcaccgtgctgaacatcacgccggaaatggcctctcagggcggcaaatacgccatggtcgttggcattccgacgttgcagatgggcgtctttggcggcctgatctgcggtattcttgcggcctggtgttacaaccgcttccacaccatgcagctgccggagttcctcggcttcttctccggcaagcgctttgtggcgattgcgacggcgtttctgtcgttcctgctcggcctgctgctgccgtacgtctggcagcatattcaatccgggatcgacgccctgtccgtggtggtaaacggcgataaccaggcggcctcgacctttatcttcgggctggtggagcgcgcgttgatcccgctcggcctgcaccatatctggtatccatccttctggtattccttcggggattacactacccaggcgggtcaggtgatccacggtgaccagaccatctggttcaagatgctggaagagggagtgaaatccttcagcagcgacacctaccagaacgccgggaaattcatgcagggcgagttcccgctgatgctgttcgcactgcccgcggcgtgtctggcgatgtaccacgaagcgcacacgaagaataagaaaatcgcggccggtattctgttctctgcggccctcacctgcttcctgacgggcatcaccgagccggtagagttcacctttatcttcgtggcgccgatcctttacgtcttcaacgccatcatggcgggcctggcgtacatgaccatgtacctgctgcatgcgcacatcgccaagtcgttctcggcgggctttatcgactacctgtcgttcgggatcctgccgtcgtttaacggctatcagaccaacttcctgagcgccattatcatcggcattccaatggcattgatctactacttcaccttccgcttcgtgatccgtcgcttcgacgtgaagacgccgggccgcaccgaagtgaccgccagcgcgaatgacaagtccgattccgaacttgccaccgaaatcatcggcctgctgggcggtgcgcagaacattgattccgttggctcctgcatcacgcgtctgcgtctggaagtggcgaagagcgaagcggtggaccgggacgggctgaacgggcttggcgcgcgcggcgtggtgttcgttggcgataacggaatacaggtgattttcggggccagagcacagtttatcgcccagaccatgtccacgatgattggcaaataa

SEQ ID NO: 115233 - DNA, 1017 bp, Enterobacter cloacae
ttgaagaaagtcagcatcattgatgtcgcaaagcatgcgggcgtgtcggtttctaccgtttcgctggtgctgcgccagaaagggaagatctcagaggcgacgatcgggaaggtcaatgccgccatcacaacgctgggctatgttcataacgtcgccgctgccaatcttcgcgccaacacctccaacttaatcggcctgatcctgcgcgacttcagcgacagcttttccatcaaggtgatggcgagcatcgttcaggagctggagaaacagggttatatggtatttctcggtcagccgctgaacgacggcgaacatcttgagcgtaccctgctctcatttaagcagcagggcgtggcgggcgtcatctacctggcgtcggacacccgcgccgcctctcttccggaacacattcgtcactgcccgctgccgcttgtggcggtttcgcagtcgttgctggaagagaaatgcaacctggtgatgcgcgataaccgccaggcggcgaacctggccgcgcgttatcttatcgagcgcgggcaccgtaacatcgcctacattggcgggcgcgacgggtgccgtatccgcgagcagcgcctgcttggttttcgcagcgcgatgacgcagagcggcctggtctggcgtgaggaatattctcccgcctgcaccgatgacacgcaggcggcggccatggcgactcgtcagctgctggagaagaacaacacgattaccgccctgctctgccattcaccggacgcgatgatcggttcaatctcaggtattcaccaggtggggcgcacggtgggtaaagacgtgtttttaacccagcaggtggcgctgattggttttgaagatatgctccacgttaatctcacgtcgccgtcactgacttacgtttcgtctgccagcgaagagaccggccgccaggcggcagggctgatgatccgcaggctgaaagagccggatctgcaaacgcagcgcattaccctctccgggcagcttatcgcgcgggaatcggcgtaa

SEQ ID NO: 115234 - DNA, 522 bp, Enterobacter cloacae
atgcctaccattatcacccacgctgccgtacctctgtgtctgggcttagggctcggaaccaaagtcatcccaccccgcctgctgtttgccgggatcgtcctcgccatgctgcccgatgccgacgtactggcgtttaaattcggtgtcgcctacgggaatattttcggccaccgcggtttcactcattcgctactgtttgccctggtggtgccgatactctgcgtgctggcaggccgatgttggttcagggccagcctgacgcggtgctggctgtttttaaccgtatcattgctgtcgcacagcctgctggattcaataacgacaggcgggaaaggcgtcggctggctgtggccctggtcagatgagcgcttctttgcgccgtggcaggtgatcaaggtcgcgccgtttgcgctgtcgcgctacgccacgccctacgggcatgaggtcattatctcggaactgctgtgggtgtggctgccggggatggtgctgatggggttgctgtggtggaggcggaggtaa

SEQ ID NO: 115235 - DNA, 1386 bp, Enterobacter cloacae
atgttaaaaatctttaatacaatgacgcgccaaaaagaggaatttaaacctatccatgccggggaagtcggcatgtacgtgtgtggtattacggtttacgatctctgtcatatcggccatggccgtacctttgtcgcgttcgacgtggtgtcacgctacctgcgcttcctgggctacaacctgaagtacgtgcgcaatatcaccgacatcgacgacaaaatcattaaacgtgctaatgaaaatggcgaaagctttgtcgcgctggtggatcgcatgatcgccgaaatgcacaaggattttgatgccttaaatattctgcgcccggacagcgagccgcgtgcgacccaccatatccatgaaatcattgatatcacccaaaagctgatcgagcgcggtcacgcctatgtggcggacaacggcgacgtgatgttctcggtgccgacggacccaacctacggtgcgctttcccgccaggatctggaccagctccaggccggtgcgcgcgtggacgtggtggacgtgaagcgtaatccgatggactttgtgctgtggaagatgtccaaagcgggcgaaccgagctggccatccccgtggggcgaagggcgtccgggctggcacattgaatgttccgcgatgaactgcaagcagctgggcaaccatttcgacatccatggcggcggttcggatctgatgttcccgcaccatgaaaacgaaatcgcgcagtccacctgtgcacacggcggcgagtacgtgaactactggatgcactccgggatggtgatggttgaccgcgagaagatgtcgaaatcgctgggtaacttcttcaccgtgcgcgacgtgctgaagtattacgacgcggaaaccgtgcgctacttcctgatgtctggccactatcgcagccagctgaactacagcgaagagaacctgaagcaggctcgcgctgcgctggagcgtctgtataccgccttgcgcggcaccgataaatctgttccggccgcaggcggtgaggcgttcgaggcccgcttcgttgaggtcatgaacgacgacttcaacaccccggaagcctactccgtgctgttcgacatggcgcgtgaggtgaaccgcctgaagtcagaagatatggcggcggccaatgcgctggcgtctcatctgcgtaagctctcttccgtgctcggcctgctggagcaggagccggacctgttcctgcaaagcggcgcgcaggcggacgacggtgaagtggcggaaattgaagcactgatcaaagcacgtctcgaagcgcgtcaggcgaaagactgggcggcggcggatgcggcgcgtaaccgtctgaccgagatgggcattattctggaagacggcccgcagggaaccacctggcgtcgtaagtag

SEQ ID NO: 115236 - DNA, 495 bp, Enterobacter cloacae
atggttactttccacactaatcatggcgatatcgtaatcaaaacctttgatgacaaagcgcctgaaacagttaaaaacttcctggactactgccgcgaaggtttctacaacaacactattttccaccgtgtgatcaacggctttatgatccagggcggcggtttcgagcctggcatgcgccagaaagagacgaaagaagcgatcaaaaacgaagcgaacaacggcctgaaaaacacccgtggtacgctggcaatggcccgtactcaggcgccacactctgcgaccgcacagttcttcatcaacgtagcggacaacgacttcctgaacttctctggcgaaagtctgcaaggctggggctactgcgtattcgcagaagtggttgaagggatggacgtggtcgacaagatcaaagccgtttctactggccgcagcggtatgcaccaggacgttcctaaagaagacgttgtgatcacaagcgtgaccgtcagcgagtaa

SEQ ID NO: 115237 - DNA, 723 bp, Enterobacter cloacae
gtggcgacactctttattgcggatctgcatctgcaaacagaagaaccggcgataaccgccggttttctgcgttttttacgcggtgaagcgaaaagcgccgacgcgctgtacattctgggcgacctgtttgaggcctggattggcgacgacgatccgaacccgctgcaccgtgagatggcggcggccattaaagcactggtggattccggcgtcccctgctatttcattcacggcaaccgtgatttcctgatcggccagcgctacgcccgcgagagcggtatgacgctgctgccggaagagcaggtgctcaacctctatggccgcaatattctgatcatgcacggcgacacgctctgcactgacgataccggctacctggcgtttcgcgccaaagttcacaccccgtggatccagaaagtgttcctcgccctgccgctgtttatccgcaaccgcatcgccgccagaatgcgcgcgggcagcaaggccgccaacagcagcaaatcgatgaccatcatggacgtcaatccgcaggcggtggtgaaggtgatggagaagcatcgcgttcagtggctgatccacggccatacccatcgtcccgatgtacattcccttatcgccaacggcgagcccgcccatcgcgtggttttaggcgcctggcacagcgaaggatcgatggtcaaagtcacgccggaaggtgttgaactgatcgccttcccgttttaa

SEQ ID NO: 115238 - DNA, 510 bp, Enterobacter cloacae
atgtcttcccgcaataatccggcgcgtgtcgccatcgtgatggggtccaaaagcgactgggctaccatgcaattcgccgccgaaatctttgaaatcctgaatgttccgcaccacgtcgaagtggtttccgcgcaccgtacgccggataaactgttcagcttcgccgaaagcgccgaagagaacggttacgaggtgatcattgccggtgcgggcggcgcagcacatctgccgggcatgattgccgccaaaacgctggtgccggtactgggtgttcccgtgcaaagcgccgcgttaagcggggtggatagcctttactctatcgtccagatgccgcgcggtattcccgtcggtacgctggcgattggtaaagcgggtgcggcaaatgccgccctgctggccgcgcagatcctggcgacgcatgataaagagttacatcagcgtctggcggagtggcgtaaaacccagaccgatgaggtgctggataacccggatccgcggggtgcagcatga

SEQ ID NO: 115239 - DNA, 1068 bp, Enterobacter cloacae
atgaagcaggtttgcgttcttggtaatggtcagcttggccggatgctgcgtcaggccggtgagccgctgggtattgccgtctggcccgtcgggctggatgccgagccggaagccgtgccgttccatcagagcgtgatcaccgccgaaattgaacgctggccggaaaccgccctgacccgcgagctggcgcgccataacgcctttgtgaaccgcgacgtctttccgatcattgccgaccgtctcacgcaaaaacagcttttcgacaagctcggcctcgcgaccgcgccgtggcagctgctttccgataagcgcgagtgggatgacgtctttgcgatgctgggagacctggcgattgtgaagcgtcgcgtcggcggctacgacggccgcgggcagtggcgcctgcgcgcgaacgacaccgccgagctgccggacgactgctacggcgagtgcattgttgagcagggcattaacttcagcggtgaagtgtcgctggttggcgcgcgcgggcatgacgggcacaccgttttttacccgctaacgcataacctgcatcaggacggcattctgcgcaccagcgtcgccttcccgcacgccaatgctgaccagcagacgcaggcggaagagatgctgtctgccattatgcatgagctgggctatgtgggcgtgatggcgatggagtgtttcgtcacgccgtcgggtctgctgatcaacgaacttgcgccgcgcgtgcacaacagcggccactggacgcaaaacggcgcctccatcagccagttcgagctgcacctgcgcgccatcaccgatctgccgctgccgcagccggtggtgaccagcccctcggtgatgatcaacctgatcggcaccgatctgaactacaactggctgaagctaccgctggtgcacctgcactggtacgacaaagaggtgcgtccgggacgtaaggtcggccacctgaacctgaacgataccgacacggaccgactgagcgccacgctggaagcgattgttcccctgctgccgccagaatatgcgagcggtattgtctgggcgcagtcaaaactgaagtaa

SEQ ID NO: 115240 - DNA, 1071 bp, Enterobacter cloacae
atgaacgatggaacggactatcgcgcgatcctcgcgtccgatacccctttaatcgacgttcgcgcgccgatcgaatttgcccagggtgcgatgcccgccgcactcaaccggccattaatgaacgacgatgagcgtgccgccgtcggcacctgctataaacgccagggtccggacgccgcgctggcgctcggccatagcctggtcaacggcgagacgcgcgaggcgcgcatcagcgcctggcgggaagccagccttgcccatcctgagggctacctttgctgcgcgcgcggtggccagcgctcacacatctcccaggcctggctgaaagaggcgggaatcgattatccgctgatccgcggcggctataaggccctgcgtcagacggcgattcaggtgaccattgagcagtcacaaaagccgatggtgcttatcggcggctgtaccggtaacggtaaaacgctgctggtgaagcagcatgcgcagggcatcgatctggaagggctggcgcaccatcgcggctcgtcgtttggtcgcacgctcaccccgcagctttctcaggcgagcttcgagaatcaccttgcggttgagctattgaaaaaagacgccgcgcgctgggtgcttgaagacgagggccggatgattggctctaaccacctgccggagtgcctgcgcgaccgcatggctgaagcgcctgtcgtagtggtcgaggatccgtttgagatccgtcttgagcgcctgcgcgaagagtatttcgtccacatgtgggccgacttttctgccgcctacggtgaagaggcgggctggaaagcgtacagcgaatatctgcatcacggcctgtacgccattcgtcgccgtctggggctgcaacgctttgcggaatttaccgccctgctggatgccgcgcttgtcgagcaacagcgtactggcagcactgacgcgcacttcagctggcttgtgccgttgctgaaggactattacgacccgatgtacggctatcagctggagaaaaaggcggagaagattgtgtatcgcgggacgtacgaagaaattgctgagtggctcgatcgctga

SEQ ID NO: 115241 - DNA, 1146 bp, Enterobacter cloacae
atgactataagaaaaacagcgctggcgacaacgatcggcgcagcagtggcattggcttctttcgcatctcaggcggaaatcacccttctgaaacaggatccgcaggcgggtaacccgctgagccgcctgaactttaccgttggcggcagtattcgtcctcagttccagaatatgaccggtgatgacggcaaaaacagctacaagcgcaacggctttgacggcggcacccgcttccgtttcgctgcggattactacctgttcgatgacatcagctggatcagctactacgagctgggtgtgaacattccggcgcagttcaactgggatcatcactacgccgacggcgcgcacgacacctctcgtcgtatgctctacaccggtctgaagagcgacacctggggtacgctgaccttcggccagcagaacagcgtgtactatgacgtagtgggcgcaaaaaccgatatctgggactacgacatgattggtcaggcgccaggtaacgggatcaacggcgactatgacggctcttaccgttcacgccagatgctgaagtacaagaaaaccgtgggcgatgctgacatctacgcctcttacctgtttgaagacagcgaatacctgccgggcaacggcctgcgttacaaacgtaaaggcggcggttcactgggtatcgattatcacctgactaccgatctgacctggggcgcagcgtggaactacacccgcgcggacatgcgtaacccggacaacggcgacagcaaatcctacgaccagaatatccttggtaccgccctgagctggacgccggataactggaccttctccgcaggcggcggctggtatcagaacttcctgaccaccaaaaaagtgtccgttaacgactacttcgccggtgatgcatggggtattgaatactttgcgggttacaagttcccggttggtcagtatgcggtgaaatccatccagccgtacttcatgggcgaccgtattgagtacgtgaatggccgtaactaccagcgcatcgacaacggtgtgggtatcagcttccagctggattacggtttccgcgtggattacgaacacgtgttcacctccagcaccgacaacctgggcgatatgaacctggtgcgtctgcgttacgacttctaa

SEQ ID NO: 115242 - DNA, 2415 bp, Enterobacter cloacae
atgattgcccgctggttctggcgcgagtggcgctcgccctcgctgctgattgtctggctggcgttgagcctggcggtggcctgcgtgctggcgctcggtagcgtcagcgatcgtatggagaaagggcttagccagcagagtcgggaatttatggccggggaccgggctctgcaaagttctcgccccgtgccgccgggctggattgaggaagcgcgcaaagaggggctgaaggtaggggagcagatcacctttcagactatgacctttgcgggcgacacgccgcagcttgcaagcgtaaaagccgtggatgacatctacccgatgtacggtgacttacaaaccagcccgccggggctaaaaccgacggccggtacggtcctgctggcatcgcgactgatggcgctgctgaacctgaaacccggcgacagtatcgacgtcggcgacgcgacactcaaaattgccggggaagtggtgcaggagcccgactctggatttaatccgttccagcttgcgccgcgcctgctgatgaacagcgctgatgtggcgaaaaccaacgccgtccagccgggaagccgtgtcacctggcggtataagtttggcgggacgcctgcgcagctggaggcgtacgaaaaatggctcctgccgcagctcaagccggaacaccgctggtacgggctggagcaggatgacggggcgctcggcaaatccctcgaacgttcccagcagttcctgctgctgtcggcgctgttaactctgctgcttgccattgcggcggttgccgtggcgatggggcactactgccgcagccgttacgatctggcggcgatcctcaaaaccctcggcgcgggccgcgcgcagctgcgcaagctgattgtcggccagtggctgatggtgctggcgttgtcggctctgaccggcggggcgatagggctgctgtttgaaaagctgctgatggtgctgctcaaaccggtactccccgccgcattaccgcctgccagcctctggccgtggctgtgggccatcggcgcgatgacgacgatctccctgctggtagggttacgcccgtaccggctgctgctcgccacccagccgctgcgcgtgctgcgccgcgatgtggtggccagcgtctggccgctgaagttctacctgccggtgattattgcggtggcggtcgggctgttggcctggctgatgggcggcagtacgttgctgtgggcggtgctggcgggcgcggtggtgctggcgctgctgtgcggcgtagtgggctggatactgcttaatgtcctgagaaagctgacagttaaatcactccccatacggttagcggttaaccgactgctgcaccagccgtggtctaccctcagccagctctcggcattttcgctgtcgtttatgctgctggcgcttctgctggtgctgcgcggggatctgctggatcgctggcagcaacagcttccgccggaaagcccgaactatttcctgatcaacattgctcccgaacaggtgacgccgctgaagggtttcctgtctgagcatcacattattccggaatcgttctatccgatcgtgcgcgaccgcctgacgcagatcaacggccagtcgacggagggaaataaggatgaatcgctcaatcgcgaactcaacctgacctggcaggcgaaacgtccggaccataacccgatcgttgccggcacctggccgccgaaagcgggggaagtgtcgatggaagaggggctggcgacacgcctgaacgtgaagctcggagacagcgtgaccttcaccggcgatacccaggatttcaccgccaaagtcaccagcctgcgcaaagtggactgggaaagcctgcgaccaaacttcttcttcatcttcccgccgggtgcgctggacggacagccgcagagctggctcaccagcttccgctgggaaaacggcaacggcatgctgacgcagcttaaccgggaatttccgacggtgagcctgctggatatcggcgcgatcctcaaacaggtcgggcaggtgctggagcaggtgagccgcgcgctggaggtgatggtagtgctggtgaccgtctgcggcgtgctgttgctgctggcgcaggtgcaggtgggcatgcgtcagcgtcatcaagagctggtggtctaccgcacgctgggagccagtaaacggctgctgcgcgccacgctgtggagcgaatttgctctgctcggtctggtggcgggcctggtggcggccatcggggcggaaaccgcgctggcggtactccagagcaaagtcttcgacttcccgtgggagcccgactggcggctgtggctcacgctgcccgtctgcggcgccgtgctgctgtccctgtgcggcggctggctcggaacccggctgttgaaaggtaaagcgctattccgccagtttgtcagctag

SEQ ID NO: 115243 - DNA, 687 bp, Enterobacter cloacae
atgccagcggaaaacattgttgaagttcatcgtcttaagaagtccgtcggtcagggagaacacgagctttccatcctcaccggagttgaactcgttgtcaaacgtgccgaaaccatcgccctgattggtgaatccggttccggtaagtccacgctgctggccattctcgccggtctggacgatggcagcagtggggaagtgaacctggtcggccagcccctccacgcgcttgatgaagaggcccgcgccgcgctgcgtgcccggcatatcgggtttgtctttcagtcattcatgctgatcccgacgctgaacgcgctggaaaacgttgagctgcccggcctgctgcgcggtgacaatactcgtgaaagccgcgatcacgcgaaggcgttgctggaacagctggggctgggcaaacgtctcgaccaccttccggcacagctttccggcggtgagcagcagcgcgtggcgctggcccgggcgtttaacggccgcccggaagtgctgtttgccgatgagccaacgggcaatctcgaccgtaaaaccggggacaaaattgccgatctgctgttttccctcaaccgcgagcacggcaccacgctgattctggttacccacgatccgcagctggccgcccgctgcgaccgccgcctgcggctggtgaacggtattcttcaggaggaagcatga

SEQ ID NO: 115244 - DNA, 585 bp, Enterobacter cloacae
atgctgatgaccttccgcgcggcggctgcggacacgttattgattctgggcgacagcctgagtgcgggctatcgtatggccgccagtgcggcctggcccgccctgctcaatgataaatggcagtcccgggcgtctgtcgtgaacggcagcatcagcggcgatacgtcgcagcaaggcttatcgcgcctgcctgccctgcttaagcagcatcaaccgcgttgggtgctggttgaactgggcggtaatgatggtttgcgcggcttccagcctcagcaaacggagcaaacgctgcggaccattttgcagaccattaaggccgccaatgcccagccgctgctgatgcaaattcgcctgcccgccaactacggccgtcggtataatgaggcgtttagcgcgatctatcctaagcttgccaaagagtttgatattccgctgctgccatttttcatggaagaggtctatctgaaaccccagtggatgcaggatgatggcattcaccccaatcgcgatgcccagccgttcattgccgactggatggcaacccggctggctcctttagtaaaacatgactcgtcaaacagctga

SEQ ID NO: 115245 - DNA, 771 bp, Enterobacter cloacae
atgcaaaaatcggtcttaataacaggatgttccagcggaattggccttgaaagcgcccttgaactgaaacgtcaggggttttgggtactggcagcctgccgcaaacccgaggatgtcgaacgcatgcgagggctgggatttaccggcattctgctggatctcgattcgccagagagcgtagagcaggccgccgatgaggttatcgccctgaccaacaaccgtctttacggtctcttcaacaatgcgggctacggcgtgtacggcccgctacagactctctcacgggaacagctggagcagcagttctccgcaaactttttcggggcgcatcagcttaccatgcgccttctccccgccatgctgccgcacggcgaagggcgcatcgtgatgacctcctcggtcatgggcctgatctccacgccgggccgcggggcttacgccgccagcaaatatgcgcttgaagcctggtccgatgcgttgcgcatggagctgcgccacagcggtattaaggtcagcctgattgaaccgggcccgatccgcacccgctttacggaaaacgttaaccagacgcaggcggacaaaccggtcgaaaaccccggcatcgcggcgcgttttacgcttgggccagaagccgtcgttgccaaagtgcgccacgcgtttgagagcgatacccctaaaatgcgctatccggtcacgctggtaacccatgccgtcggctggttgaaacgcctgctgccggggcggatgatggacaaaattttgcagggttga

SEQ ID NO: 115246 - DNA, 855 bp, Enterobacter cloacae
atgtccgtacagaatatcgtcaacataactgaagctaacctgcaacagacgctcgaacagtcaatgattaaaccggtgctgttctacttctggtctgaacgcagccaacactgcctgcaactgacgccggtcctggaaagccttgccgcgcagtacaacggtcagttcattctggcgaagctggattgtgacgccgaaccaatggtggcttcccagtttggcctgcgcgcgatcccaaccgtctacctgttccagaacggtcagccggtggatggcttccaggggccgcagccggaagaggcgatccgcgccctgctggataaagttctgccgcgcgaagaagagctgaaagcgcaggaagccatggcgctgatgcaggaaggtaagtacgacgaggcgctgccgctgttaaaagacgcgtggcagctgtcgaaccagaacagccagattggtctgctgctggcagagacccagattgcgctgcaccgccctgaagacgcggaagccgtgctgaaaacggtgccgatgcaggatcaggatacccgttatcagggtctggtggcgcagattgacctgctgaaacaggcggccgatacccctgaaattcaacagcttcagcagcaggttgcggacaacccgcaggatgccgcgctggcaagccagctggcgcttcagcttcatcaggtggggcgtaacgaagaggcgctggagctgctgtttagccatcttcagaaggacctgggcgccgcagacggacaggcgcggaagatgttccaggagatcctggccgcgctgggtaccggtgacgcgctggcgtcgaaatatcgtcgtcagctgtacgcgttgctctactag

SEQ ID NO: 115247 - DNA, 783 bp, Enterobacter cloacae
gtgggtgaacataacataaccaacgaatcgctggcgctgtcgatggtcctggtgctggtggcgattgtggtcagctaccgggaaaagctggggctggaaaaagatattctttggagtatcgcccgcgcggtcattcagctcatcatcgtcggctatgtgctgaaatacatcttcaacgtcaatcatgccgtgctgaccctgttgatggtgctgtttatctgctttaacgcggcatggaacgcgcagaaacgcagtaaatacatcgataaagcgttcatttcgtcgttgatcgccatcactaccgggaccgcgttaacgctggcggtactggtactctccggctcgatagaatttacgccgatgcaggtgatccccatttccgggatgattgcgggcaatgcgatggtggcggtcgggttgtgctacaacaatctggggcaacggttcagcagtgaacagcagcagcttcaggagaagctaagcctgggcgcgacgccgaaggtggcctctgcgcggttgatccgcgacagcattcgctcttcgctgatcccaacggtggattccgccaaaacggtgggtctggtgagcctgccgggcatgatgtcggggctgatttttgccggtatcgatccggtaaaagcgattaagtaccagattatggtgacgtttatgctgctctctacggcgagcctgtccaccatcattgcctgctacctgacctatcggaagttttacaacgcgcgccaccagctggtggtgacgcagttgaaaaagacggggtaa

SEQ ID NO: 115248 - DNA, 672 bp, Enterobacter cloacae
atgaataataaaaaaaatcttctggatatcagggatgttggctttcgtgtgggtgataacaccatccttcagcacgttgatttttgtctctctccgggcgaatttaaactgataactggcccctccggctgcggcaaaagcaccctcctgaaaatcgtggcttcgctactgagcccaacggagggaaccatcctgtttgcaggaaaagatatcgccacgctttcaccggaaagctatcgccagcaggtgtcatactgcgtgcaaacgccgtccctgtttggcgacacggtgtacgacaatctggttttcccctggcacatccgcaaccaaacgcctgatccaaaaaagtttaccgacgatctgactcggttcgggctttcgccggagacgctgaccaaatcgatcgccgaactgtcgggaggggaaaagcagcgcgtctcgctgatccgtaacctgcaattcttgccgaaggcgctgttgctggacgaaatcaccagcgcgctggatgacgctaacaagcgcaacgtcaatgacattatccatcgctacgcccgggagcagaatattgccgtgctgtgggtgacgcatgattcaaatgaaattacccatgcggatgatgtcatcacgctcaggccgcagggcgggaaaatggaggaggctcatcgtgggtga

SEQ ID NO: 115249 - DNA, 855 bp, Enterobacter cloacae
atgacacatatcttttatgagttctcttccctgaagcctggtgttcctgatgtggaaacattaatggaagtcatcaattcttctgaactcacgcgttttgtcatgggtgcagaggtggtcgattttgttaagaaggcgctcatcgttaacaccacaatcggtagctttaaaaactgctattttgctttcgatgatggggcttactttctcgagtttgacggcaagggtaaatccagacgctttactgaggtgccggactggttcgtttcccccgcggaatttgcccgctcgcaatggctgattaaccatgatctggccgatgtgaaggcgacggcgtttattgacgtgctgatgtcctatccgcttaaagagcgccgggcgcactgcaatctgctgtttggtctggatctgcataaggtcaatgtggttccggcgcctacagcccctgccggaaaaatgggcaataaaaacggaaaaaccaccaagcctcgcgtcacagacctcggctcttttgagctttttaccgcgttctttgcgcgtatgaaaaccgccgtcaatgctaatgaattccctaccctacaggtgctgaccggccaggaggatcttacaaaagcgccgcacagcttaaagcaagggatcagaacctggtttaaggcgattaccggcgatctgccgccgaacaacaaacgtgtcggggcgggcaatgcggtattgttctgcgctcccgttcgcgagcagatccagcagatagaggccatcggcctggaaaaatactatcagggcttatcaaaagctatcgctgacgccggggatgggtttatcactgacttcagctatacctggtctgaaaagtaa

SEQ ID NO: 115250 - DNA, 915 bp, Enterobacter cloacae
atgctcatcgttgttcctgtccttatattcgttgcgctggttatcgtgggcgcaggcgtcaaaattgtcccgcagggttaccagtggaccgtcgaacgcttcggtcgctacaccaatactcttcagccgggtttaagcctgatcgtcccgttcatggacagaattgggcgtaagatcaatatgatggagcaggtgctggatatcccttcccaggaagtcatctccaaggataacgccaacgtcaccatcgatgcggtttgctttattcaggtgattgatgcgccgaaagcggcctatgaggtgagcaacctggagctggcgatcgtcaacctgaccatgaccaacatccgtaccgtgcttggctcaatggagctggacgaaatgctctcccagcgcgacagcataaatacccgcctgctgcacattgtggatgaagccaccaatccgtgggggatcaaagtgacccgcattgagatccgcgacgtgcgcccaccggcagagctgattgcttccatgaacgcgcagatgaaggccgagcgtaccaagcgtgcctatattcttgaagccgaaggggtgcgtcaggctgaaatcctgaaagcggaaggggaaaaacagtcgcagatcctgaaagccgagggcgaccgtcagtctgccttcctccaggcggaagcgcgtgaacgttcggcagaagcggaagcccgcgcgacgcaaatggtctccgaggcgattgccgccggggatatccaggccgtgaactacttcgtcgcgcaaaaatataccgatgcgctgaaggagatcggctccgcgaacaacagcaaggtggtaatgatgccgctggatgccagcagtctgatgggatctatcgccggaattgccgagttgatcaaagacggcggaaacgagcgtaaaaaatga

SEQ ID NO: 115251 - DNA, 453 bp, Enterobacter cloacae
atgattgagctcatcgttgcacatcctcatgcgttctggctaagccttggcggtttactgctggccgccgagatgcttggcggcaacggttatctgctgtggagcggggttgccgcggtgattaccgggctggtcgtctggctgctgcctgtcggctgggagtggcagggcgcgctgtttgccgtgctgacgctgctggccgcctggctgtggtggcgctggctgaacaaacgggtgaaggcgcagaagccggtcgacgcgcacctcaaccagcgtgggcagcagatcgtgggtagacgctttacgcttgataacgcgctgatcaacggacgcggtcatatgcgcgtgggggacagttcgtggccggtggtggccgacgatgacctcagcgccggcacgcgggttgaggtcattgcggtggaaggcattaccctgcgggttaaagcctgttag

SEQ ID NO: 115252 - DNA, 411 bp, Enterobacter cloacae
gtgaatatcagcgatgttgcgaaaaaaaccggcttaaccagcaaagcgattcgcttttatgaggaaaaagggctggtgacgccaccgttgcgcagtgagaacggctaccgcagctatacgcagctgcatcttgatgaactgacgttactgcgccaggcaagacaggtaggatttaaccttgaagagtgcggcgagctggttaacctgtttaacgatccgaaacgccacagtgccgacgtgaaaaaacgtacgctggaaaaagtggcggagatcgaacgccatatcatcgaattacaggcgatgcgtgagcaactgttacagctggcagaatcctgcccgggagatgacagcgccgagtgcccgattatcgacaatctttccggctgctgccaccgtaaaacccacgcctaa

SEQ ID NO: 115253 - DNA, 2499 bp, Enterobacter cloacae
atgtctcacactattgacctgacactggacggcctctcctgcggccactgtgtcaaacgcgttaaagaaagcctggagcagcgtcctgacgtggaaagcgctgaggtgagtatcgatcatgccgccgtgaccggcagcgccagcgccgacgcgctgattgataccattaaacaggccggttacggggcggagttaagccacccaaaggctaaaccgctggcagagtcatcatccccgtcggaagcactgacagcggccactcctgagcttccggtagctgatgatattgatgacagccaacagctgctgatcaatggcatgagctgcgccagctgcgtctcccgggtacaaaacgccttacaggcggtaccgggcgtcgcacaggcacgggtaaacctggcggagcgtactgcgctggtgatgggcagcgcctccgccgcagagttagtgcaggccgtggagaaagcgggctacggggcggaggccatcgaagatgatgccgagcgccgcgagcgccagcaggaaacggctgtcgccactatgaagcgtttccgctggcaggcgattgtcgccctgctggtcggtattccggtgatggtgtggggcatgatgggtgacaacatgatggtcaccgctgacaaccgcaccctgtggctggtgattggtctgattacccttgcggtgatggtgtttgctggcggacatttctataccagcgcctggaagagcctgaaaaaccgcaccgcgacgatggacacgctggtcgcgctcggtaccggcgcggcgtggctgtattcgatgagcgtgaacgtctggccgcagtggttcccgatggaggcgcgccatctctattatgaagcgagtgcgatgattatcggtctgattaacttaggccatatgctcgaagcccgcgcgcgtcagcgctcgtcgaaagcgctggaaagattactcgatttaaccccgccgacggcccgcgtggtcacggacgacggggaaaaaagcgttccgctctcaaaggtacagccgggaatgacgctgcgcctgaccaccggcgaccgcgtgcccgtcgacggtgaaatcacccagggcgatgcctggctggatgaagcgatgctgaccggcgagccgataccccagcagaaatctcagggcgatgcggtgcatgcgggtacggtggtacaggacggcagcgtactgttccgcgccagcgcggtcgggagccataccacgctgtcacgcatcattcgcatggtccgccaggcgcagagcagtaagccggagattggtcagcttgccgataaaatctccgccatttttgtgccggtggtcgtcggtattgccctgctgagcgcggcgatctggtatttcttcggcccggcgccgcagattgtctacaccctggtgatcgccaccacggtgctgatcatcgcctgcccttgtgcccttggcctggccacgccgatgtcgattatctctggcgtcggacgcgccgccgaatttggcgtactggtccgtgatgctgacgccctgcaacgggcaagcacgctggacacccttgtctttgataaaaccggcacgctcaccgagggcaaaccgcaggtggtggccgtcagtaccgttggctgtacggagacggacgccctgcgccttgccgccgcgctggaacaaggttccagccacccgctggcgcgcgccatcctggagaaagccggtgatggccgtctgccgcaggtcagcaacttccgcaccctgcgcggtttaggggtcagcggtgaagccgaaggccatacgctgctgctgggcaaccaggcactgctgactgaacacggcgttgatacgtccgcgctggacgcagagctaaacgcgcaggcctctcagggcgcgacgccggttctgctggcgagggatggtcaggtggcggcgctgctggccgtgcgcgatccgttacgccaggacagcgtagatgccttacagcgcctgcaccgcgcgggctatcgtctggtgatgctgaccggggacaacccgaccaccgccaacgccattgcgaaagaagccggtattgatgaggtgatcgcgggcgtgctgccggacggcaaagcggacgccatcaagaacctgcaaagtcagggtcgccaggtggcgatggtgggcgacggcatcaacgacgccccggcgttggcgcaggctgacgtaggcattgcgatgggcggcgggagcgatgtcgccattgaaaccgcggcgatcaccctgatgcgccacagcctgatgggggtggcggatgcgctggcgatttcgcaagccacgttgcgcaacatgaagcagaacctgctgggggccttcgtctataactcgctcggcattccgattgccgccgggattttgtggccgctgaccggtaccctgctgaacccggttgttgcgggtgcggcgatggcgctctcgtcaattaccgtggtgagcaacgctaaccgtctgctgcggtttaaaccgaaggattga

SEQ ID NO: 115254 - DNA, 795 bp, Enterobacter cloacae
atgggtctgtttaatcgtctaaaaacatcgtttcgcgccctttttccccgccgttatgcctggcccggtatggatatttcgcttccgggcgggcagcatctgcacctggtgggaagcattcatatgggcacgcaggacatgtcccccctgccctccggcctgattaaactgctgaagcgcgccgacgcgctgatcgtcgaagccgacatctccggccatgaatcgccgtttgccgggctggaaagcgatcgccccctggcggaacgtcttaacgggacgcagctggctgagcttacccgtcttgcggatgagaccggcgtctcgctctcaatgctcgacactctgcccctgtggcaaattgccatggtgttacaggccacccaggcgcagcgcctggggctgcgcggcgattacggtatcgattatcaactgctgaatgcggcaagggcgcgcaacctgtccgtcattgaactggaaggcacggacagccagattgcgcttcttcgccagcttcccgatgacggcctgatgctgctggatgataccctgacccactggcacaccaacgcgcgtctgctgcaaacgatgattggctggtggctggatgcgccgcccgcagacggtaagctggcgttaccgtcgacgttcagtgaatcgttgtatgatgtgctgatgaacgcgcgcaaccaggcgtggcgggagatactatatgccctgcctgccggtcgttatgttgtcgcggttggcgcgttgcatttgtacggagaagggaatttgccgtcgctgctgaaataa

SEQ ID NO: 115255 - DNA, 480 bp, Enterobacter cloacae
atgactcccgccgttaaattactcgaaaaaaacaaaatttctttccggatccacacatacgatcacgatccgaacgaaaccaactttggtgatgaagtggtgcgcaagctggggctgaacgcggaccaggtctacaaaacgctgctggtcgcggtgaacggcgatatgaagcacctcgccgtggcagtgacgcccgtcgccggacagcttgatctgaagaaagtggccaaagcgctgggagcgaaaaaggtcgatatggctgacccgatggttgcgcaacgcacaacgggttatctggtcggcgggatcagcccgctcggccagaaaaagcgtctgccgacgctgatcgatgcgccttcgcaggaatttgagacgatctatatttctggcggcaaacgcgggctggatatcgaactggccgcaggcgatctggcgaaaatgctggacgcgaaatttgcggatattgcgcgccgggattga

SEQ ID NO: 115256 - DNA, 1653 bp, Enterobacter cloacae
atgaagttaatgaagcgtggcgtcgcgctggcgctcatcgccgcatgggggctgacaagccagcccgcgcaggcgtatgaaaaagataaaacctataaaattaccattctgcatactaacgatcatcacggccatttctggcgcagcgaatacggtgaatatggcctggcggcgcaaaaaacgctggtggacggcattcgtaaagaggtcgcggcccagggcggcagcgtcctgctgctgtcgggcggggatattaataccggggtgccggaatctgatttacaggatgccgagcctgatttccgcggcatgaatttaattggttacgacgcgatggcggtcggaaaccacgagtttgataatccgctgagcgtgttgcgccagcaggagaagtggtccaaattcccgttcctttccgccaatatttatcagaaaagcaccggcgagcgcctgtttaaaccgtgggcgctgtttaagcgtcaggatctgaagatcgcggtcatcggcttaaccaccgacgatacggccaaaattggcaaccctgaatttttcaccgacatcgaatttcgtaaaccggcggacgaagcgaagctggtgatccaggagttgcagcagaatgaaaaaccggatgtgattatcgcgaccacccacatggggcattacgataacggtcagcacggctctaacgcgccgggcgacgtggagatggcgcgcagccttcctgcgggctcgctggcgatgattgtgggcggtcactcacaggatccggtctgcatggcttctgagaataaaaagcaggcagattatgtgcccggcacgccgtgcgcgcctgatcgtcagaacggaatctggattgtacaggcccacgagtggggtaaatacgttggccgcgcggatttcgaattccgtaacggcgaaatgaagctggtgcactatcagctcatcccggtcaacctgaagaagaaagtgacctacccggatggcaaaagcgagcgggtactctacacgccagagatcgctgaaaaccagcagatgctctctttgctgacgccgttccagagcaaagggaaagcgcagctggacgtgaagattggcacgcttaacggacgactggaaggggaccgcagcaaagtccgctttgtacagaccaacatggggcgtctggtgctggccgcgcagatggcgcgcacgaatgctgatttcggcgtgatgagcggcggcggtattcgtgattccattgaaggcggagacatcacctataaagacgtgctcaaagtgcagccgtttggcaacgtggtggtctatgcggacatgagcgggaaggaggtgattgactacctgaccgccgtggcgcagatgaagccggattccggggcgtatccgcagtttgctaacgtcagcttcgtcgcgaaggacggcaagcttaacgatctcaaaatcaaaggcgaaccggttgatccggcgaaaacctaccgcctggcaacgttaagctttaacgccaccggcggcgacggctatccgcatatcgataacaaaccgggctatgtaaataccgggtttattgatgcggaagtgttgaagcagtttatccagcaaaattcaccgattgacgtgaacatgtatgagccgaaaggcgaggtgagctggcagtag

SEQ ID NO: 115257 - DNA, 1221 bp, Enterobacter cloacae
atggcaatcagtgaatcaacccagcccgtccagggcgctccggcgtcgccgccgaaatcgcgcacttcctttaaagtattaggcgcaatcagtctctctcatctgctcaacgacatgatccagtcgctgattctggcgatctacccgctgttgcaatctgagttctcattaaccttcgtgcagatcgggatgatcaccctgaccttccagctggcctcttcgctgctacagccggtggtgggctactggacggacaaatacccgatgccatggtcgctgcccattgggatgtgctttaccctgagcgggctggtgctgctggccatggcgggcagctttgaggcggtactggttgccgcggcgctggtgggaaccggttcatcggtgttccatccggaatcgtcccgcgtggcacgtatggcctccggcggacgtcacgggctggcgcagtctctgttccaggtggggggtaactttggtagctccctcggtcctctgctggcggcggtaattatcgcgccttacggcaaaggcaacgtggcgtggtttgtgctggccgcgctgctggcgattgtcgtcctggcgcaaatcagccgctggtatgccgcgcagcatcgcgtaaataagggaaaacctgccgcgaagataaccaatccccttccgcgcaataaggtgatccttgccgtcagcgtgctgctggtgctgattttctcgaaatatttctatatggcgagcatcagcagctattacaccttctatctgatgcaaaaattcggattatcagtacaaaacgcccagttccacctctttgccttcctgtttgcggtggcggcaggcacggtgataggcggccctgtaggggataaaattggacgtaaatatgtgatttggggctctatcctcggcgtcgcgccgtttacgcttgttttaccgtacgcaacgctggaatggaccggaatattgacggtgattattggttttattctcgcatcggcattttcagccatcctggtctacgcgcaggagctgctgccgggacgtatcggtatggtttccggcctctttttcggttttgcctttggcatgggcggccttggcgcagccgtgttggggatggttgcagaccacaccagcatcttcctggtctataaaatctgcgctttcctgccacttctggggatgttgaccatattcctgcctgacaatcgtcataaagcgtga

SEQ ID NO: 115258 - DNA, 1677 bp, Enterobacter cloacae
atgcaccacgccacaccgcttatcaccaccattgttggtggacttgtgctcgcttttattctcggcatgattgccaataaactgcgtatttcgccccttgtaggctatttgctggcgggcgtgctggcagggccctttacgccgggttttgtcgcagataccaaactggcgcctgagctggcggaattgggcgtgatcctgctgatgtttggcgtcggactgcatttttccctgaaggatctgatggcggtaaagtcgatcgccataccgggagcgatcgcccagataggggtggcgacgctgctgggcatggcgctttcggcggtgctgggctggtcaatcatgaccggtatcgtatttgggctgtgtctttcaaccgccagtaccgtggtgctgctgcgcgcgcttgaagagagacagctgatagacagccagcgcggacaaatcgcgataggctggctgattgttgaagatctggtaatggtgttgacgctggttctgctgcctgccgttgccgggatgatggaaaaagagaatatcggcttcgcctcgctggcgctggatatgagcattaccatcggtaaagtcgtggcgtttatcgccatcatgatgctggtgggccgccgtctggtgccgtggatcatgtcccgcagcgccgccacgggctcgcgtgaactgttcacgctttcggtccttgcgctggcgctgggcattgcctttggcgccgtcgagctgtttgacgtctcctttgcgctgggcgcgttcttcgccgggatggtgctgaacgagtccgagctgagccaccgtgccgcgcacgataccctgccgctacgtgatgcattcgcggtgctgttctttgtctccgtcgggatgctgttcgacccgctgatcctcattcagcagccgctggccgtgctgggtacgctggcaatcatcatctttggtaagtccgttgccgccttcttcctggtacggatgttcggtcactcgccgcgcacggcgctgaccatcgccgccagcctggcgcagattggcgagttcgcctttattcttgctggtctggggatggccctgaacctgctgccacaggcggggcaaaatctggtgctggcgggggcgatcctctccatcatgctaaacccggtattgtttgccctgctggagaaatatctcgagaagaccgaaaccctcgaagagcaaaccctggaagaagcgattgaggaggagaaacagatccccgtagatatctgcaaccacgcgctgctggtcggttttggccgcgtcggcagcctgctcggtgagaagctgatggcccaggggatccccctggtagtgattgaaacctcccgcactcgcgtcgacgagcttcgcgagcgcggcatccgcgcggtgctgggcaacgcggctaacgaagagattatgaatctggcgcatctggactgcgctcgctggctgctgctcactatcccgaacggttacgaggctggcgagattgtcgccacagcccgtgaaaaatgcccacatatcgaaatcattgcccgcgcccattatgatgacgaagtggagtacatcaccgagcgcggcgcgaatcaggtggtgatgggtgagcgtgagattgcgaatacgatgctgacaatgctgacgaaaccgccggttgaagaggcggtgacggggtaa

SEQ ID NO: 115259 - DNA, 1305 bp, Enterobacter cloacae
atgaaatttcccggtaaacgtaagtccaaacactatttccccgtcgatgcccgcgatccgctgttacagcaaattcagcaggaaagcgaaaccagcgctgcctgggtggtcggtatcgatcagacgctggtggacattgaagccaaagtggatgatgcgtttgtcgcacgttacggtctgagcgccgggcactcgctggtgattgaggatgacgttgctgaagtgctgtatcaggagctggtgcgcgaaaatcttatcacccaccagtttgccggcggcaccatcggcaacaccatgcacaactactccgtactggcagacgaccgctcggtgctgcttggcgtgatgtgcagcaatatcgaaatcggtggctatgcctaccgctacctgtgcaatacctccagccgcaccgatctgaactatttgcagggcgttgacgggccgattggccgctgctttacgctgataagcgattccggcgagcgtacctttgccatcagccccggccatatgaataagctgcgcgctgaaagtatcccggaagaggtgatcgcgggcgcgtctgcgctggtactgacctcctatctggtgcgctgcaagccgggcgaaccaatgccggacgcaaccatgaaggcaattgagtacgcgaagaaatacaacgtgcctgtggttctgacgctgggcaccaaattcgtcattgccgacaacccggagtggtggcaggccttcctgaaagaacacgtctcgattatggcgatgaatgaagaagaagccgaagcgctgaccggcgaaagcgatccgctgctggcgtctgataaggcgctggactgggtagatctggtgctctgcaccgccgggccggtcgggctgtatatggcgggcttcacggaagaagagagcaagcggaaaacccagcacccgctgctgccgggcgcaatcgccgaatttaaccagtacgagttcagccgcgccatgcgtcataaagactgcatcaacccgctgcgtatcttctcccacatcgcaccgtatatgggtggccccgagaagatcatgaacaccaacggcgcgggcgacggcgcgctggccgcgctgctgcacgacatcaccgccaacgcctaccacaaaaccaatgtgccgaattccagcaagcacaccttcaactggctgacctactcctcgctggcgcaggtttgcaagtacgcgaaccgcgtgagttatcaggtgctgaaccagcattcaccgcgcttaacgcgggggctgccggaacgggaagacagcctcgaagaggcgtattgggacaggtaa

SEQ ID NO: 115260 - DNA, 963 bp, Enterobacter cloacae
atgagtcaggcgaaaaccggcatcctgcttgccaatctgggcaccccagaagcacctactccagcggcggtcaaacgctacctgcgacaatttttaagcgacacgcgcgtcgtggataccccaagactgctgtggtggccactgctgcgtggcgtcattctgccgattcgttccccgcgtgtggcaaagctctatcagtccgtgtggatggaagagggctcgccgctgatggtgtacagccgtcgtcaggagaaggcgctggccgcccgcctgccggacatgcccgttgcgctcggcatgagctacggtaagccgtccctggaaagcgccgtcgactctctgctggcgcagggcgttgaacacattgtggtgctggccctttatccgcagtactcgtgctccacggtagctgccgtctgggacgaactggcgcgcattctggcgacccgccgccgtataccgggtatcacctttatccgcgactacgccgataacgagctgtacattcaggcgcttgccagcagcgcgcgcgcgtcgtttgaaaaacacggcgagccggatctgctgctgctctcctatcacggtattccgcagcgtttcgcgaacgaaggggatgattacccccagcgttgccgcgataccacccgcgagctggtctccgccctcggcctgccgcctgagaaggtgatgatgaccttccagtcgcgcttcggccgtgaaccgtggctcaccccgtatactgatgaaacgcttaagatgctgggcgagaagggcgtgaagcacattcaggtgatgtcgccgggcttctcggcggactgtctggaaacgctggaagagattgccgtccagaacaaagagttctttatggaggcgggcggaacgaaatacgaatacattcctgcgcttaacgactcccctgaacacatcgacatgatggtctcactggtcaccacccgccgctga

SEQ ID NO: 115261 - DNA, 645 bp, Enterobacter cloacae
atgcgtattattctgcttggcgctccgggcgcgggtaaaggaactcaggctcagttcatcatggagaaatacggtattccgcaaatctccaccggtgacatgctgcgcgccgctgttaaatctggctccgagctgggtaaacaagcgaaagacatcatggacgcaggcaaactggtgaccgacgaactggttatcgcgctggttaaagagcgcattgctcaggaagactgccgtaacggtttcctgctggacggcttcccgcgcaccattcctcaggctgacgccatgaaagaagcgggcatcaacgtggattacgtgctggagttcgacgtaccagacgagctgatcgttgaccgtatcgttggccgtcgcgtacacgctgcttctggccgcgtttaccacatcaaattcaacccacctaaggttgaaggcaaagacgacgtgaccggcgaagagctgaccacccgtaaagacgatcaggaagaaaccgtgcgtaaacgcctggtggaataccatcagatgaccgcaccgctgatcggctactacaccaaagaagcgcaggcgggtaacaccaaatacgcgaaagtggacggcaccaaagccgtggctgacgtacgtgcagagctggaaaaaatcctcggctaa

SEQ ID NO: 115262 - DNA, 1875 bp, Enterobacter cloacae
atgaaaggacaagaaacccgtggtttccagtcagaagtaaaacagcttctgcacctgatgatccattccctgtattccaacaaagaaatcttcctgcgtgagctgatttccaacgcctctgatgcggcggacaagctgcgcttccgcgcgctgtctaacccggatctgtatgaaggcgacggcgagctgcgcgtgcgcgtctcgtttaataaagagaaccgcaccctgaccatcgccgataacggcatcgggatgaaccgcgacgaggtgattgaccacctcggaaccatcgccaaatccggcaccaaagcgttccttgagtccatgggctctgaccaggcgaaagacagccagctgatcggtcagttcggcgtaggcttctactcggcgttcatcgtggcggacaaagtcaccgtgcgcacccgcgccgcgggcgacagcgtcgagaacggcgtgctgtgggagtctaaaggtgaaggtgaatacaccgttgatgacatcaccaaagcggatcgcggcaccgaaatcaccctgcacctgcgtgaaggcgaagacgatttcctgaacgactggcgcgtacgctccattatcagcaaatattccgaccatatcgcgctgccggtagagattgaaaaacaggaagagaaagacggcgaaaccgtggtttcctgggagaaaatcaacaaggcgcaggcgctgtggacgcgtaataaagctgaaattaaagacgacgagtacaacgagttttacaagcacatcgcccacgacttcaccgatccgctgacctggagccacaaccgtgtggaagggaaacaggagtacaccagcctgctgtacattccggcgcaggcgccgtgggacatgtggaaccgcgatcacaagcacggcctgaagctgtacgtgcagcgcgtcttcatcatggacgacgccgagcagttcatgccgaactacctgcgctttgtgcgtggcctgatagactccaacgatctgccgctgaacgtctcccgtgaaattcttcaggacagcaccgtcacccgtaacctgcgcaacgccctgaccaaacgtgcgttgcagatgctggaaaaactggcgaaggacgatgcggaaaaataccagaccttctggaaacagtttggcctggtgctgaaagaaggtccggcggaagatactgcgaacgtggaagctatcgctaaactgctgcgcttcgcctctacgcacaacgactcctccgcccagaccgtgtcgctggaagagtacgtctcccgcatgaaagaagggcaggagaagatctactacatcaccgccgacagctatgcggcagcgaagagcagcccgcatctggaactactgcgtaagaaaggcatcgaagtgctgctgctgtctgaccgcatcgacgagtggatgatgaactacctgaccgagttcgacggtaaatccttccagtccgttgccaaagccgacgagtctatcgataagctggcggatgaagtggacgacagcgcgaaagaagccgagaaggcgctggagccgttcgttgagcgcgttaaaacgctgctgggcgaccgcgtgaaagaggtgcgcttcacgcaccgtctgaccgatacgccagccattgtcaccaccgatgcggacgaaatgagcacccagatggcgaaactgttcgctgcggcgggccaggccgtgccggatgtgaaatatatctttgagcttaatccggatcacccgctggtgaaacgcgcggcggatacccaggacgacgcccgctttgcggagtgggttgaactgctgctggatcagtccctgctggccgagcgcggtacgctggaagatcctaacctgttcattaaacgtgtgaatgcgctgctgctggcgtaa

SEQ ID NO: 115263 - DNA, 606 bp, Enterobacter cloacae
atgcaaaccagtccgctgctcacgcagttaatggaagcactgcgctgcctgccgggcgttggcccgaagtcggcgcagcgtatggcgtttacgctattgcagcgcgaccgcagcggcgggatgcgcctggcgcaggctctgacccgcgccatgtcagaaattggccactgtgcggattgccggacctttaccgagcaggacgtatgtaacatctgcacgaacccgcgtcgtcaggaaaacggtcagatttgtgtggtggagagtccggcggacatctacgccatcgaacaaaccgggcagttttccggccgctatttcgtgctgatggggcatctctccccgctggatggcatcggcccggacgatatcggtctcgatcgcctggagcagcgcctggagtcggaaaccatcaaagaggtgatcctcgccaccaacccgacggtggaaggggaggcaaccgccaactacatcgccgaactgtgcgcgcagtacggcgttgacgccagccgcatcgcccacggcgtgccggtcggcggtgagctggagatggtcgacggcaccacgctgtcacactcgctggccggacgtcacaagattattttctga

SEQ ID NO: 115264 - DNA, 333 bp, Enterobacter cloacae
atgtttggtggaaaaggcggtctgggtggcctgatgaagcaggctcagcagatgcaggaaaaaatgcagaagatgcaggaagagatcgctcagctggaagtcacgggtgaatccggtgccggtctggtcaaggtgactatcaacggtgcgcataactgccgtcgcgttgaaatcgacccgagcctgctcgaagacgacaaagagatgctggaagatctggttgcagccgcgtttaacgatgccgctcgccgtatcgacgaaacccagaaagagaaaatggcctctgtttccagcggtatgcaactgccgccgggctttaagatgccattctga

SEQ ID NO: 115265 - DNA, 1929 bp, Enterobacter cloacae
atgagttatcaggtgttagcccgtaaatggcgaccacaaacctttgctgacgttgtcggtcaggaacatgtgctgacggccctggcgaacggcttgtcgctaggtcgcatccatcacgcctatcttttctccggcacccgcggcgtcggtaaaacctctattgcccgtctgctggcaaaaggtctgaactgcgaaaccgggatcaccgccaccccgtgcggcgtgtgcgacaactgtcgtgagatcgagcaggggcgttttgtcgatctgattgagatcgacgccgcctcgcgcaccaaagtggaagatacccgcgatctgctcgacaacgtgcagtacgccccggcgcgcggccgcttcaaggtctatctgatcgatgaagtgcacatgctgtcgcgccacagcttcaacgccctgctgaaaacgctggaagagccgcctgcgcatgtcaaattcctgctggcgaccaccgatccgcaaaagctgccggtcacgatcctctcgcgctgcctgcaattccacctgaaggcgctcgacgttgagcagatccgcgctcagcttgagcatatcctcgatgaagagaacattgtccacgagccgcgtgcgctgcaactgctggcccgtgccgcggacggcagcctgcgcgatgcgctgagcctgaccgaccaggcgattgccagcggtgacggtaaactctccaccgacgcggtcagtaccatgctcggcacgctggatgacgatcaggcgctgtcgcttattgaagcgatgattgccgccaacggtgagcgagtgatggcgctcgtcaacgacgccgctgcccgtggcattgagtgggaagcgctgcttgtcgagatgctcagcctgctgcaccgcgtggcgatgctgcaactgtctccgtcggccattggcgcggacatggcgaccattgaacagcggatgcgtgaacttgcgcgcaccgtgccgccggctgacgttcagctttattatcagacgctgctgattggccgcaaagagctgccgtttgcaccggatcgccggatgggcgttgaaatgacgctgctgcgcgcgctggccttccatccgcgcaagccattgccggagccggaaacgccccggcagtcctttgcgccggttgcgccgaccgcggtaatgtcaccgcagcaggtgccaccgcaaccggcatcgccgccgccgcaaaacgtgccgctgtcggatgccaccagttcggtgcttgccgcacgaagccagttgcaacgtgcgcagggagcaaccaaaccaaaaaagagtgaaccggcagcgcctgcaagagcgcggccggtgaacaacgccgcgcttgaacgactggcctcggtaacggagcgcgtgcagtcgcgtccggcaccgtccgcgctcgagcaaaaagccccggcgaaagaagaggcataccgctggaaggcgaccaccgttgttgaaacggtcaaggaagtggtcgccacgccaaaagcgctgaaaaaggcgctggagcatgaaaaaacgccggagctatccgcgaagctcgcggaagagtccatcgagcgcgatgcctgggccgccgaggtcagcaaactgcaactgccgaagctggtggagcaggtcgcgctgaacgcctggaaagagcaggacggtaatcaggtgcgtctgcacctgcgccctggccagcggcacctcaactcccctggcgcgcaaaaggcgctggccgaggcgcttaccgcattacagggtgtaccggttgaattgactatcattgaagatgataatccggcggtgaaaacgccgctcgagtggcgtcaggccatttatgaagagaagctcgcgcaggcgcgcgaggcgataattgcggataacaacatccagaccctgcgtcggttcttcgacgccgatctggatgaagagagtattcgccccatttga

SEQ ID NO: 115266 - DNA, 552 bp, Enterobacter cloacae
atgaccgcaactgcacagcagcttgaatatctgaaaaatagcatcaaaagtatccaggactatccaaaacctggcattcttttccgcgatgtcaccagcttgctggaagacccgaaagcgtacgccctcagcattgaactgctggttgagcgttataaaaacgccgggatcaccaaagtagtaggtactgaagcccgtggcttcctgtttggcgcaccggttgcgctggcgatgggcgtgggttttgtgccggtgcgtaagccgcgcaaactgccgcgtgaaaccattgctgagagctatgagctggaatacggcaccgatcagctggaaattcacgttgatgccatcaagccaggcgacaaagtgctggtggtggacgatctgctggcaaccggcggcaccatcgaagcgaccgtgaagctgatccgtcgtctgggcggggaagtgaccgacgcggcattcatcatcaacctgttcgatctcggcggcgagcagcgcctggaaaaacagggtattaccagctacagcctggtgccattcccgggacattaa

SEQ ID NO: 115267 - DNA, 378 bp, Enterobacter cloacae
atgcagcgtactattttaatcatcattggctggctcgcggtagtgctgggcacgctgggtgtggttttacccttgctgccgaccaccccgtttatcctgttggccgcctggtgcttcgcccgctcgtcgccgcgttttcaccactggcttctgtaccgctcgtggtttggcggctacctgcggcactggcaaaaacaccgggccatgccgcccggggctaagccgcgcgccattgccttcatccttatcaccttcgccgtctcgttatggctggtgaaaatgatgtgggtgcgcattctgctgctggcgatcctggtttgcctgctgatctttatgtggcggatccccgtggttgatgaaaagcaacaaaagcactga

SEQ ID NO: 115268 - DNA, 528 bp, Enterobacter cloacae
ttgaaaacagcactgcttcttgagaggctgcaaaatcagctgatcgcgctgcgggcgcaggccacgccgttgatgggccacgccacgctgaaaccgcgctttgaccgacagctcttccgcacccgcagcaccgtcattgaggattatcttgctgaagcgcagaccaatctcgacgagcttcgtcacgcggttgagagtgaacagcaggaacaggtcgcgtggcttgcggagcatcttaccgagcagatcaccgccctgcaccgggaaatcgccgcctggccgttacgggcgtgggacagcgcctcgccgggactcggaaaatggcagcgcaagcggctggagaaccaggagtttgagcgccgtctgtttgagatgaagcgcgagcgcgaagcccgcctgaacaccagcgaaacgctggaagagcagcagttattaatgcgtgaaatcagcgcgctggaaggccgcatcgtccgctgccgtcaggcgctggatgagattgaacgcgtcatcgaacgcctgacccgttaa

SEQ ID NO: 115269 - DNA, 177 bp, Enterobacter cloacae
atgtcactggaaaatgcccccgacgaggtcaagctggccgtcgatttaattatgctgctggagaatcacgagatcccggcggagacggtgctgaaagcgctggagattgtgcgacgagattttgaggggaaacttccccctcaccctaccctctccccagaggggagagggaaatag

SEQ ID NO: 115270 - DNA, 3348 bp, Enterobacter cloacae
atgctgcacatcaatcgctcgcaacatcctgttctggccctgtttttgatcctgctgttttactttgcagccgcgccgctttcatgggcccgtgcagacaacggcagtgacattcccacgcgtgctgatgttcagtcgcaactcgacaccctgaataagcaaaaagatctctccgcccaggaaaaactcgttcagcaggatctgacggaaaccctggaaacgctggacaagatcgatcgcatcaaagccgaaacggcccagctacggcagaaggtcgctcaggcgccggagaacatgcgtaaggcaacggaggcgctgagtgcgctcagcgacgtcgataacgacgatgaaacccgaaaaacgcttgccacgctgtcgttgcgccagcttgagtcgcgcgtggcgcagctgctggacgatctgcaaacggcgcagtccgatctctcaacctacaacagccagctggtttcgctgcaaacccagcctgagcgcgtgcagaacgctatgtactcggcgtcgcaacagctacagcagatacgtaaccgtctgaatggcatcaccgtgggggaaggggcgcttcgtcccacccagcaaacgctgctgaacatccagcagacgctgctaaacgcggagattgaacagcagcgtaagagcctggaaggcaacacggtgctacaggatgcgctgcaaaaacagcgtgactacgtgaccgcgaatatcaaccggcttgagcatcagcttcagctgttgcaggaagcggtgaacagcaagcgcctgacgctgactgaaaaaacggcgcaggaagcggtttcgccagacgagacggcccgtattcaggccaacccgctggtgaagcaggagctggagattaaccaccaactgagcgagcgtctgattcaggcgactgaaagcggcagcgcgctggtgcagcagaatattaaggtcaaaaactggctggatcgcgctttgcaggccgagcgcaacgtcaaggagcagattgccgtcctgaagggcagcctgctgctgtcgcgcattctctaccagcaacagcagacgctgccttccgccgacgagctggaagacatgaccaaccgcattgcggatttgcgtcttgaacagtttgacgttaaccagcagcgcgatgcgctatttcagagcgataccttcgttgccaaagtggaagagggccattcaggtgaagtgaatgctgaagttcacgacgcgctgttgcaggtggtggacatgcgccgcgaattgctcgatcagcttaacaagcagctgggcaaccagctgatgatggcgattaacctgcaaatcaaccagcagcagctggtgagcgtttctaaaagcctccaggagatcctgacccagcagattttctgggtgaacagcaataaacccatggactgggactggtttaaatctttcccggaaacgctgaaatcccagatcaaaagcatgaaaattaccgtgaactgggagaaagcctggcctgcggtgatgattgccttcctgacggggctgcctttgctgctcatcgctggcgtcatacgctggcgtttgaaatggctgaaacagtaccaggcgaagctggcctcggaagtggggcaactgcgtaacgacagccaactgcacaccccgaaagcgatcctgatcgatctgatccgtgctctgccggtctgcctgttgatactcgccgtgggcctgatcctgctgaccatgcagctgaatatcagcgatctgctgtgggcgttcagcaagaagctggcgctgttctggctggtgtttggtctgtgctggaaagtgctggaaaaagatggcgtcgccgtccgccacttcaacatgccggaaaaactcaccagccactggcgtcgccagattgtgcgcatcagcctcgcgctgctgccgctgcacttctggtcagttgtggcggagctttccccgctgcacctgatggatgacgtgctggggcaactggtgattatgctgaacctgctgctgattgccgttctgatgtggccaatgtgccgcgacagctggcgggataaagagtcccacaatcttcgtctggctaccgtaacggtactggcgatcattcctctggcgctgatggtgctgacggcgacgggttacttctataccacgctgcgtctgtccggtcgctggatcgaaacggtttatctggtgattgtatggaacctgctgttccagaccgtgctgcgtggtttgagcgtggcggcgcgccgcattgcttatcgtcgtgctgttgcccgtcggcagcatcaggtgaaagagggggctgaaggggcagagccgcaggaagagccgaccattgctctggagcaggttaaccagcaaacgatgcgtattaccatgctggtgatgatcgccctgtttgcggtgatgttctgggccatctggtctgatttaattaccgtcttcgcctacctcgacagtatcacgctctggcaatacaacggtaccgaagcgggcgctgcggtaatgaaaagcgtcaccatgggcagcctgctctttgcgctggtgtcgtcagtggttgcctgggcgttgatccgcaacctgccgggtctgctggaagtgctggtgctctcaaggctgaacctgcgtcagggggcgtcgtacgccattaccaccatcctgaactatgtcattattattgtcggggcgatgacggtattcggctcgctgggcgtctcgtgggataaactccagtggctggcggcggcgttgtcggtgggtctgggcttcggcttgcaggagatcttcggtaactttgtctctggcctgattatcctgttcgaacgtccggtgcgtatcggcgataccgtcaccatcggtactttctccgggaccgtcagcaagatccgcattcgtgcgaccaccattaccgacttcgatcgtaaagaggtgatcatcccgaacaaagcgtttgtgaccgagcgtctgatcaactggtcgctctcggataccaccactcgcgtggtgatccgactcggggtggcctatggctcggatctggacaaggtgaaagaggtactgctgaaggcggcagccgaccatccaaaagtgatgcacgatcctgcgccagcggtattcttcaccaccttcgggccgagcactttggatcatgagctgcgcctgtacgtacgcgaactgcgcgatcgcagctacaccgtcgatgagctgaaccgcaccattgaccgtctgtgtcgtgaaaacgatattaatatcgcctttaaccagcttgaggttcatctgcgcaacgagaaaggcgatgagcatacggaagtgaagcgcgagattaagggggacgaccctactcccgcctaa

SEQ ID NO: 115271 - DNA, 594 bp, Enterobacter cloacae
atgcgtttgttctcacagcagggtgtttcggcaacctcgctggcacagattgctcaggccgcgggcgtcacgcggggagcgatttactggcatttcaaagacaagtccgatctgtttggtgaaatctgggagctttcagagtccagcattagcgatcttgagagtgagtatcgggcaaaattccctcacgatccactctcagtgttaagagaaattctagtatatatccttgaagcgacggttgttgaagagcgtcgtcgtctgatgatggaaatcatcttccataaatgtgagttcgttggtgaaatggcggtggttcaacaggcgcagcgcgacctgtgtctggaaagctacgatcgcatcgaacaggtcctcacggagtgcatgcaggccaaaatgcttcctgccacattactcacccgccgggcggcgatcctgatgcgcagctatatttccggcctgatggaaaactggctttttgctccggagtcgttcgatctcagatcagaggcgcgcagctacgtcgaaatttttcttgagatgtgccagctctgtccgacccttcaaagtaaacttagcccgcgctctgcctga

SEQ ID NO: 115272 - DNA, 1194 bp, Enterobacter cloacae
atgaacaaaaacagagggttaacgcctctggcggtcgttctgatgctctcaggcagcttagcgcttacaggatgtgacgacaaacaggctcaacaaggagctcagcaggtgccagaagttggcgtcgtgacgctcaaatccgaacctctccagatgacaacagaactaccgggccgcaccagcgcctaccgcattgcggaagtgcgtccgcaggtgagcggtatcatcctgaaacgtaacttcaccgaaggcggtgatgtcaaggcaggcgagtctctgtatcagattgatccagcaacctatcaggcgtcttatgagagcgctaagggcgatctggctaaagccgaagcggcagccaaaatctcgcagctgacgttgaatcgttacaagaaactgctcggcacgcagtacatcagccaacaggattacgattctgccctggccgatgcacagcaagccaacgcagccgttgtggcggcgaaagcggcggtagaaaccgcgcgtattaacctggcctacaccaaagtgacctcccctatcagcggtcgcattggtaaatcagccgtcaccgaaggtgcgctggtgcagaacggtcaaaccaacgcgctggccaccgtgcagcagctcgacccgatctacgttgacgtcacccagtccagcaacgatttcctgcgtctcaaacaggagctggctaacggcaccctgaaacaggaaaacggtaaagccaaagtggaactggttaccaacgacggtatcaagttctcacagactggcacactggaattttctgatgtgaccgtcgatcagaccaccggctctatcaccatccgggccattttccccaatccggataaaaccctgctgcccggtatgttcgtacgcgcccgtcttgaggaagggactaacccaagcgccattctggttcctcagcaaggtgtgacccgtacgccacgcggtgatgcgagcgcactggttgtgggtgccgataacaaagtcgaaacacgcaatatcactgcaacgcaggcgattggcgacaagtggctggtaacggaaggtctgaaagatggcgatcgcgtaattattactggtttgcaaaaagttcgtcctggtgcgcaggtcaaagctcaggaagtgaaatctgacgacaaacaacaagcgtcggccgctggccagtcagaacaaaccaagtcttaa

SEQ ID NO: 115273 - DNA, 3147 bp, Enterobacter cloacae
atgcctaatttctttatcgatcgccccatatttgcgtgggtgatcgccataatcatcatgctggccgggggacttgcgatcctgaagctgcctgtcgcgcaatatccaacgattgcgccgccggcagtgacgatctccgcaacctatccgggcgctgatgccaaaacggtgcaggataccgttacgcaggttatcgaacagaacatgaacggtatcgataacctgatgtacatgtcctcaaacagtgactcaaccggtacggttcagatcacactgacctttgaatccggtacggatgcggacattgcacaggttcaggtgcagaacaaattgcagctggcgatgcctctgctgccgcaggaagtacaacagcagggcgtgagcgtcgagaaatcgtccagtagcttcctgatggttgtcggcgtgatcaacaccaacggcaccatgacgcaggaggatatttccgactacgtgggcgccaacatgaaggacgccatcagccgtacgtctggtgtgggtgacgttcagctgttcggttcccagtacgcgatgcgtatctggatggatccgaataaactgaacaacttccagctgacgccggttgacgtgatcagcgcaattaaagcgcagaacgcccaggttgccgccggtcagttgggtggtacaccgccggtgaaaggccagcagcttaacgcgtcgatcatcgcgcaaacgcgtctgacctccgccgatgagttcagcaaaattctgctgaaggtgaatcaggacggttcgcaggttcgcctgcgtgacgtggcgaaggttgagctgggcggtgagaactacgacatcattgcgaagttcaacggtaaaccggcttccggtctgggtatcaaactggcgacgggcgcgaacgccctggacaccgcgacggctatccgtgcagaactgaagaagatggaaccgttcttcccgtcaggtctgaaaatcgtttatccgtatgacaccacgccattcgttaaaatttcgattcacgaagtggtgaaaaccctggttgaggcgatcattctcgtcttcctggtgatgtacctgttcctgcaaaacttccgcgcaacgctgatcccaaccatcgccgtgccggttgtactgctcgggaccttcgcggtgctggcgatatttggctactcgataaacaccctgacgatgttcgggatggtgctcgccatcggcctgctggtggatgacgccatcgtggtggtcgaaaacgtcgagcgtgtcatggcggaagaaggcctgccgccgaaggaagcaacccgtaaatcaatgggccagatccagggcgcgctggtcggtatcgcgatggtactgtctgcggtatttatcccgatggccttctttggtggctctaccggtgcgatttaccgtcagttctccatcaccatagtttcggcgatggcgctgtcggtactggttgcactgatcctgacgccagccctgtgcgcgacgatgctgaagccgattcagaaaggtggtcacggcgagcataagggcttcttcggctggttcaaccgcatgtttgataagagtacgcaccactacaccgacagcgtgggtaacatcctgcgcagcaccggtcgttacctgctgctctatatcatcatcgtggtggggatggctttcctgttcgttcgtctgccaagctcgttcctgccagatgaagaccagggcgtgttcctgagtatggcgcagcttccggccggtgcgacgcaagagcgtacgcaaaaggtgctggatgagatgaccgactacttcctgaccaaagagaaagacaacgtcgaatccgtgtttgcggttaacggctttggcttcgcgggtcgtggtcagaacaccggtatcgccttcgtttctctgaaagactggtctgaacgtccgggcgcagagaacaaggtagaagccattaccggccgcgcgatgggcaccttctcacagattaaagatgcgatggtcttcgcctttaacctgccagcgattgttgaactgggtacggcgaccggcttcgacttccagctgattgaccagggcggtctgggccacgaaaaactgactcaggcgcgtaaccagctgtttggcgaggtggcaaaacaccctgacctgctggtgggcgttcgccctaacggtctggaagatacgccgcagtacaagatcgatatcgaccaggaaaaagcgcaggcgctgggtgtttccatcagcgacattaataccacgctgggtgcagcctggggtggcagctacgtcaacgacttcatcgaccgtggtcgcgtgaagaaagtctacgtgatgtccgaagcgcaataccgtatgctgccgaacgatatcaacaactggtatgttcgcggcagcgatggccagatggtgccgttctccgccttctcaacctcgcgctgggaatacggttcaccgcgtctggagcgttataacggcttgccatcgatggaaatcctcggtcaggcagcgccgggccgaagcaccggtgaagccatgaacctgatggaagaactggccagcaaactgcctgcgggtgtcggctacgactggaccggcatgtcctatcaggaacgtctgtccggtaaccaggcccctgccctgtacgccatttcactgattgtggtgttcctgtgtctggcggcattgtatgagagctggtcgattccattctccgttatgctggtggttccgctgggggttatcggtgcgctgcttgccgcaacgttccgtgggctgaccaacgacgtttacttccaggtgggcctgctgacaaccattggcttgtcggcgaagaacgcgatactaatcgtcgaattcgccaaagatctgatggagaaagaaggaaaaggcctgattgaagcaacgctggaagccgttcgtatgcgtttgcgtccaatcctgatgacgtccctggcatttatcctcggcgttatgccgctggttatcagctccggcgcgggctccggcgcacagaacgcagtaggtaccggcgtaatgggtgggatggtaaccgcgaccgttcttgcgatcttcttcgtaccggtgttcttcgtggtggttcggcgccgcttcagccgtaagaatgaagacgttgagcacaatcattcggtagaacatcactga

SEQ ID NO: 115274 - DNA, 375 bp, Enterobacter cloacae
atggacgagtactcgccaaaaaggcatgatatcgcgcagttgaaatttctctgcgaatccttgtaccatgactgccttgccaatcttgaagaaagtaaccatggctgggtgaacgatccaacgtctgctatcaatttacagcttaacgagctgatcgagcatatcgccaccttcgcacttaattataaaattaagtacaatgaagataataagttgatagagcaaattgatgaatacctggacgacacctttatgttgttcagcagctacggcattaacgcacaggatttgcagaaatggcgtaaatcaggaaaccgtctatttcgctgcttcactaatgtcagcagagctaatccggttagtctttcctgttaa

SEQ ID NO: 115275 - DNA, 219 bp, Enterobacter cloacae
atgtctgataaaccattaacaaaagtcgattatttgatgcgcctgcgacgctgccagtcaattgacacccttgaacgagttattgagaaaaataaatacgagctgtctgataatgaactggcggtattttattcagctgccgaccatcgtcttgctgagctgaccatgaataaactgtatgacaagatcccctcttcggtgtggaaatttgttcgttaa

SEQ ID NO: 115276 - DNA, 552 bp, Enterobacter cloacae
atgagtgaagaaaaacagaagatgattgcaggtgaatattaccgccctggcgatgacacgctgagggctgaccgtttacgcgcgcgtcatcttgttcaccgctataaccataccgcacccgatgagaaggccgaacgtcgcgccttattagctaacctgctgggtcaaagcgaaggtgcctatatagagccaagcttccgctgcgactacgggtataacatctatctgggcaacaatttttacgctaacttcgattgcgtcatgctggacgtctgccctgtccgcattggcgataactgtatgcttgcgccgggagtgcacatttatacggccacgcatcctctggatgcgactgaacgtaacagcgggctggagtacggtaaaccggtcaccattggtgataatgtctggatcggcggacgcgcggtgattaatccaggcgtgaccattggcgataatgcggttatcgcttccggcgcggtagtgaccaaagacgtgccggccaatgcggtagtgggcgggaatccggcgaaaatcattaaaatgctctaa

SEQ ID NO: 115277 - DNA, 468 bp, Enterobacter cloacae
atgacagagatacagcgcctgcttacagctaccatcgacgatctcaatacccgcgaaaagcgcgacaatcgcccgcgctttagcatcagctttattcgcaaacaccccgggttgttcgtcgccatgtacgccgcctggctggcaacgcttatcgtcatgctgaagtctgaaacgctggtcgattccgtctggctgctggttgtgctgttcgtggtgtttaacgcgtttttctttttcgacgtcaatccacgttaccggtatgaagatatcgacgtactcgatttccgcgtgtgctacaacggggagtggtacaacacgcgttacgtgccgaaagagctgatcgacagcatcctgcactcgccggccgtcgaagccgggcaaaaagagaagttgcagaaaatggtcaccaccaagggccagctctctttttatgatgtctttaccctttcccgctccactgctgcgtaa

SEQ ID NO: 115278 - DNA, 1461 bp, Enterobacter cloacae
atgaatataccgggtgatgagctttacaccttgctccatgctgcgctgaaaaaacgtggggaagagacgctccagcgtgcgctctatcttgctttgcgggaggccatactgtgcggaaggcttcgatccggcagccatttgcccggctcacgaacgctggcgcagcagatctctgtgtcccgaaataccgtcaacgcggcgctggaccagctcacgctcgaaggttatttgctgcgtagccgccagggcacgcgggtggggcaatttgctcctcggacgattgcccggacattaccggacccggacgtcaggctgacaaaacgtgtcgccctgctgcccgcgcctgtgccgcgcgacactccggtgatggcgtttacgccgggaacgcctgccatcaactatttccccttgccgctgtggcggcggttgtacgatcgcgtcctgcgcgaggagggaagcgccctgttagggtatggcgacccggccggcgagccgacgctgcgggccgccattgcccgccatcttgcgctctcccgcggcattgactgcgatgccagccagatagtgataaccgaaggggcgctggagggcgtcaatctctgcacgatgctgttaagcgagccgggggatgtcgcctgggtggaaaatcccggctatagcggcgccaaaagcgcttttgtcaaaaccggcttggcgatgacaggcataccggtggatgacgaggggatgtgctgggaagggctgtctgcgccttcacccacgctgatttttacctcgccatcgcatcagttcccttgcggaagcgtgctcagcgcgcggcggcgtctggcgctgctggaactggcccggcagtacagcgcgtggatcattgaggatgattacgacagcgaatttcgttataccggtgagcccgtcccggcgatgctgggaatggtcaacaatgcgcccgttgtgtatctggggacgttcagcaaaacgctgtttccatcgctccggatggggttcatggtgttaccgccagcgctggcgaaggcggcgcgtccggccatcggctcgctgctgcgcggcgggcatcgcgctgaacagcgcaccctggcgctgtttattgaggaaggccactatgcacgacatcttgccgccatgcgccgcctttatcgtaagcgttaccgccagctgcgggaggtgctgagcgcagagcttcatacgccgcaccgtgttcttgccggggaagggggaatgcatctgacgctggcaattgacggtatcgacgaccagcggctggtagagcaggcgagagcgtttcagctggcacccgctgcgctgagcgggtattaccttgagacgaagctggggcaaaccggtctggttttaggttacggcaatacctctgcttcgcagtttgcgccgggtatccgacgtcttcaggcgctcattacgcagcagtggagcgggaaagggtaa

SEQ ID NO: 115279 - DNA, 711 bp, Enterobacter cloacae
atgaatacattcaatgagtttggacaacctgtaggcgaaagcctcatcgactggcagcctcgcccgcacccgtcccgggtgatacttcagggtcgctattgtcggcttgagcctctgcgcgtggagcatgccccggcgttgttctctgcgtattccctggccggagatacccgaagctggacgtggctgctgcgtgaacccgatgccaccgcagaggagtttgccgaatgggtggcgagcgtgagcgaattagccgatcccatccactttaccgttatcgataaccagacccagtctcctgtcgggacgctgtccctgatgcggatcgatcctaaaaacggcgttgtggaagtgggacatgttcacttctcgtcactgttaagtcgcacgcccatgtcgacagaagcgcagtatctgctgatgcggtacgtgttcgataccctgggctaccggcgttatgaatggaagtgcaacagcctgaacgaaccatcccgcaaagcggctctgcgtctgggctttcagtttgaagggcgttttcgccaggcgctggtcattaaaggccgaaaccgggacaccgactggttttcaattctcgacaaagagtggccagcgctggcgagcgcgtttgaaagctggcttgccaccgacaattttaccgccgatggcaaacagaaaagctccctggaaagctggcgagagacgcgcgtttag

SEQ ID NO: 115280 - DNA, 141 bp, Enterobacter cloacae
atgcaggtgctgaactcattacgcagtgcaaaacagcgtcacccggattgccagatagtcaaacgcaagggacgcttatacgtgatctgcaaatccaacccgcgctttaaggcggtgcagggacgtaaaaaaagacgctaa

SEQ ID NO: 115281 - DNA, 261 bp, Enterobacter cloacae
atgaaaccgaatatccatccaacctatcgcaccgttgtgtttcacgacaccacggctaatgaatactttaaagtcggctcaacaattaagacagaccgtgaaattgagctggaggggaaaacgtatccctacgttacccttgatgtctcctctaaatcacatccgttttataccgggaagcagaagaccttctcgacggatggcagcgcggcacgcttccgcaagcgttttggtggctttcttgatgcgaagcgaggctaa

SEQ ID NO: 115282 - DNA, 1569 bp, Enterobacter cloacae
atgcgaacccgacatctggtcagcctggtaacaggcatactgatcttctctgtgctggtccctgtgtgcctcagtatctggctggcgcatcgtcaggcagaggataaatttgtggacgctctggacagctatgcctcgcgcgtcctgatccgtaccgacagagtcgttgcgcaggcaaaacaggcgctcacgcacctacagacattccacgccccaccctgcactcccccgcatttacgcgaaatgcgtcgggttgaattctcatggcgctatattcaggaagtgatgtatatcgataacctgaagccgctctgctcatcccttgaacaatccagtaatacggcgatcttaccgcccccgatgcggatcaccgcagacgggtatagcgcgtggctcacctcgcaaaacgacctcggcattcaccgctatatggccgttctggggaaaggacattatctggtgatggttgatcctgcctcgcttgtggatgttgtcccgtttggtgaaatttcgatggatgccgccctggtgggcagtgaaacccatcggatatttgccagaagcaatattgtcgacccgtatattctttctgtcgttaaggagcagcaggacgttacgcgcgtacaatacaacggctcgatgtacgtgttgaaacctgtacccgaactgggttttacggtgatcgcgtgggcgtcgttaaaaccgctggcggaatcgtggcaccagcagctgatcatctggctaccggctggcatcttgctaagcctggctggtgcccttattgtcctgcgcatcctccgccgtttgctgtcaccgcgtaaccgcctgatcgacgcaatcaacaaccgggagatcgaggtttactatcagcccatcgtagcgctgtgcagtggaaaactggtgggtgctgaagcgctgatgcgctggccgcagccagatggcagtcacctgtcgcccaatctctttgtgccgctggctgagcagacggggcttatttcaacgctgacgcagctggtggtgaataaggtgtttgaggatttaggcgcctggctgcatcatcacccggaactgcacatttctgtcaaccttgcgccatcggatttaacgtcccccgagctgcctcgccagctgagtcagttgctcaacaaatggggcgtccacccgcgccagatcgcccttgaattaaccgagcgcggctttgccgatcccgccgtcagcgtgcctgccatcgctgcgtttcgccgcgccggacacgctatctacattgatgattttggcacgggttactccagcctgagctatttgcaggatctggatgtcgataccctgaagattgataaatcctttgtggatgcgctggagtacaagaacgtgactccccacatcatcgaaatggccaaatcgcttaaactggcgatggtcgcagaaggcattgaaactgaagggcagatcgaatggttgcatcgccacggcgtgcagtacggccagggctggtatttcagcaaggcgctgcctaaagaggatttcattctctgggccgggcacaacctggagaagcacattacttaa

SEQ ID NO: 115283 - DNA, 273 bp, Enterobacter cloacae
atgtcacacacagttcgtgataaaaagaagttattgacccgcctgaaaaaaattcaggggcaaagcgctgcgctggaaaaaatgcttaacagcgatcatgaatgcgccgaggtgttacagcagctggcggcgatcaggggcgcggtaaacggtatgatgatgcaagtgattgaggggcatttaaccgatcacgtggtgaaagagccagaggaagcgcagcgcgaggccgatctcggggtcgtgatgcaggtgatcaaatcgtaccttaagtaa

SEQ ID NO: 115284 - DNA, 816 bp, Enterobacter cloacae
atgaacgatttttcttctcttctacagcagggtaacgcctggctgtttgtccccagcgccatcctgcttggcgcgctccatggccttgagccaggccattcaaaaacaatgatggcggctttcattgtggcgatccgcggtacgctgaaacaggctgtgttgcttgggttgtccgcaacgctgtctcatacggcggtcgtctggatcattgcgatggcgggattatggtttggtcggggatgggatgcagatacttctgagccctggtttcagttgatttccggggttctgatcgtgttgatcgccctgtggatggcgtggcgaacctggcatgagagccagccgcatcaccaccatgatgatcatcatcaccatcatgatcatcacgaccacgcgcatcatcacgaccacacgtctcctctggttgaagaggagtggcaggatgcccaccagcgcgcacacgcccaggacattaaccgacgcttcaacggtaaagaggtcaccaccgggcaaatcgcgctattcggcctgaccggtgggcttatcccctgtccggcctccattacggtgctgctgatctgcctgcaactgaaacatttcgcgctcggcgccacgctggtgttcagtttcagtatcggactggcgctcactctcgtcgcctctggcgcaattgccgcattaagcatgaaacatgcggcgaagcgctggcccggctttagcgccttttcgcgcaaggcgccgtggatctcagcggcactgatcgcggtagtcgggatttatatgagcattcacggcgcaagcgggatcctgagataa

SEQ ID NO: 115285 - DNA, 624 bp, Enterobacter cloacae
atgtccgcgcgcctcctccagtgtgaagcggagcagcatgcccgtgaggtggtggtgaccacgcagcacgtgtgggagcatcagggtaaagcgctgtttatcagctgcaagctctggcggattgatgaccacggggtgctgcacggtgatgtgcaggtgacggtggcgtctgacattcctgagcccgctcgcgtgggcctgagcgttatgctggcggatatcccggaaacggtgcgctggctggggctaggcccgctggagaactatccggacagaaaactggcggcgcagcaggggcgttgggcgttaccgctggaagagatgcagacgccgtatatcttcccgacggagaacggtttgcgctgcgacacccgcgagctgacgtttggctcccatcagttgcagggacagttccatttctccctgagccgttatagccagcggcagctgcatgagacaacgcatcagcacttgctgcgggaagaggctggctgctggttgaatcttgatgcgtttcacatgggcgtagggggggacgactcatggagcccgagcgtagccccggccttcattctgcaaaaccgccggctgcgctacacgtttagctggcagcagaacggctga

SEQ ID NO: 115286 - DNA, 285 bp, Enterobacter cloacae; identical to SEQ ID NO: 26633

SEQ ID NO: 115287 - DNA, 429 bp, Enterobacter cloacae; identical to SEQ ID NO: 26632

SEQ ID NO: 115288 - DNA, 2118 bp, Enterobacter cloacae; identical to SEQ ID NO: 26631

SEQ ID NO: 115289 - DNA, 1767 bp, Enterobacter cloacae; identical to SEQ ID NO: 26630

SEQ ID NO: 115290 - DNA, 1248 bp, Enterobacter cloacae; identical to SEQ ID NO: 26629

SEQ ID NO: 115291 - DNA, 636 bp, Enterobacter cloacae; identical to SEQ ID NO: 26628

SEQ ID NO: 115292 - DNA, 1284 bp, Enterobacter cloacae
atgagcgctatttccctgatccagccggatcgcgacctcttctcctggccccagtactgggcagcctgctttggaccggcgccgttcctgccgatgtcccgggaagagatggatcaactgggctgggacagctgcgatatcattctggtgacgggcgatgcgtatgtcgatcacccgagctttggcatggcgatctgtggccgtatgcttgaagcccagggcttccgcgtggggatcatctcccagcctgactggaacagcaaagacgactttatgcgtctgggcaagcctaacctgttcttcggcgtgaccgcgggcaacatggactcgatgatcaaccgctataccgccgaccgtaagctgcgccatgacgacgcttacacggctgacaacgtggcgggtaaacgtcccgatcgcgcgaccctcgtctacacccagcgatgcaaagaagcatggaaagacgtgccggtgatcctgggcggcatcgaggcgagcctgcgccgcaccgcacactacgactactggtctgataccgtgcgccgttcggtgctggtggattcgaaagccgacatgctgatcttcggcaacggcgagcgtccgctggtggaggtggcgcatcgcctggcgcagggtgaaccggtcagcgagatccgcgacgtgcgcaacaccgcgatcatggtgaaagaggcgctgccgggctggagcggggtggattcccgcattatcgatatgccgggcaaaatcgaccctatcccacatccgtacggtgacgatctaccgtgcgcggataacaaaccggttgagccgaagaaagcggaagcaaaggccgtggtggtgcagccgccgcgtccgaagccgtgggaaaaaacctatgtgctgctgccgtcttacgaaaaagtaaaaagcgataaagtactctacgcccacgcatcgcgcatcttacaccatgaaaccaaccccggctgcgcgcgcgctctgatgcaaaagcacggcgagcgctatatctgggttaacccaccggcgatcccgctctctaccgaagagatggacagcgtctttgctctgccgtacaagcgtgtgccgcatccgtcatatggcaacagccgtattccggcgtacgagatgatccgtttctcggtcaacatcatgcgcggctgcttcggcgggtgctcatttactcttgtttttatgtatttagagttaaactctacttttctatttttagaattcaagctattcatcgtaattgagagatatccttttaatgttcagcaagcctgttaa

SEQ ID NO: 115293 - DNA, 1413 bp, Enterobacter cloacae
atgtcactcagtcggcgtcagtttattcaggcttcgggtatcgccctttgtgcgggtgcgatgccgcggacagccagcgccgccgggcagcaacagccgctgcctattccgccgttgattgaatcccgtcgcgggcagccgctattcctcacgcttcagcgtagccactggtcctttacccagggaacgcgcgcgcaggtatggggcattaacggacgctacctcgggccgaccattcgcgtgtggaatggcgatgacgttaagctcatctacagtaaccgtacgacggaaaatgtcgcgatgaccgtcagtggtttgcaggtgccggggccgctgattggcggcgcggcacgcatgatgtcgccgaatgccgactgggcgcccgtcctcccgattcgtcagagcgcggcgacattgtggtatcacgccaacaccccgaaccgcaccgcccagcaggtctacaacggcctggccggaatgtggctgattgaagatgaggtcagcaaaacgctgccgatcccgaatcactacggcgttgatgatttcccgatcattattcaggacaagcggctggataacttcggcacgccggagtacagcgagccgggcagcggtggttttgtgggcgatacgctgctggttaacggcgcgcaaagcccgtatgttgaagtgtctcgtggctgggtgcgcctgcgtctgctgaatgcttctaactcgcgtcgctatcagttgcagatgagcgacggccgcgcgctgcacgtgatttcaggcgatcaggggttattacctgcgccggtatcggtaaaacagctggcgctggcaccgggcgaacgtcgtgagatcctcgtggatatgaccaacggggatgaagtgtccgtgacctgcggcgaagcggcaagcattgttgaccgtattcgtggcttctttgaaccgtcgagcgttctggtctccacgctggtgctgacgctgcgcccgaccggcctgttgccgctggtgaccgacagcctgccgatgcgcctgctgccgcaggagattgtgaccggcccggcagtacgcagtcgcgatatcagccttggcgacgatccgggcatcaacggtgcgctgtgggacgtaaaccgcattgatatcaccgcccagcagggaacctgggagcgctggaccgtccgctcggagatgccgcagtcgttccatattgaaggggtgtcattcctgatccgcaacgtcaacggggcgatgccgttcccggaagacaggggctggaaagataccgtctgggtggatggccaggtcgaactgctcgtctactacggccagccttcctggccgcacttcccgttcctgttccacagccagacgctggagatgatggacaggggatcggtagggcagatgctggtgaatccggcaccgtaa

SEQ ID NO: 115294 - DNA, 738 bp, Enterobacter cloacae
atgctatacattgttcgtctcattcttaccgttatttattgcattctggtctgtattttcggatcgatttattgcctgttcagcccgcgtaacccaaagcatgtcgcgacgtttggccacatgtttggtcgtcttgcgccgctatttggcctgaaggttgaaaagcgtctgcctgaaggggcggagaatttcggtaacgccatctatatcgctaaccatcagaacaactacgatatggtgacggcctcaaatattgttcttccgccgaccgtaaccgtgggtaaaaaaagcctgctgtggatcccgtttttcggtcagctgtactggctcaccggtaacttactgattgaccgtaacaaccgcgccaaagcgcatggtaccattgcggaagtggtggatcagtttaaaaagcgccggatttccatctggatgttcccggaagggacgcgcagccgtggtcgcggcctgctgccgtttaagaccggcgcgtttcatgctgcaattgcggcaggcgttccaattattcccgtgtgtgtttccaatacatcgaataagattaatcttaaccgtctgaataacggactggtcattgtcgaaatgctgccgccggtagatacctcaaaatacggtaaagaccaggtgcgcgagctggccacgcactgccgcgagctgatggctcagcatattgcgcagctcgataaagaagttgcagagcgagaagccgccggtaagatttga

SEQ ID NO: 115295 - DNA, 2259 bp, Enterobacter cloacae
atgagcgatatggcagagcgcctcgcgctacatgaattcacggaaaacgcctacctgaactactccatgtacgtcatcatggacagggcgttgccgtttatcggggatggcctgaagcccgttcagcgccgcatcgtctatgcgatgtccgaactggggctgaatgctaccgccaagtttaagaaatccgcccgtaccgtcggcgacgtgctgggtaaataccatccgcacggcgacagcgcctgctatgaagcgatggtgctgatggcccagccgttctcttatcgctatccgctggtggatggccaagggaactggggggcaccggacgatccgaaatccttcgcggcaatgcgttataccgaatcccgcctgtctaaatatgccgaagtgctgttgggcgagctggggcaggggacggtcgactgggtgccaaacttcgacggtacgatgcaggagccgaagatgctgcctgcgcgtctgccgaacatcctgctgaacggcacgaccggtatcgccgtgggcatggcgacggacattccgccgcacaacctgcgtgaagtggcaaaagccgccatcaccctgattgagcagccgaaaacctctctggacgatctgctggatatcgtgcaggggccggactacccgaccgaagccgagatcatcacctcgcgcgcggaaatccgcaaaatctaccagaacggtcgcggctccgtgcgcatgcgcgcggtgtggaccaaagaagacggggccgtggtgatcaccgcgctgccgcaccaggtgtccggtgcgaaggtgctggagcagatcgcctcccagatgcgcaataaaaagctgccgatggtggacgacctgcgcgacgaatcggaccacgaaaacccgacccgtctggtgatcgtgccgcgctctaaccgcgtggacatggagcaggtgatgaaccacctgttcgccactaccgatctggaaaaaagctaccgcatcaacctgaacatgattggtctggacggtcgtccggcggtgaaaaacctgctggagatcctcacagaatggctggccttccgccgcgatacggtgcgccgtcgtctgaaccatcgtctggaaaaagtgcttaagcgcctgcatatcctcgaaggtttgctggtggcgttcctcaacattgacgaagtgatcgagatcattcgtaccgaggacgaacctaagcctgccctgatgtcgcgctttggcatcagcgaaacccaggccgaagcgatcctcgaactgaaattgcgccatctcgccagactggaagagatgaagatccgcggcgagcagaacgagctggaaaaagagcgcgatcagcttcaggcgattctggcatccgagcgcaagatgaacaccctgctgaagaaagagttgcaggccgatgccgacgcctttggcgacgaccgtcgttctccgctgcacgagcgcgaagaggcgaaggcgatgaacgagcacgacatgctgccttccgagccggtgaccatcgtgctttcccagagcggctgggtacgtagcgctaaaggccacgatatcgacgcgccgggtctgagctacaaatctggtgacagcttcaaggcggcggtgaagggcaagagtaaccagccggtggcgttcatcgactccacgggccgcagctacgccatcgacccgatcacgctgccgtctgcgcgcggccagggcgaaccgctaactggcaagctgacgctgccgccgggcgccacggtggaccatatgctgatggaggccgacgatcaaaaactgctgatggcgtctgatgcgggctacggctttatctgtaccttcaacgatctggtgtcgcgtaaccgtgctggtaaggcgctgattagcctgccggataacgcacacgtcatgccgccgctgatcatcgagaacgaaagcgacatgctgctggcgatcaccgctgccggacgcatgctgatgttcccggtcagcgatctgccggagctgtcgaaagggaagggcaacaagatcatcagtatcccgtcagcggaagcggcaaaaggcgtcgatggcctcgcgcatctcttcctgctgccgccgcagagcaccctgaccattcatgtcggcaagcgtaaaatcaaactgcgtccggaagagttgcagaaggtggtgggtgagcgtggacgtcgcggctcactgatgcgcggcctccagcgaattgaccgcgtggagatcgactcgccggcgcgcagcaaagcggacgacagcgaagagtaa

SEQ ID NO: 115296 - DNA, 402 bp, Enterobacter cloacae
atgaaaaaattcgctgcaattgctgccatcatgatgatgaccacggcccctgtctttgctgcacaggggggcttctctggcccatctgtgacacagaaccagacgcaaacccagcagggtggctttgtcgataacaacgccaacctcaccaccgcggctaaagtgaaagacctgaaggacgatgcctgggtgaagctgcgcgggaacattaccgagcgcctgtccgatgaccgttacaccttccgcgatgagagcggcacggtggtggtggagatcgaccacaagcgctggaacggcgtgacggtgacgccccaggataaagtcgaactccagggtaaaatcgataaagactggaacgagtttgaaatcgacgtgaagcaggttatcaagctgaacaaataa

SEQ ID NO: 115297 - DNA, 660 bp, Enterobacter cloacae
atgcgcattttactggtagaagacgacaggctcatcggcgacggcatcaaagcgggcttaagcaaaatgggctttaacgtggactggtttaccgacggtaaaaccgggcaggcggccctgtacaccgcgccgtatgatgccgtggtgctggacctgacgctgccagaaatcgacgggcttgagatcctgcgcgcctggcgcgaaagcggtaagagcgaaccggtgctgatcctgaccgcgcgggatgcgctgaatcagcgcgtcgaagggttacgcctgggggcggatgattacctgtgtaagccgttcgcgctgattgaagtggcggcccgccttgaagcgctggtgcgccgcagtcacgggcaggcgcgcagcgagctgcgtcacggcaaggtcacgctcgatccggcaagccttgtcgccacgctggagggcgaaacgctggtgctcaaacccaaagagttcgccctgctggagctgctgatgcgcaacgcgggccgcgtgctgccgcgcaagaccatcgaggagaaactctacaactgggatgatgacgtctccagcaacgccgtcgaagtccacgttcatcatttacgccgcaagctcggcagcgaatttatccgcaccgtgcacggcatcggttataccctgggtgacgcatga

SEQ ID NO: 115298 - DNA, 1350 bp, Enterobacter cloacae
atgaaactgaccctacgcctgagcctgaagctgcgcctgacgctcctctttttgttgctgtccctggcggcctggtttgccgcaagcgtggtggcctggcaccagacgaccgacaagctcgataagctgttcgatacccagcagatgctgtttgccaaacggctgctgacgatggacgtggacgaactccgcgccccggaacgcatgcgcgaggtaccgaaaaaagccaaacacggccatctggacgacgatgtgctggccttcgcaatcttcaccgccgacggcagcatggtgcttaacgacggcgaaaacgggcgcgacataccttacctctaccgccgggacgggtttgatgacggtcgcttgcaggatgacaacgacgaatggcgtttcctgtggctgacttctccggacgggaaataccgcgtggtggttggccaggagtgggagtaccgacaggatatggcgctggacgtggtcagctcgcagctgacgccgtggctggtggcgctgcccgtaatgctactgttgctgattgttctgctgagccgggaactgaaaccgctgaaaaaactggcgcagaccctgcgctcgcgctcgccggatgcgaccgatacgctgcccacccacggcgtgccgacggaggttcgcccgctgcttgatgcgcttaaccatcttttcgcccgtacgcaggagatgatggcccgcgagcgccgcttcacctcggatgccgcccatgagttgcgcagcccgctggccgcgctgaaggtgcaaaccgacgtggcgcagctttcccttgacgatcccggggcgcagtctaaagcgctggggcagctgcatgcgggcatcgaccgcgcctcccggctggtggaccagcttctcaccctgtcgcgcctggattcactggataatcttgatgacgtcgaacccgtgatgatggccgatttgctgcaatccgcggtgctggatatctggcatccggcgcagcaggcgggcattgatattcggctcaacgtcaacgcgcccgaggtgatgcgtcacggacagccgctactgctgagccttctggcgcgtaacctgctggacaacgccgttcgttacagcccgcgcggcagcgtggtggacgtgacgctgcatacccaaagctttaccgtgcgcgacaacggcccgggcatttcttccgatgcgctggcgcgtctcggcgagcgcttttatcgtccaccgggccaggacgccaccggcagcggtctggggttgtctatcgtcaagcgtatcgcgacgttacatgggatgagcgtctcgctgggcaatgcgccggaagggggctttgaggtgaccgtcagctggtag

SEQ ID NO: 115299 - DNA, 582 bp, Enterobacter cloacae
atgagcaatattctgattatcaacggcgcgaaagaatttgcgcactctaaaggccagctcaatgacaccctgaccgaggtcgcggatggtttcctgcgcgacgccggacatgatgttaaggtcgtgcgcgcggacagcgattacgacgtgaaggccgaagtgcagaacttcctgtgggccgacgtggttatctggcagatgccgggctggtggatgggcgcaccgtggaccgtgaaaaaatacatggacgatgtgtttaccgaaggtcacggttcgctgtatgccagcgacggccgcacccgctcagacgcgtctaaaaaatacggttccggcggcctgattcagggcaagaaatacatgctctccctgacctggaatgccccgctagaagcgttcactgagcaagatcagttcttcgaaggcgtgggcgtagacggcgcgtatctgccgttccacaaggcgaatcagttcctgggtatggagccgctgccgacctttatcgtcaacgacgtgattaaaatgccggacgtcccgcgctatatcgcagaatatcgcaagcatctcgcggaaatttttgcttaa

SEQ ID NO: 115300 - DNA, 315 bp, Enterobacter cloacae
atgcttaccgttattgctgaaatccgtacgcgtcctggccaacatcaccgccaggcggtactggatgagttcgcgaagatcatcccgaccgtactgaaagaagaaggctgccacggctacgcgccgatggtggacgccgccaccagcgcaagctttcaggcgaccgcgccagactcaatcatcatggttgagcagtgggaaaccgtcgcgcaccttgaagcgcatttgcagaccgcgcatatgaaagcgtggagcgacgcggtgaaaggggacgttctggaaacccacatccgtattctggagcaaggggtttaa

SEQ ID NO: 115301 - DNA, 441 bp, Enterobacter cloacae
atgggactttttaacttcgtaaaagaagcaggcgaaaagctgtgggataacctgaccgatcataaaggtcagggcgacaaaatcaccgagcacctcaagaaactcaacattcccggttccgataaggttcaggttaacgtcactgacggcaaggccagcgtgacgggcgacgggctgacgcaggagcagaaagaaaaaatccaggtcgccgtcggcaacatcgcgggcgtcagcgaagtggagaacaatatcaccgcgacagatgccaaagatgaagccacctactatacggtgaaatccggcgataccctgagcgcaatctctaaaaccgtgtacggcgatgccaaccagtacaataagatttttgaggctaaccgtccaatgctctccagcccggataagatctatcccggtcagacgctgcgtattccgaaagcgtga

SEQ ID NO: 115302 - DNA, 1188 bp, Enterobacter cloacae
atgttaagtcgtatcaaaaaagaacgtctgcctgttatcgctgcgcccgttgactcccgcgcattcagcgatgaactgaattcggcgcgcagccacgttcttgacctgattagccgtcatttaacggagttcggcgacaaattcccggcggaaacctgccagaacggtttttatccgctgactgacaacgtggagtggaccaccagcttctggaccgggcagctgtggctggcatgggagatgagcggcgaggaaaaattccgcgcgatggcggaaaaacacgtgcgctcgtttggcctgcgcatcgccgggcgcaacgacaccaacacccacgatttaggcttcctctacacgctctcctgcgtagccgcgtggcggctgaccggaaaccgcgaggcgcgcggcttctcgctactggcggcggaagccctgctggaacgcttccacgagaaggcgaaaatcatccaggcgtggggcgatatctccgatccggagcaggccgggcggatgatcatcgactgcaacatgaacctgccgctgctctactgggcaacggagcagacgggcgatccgcgctttgccgacgccgcaaaagcgcacgtcatgcaggccgcgaagtacctcattcgtgacgatgcctcaaccttccacacctactatatggatgtggcaaccggcgcaccgcgctacggcaacacccagcagggctacgccgacgactcctgctggtcgcgcgggcaggcgtgggggatctacggtttcctgctgagctatatctataccggcgacgaaacgatgatcgccctgtcaaaacggctggcgaactacttcctcaatcgcctgccggaagactacgtctgccactgggatctggcgctggtgggcaccgacgcactgcgtgactcttcctcggcggcaattgcggtgtgtggactgctggagctggtgaaacatctgccggtcacagatccggatcgcgaacgttacctcgaatgggcgaaagggattatgtcctcgctgacaaagcactatctgatgggcaaagaagagaagggcaacgggctgcttaagcactcggtgtatcacctggcgagcaataaaggcgtggatgagtgcgcgagctggggcgattacttctacgttgaggcactggtgcgttttacgcagagctggaaactgtactggtaa

SEQ ID NO: 115303 - DNA, 1266 bp, Enterobacter cloacae
atgaaaagcacatcgacaaccaacagaactgaatattacaaaatcagcagctttatctttctctatttctttacctggtctgccagtattggtctgctggcgatctggctcggtcagaaagccaacctgagcggatcggtgattggaaccgtctttgcggtgaacgggatattctccgttattctcaagccgatctacggctatattctcgataagatcggcatgagcaaatatctgctctattttgtggtgatcatgtcggccctgatggcgccattctttatttacgtttaccagccgctgttaatgtctaataccctgctggggattattatcggcgcgctctatttaagctttgcctggtacgcgggcgtggcggcgtgtgaatcctattccgaccgctttagccgtttgaatggcatggagttcgggcagatccgtatgtggggttcgctcggttgggcggtggcgtcatctttctccggcctgctgttcaacctctcaccggcgtataactttattctcggcagcgtggcgtcggtggtgatgctgattgtcctgctgagcctgaaagtgaacactaactccgctcacgcaggcgaggtgctgacgaaagagaaaattgccccgtccgacgtttacgccctgctgcgtaaccgtaaattctgggccttctgcctgtacgtggcgggcgtggcgtggatgatgtttatcgccgaacagcaattctcgcgctatttcgtcaccttcttcgatgatattcatgagggcaacgccgtattcggctatctcgggaccgtacagtcgggcatggaatttgtcatgtatatggtggtcccgttgtttgcgaactttattggcgccaaacgcgggctgttaattgtcgggctggtggttggggcgcgtctgattatttccggcatgtgtgattcacacctgttaatttcagtacttaagccgctgtacggtctggaaatttgtctcctgctggtgtcggtatttaaatatatcgccgagcatttcgacaagcgcgtcaatgccaccatgtatttactcggctatcaggcgatgctctacgttggcaacgtggtggtctcttcccctgccggctatatgtatgaccgtattggctttgagcacacctatatcatcatgggcgcaacggcgctgacctttacccttatttctgcttttacgttatccgcctgtcagagcaaatggcgcggggctcgtgcgctgaacgtagcagaaacgtcaacacgataa

SEQ ID NO: 115304 - DNA, 1815 bp, Enterobacter cloacae
atgtgggcggcaaacaaagaaaaatcaaatccgttgtcttcacgccaggaggtagtggcgtcgttgaatgcacttttacaggcgctggacacgcaatttccggcgaaccgttcacgattcccgctgggcgacacctgcgcccattacaccgcggatattgcgcagatggagggactttcccgcgcgctctgggggctgtttccgctgatggcatccggcgaaagcacgccgttcagcgagaagtaccttactgccattaagcttggtaccgacccgcaaagcagcggctactggggtgaaaccggcccgtacgatcaacgtctggtggagatggcggcctacggtctggggctcgctctgctgggggataaactcaccgcgcactttaccgggcgcgaggtgatgaacctgcacgcgtggctcaaccaaatcaccgacgcgcagatgccggacagcaactggaactattttgccattatggtccagctcggctttaagcgcgccggcctgccgtacgatcgggccgccattgaccaccgctttgcgctgatggacgcctactacctcggcgacggctggtattccgacggtcccggccgcccgaaagattactacatctccatggctttccatttctacggcctgatttacgccaccctgagtgacgacgaggcgagggcgaaggtgctgcgcgagcgctcgcgtctgttcgcggaagactttatctactggtccgccgccgatggcgcctcggtgccgtttggccgcagcctgacctaccgctttgccatggttgccttctggagcgcggtggccttttctcaactggacgtcttcaccccgggcatcgtgaagggcattgtgctgcggcatctgcgctggtggcagcagcagtcgattgtcgatcgcgacggtattcttaccctggggtttgcgtatccgaacctggcgatgtgcgaggattacaactcccccggttcaccgtactgggcgctgaaaacctatctgatcctggcgctgccggaagcacacccgttctggcaggcggaagaacaaccgctgcccgcgcttgctgaaaaacatgtgattccgcatgcgcagcagatcctgatgcattcgaaagattcgcagcacgtcgtcatgctcaccgccggtcagctggagctgaacaactacgtcaacaccgaagcgaaatacaccaaatttgcctactccagccgcttcggattcacccttgagcgcgggcgttttggcctgaagcatgccgcctgcgattccatgctgctgctggcggacggagatgactatttccgcggacgtcgcgagtgcgaagaggttcgggtggatgaaaattacattttctcgcgctggtcgccgtggcgcgacgtgcagattgcgacctggcagatcccgttcggggagtggcacctgcgcctgcaccgtatcaacagcgcgcgcactctgcaaaccgtcgagggcggctttgcggtgatgaaaaccgcccatcaggtgcgcgaacgcggttgttatctgttggctgaaaacggcagcagcgtcattgtcgatctttcgccgatcattcagcgccagccagacagcatcgtcacgccgccgaacagcagcattatgtttgcggagtgcgcctccattccgctgttaaaagctgacctcccgcaaggggaaagctggctctgttgcgccgttctggctggcggaaaacagcccgctgcggcgacgccgcagctgaatataacccataaccaggtcgtgattcgcgaacccggaagcgaacgtaagctgtcgttcacattataa

SEQ ID NO: 115305 - DNA, 840 bp, Enterobacter cloacae
atgcgcgacacgccgacatccgaccttctggaactgatcgccctgaatgataccgtggcctcgttcagccgcctgtttgccaatacggtgcgctaccatcactggcatcagtgtctggagatcctctatgtggaagagggctttggcgtggcgattgtcgataatcgtcactacaccatgcgccccggacgactgtttttcttcccgccttttacgctgcacaaggtcatggtggacgaacaggcggaggcaatttaccgccgcaccattattcatctcgaccagcacgcggtgctgaagatcctgcgggattttccccagacccggcagcgcctggagcggctgtcacgccgtggcggcgaagcgtgggtcgccgatttagcccactgtcaccaccatatcgaccatctgtttagctgctataaaccgccgatgaacggcgagagcatcgccagcctgctgatcggcctgttcgcgatgctccccgacgatcacgacggtgagccgggcaacagccaggggatcgccagccaggtaatgttctggctcgacgagcattatcaggagaaatttcgtctggatgccctggccgaagagctgggtaaatcacgcagttacgtatcgcgaagattccatgcggaaacgggcgaaaaaattcacgactacctgaacacgctaaggttgcgtaaggcgtgcgagtgtttactccacacggattcgagcgtgcgtgacattgccgcacaggcgggattttccgacgtgacgtggtttatcagcgcgtttaaaaaggggattggcgagacgccgttgcagtacaggaagaaccatcgtgcggtttga

SEQ ID NO: 115306 - DNA, 876 bp, Enterobacter cloacae
atgatccgaaaaattgatgtctacggcgaccgcctccgctcgcgggcgcaccagctgacgccgcgtctgctgcaggtggcgagctatatcaatgaaaatcgtgaagcggttattgagcagacggcaatggagattgccgctgtgctacacacctcggacgccaccgtggtgcgtgccattcaggcgcttgggtttggcgggctgcgggatctcaagcagaccctggagcagtggtttggcccggtggtcacctccagcgagaagatgtccaccacggtaaacacgcttaccagcgacgtcgacgcgagcatcgattttgtgctggaaggccatcagcacacctgcgcggtgttgtccgaaccgggcaaccgctacgcgatggcgcaggccgtgtcgctgctggcgcaggcgagacaggtcgctatttttggcattggcgcatccggcattctggccgagtacacctcgcgactgtttagccgtataggcctgcctgcgatcccgctcaaccgcaccggtattggcctcgccgaacagctgattgccctacagcgcggtgacgtgctggtaatgatggcgcaaaaatccgcgcaccgggaggggcagaccacgctgcgcgaagcgaagcgcctgggtattcccaccattttgctgaccaacgccacggactcgcgctttagcaaagaggcaagcgtagtgatccacgtcccgcgcggcggcgagaaaggcaaaatcccgctgcacggcacggtgctgctgtgcctggagatgattattctgtccgtcgcctccaccgagccgcagcgcaccatcaagtcgatgaagcgcatcaacgagttacaccgcggattaaagccggggaagaagagcggatga

SEQ ID NO: 115307 - DNA, 951 bp, Enterobacter cloacae
atgcgcgtattttttgcaatgctggtgctggtgggttttgctgtaggagccgcagagccaacgcagacgtttactgacgacctgaaccgcaacgtggtggtgccggttaacccgaagcggattgtgtccctgcacgacctggatatcaccattccgctgatcgagcttggcgtaccgccggttgccagccatggccgcacccgaccggacggcagccattttctgcgttccagcggtatgctgacgggcatcgattttgataattccgacatcacattcatcggcaccgcggatatcgatattgaagccatcgccgcggcgaagccggatcttatcatcaccgagccgacccgcaacacgccggtcgaacagctggaaaaaattgccccgacggtgagtatcgatcacctcgacggcggtgcgccggagatctaccgcaagctggcgcagcttaccgggacagaggcgcggctgaagattctggagcgtcgctatcaggagcagatcgaggcgctaaaggcgaccatcgatacgagcaaactgaccgtctcggtgattcaggccaatcagggcaaaatcaacgccatgcacagctaccactcgcttgggcgcgtgctgcgcgacgcagggttcaggttcccgccgctgattgagagcatcccagagggcgggcgcatcgacgtcagcgccgagcgcctgccggagctggatgctgattttgtctttgccacctggcgcggggacaccggcggaaaaccgcaggacgagctggcggcgatggatgcggtgatgccgggctggtgtcagtttctcaacgcctgccgaaccgggcattacgtgctcatctcccgcgaggaagcgatctcaaattcatttgcctcgctggggctgatggccgcgcaggtgcagtcgcagatagtgggccgtccgctgccggaggccgcacgatga

SEQ ID NO: 115308 - DNA, 1041 bp, Enterobacter cloacae
atgaaccgggctggattgagggcagtacgatttttctccttctcggcgctggttcgcccgagggcgctgctgtatctggccgtattatcgcttgccgctctcctgctgctaagttttggcctgacgcacggttcgctgcccattcctgcttccgccatcggacgtgcgctgttttatcctgaacgtctgacggcggatgcgcattacattgtgatggatatccgcctgccgcgcctgctgatggcggtgctgtgcggcgcgatgctcggcatggcgggggcggccatgcagtccattacccgcaacggccttgctgaccccggtcttatcggcgtgaaagagggctgtagcgcggcggtgctgctgctgatttttcagtttccgggattggggccgtactggcgtccacttatcggcatggccggtgggctgctgaccgcgctgctggtagtggcgctggcgcgtgatatctcgcgcccgcgattcatcctgattggcatcggcgtgtcatgggcgtttgccgccgcgatgggggtctttatgacgaccgccgacgtgcgcgacgtccagacggcgatgctgtggctggcggggagcctgcatgcggcaagctggacgctggtcagcatcgctgctgcctggacagtgccagcgtttgcgctgctgctctttaccgcacgcgccgcagacgtagccttgctcggcaaccacactgcgacggggctgggcgtgcggacttcacgcctcgctctgctgcgcgtgtttgcccccgtggtgctcaccgcggcctgcgtctcctgcgtggggagtatcggctttgtcgggctgattgccccgcacatggcgcgcctgctgctgcgcggagggcaaacggcactgctgacgggaagtgccgtactgggcgcgctgctggtgctgctggcggataacgtcgggcggctggcatttctcccgttgcagctgccggcgggaattgtcatttcactgattggcggaccgtttttcctgctgctgctctggcagcgtcgggatcgattttag

SEQ ID NO: 115309 - DNA, 984 bp, Enterobacter cloacae
atgatgcgcacatctgtggcctttattctctttacgctgctgcttctggcaggcgcgattgcgcacctgagcatcggggcgcgcgttatcgccccccggacggtagtagacgcatttttccacttcgacccgcgcaattttgagcatagcgtgatcgtcaggctgcgcttgatgcggctgtgcgccgccctggtggcgggcgcggcgctcggcatcgcgggcgtgctgctgcaatcagtgatccgcaacccgctcggcgagccgcatatcctggggctgaatgcaggggcggcgctggcggtggtgctgacgagtgccctcgggctgtcgctgccgtttggccgccctctgatagccgcagctggcgccgccgcgctctttttgctggtgctaacgttctcctcatccgggcgtaccggtctcacgccgatgaaggtcacgctgtgcggcgtggcaatgtcggcatttgcctcatcgataaccgccacggtgttgattctggatgaacagacgctgctggccgtgcggacctggcttgcgggggatgtggcgggagtcatcggcgagacgatcgctagcgccgcgggggccgctgccgtgggttttgcgctggcgctctggctgtcgccgtcgctgaacatgctggcgctgggcgagagaatggcgcaggggcttggcgtgtcgctgctgaaaacgcgcctgctcgcgctgctggccatcgccctgctgtgcggcgcggcggtttcagttgccggaccgatcgggtttatcggactcgtggtgccgcagctgattcgccgtctggtatcggtggacctgcgcgtgatggtgccgctttcagccctctgcggggcgctggttctgctgatggcggatatcgccgcccgtacgctgttaacgccgtatgagctggcaaccggcgtgatgactgcactggtcggcgcgccggtctttatccttatggcgtcaaggatgttcaaatga

SEQ ID NO: 115310 - DNA, 813 bp, Enterobacter cloacae
gtggcttactacatcaaaaagccgggactggttcttgagaacctctccgcgggttaccagaaaaaaatcatcgttgatgatatctcccttgcgatcccccagcagaaaatgactgttctggtgggcgcaaacggctgcggaaaatcgacgctgttaagtaccctcgcacggctgcttcagccgctcggcggcagcgcggtgctggacggcaaagccatccactcgcaaccaaccaaagcggtcgcccgccagctcgggatcctgccgcagtctccgctgcttccagaagggttaaccgtatttgagctggtctcgcgcggacgtttcccctggcagaacgtgatgcgccagtggagcgaggaagacgagcgggccgtggaagaggcgttacgcctgaccggaacggcagagtttgcccatcatctggttgaaagcctgtccggcggccagcgccagcgctgctggatcgctatggtgctggcgcagcaaacgccctatatcctgctggatgaacccacgacgtacctcgatcttcgctaccaggtggagatcctcgaactgctgcacacgctgacgcgccggcacgggcgcaccgtggtggtggttctgcacgatctcaacttcgccgtgaattacggtgattcgctggtctttttacgtcagggaaaggttgagggggtactgcatgagggcgacgcctgcacgccggagctgatcaaagcggtgtttgacgtcgacgtgcatatgtcggttaacccgctgaccggcaagccgttctttatgccgttccgtcaggctgacgacaaaccatga

SEQ ID NO: 115311 - DNA, 2247 bp, Enterobacter cloacae
atgattctcaattacaagtccgacgccatagaggctaacggacagaccgtaagggcaatgactcacacattcttccgcgagcatttcatcgcaggatattttgggaaaacagatgtaatggctaagttcacaccttcattcgccggggtaaaagggcgcgcgctcttttcactcctgttcatggcgcctctggtgcacgcagcagcaaaagacggtgagacgcttaccgtcactgccgatccttacgcttccaccgacgccaccagcggctatcagcccctgaacacctccaccgccacgctgaccaacatgccgatgctggacatcccgcaggtggtcaataccgtcagcgataaagtgctggaagaccaaaacgcgaccacgctagacgaggcgctgtataacgtcagcaacgtggtgcagaccaacaccctgggcggcacgcaggatgccttcgtgcgccgtggcttcggcgcaaaccgcgatggctcgatcatgaccaacggcctgcgcaccgtgctgccgcgcagcttcaatgccgcaaccgagcgcgtggaggtgctaaaaggcccggcctcgaccctttacggtattctcgaccccggcggcctgattaacgtggtgaccaaacgcccggagaaaaccttcggcggctcgatttctgccacatcaaccagctttggcggcggtagcggacagtttgacgtcaccggtccaattgaaggtacgcgtctggcctatcgcctgacgggggagtatcaggacgaggattactggcgtaatttcggcaccgaacgcagcacctttatcgccccgtctttgacctggttcggcgatgatgccaccgtgaccgtgctctattcgcatcgcgactataaaacgccgttcgatcgcggaacgatcttcgatctcaacaccaaaaaggccgtcgacgtcgatcgcaaaacccgctttgatgagccatttaacgtgaccgacggtcagtccgacctcgctcagcttaacgcggagtatcggctcaacagccagtggaccgcgaagttcgactacagctacagccaggataagtacagcgataaccaggctcgcgtgatggcctacgattcaaaaaccggcaacctgacccgccgcgtggatgcgacccagggttcgacccagcgtatgcacacaacgcgggcagatttgcaggggaacgtggacatcgcgggcttttacaatgagatcctgaccggcgtgtcgtatgagaattacgatctgctgcgcacggacatgatccgttgtaagaacgttaaggatttcaatatttacaacccgagctacggcagcctcggcaagtgcaccaccgtctcggcagccgacagcgatcaaaccatcaagcaggagagctactccgcctacgcgcaggacgcgctgtacctgaccgataaatggatcgccgttgccggactgcgctaccagtattacacccagtacgcgggcaaaggccgtccgtttaacgtcaacaccgacagccgcgacgaccagtggacgccgaagctgggcctggtatacaagctcacgccggcagtctccctgtttgccaactattcccagacgtttatgccgcagtcgtccattgcgagctacatcggcgacctgccgccggaaacgtcgaacgcgtatgaaataggcgctaaattcgacctgttcgacggcattaccgccaacatcgcgctgtttgatatccacaagcgcaacgtgctgtacaccgagagcgtcggtgatgaaaccgtcgccaaaaccgcgggccgcgtgcgctcgcagggtgtcgaagtggatctcgccggatcgctgaccgagaacaccaacattatcgccagctacggctataccgatgcgaaggtgctggaagacccggactacgcgggcaaaccgctgccgaacgtaccgcgccataccggctccctgttcctgacgtacgatattcacaatgcgtttgccgggaatacgctgacaattggcggcggcgggcacggcgtaagccgccgctcagcgactaacggtgcggattattatctgccgggctatttcgtggcggatgcatttgcggcgtacaaaatgaagctgcaatatccggtgacgctacaggtgaacgtgaagaatctgttcgataagacctactacacgtcgtcgattgcgaccaacaacctgggcaaccagattggcgacccgcgtgaagtgcagtttacggtgaagatggagttttga

SEQ ID NO: 115312 - DNA, 1893 bp, Enterobacter cloacae
atgacgcaaacctataacgctgatgccattgaggtactcaccgggcttgagccggttcgccgccgcccggggatgtacaccgatacgacgcgcccaaaccacctgggccaggaagtaattgataacagtgtggacgaagcgctggcaggccatgccagacgcgtggacgttatcctgcacgccgatcagtcgctggaagttatcgacgacggccgcggcatgccggtagatatccacccggaagagggtgttccagccgttgagctgatcctctgtcgtctgcacgcggggggtaagttctccaacaaaaactaccagttctccggcggcttgcacggcgtggggatctccgtggttaacgccctgtcaaagcgcgtggaagtgaacgttcgtcgcgatggccaggtgtataacatcgcgtttgaaaacggcgaaaaagtgcaggatttgcaggtcgtcgggacgtgcggtaaacgcaacaccggcaccagcgtccatttctggcctgacgaaagcttcttcgacagcccacgcttttccgtttctcgcctgacgcacctgctgaaagccaaagcggtgctgtgcccgggcgtggaaatcacctttaaagatcacgtaaacaacaccgaacatagctggcgctacgaaaagggtctgaacgactacctgtgcgaagcggttaacggcctgccgaccctgccggaaaaaccgttcgtcgggaatttcgaaggtgacaccgaagcggtggactgggcgctgctgtggctgccggaaggcggtgagctgctgacggaaagctacgtcaacctgatcccaacgctgctcggcgggacgcacgtcaacggcctgcgtcaggggctgctggatgcgatgcgcgagttctgcgaataccgcaacattctgccgcgcggcgtgaagctttccgcagaagatatctgggaccgctgcgcctacgtgctctccgtgaagatgcaggatccgcagtttgccggtcagactaaagagcgcctgtcgtcacgccagtgtgcggcgttcgtctccggcgtggtgaaagatgcgtttaccctgtggctgaaccagaacgttcaggccgcagaaatgctggctgaaatggccatctccagcgcccagcgtcgcctgcgcgcggcgaagaaagtggtgcgtaaaaagctgaccagcggccccgcgctgccgggcaagctggcggactgtaccgcccaggatctcaaccgcaccgagctgttcctggtggaaggggactcggcaggcggatcggccaagcaggcgcgcgatcgtgaatatcaggcgatcatgccgctcaagggtaagatcctcaacacctgggaggtctcgtctgatgaagtgctggcctcgcaggaagtacacgacatctccgtggcgatcggcatcgatccggacagcgacgatctgagccagctgcgctacggcaagatctgtatcctcgcggatgcggactccgatggtctgcacatcgccacgctgctctgtgcgctgttcgtgaagcacttccgcacgctggtgaaaaacggtcacgtccacgtggcgctgccgccgctgtaccgtatcgaccttggcaaagaagtctactatgcgctgacggaagaagagaaagcgggcgtgctggagcagctcaaacgcaagaagggcaaaccgaacgttcagcgctttaaagggctgggcgagatgaacccgatgcagctgcgtgaaaccaccctggatccgaacacccgccgtctggtgcagctgaccatcagcgatgaagacgaacagcaaaccaacgccgtgatggatatgctgctggccaagaaacgttctgaagaccgacgtaactggctccaggagaaaggcgatatggcggatattgaggcctga

SEQ ID NO: 115313 - DNA, 582 bp, Enterobacter cloacae
atgtcgacgcttctctatctgcatgggtttaacagctcaccacgatcggcgaaagcgacgcagcttcgccagtggctgagcgcgaatcatccccacgtggagatgattattccgcagttgcccccttatccggcggatgcggcagagatgctggaatcgatcgtgcttgaacacggcggcgaatcgtttggcgttgtcgggtcgtcgctcggcggctactacgccacctggctgtcgcagtgctttatgttacccgctgtcgtcgtcaacccggcggtccggccatttgagctgttaagggactttcttggcgaaaacgagaacccctacaccggccaacaatatgtgctagagtcacgccatatttacgatctcaaagttatgcaggtcgacccgcttgaagcgcccgatcttatctggctgctgcaacagacgggagatgaagtgctggattaccgccaggcagtggcgtattacgcatcctgccgccagactgtagaagagggcggtaaccatgctttcacgggctttgaagatcatttcacccagattgtcgattttcttggactgcacagccactga

SEQ ID NO: 115314 - DNA, 828 bp, Enterobacter cloacae
ttggaaagcctgttgaacctgactgttgctggtggggcgccagtcaggatattacaaatcaccgacacccacctttttgccgaaaagcatgagacgcttctgggcgtgaacacctgggagagttatcaggcggttcttgacgcgatccatgctgaaaagcggccatgcgatctgatcgtcgcgacgggcgatctggcgcaggatcaatcctccgcagcctatcagcattttgctgaagggattgcgagctttagcgtgccttgcgtctggctaccgggcaatcacgattttcaacccgctatgtacagttcgcttcaggatgcggggatttcaccggcaaaatgtgtctttgcgggggaccagtggcaaattctgctcctcgacagtcaggtgtttggcgttccgcacggtgagttgagctactatcagcttgactggctggagacaaaactggccgccgaaccgaatcgcaatacgctgctgttgctgcatcatcacccgctgccggcgggctgtagctggctcgatcagcacagcttacgcaactctgcggcgctggacggcgtactggcgaaatttccgcgcgtgaaaaatttgctgtgcgggcacattcaccaggaacaggatctcgactggaatggtcgccgcctgctcgcgacgccctctacctgcgtgcagtttaagccgcactgcgccaactttacgctggataccatcgcaccgggctggcgctggctggaactgcatgccgatggctcgctgaccaccgaagtttgccgtctgaccggggctcaattccgcccggataccgcttcggaaggctattga

SEQ ID NO: 115315 - DNA, 423 bp, Enterobacter cloacae
atgaagcgttatacacctgacttcccagaaatgatgcgcctgtgcgaaaccaatttcgcccagctgcgctgcctgctgccgcgaaacgacgcgcccggcgaaacggtgagctatcaggtgagcaacgcgcagtatcggttaacgataacagaatcaacgcgctacactacgctggtggagattgagcaaacggcgccgagcatcagctactggagcctgccgtcgatgacggtacgtctttatcatgacgcgatggtcgctgaagtgtgttcaagccagcagatctttcgctttaaagcgcggtatgattacccgaataaaaagttgcatcaacgcgacgaaaagcatcaaattaaccagtttttagccgactggctaagatattgtttagcacatggagcaatggcgattccggtttgttag

SEQ ID NO: 115316 - DNA, 633 bp, Enterobacter cloacae
atgcaaaaaccagaaaacgtgcctgtcaccttcgccaaaaacgatgtagaaattattgcacgagaaacgctttatagcggttttttttcaatggaactttaccgtttcaggcatcgtctgtttaacggtgagatgagcggtgaaatcaaacgcgaaatttttgagcgcgggcatgcggctgtgttgctaccctatgaccctgtgcgtgatgaagtggtgctggtcgaacaggtgcgtattgcggcttatgataccagcgatacgccatggttgctggagatggtggcagggatgatcgaagaaggtgagtcggtcgaagacgtcgctcgccgtgaggcgctggaagaggcgggcctggcgatcggccggacgaaaccggtgttgagctacctggcaagcccgggtgggacaacggaacgttcatctattatggtgggcgaagtggacgccaagacagcggaagggatccacggtctggcagatgaaaacgaagatattcgggttcatgtggtgagtcgggagcaggcttaccagtgggtagaagaggggaaaatcgacaacgcagcgtctgtcatcgccctgcaatggctacagctgcattatcagacattacgacacgagtggaaaaaatga

SEQ ID NO: 115317 - DNA, 1479 bp, Enterobacter cloacae
atgaagaaattgctccccatccttatcggcctgagcctgacgggcttcagtgcaatgagccaggcagaaaacctgttacaggtctaccagcaggcacgtctgggcaaccctgatttacgtaaatcagcggccgatcgtgatgctgcgtttgaaaagattaacgaagcacgtagtccactgctgccgcagttaggcttaggtgcagattatacctacactaacggttttcgcgataacaatggcatcgattcgaatgccaccagcgcctctttacagcttacacaaaccctgttcgacatgtccaaatggcgggaactgagcttgcaggaaaagagcgccggcattcaggatgtcacctatcagaccgatcagcagacgctgatcctgaataccgcgaccgcctatttccaggttctgagcgcgattgacgccctctcctacaccgaagcgcagaaacaggcggtttaccgtcagttagatcaaaccacccagcgttttaacgtgggcctggtcgccattactgacgtgcagaacgcccgttcacagtacgataccgtactggctaacgaagtgaccgcacgtaacaacctcgacaacgccctggaagcactgcgtcaggtcaccggtaactactatcctgagctggcctctctgaacgtggacagtttcaaaacggacaaaccgcaggcggttaacgccctgctgaaagaagcggaaaaccgcaacctgaccttgttgcaggcacgcctgagccaggatctggcgcgcgaacagatccgtcttgcacaggatggtcacctgccaactctgagcctgagcgcctctaccggcgtatcggacaccagctacagcgggtctaaaacgacctctcaggcctatgacgacagcaacgttggccagaacaaagtgggtctgagcttctctctgccgctgtaccagggcgggatggttaactctcaggttaaacaggcgcagtacaactttgtgggtgccagcgagcagctggaaagcgcacaccgcaacgtggtgcagaccgtgcgttcttcctacaacaacgtaaatgcctctatcagcagcatcaacgcctataaacaggccgtcgtctctgcccagagctcactggatgcgaacgaagcgggttactccgtaggtacgcgtaccatcgtggacgtgttagacgcaacgaccacgctgtataacgcgaaacagcagctctccagcgcacgttatcagtatctgattaaccagctgaacatcaagcaggcgctgggtacgctgaacgagcaggatctgcaaatgctgaacagcacgctgggcaaaccggtccctacgtcgcctgacagcgtcgcgccggaaaatccacagcaggatgccgccgttgataatttcacccctaacagcagcgccccgcttgcgcagccagcggcagcgcgtagcaccgcacctgccagcagcggtacgaatccgttccgtcattag

SEQ ID NO: 115318 - DNA, 648 bp, Enterobacter cloacae
atgaatcacgcgtcgttccgcaaaagctggaacgcacgccacctgacacctgtcgcgctggcggtcaccgccgtctttatgctggcaggctgtgagcaaaacgacgaaacggtttcgctgtatcaaaacgccgacgactgcgcgagcgcaaccggtaaagccgctgagtgtacgacggcctataacaacgccctcaaagaagcggaacgtaccgcgccgaaatatgcctctcgcgaagactgtgtagccgaattcggtgaaggccagtgccagcaggcacctgctcaggcgggtatggcaccggaaaaccaggcgcaggcacagtccagcggcagcttctggatgccgctgatggcgggttatatgatgggccgtttgatgagcggcggtgcgggctaccagcagcagccgctgtttagctccaaaaacccgaacagcccggcctacggtaaatacaccgatgccaccggcaagggttacggtgctgcaacgccaggccgtacgatgaccgtaccgaaaaccgcaatggcgccgaaaccagccaccaccagcaccattacccgtggcggctttggtgagtctgttgccaaacaaaccaccatgcagcgtagtgcgaccggctcctcaactcgctcaatgggcggctga

SEQ ID NO: 115319 - DNA, 1161 bp, Enterobacter cloacae
atggaacgagtcagtattgttgagcgcccggactggcgcgaaaaagccaccgaatacggtttcaactttcacaccatgtacggcgagccgtactggtgtgaagatgcttactataagctcacgctcgctcaggtcgaaaagcttgaagaggtaaccgcagagctgcaccagatgtgcctgaaggtagtagaaaaagtcatcgacagcgatgagctgatgaccaaattccgcattccgaagcacacctggagttttgttcgtcagtcctggaaaacgaaccagccttcgctctactctcgcctcgatctggcatgggatggcgtgggtgaaccgaagcttttagaaaacaacgcggatacaccaacctctctgtacgaagccgcgttcttccagtggatctggctggaagatcaggcgaatgccggaaacttgcccgaaggcagcgaccagttcaacagccttcaggaaaagctgattgagcgtttcgtcgaactgcgtgaacagcacggtttcaacctgttgcacctcgcctgctgccgcgataccgaagaagatcgcggtacggttcagtatttgcaggactgcgcagccgaagcggaagtggcgacggaattcctctatatcgaagatatcggtttaggtgaaaaaggtcagtttacggacatgcaggatcaggtcatcagcaacctgttcaagctctatccgtgggaatacatgctgcgggaaatgttctctaccaaactggaagacgccggcgtgcgctggctggaaccggcctggaagagcattatctccaataaagccctgctgccgatgctgtgggagatgttcccgaatcacccgaacctgctgcctgcttactttgctgaagatgatttcccaccgatggagaaatacgtcgttaagccaatcttctcccgtgaaggggcaaacgtctcgattatcgaaaacggtaaaacgctggaagcggttgaagggccgtacggtgaagaagggatgatcgtccaggcgttttatcaactgccgaagtttggcgacagctatacgttgatcggcagctggcttattaacgatcagcctgccgggattggcattcgcgaagatcgcgcgctgattacgcaggatctgtcgcgtttctacccgcatattttcgtcgagtaa

SEQ ID NO: 115320 - DNA, 789 bp, Enterobacter cloacae
atgtcttcttctcgtatgccagcactgtttttaggccatggcagcccaatgaacgtcctggaagataacgtctatacccgcgcctggcgtcaactgggtgagacgttaccgcgtccgaaggcaattgtggtggtctctgcgcactggtttacccggggtaccggtgtgacggccatggaagcgccaaaaacgattcatgattttggcggctttccgcaggcgctgtatgacacgcattatcctgctccgggctcccccgagctggcgcagcggctcgttgatctgctcgcccctgttccggttgcgctggacaaagaagcctggggctttgaccacggctcatggggggtgttgatcaaaatgtatccggatgccgatatcccgatggtgcaactgagtatcgacagcaccaaaccggctgcctggcacatggagatggggcgtaagctggcttcgcttcgtgatgagggcatcatgctgattgccagtggcaacgtggtacacaatctgcgtacggtacgctggcacggtgaaaatacgccgtacccctgggcaacagcctttaatgactatgtaaaagacaacctgacctggcaagggccggccgaacgacaccctttggtgaactatctggatcacgacggcggttcgctctctaacccgacgccggaacacttcttgccattgctgtatgtactaggcgcgtgggatggtcaggaggttattacaatcccggtcgacggtattgagatggggagcttgagtatgctgtcggtgcaggtggggtaa

SEQ ID NO: 115321 - DNA, 774 bp, Enterobacter cloacae
atgtcagtaccgttgattttgaccttactcgcgggcgccgcaacctttatcggtgcgttcctcggggtactcgggcaaaaaccctctaatcgccttctggccttctcgctgggtttcgccgccgggatcatgctgcttatctcgctgatggagatgctgcccgccgcgcttcacaccgaaggtatgtcgcctgttctgggctatggcatgtttatcattggactgctgggttattttgcgcttgaccgtattcttcctcacgcgcacccgcaggatttaatgcaaaaaagcgttacccccatcccgggcaatatcaaacgcacggccattctgctgacgctgggtatcagcctgcataactttccggaaggtatcgccacctatgtcacggccagcagcaacctggaaatgggttttggtgtggcgctggccgtggctttgcacaatattcctgaaggacttgccgttgccgggcccgtttatgccgccacgggttcaaaacgtacggctgtcttttgggcgggtatctccgggatggctgaaattctcggcggcgtgctggcgtggctgatcctcggtagcctcgtctccccgattgtgatggctgcgattatggctgccgtggccgggattatggtcgcgctctctgtcgatgagctgatgccgctggcgaaagagatcgatcccaacaataaccccagctacggcgtactgtgtggaatgtcagtgatggggatgagtctggtactgctgcaaacggccggtattggctaa

SEQ ID NO: 115322 - DNA, 561 bp, Enterobacter cloacae
atgtatatgggtaaaaaactactgttagcgacggctatggcagtcattgtatcgggtgctgcttttgcagatgatcaaggctcaggaaaaatcacattcaaaggtattgttattgacgcaccgtgcagtatcgcaccagacagcgttgataaagaagtcgatctgggtgaagtgaccacggctgttatcaacgccaacaaaaaatctaccccggtaccggtcgatatcaatctggaaaactgccagcttgacgatccggcagacgagaccgacacgccaattaccaaagtggatgtgacctttaccagcgcagcgacagacgcggcggataccagcctgatgagcaacacctatgcaagcggtgcgcagaacgtgggggtgcgtctgctggataacgcggagtctgctatcacgctgggagaggccaacgaggttgagttgctggcgggttcaaccacccagacgctgcatttcaaagcggttatggaagtccctacaggtaaaactgcgacggcaggccaggttgaagccacggctaactacgtcctgatgtacaaataa

SEQ ID NO: 115323 - DNA, 2448 bp, Enterobacter cloacae
atgatgacatacaaattacaatggataatcatcattgcgtccctgttaatgacgaaagttgcctctgccaccgagtttaatataaacgccatcgataaagatcagcgcggcagcgtcgatttatcactgtttaaagatcaaatatcggttacgccgggaagctatttcgttacggttgccgtcaatgatattccgctggcaaatggctggcagcttcgctggcgagaaataaataacgccgttcaggtctgtattccccccgagctggtcgatacctttgcgttgcaggatgacgttcgccacgctttgcctgagaaagagggatgcgttgatttctccgccagacccgacatccgatttacttttgagcaaggcagccagaccctgaaagtgaccatcccccaggcgtggctgcaataccgtgcggttgactggatgccgccatccacctgggacatcggcgtgccgggcgtactgctggattacaatctttttgccagccattatcagcccaatagcggcagcaacaatgacaacgccaatacctatggcaccgccggcgcgaacatgggcgcgtggcggctacgcagcgattaccagtacacgcaaagccatactgacgcaggctcggagcataatggacgtttttcacgcgtgtatatgttccgccctctgccctcgatcggtgcgaaactgacgttgggtgaaacggatttccagtccgcaatttttgacgcctttacctacaccggcgcatcgctaatcagcgatgaacgtatgctgccatggtcgctgcgcggctatgccccgcagattaccgggatagcgcaaaccaacgccacggtaaccgtaagccttgccaatcgcgtgatttaccagagtaaagtgccgccaggtccttttgttattcaggatcttaaccagtcggttcagggcacgctggacgtcaaaatcacggaagaggatggacgcgtcagcaccttccaggtctcggccgaatccgtaccatttttaacgcgcaagggtcaggtgcgctacaagctcgcggcgggtaaagcgcgccagggcgcctcccatgacgttgaagataacgccttcatgagcggcgaattttcctggggcatgctgtcgcacacctccctgtatggcggtacgctggccgatggcgaccgctatcgttccgtcgctgccggaatcggccagaatatggcctggctgggggcgctctcttttgacgtcacgcaggccaccagccagctgccacaccagcgcagccagacgggttacagctatcgcattaactacagcaagcgtttcgataccaccggcagtcagcttacgctcgccagctaccgctactcagatccacagtttttgagctacgcccgctaccttgattatgacgacggtgaccgccagtcggaaaaacaaaccctgagcgtgacggcaagccagtacatttcggcgttatccctgaacctgtacgtcaatatgctgcgtcagacatggtggaatgattcaccctccacgaccggcagtatcacggcgggctacaactttgatatgggccgctggaagaaccttggcgtaaccctgtcctggagtaaaacgcattacgatgagaaagacgaaagtgacgatactcagttctatctctcgctcagcgtaccgctcgatcccgatcatcgacttaactatgacctgcgtaaccgcgacacgctgagccataacgtgtcgtggtacgacacgtcggatcgcaataacacctggggcgtttccgcgggcgcggagagcgggaagccagactccggggcgcagttcagcgggaattatcagcattattctgcgtacggcgatcttaatctctccggcagctataaagctgacgaatataactccctcagcgcaagctggagcggttccttcacctcaacggtgaaaggcgccgcgctgcaccggcgcagctacggtaatgaaccccgcgtaatggtcagcaccgacggggtaggcaatatcccgctgaacatgtcgcgagatgagaccaaccgttttggcatcggcgttttaccgtcattctccagctattccccctccagcgtgcagatcaatatgaacaaccttccggatggcgtggacgtggacaaccgcgtcgtgacctcaacctggactgagggggccattggttttcgtcagattgccacgcgtgcaggtcgggacgtggcaggtgttctgcggatgtcatcaggaacgccaccgctcggggcgattgttcgcctggaagcaaacgatttgcaggttgggatggtggccgatgaaggccacgtctggctcggcgccgttgagccagaacagcagtttcgcgtgacatggggcgacaaccaacagtgtcgcttctcgttaccttctcacttagaaaacagtatgcagttgatactgccgtgtcagtaa

SEQ ID NO: 115324 - DNA, 762 bp, Enterobacter cloacae
atgaaattaacgccgattaaaagcctgtgcctgatgctaatcagcacagcatttaccacccatgcggccattaatctggaccgcacgcgcattgtttttccagaaagcgacaaggccagcagcctgaaagtggacaaccagagcaaggcgctgccttatctggcgctctcctggattgaagatgaaaaggggcataaagaagatgcgcactttatggcgcttccccccattcaacgtatcgaagcgggcgcctcgtcgcaggtaagaattgttaaacaagccgccacccgccagttgccaaaagacagggaatcgctgttttatttcaacctgcgtgaagtaccgccaaaaagcatcagcgccagcgaggagcgcagcgtgatgcaggttgccatgcagagccgaatcaagctgttctggcgtccggaagcgattagcaaaaaatccggcgaactggctgaaatgcgcatggaaattaccgccagcgcgaaaggactcacggtccacaaccctacgccgtactacatcacgctggcgtggctgagcaaaaatgccaaaaccatgctgccgggttttgacagtctgatgattgcgcctttcgccacggcaaccgcctctaccggtgattaccacggtagttattacagcatcggctatatcgacgattacggcgccctaaaaaaagtcgacgtgcagtgcaccggaacggcgctatgtaaacttaccgaacggaaaatcgataaagatgcaaaagctcgctag

SEQ ID NO: 115325 - DNA, 1062 bp, Enterobacter cloacae
atgcaaaagctcgctagtttcctgtttacactgctgctttcagcgctgcctttgaaagatgcgctggcgcttaactgctatctgggtggatctggcggccccgtcgaggagacaaaaacgatcaccccttttgcgatacccagcaacgctcaggttggtcaaaaaatatgggagtctgatgacattaaaattccggtgacgtgtgataacaacgtcacgagcaattttgagccggaagatgtctttgcatgggtgaacccttatcctgccgcaaccgatccctattatgaactgggcgtcacctatgaaggcatagattacgatgccacgggccagcccaacggcgtggatacccgccagtgcctggacaacgataacatcaccatttacaccgcggatcaaatccgccagatgggttgggagaatcgcatctgctccggcaatccggatgatatccatatttcacgcacgttcgtcgcccgattacgacttttcgtgcgaattaaggctatgccgccacatggttatatcagttcgctcagcgattacatcgttgtgcagtttgacggtaagggtggcgttaatcagatggccgacgcgaagaacctcaagtatcacatcaacggactgcaaaacattacggtgcttgattgtggagcgacgtttagcattttccctgaaaatcaggagatcgacttcggcgccttcagcgcgcgcgacattgtgaatcagcagacgcgtatgcgcacgttttcaatacgaaccaccaaagtgcaggatgcccagtgctcggacggatttaagatggactcgtcgttttacacaaccgaaacgcttagcgcagacgacaccgcagtactgatagggaatgggttaaagctgcgtattcttaacggaacggagccttacacctttaaccagtacaaggagtacgccgattttacgggcgataagatgaatgttgagcaaaactacacggctgaactttcacgggaggaagggaaagcgattcagtccgggccgtttgaaaccgtggtactgttcaaaattaactaccactag

SEQ ID NO: 115326 - DNA, 654 bp, Enterobacter cloacae
atgaatcagacgctactttcctcttttggcacttcaactcaacgtgttgaacatgcactggatgcactgcgcgaaggccgcggtgtgatggtgcttgatgatgaaaaccgtgaaaacgaaggcgacatgatttttgccgccgagaacatgaccgttgagcagatggcgctgaccatccgtcacggtagcggcatcgtatgcctgtgcatcaccgaagaccgtcgcaagcagcttgatctgccgatgatggttgaaaacaacaccagcgcctttggtaccggcttcaccgtgaccattgaagcagcgcatggcgtaaccaccggtgtgtcggcggctgaccgcctgactaccgtgcgtgcagcgattgctgatggtgcgaaaccatccgatctgcaccgccctggtcacgtcttcccgctgcgcgcgcagccgggcggcgtgctgacccgtggtggtcataccgaagcgaccatcgatctggtgacgctggctggcttcaaacccgcaggcgtgctgtgcgaactgaccaacgatgatggcaccatggcgcgcgcgccggagtgcatcacctttgcgcgtctgcacaatatgccagtggtgacgattgaagatctggttgagtaccgccgcgcgcacgagcgcaaagccagctga

SEQ ID NO: 115327 - DNA, 297 bp, Enterobacter cloacae
atgattgacccaaagaaaattgagcagatcgcgcgtcaggttcatgagtccatgccgaaaggtattcgtgagtttggtgatgacgttgagaagaaaatccgccagacgttgcaggcacagttggttcgccttgatttagtcagccgcgaagagtttgatgtgcagactcaggtgctgctgcgcacccgcgagaaactggcgctgctggaacagcgtctgagcgagctggagagccgcaatgcgccggaagaagtgaagccagcgccagctattccaccggtggatgaccaggcataa

SEQ ID NO: 115328 - DNA, 1431 bp, Enterobacter cloacae
atgaaagtaacactgccagagtttgaacgtgctggagttatggttgtcggtgatgtgatgctggatcgctactggtatgggccgaccagccgtatctctccggaagcgccggtgccggtagttaaggtcgacaccattgaagagcgtccaggcggcgcggcaaacgtggcgatgaacatagcctcgctgggcgcgcattcgcgtctggtgggcctgaccggcattgacgatgcggcgcgcgccctgagtcagtcgctggcggacgtgaacgtgaagtgcgacttcgtttctgttccgacccacccaaccatcaccaagctgcgcgtcctgtcgcgtaaccagcagctgatccgcctcgatttcgaagaaggattcgaaggcgttgatcctgagccgctgcacgagcgtattagccaggcgctgggcaatatcggcgcgctggtgctgtctgattatgccaaaggcgcgctggcgagcgtgcagaccatgatccagctggcgcgtaaagccagcgtaccggtgctgatcgatccgaaaggcaccgattttgagcgctatcgcggcgcaaccctgctgacgccaaacctctctgaattcgaagcggtggcgggcaagtgcaaaactgaagaagagctggttgagcgcggcatgaaaatcatcgctgatttcgagctgtctgcgctgctggtgacccgttccgagcagggcatgacgctgctgcaaccgggcaaggcgccgctgcatatgccaacccaggcgcaggaagtgtacgacgtgaccggtgccggtgatacggtgattggcgtgctggcggcgacgctggcggcgggtaactccctggaagaagcatgctacttcgcgaacgccgcggcgggcgtggtcgttggtaaactcgggacctccaccgtttcgccaatcgagctggaaaacgcggtgcgtgggcgtgcggataccggctttggcgtcatgaccgaagacgagctgaaagtggccgttgctgccgcgcgcaaacgcggtgaaaaagtagtgatgactaacggtgtgttcgacatcctgcatgcgggtcatgtctcgtatctggcgaatgcgcgcaagctgggcgatcgtctgattgtggcggtcaacagcgatgcctcaaccaaacgtctgaagggtgaaacgcgtccggtgaacccgctggagcagcgtatgatcgtgctcggcgcgctggaagcggtggactgggtggtctcatttgaagaagacaccccgcagcgcctgattgccggaattctgcctgacctgctggtgaagggcggtgattacaaaccagagcaaatcgcaggtagcgaagaggtctgggcaaatggtggtgaagtgatggtgctcaactttgaggacgggtgttcaaccaccaacatcattaagaagatccagaaagacagtcagtaa

SEQ ID NO: 115329 - DNA, 2856 bp, Enterobacter cloacae
atgccgctttcttcgcagttacagcagcactggcagaccgtttgcgaacgcctgcctgagtcgttacccgcgtcatcgttaagcgagcaggcgaaaagcgtgctcacgttcagtgattttgtgcaggagagcgtcagcgccaacccggactggctggcagagctggaaagcgcgccgccgcaggctgacgagtggcggcattatgctggctggctgcaaaccgcgctggcagaggtggcagacgaagccacgctgatgcgcgtactgcgtcagttccgccgccgggtgatggtacgcattgcctgggcgcaggcgctggagctggtgagcgaagagagtaccttgcagcagttgagcgagctggcgcagacgttgattgtcgccgcgcgggactggctctacgccgcctgctgtaaagagtggggcacgccgtgcagcgaagacggggttccgcaaccgctgttgattctggggatgggcaagctgggcggctgcgagctcaatttctcctcagacatcgatctgatttttgcctggccggagaacggctccacgcgcggcggtcgtcgcgagctggacaacgcccagttctttactcgcctggggcagcggctgattaaggcactggatcagcccacccaggatggttttgtctaccgcgtggatatgcgtttgcgtccgtttggcgacagcggtccgctggtgctgagctttgccgcgctggaagattattaccaggagcagggtcgcgactgggagcgttacgcgatggtcaaagcgcggatcatgggtgacagcgacgatgcctgggccaacgagctgcgcgccatgctgcgcccgtttgtgttccgccgctacatcgacttcagcgtgatccagtccctgcgaaatatgaaagggatgattgcccgcgaggtgcgtcgccgtggcctgaaagacaacatcaagctcggcgcgggcggtattcgtgagatcgaatttatcgtccaggtcttccagctaatacgcggcgggcgtgaaccttctctgcaatcccgctcgctgctgccgaccctgagcgctatcgaacagctgcatctgctgccggaaggcgatgcgcaaacgctgcgtgactcttatctcttcctgcgtcgtctggaaaatttgctgcaaagtatcaacgacgaacagacccagacgttaccgggcgacgagctgaaccgggcgcgtctggcctgggggatgcgggtggatgactgggcggcgctgacggaacggctggaagcgcatatggcgggcgtgcgccgcatctttaacgatctgatcggcgacgacgaaagtgaatcgcaggacgatgcgctctccgagcactggcgcgagctgtggcaggacgcgctccaggaagatgacaccacgccggtgctggcgcacttaagcgacgatgcccgccatcgcgtggtggcgctgattgccgatttccgcttcgaactgaacaaacgcgccattggcccgcgcggtcgtcaggtgctggatcatctgatgccgcatctgctgagcgatgtctgctcccgcgaggatgcgccggtgccgctgtcgcgcatgatgccgctgctgagcgggatcgtcacgcgtaccacttaccttgagctgttaagcgagtttcccggcgcgctgaagcacctgatttccctctgcgccgcctcgccgatggtggcgaacaagctggcgcgttatccgctgctgctggacgaactgctcgacccgaatacgctgtatcagcctacggcgacggatgcctaccgcgacgagctgcgtcagtatctgctgcgcgtaccggaagaggacgaagagcaacagcttgaggcgctgcgtcagtttaagcaggcgcagatgctgcgcgtggcggcggcagatatcgccggtaccctgccggtaatgaaagtgagcgatcacttaacctggctggcggaagcgatcatcgacgcggttgtccatcaggcgtgggtgcagatggtggcccgctacgggcagccgaaacaccttgcagagcgcgaaggccgcggttttgcggtggtgggttacggcaagctgggcggctgggagctgggctacagctccgatctggatctgattttcctccacgactgtccggcagacgtcatgaccgacggcgaacgtgagattgacgggcggcagttctacctgcgtctggcccagcgcattatgcacctgttcagcacccgcacctcatccggcattctgtatgaagtggatgcgcgtctgcgcccgtccggcgcggcaggcatgctggtcacctcgacggaggctttcgccgactatcagaagaacgaagcctggacgtgggagcatcaggcgctggtgcgcgcccgcgtggtatacggcgatccgcagctcaaaacgcagttcgatgcgatccgcaaggcggtcatgacgaccccgcgcgagggcagtacgctgcaaaccgaagtgcgggaaatgcgggagaagatgcgcgcgcaccttggcaacaaacatcgcgatcgctttgatattaaagccgatgaaggcggcattaccgatatcgagtttatcactcagtacctggtgctgctgcacgcgcacgataagccgaagctgacccgctggtcggataacgtgcgcatactggaactgctggcgcagaacgacattatggatgagcaggaggcgcaggcattaacccgcgcctacaccacgctgcgtgatgagttgcaccatctggccttacaggaacagccgggccatgtggcgctggactgtttcgccgatgaacgcgcgcaggtgaccacaagctggcagaagtggctggtggaaccgtgcgtaacaaaacaagtgtga

SEQ ID NO: 115330 - DNA, 1302 bp, Enterobacter cloacae
atggcacaagagatcgaattaaagtttatcgtcgaaaaagacagcgctgacgcgctccgccagcatctgaatacgctgtccggcgagcaccatgaacccgtacagctgctcaacatctattacgaaacgccggacaactggctgcgcaaccacgatatgggcctgcgcatccggggtgcgaacgggcgctacgagatgacgatgaaaatcgccggtcgcgtggtgggcggtttgcaccagcgtccggaatacaatatcgacatcagtaagccagaacttgagctggatcgttttccggcggaagtgtggccggaaggaacgctgcccgcaacgctgtcggcagaggcgcaaccgctgttcagcaccgatttctggcgcgaaaaatggctggtgacggaaggcaagagccgcattgagatcgcgtttgatcggggtgaaattaaggcgggtgaagagcaggagccgatctgcgaattggaactcgaactgctggaaggcgaggcgagcgacgtgctgaagctggcgcacaagctggtgaaccagcctggcctgcgtcagggcagcctgagtaaagcggcacgcggctatcacctggccgccgggaatgcgccgcgcgtgctgcgagaaaccccgattctgcgcgttgtgccgaaagcctccgttgagcagggcatggaagcggcgctggagctggcgctctctcagtggcagtaccacgaggagctgtgggcgcgtaacgtgaaaaatgccaaaaaacaggtgctggccgctatggggctggtgcgtcataccctgacgctctttggcggcattgtaccgcgtaaagccagcactcacttacgtgatttgctcactcaaaccgaaacgctgatgctttccgacgtgtcggcacaaacggcgatctacagcccgcaaaacgccggcgcgaaactggcgctgaccgagtttctggtgacgcgcggctggcgcacgttcctcgatgcgaaagggcagaccaaaatcgcggaaaacttcaaacgttttgcggatatccacctctcccgtcacgcggccgagctgagaaccacctttgcgcatccgctgggcgaccagtatggcgatcagcttccccgcctggcgcgtaacatcgacagcatgttgctgctgtcaggtgcgtatgagggcgtgaaggcgcaggcctggctggagaactggcaggggctgaagcatgccatagagacccgtcagcagatcgaaatcgagcatttccgcaacgaggccatttcgcaggatccgtactggctgcacagcgaaaaacgttaa

SEQ ID NO: 115331 - DNA, 693 bp, Enterobacter cloacae
atgatgaatcctttgcgtagcgacactgataccactactatcgttccactttttatgaaaataacgactgatatgcttaaattacgcctgattggacttactttactcgcttttagcgccgcaaccgcggtccacgctgaagagaaacgttacgtttctgatgaactgaatacctgggtacgcagcggccctggagacaattatcgcctcgtgggtacggtaaatgccggcgaggaagtgactctgctgcaaaccaatgcagacaccaattacggtcaggttcgtgacagctctggccgcacctcatggatcccgctgaaagagctgagcacggtgccaagcctgcgcacccgcgtgccggacctggaaaatcaggtgaaaaccctgaccgataagctgaacaacattgacggcacctggaaccagcgcaccgcagagatgcagcagaaagtggcgcaaagcgacagcgtgatcgccggtctgaaagatgaaaatcagaagctgaaaaatgagctcatcgtcgcgcagaagaaagtgaacgccgcgaatctacagctggatgacaaacaacgcaccatcatcatgcagtggtttatgtatggcggcggggtgcttggcgtcggtctggtgctgggtctggtgcttcctcaccttatcccgagccgtaaacgtaaagaccgctggatgaactaa

SEQ ID NO: 115332 - DNA, 1242 bp, Enterobacter cloacae
gtgaagagttatctggtcggtggtgcggtacgtgatgcgttattaggtctgccggtcaaagataaagactgggtcgtggtcggtgccacgcccgaagcgatgattgacgcgggctaccagcaggtaggccgcgattttcctgtgttcctccatccgaaaagccgggaagagtacgccctggcgcgtaccgaacggaaatccggttccggttataccggcttcacctgctatgccgcgccggatgtgacgctggagcaggacttactgcgccgcgatctcaccattaatgccctggcgcaggacgaaaaaggccatattatcgacgtctacggcggccagaacgatctgcgcgaccgtcttttacgccatatttcccccgccttttctgaagatccgttacgcgtactgcgcgtggcgcgttttgccgcccgttatgcccatctcagcttccgcatcgccgacgagacgatggcgctgatgacggccatgaccgacgcgggcgagctggaacacctgacgccagaacgcgtctggaaagagaccgaaaacgccctgactacccgtaatccgcaggtctttttccaggttctgcgcgactgcggggcgctgaaagtgctgttcccggaaatagatgcgctgtttggcgtgcccgccccggcgaaatggcacccggaaattgataccggcattcacaccctgatgacgctgagcatggccgccatgctcagcccggaggtggacgtgcgcttttctaccctctgccatgacctcggcaaagggttaacgccaaaggagttgtggccacgccaccacgggcacggtccggctggcgtgaagctggttgaagggctttgccagcgcctgcgcgtgccgaatgacattcgcgatctggcaaaactggtcgccgagtttcacgacctgatccacaccttcccgatcctgaaacccgccaccatcgtcaggctgtttgataacatcgacgcctggcgcaaaccgcagcgcgtggagcaaattgcgctgaccagcgaagccgacgtgcgcggccgcaccgggtttgaagcgtccgattatccgcagggacgtttgctgcgtgaggcgtgggacgtggcgaaagcggtgccaacgaaagaggtggtggaggcaggatttaaaggcccggcgatccgcgaagagctgacgaagcggcggattgatgcggttgcagcgtggaaggaaaaacgttgccctcagccgaaagactga

SEQ ID NO: 115333 - DNA, 822 bp, Enterobacter cloacae
atgagcgatatgcactcgctgctggtggcggcaatactgggtgtggtcgaaggattgacggagtttttgccggtgtccagtacgggccatatgattatcgttggccatctcctgggctttgaaggcgataccgcaaagacgtttgaggtggtgatccagctgggctctatcctggcggtggtcgtgatgttctggcgtcgtctgtttggtctgatcggtatccacttcgggcgtttgccgcagcgtgaaggagagggcaaagggcgcctgacgctgattcatattctgctcgggatgatcccggcggtggtgctggggctggtgttccacgacaccattaaatcgctcttcaacccgattaacgtgatgtacgcgctggttgtcggcggcttcctgctgattgccgccgaagtgctgaagccaaaaaccccgcgtgcggaaggtctggacgatatgacgtatcgccaggcgtttatgattggctgcttccagtgtctggcgctgtggccgggcttctcccgttcaggggcaaccatttccggcgggatgctgatgggcgtgagccgttacgcggcgtctgagttctcgttcctgctggcggtgccgatgatgatgggcgccaccgcgctggatctctacaaaagcatcggcttcctgaccgtgggcgacattccgatgttcgccgtgggctttatcaccgcctttattgtggcgttgatcgccatcaaaaccttcctgcaactgattaagcgtatttcgtttattccgttcgcgatctaccgctttatcgtcgcggctgccgtgtacgtggtcttcttctga

SEQ ID NO: 115334 - DNA, 369 bp, Enterobacter cloacae
atggatattgtatttatagagcaactttcggtaatcaccacaattggtgtttacgactgggaacagaccatcgagcagaaactggtgttcgatatcgaaatgggctgggacaaccgcaagtcagcaaaaagcgatgatgtgaatgactgtctgagctacgccgacatcagtgaaacggtcatcgcccatgttgaagggcaacgttttgcgctggtagaacgcgtggcggaagaggtagcagacctgctgctgagcaaatttaactccccatgggtgcgcattaagctaagcaagccgggagcggtggcgcgcgccgccaatgtgggcgtgattatcgagcgtggcgcaaatctgaaaggaaagatttaa

SEQ ID NO: 115335 - DNA, 615 bp, Enterobacter cloacae
atgagtgcaatcgcgcctggaatgattatcctcgcctacctttgcggctcaatctccagcgccattctggtctgccgcatcgccgggttgcctgacccgcgtgaaagtggttccgggaatccgggggcgaccaatgtactacgaattggcggcaagggagcagccgtagcggttttgatttttgatgttctgaaaggaatgcttcccgtctggggcgcgtatgcgctcggcgtcacacccttctggctggggctgattgccatcgccgcctgcgtcggccacatctggcccgttttctttggttttaaaggcggtaaaggcgttgccaccgcgtttggcgcgattgcgccgatcggctgggatctcaccggcgtgatggcgggcacctggctgctgaccatcctgctgagcggttattcgtcgctgggcgccatcgtcagcgcactgatcgccccgttttatgtctggtggtttaaaccgcagtttaccttcccggtgtcgatgctctcgtgtctgatcctgttgcgccaccacgacaacattcagcgcctgtggcggcgtaaggaaacgaagatctggacgaagctcaggcgtaaaaagaaagacgctcagtaa

SEQ ID NO: 115336 - DNA, 1467 bp, Enterobacter cloacae
atggcagaaatcacagattcaactccccttccaacggcaggaaataccccggatggcgacatcaagtgggtacgtagcgcatcggacgtttcacgtctcgttaatgacggctctcagggccgggccaatgcccgcatcgtggtcggtatcgcgctcgggggaattttcctcgatgcctacgatctcggcgcgctggcattcggcatcaaagacatcacccgcgaatttaacctgacgcccgccggtaccggcatggtggcctcggcgattacctttggcgcgattgtcggggcgctgctcggcggctatcttacggataaaatcgggcgctaccgcgtctttatggccgacatggtgttctttgtcgttgccgctatcgcctgtgcgctggccccgaacgaatatgtgcttgcgggcgcgcgctttgtgatgggtcttggcgttgggatcgaccttcccgtcgcgatggcgtttctcagcgagttcgccaggctgaaaggcccggggaataaagcctccagcgtcgcaatgtggtgccccacctggtacgcggccatcagcatctcttatcttctggtgctcttcttttacgccgtgctgccggaaagccacagcgactggctctggcgtctgatccttggctttggcgcggtgcccgcgctggtgattatcgccatccgcagccgctatatgagcgaatccccggtctgggcggcgaatcagggcaatctgaaggaggcggcgtccatcctgcggcagtcttacaatattaatgcccacgtaccgcaggatgcgctcgaccagcccgcgcctgtcgtgaacaaggcaaaatggtcgaactacctgaacctgttccgcggtatctatctgcggcgtaccacgcttgccacgctgctgtcagtggtctcctcgttcgcctataacgccgtagcctttggcctgccggtgatcatctccagcttctttgtgcagtcgatgctgaccaccattctgatctcgctggcgcttaacctgctgttcgcctttgtcggcgggctgctggcggtgcgctatgttccgcgcttcggcgcatggcggatgtctctggcgggttatgcgtgccagcttgcggcactgctcggcctggcgttgattggccggcctgacggggccacggaaggcgtgttcgccgtcgcgatgctggcgctgttcctgtttggtcagggttttggtccaggtgcgcataccatgacgtttgcctccctgagctacccgacctcgctgcgcggcgtgggcgtggggcttaaccagacgctgatgcgcagcagttcaacgctgtcactgtttctgttcccgctgctggtcgcctcgctggataccgccgtgttctgggtgattgcgctggcgccgtttatcggtctggcgtcgctgctggcgatccgctgggagccgtcggggtatgatgtggatgcagaggattatcggtag

SEQ ID NO: 115337 - DNA, 828 bp, Enterobacter cloacae
atgttagcaactcaggtcactgataattcatacaaaggctggcaggcctcgcttgccctccagttttgtcatacccctgagaaaaccctcctccattccgcgcgtcacagcgggccgctcaccgttcagcgtccgttttatcccgaaggggaaacctgccacctttacctgctgcacccgccaggcggaattgtgggcggagatacgctggatatttccgtgcggctcgacgccaaaagccatgccctcatcaccatgcccggcgccagtaagttctatcgcagcaacggcccgctggcctgcctcagtcagcatttttacctcgacgaagaggccacgctggagtggctgccgcaggacaccattattttccccggcgctaacgccgcgctgcgttccgtctttcacctgcacgccaccagcacgctgctggcgtgggagctgtactgtctgggccgtccggtgataaacgaaaccttcagccacggcacgctggagaaccgccttgaggtgtgggtggatggcgagccgcgtctgattgagcgactgcatctcagcggtggcgatctgacgcccgtcgcggaccatccgtgggtcggcacgctgctgttctatccggcccgggaagcacttctcgacgcggtgcgtgcgcttctcgccccgctggaaaacgttggcggggcgacgctcaccgacgatctgctgtcggtgcgttttctctcccacgacaacctgatttgtcagcgggtgatgcgcgatatctggcagtcgcttcgcccgcttttaactcccaaaaccgcctgttcgccgcgcatctggcagacataa

SEQ ID NO: 115338 - DNA, 303 bp, Enterobacter cloacae
atggaactgactcccagagaaaaagacaagctgttgctgttcaccgccgcgctggttgccgaacgccgcctcgcgcgcggggtaaagctcaactacccggaatcggtcgcgctgatcagcgcctttattatggaaggcgcgcgcgatggcgaaaccgtcgcctcgctgatggaagccggccgccacgtcctgacgcgcgatcaggtgatggaaggcgtgccggagatgatcccggatatccaggtggaagccacctttccggacggatccaagctcgtcaccgtccacaacccgatcgtgtaa

SEQ ID NO: 115339 - DNA, 315 bp, Enterobacter cloacae
atgatcccaggcgaataccggatccagtccggaaacattgctctcaacgtcgggcgcgaaacccgaagtgtgatcgtggaaaaccacggcgacaggccgatccaggtcggatcgcactaccacttttacgaggtcaacccggcgctgaagttcgatcgcgaagccacccgaggttaccggctgaacatcccggccggcactgccgtgcgcttcgagcccggccagaagcgggaagtgacgctggtgcaggtgacgggcgcacagcgcattttcggctttcgcggcgaggtcatgggcgaggtgaaacatggctga

SEQ ID NO: 115340 - DNA, 1704 bp, Enterobacter cloacae
atggctgagatttcacgccaggcgtatgccgatatgttcggccccactaccggggataaagtgcggctggccgacagcgagctgtggatcgaagtggaagacgatctcacgatctacggcgaagaggttaaattcggcggcggaaaagtgatccgcgacggtatgggacaggggcagatgaccgccgacgactgcgtggatctggtgctcaccaacgcgctaatcgtcgatcactgggggatcgtgaaagcggatatcggcgtaaaagatgggcggatcttcgccatcggcaaagccggaaacccggacattcagcccggcgtgacgatcccgattggcgcggcaacggaggtgatcgccgccgaagggaggattgtcaccgccggcgggatcgacacccacatccactggatctgtccgcagcaggcggaagaggcgctggtgtctggcgtcaccaccatgatcggcggcggcaccgggcctgcggcaggcacaaacgccaccacctgcacaccggggccgtggtatatcgcccgcatgttgcaggcagccgatacgctaccggtgaatattggcctgctgggtaaagggaacggctccaacccggacgcgctgcgcgagcagatcgcggcaggtgccatcgggcttaagatccacgaagactggggcgcgacgcctgcggccatcaactgttcgctggaggtcgctgaagagatggatattcaggtggcgctgcacagcgacacgctgaacgagtccggttttgtcgaagacacgctggccgccatcgccgggcgcaccatccacaccttccacaccgaaggggcgggcggcggccatgcgccggatatcatcaccgcctgcgcgcacccgaatattctgccctcctccaccaacccgacgctgccctacacggtcaacaccatcgacgagcacctggacatgctgatggtttgccatcacctcgacccggatatcgccgaggacgtggcgtttgccgaatcccgcattcgccgggagaccatcgccgccgaagacgtgctgcacgatatcggcgcgttctcgctcacctcgtcagattcacaggcaatgggccgcgtgggggaagtgattatccgcacctggcaggtggcgcaccgcatgaaggtgcagcgcggcgcactgccggaagagaccggcgataacgataacttccgcgtgaagcgctatgtcgccaaatacaccatcaacccggcgctgacccacggcatcgcccatgaggtcggttctattgaggcgggcaagctggcggatctggtggtctggtcccccgccttctttggcgtcaaacccgccaccatcgtcaaaggcgggatgatcgcctgcgcgccgatgggcgacatcaacgcctcgatccccacgccgcagccggtacattaccgcccgatgtttggtgcccttggtgccgcacgccacgccacgcggctgacgtttgtctctcaggctgctgatgccagcggcattccgcaacggctcggactgcaaagcgccaccgcggtggtgagaggctgccggtcggtgaaaaaggccgacatgatccacaacgatttacagccgaatatcaccgttgacgcgcaaacctatgaggtacgcgtcgacggcgaattgatcaccagcgaaccggcagaggttttgccgatggcgcaacgctattttctgttttga

SEQ ID NO: 115341 - DNA, 465 bp, Enterobacter cloacae
atgatctatttaacccaacgcctggaccatgcgcatccgattaccgccagcgtcacgctaccgattgatgtgagggtaaaaagccgcgcccgcgtggcgctgaacgacggccgcgaagccgggctaatgctgccgcgcggcctgctgctgcgcgggggcgacctgctgactaccgacgatggcagcgaggtgatcgaagtgatcgccgccccggagtcggtttccgtggtgcgctgcgccgacccgttcctgctcgcccgcgcctgttatcacctgggcaatcgtcacgtaccgctgcaaataatgcctggcgaactgcgctaccaccacgaccacgtcctcgacgatatgctgcgtcagttcgggctggaggtgaccttcgccagcctgccatttgaaccggaagcgggcgcttacaccagcgatgcccacagccatagccactctcacgctcattcacattaa

SEQ ID NO: 115342 - DNA, 540 bp, Enterobacter cloacae
atgcgcaagtacttaccgctgttactgctggctttttccgttccggcgcttgcccatcccggccacgggaccgacagcttccaggcaggatttctccatccgctgaccgggctggatcacctgctgatgctgacgggggctggcgtgctctccgccctgagcggccgcaagctgctgttgccgttagcgacgctcggcatgatgcttgctggtgccgttgcgggcagcctgctcggcggctttagcggcatggagatgctgattatcgcctcgctggcgctctgcggcgtgatgatgtttaagaccgaaaatcgcctgctgctggcggtaccagccctggcgatgttccacggctgggcgcacggcgtggagatgtccggccacagcttctggctcttcaccagcgggtttatgttagccagcgccacggtgctgtgtgccagcttcgcggcagggctgctgctgcgccgtcacgacggcctgcgtaaaaccttcggcggcgggctgatcgtctccgccctgctggcgctgatgagctga

SEQ ID NO: 115343 - DNA, 675 bp, Enterobacter cloacae
atggagcacgcccgccagcggctgcgcctgatgcagctctccagcagtagcctgccggtcggatcgtttacctggtcgcaggggctggagtgggccgttgaggccgggtgggtcacggacgctgaggccttcaggcgctggcagatccagcagatggagcagagctttttctgtgtcgacctgccgctgtttatccgcctgtatcgtgcctgcgagaagcaggacgtcgcgacagcaaaacgctggacggcatacctgctcgcctgtcgggaaacgcgcgagctgcgcgatgaagaacgcaaccgtggggcggcctttacgcgcctgattaagagctgggaacccgcctgcccgccagaatggctgccgctgttgatgcgaagccagctcggcggcatggcgtggctcggcgtgcgctggggcattagcgcgcgcgagctggcgctgagcctcggctacagctggattgagagcgcggtgatggcgggcgtcaagctggtgccgtttgggcagcaggcagcacaacagctgattatcgacctgagcgaccattttgccgccgggtttgaacaggcatttttacgtggcgacgacgcgctgggggccgctacgccgctgtcggccatcgcctccgcgcgccatgaaacccaatattcacgactattccgttcctga

SEQ ID NO: 115344 - DNA, 618 bp, Enterobacter cloacae
atggctgattacaaacatcccctgcgcgtgggcgtgggcggcccggtagggtcgggcaaaaccgccctgctggaagcgctctgcaaggcgatgcgcgacacctatcacctggcggtggtgaccaacgatatctacaccaaagaggatcagcgcatcctgaccgaggcgggtgcgctggagccagagcgcatcgtgggcgtggaaacgggcggctgcccgcataccgccatccgcgaagatgcctcaatgaacctggcggcggtggaagcgttgagcgagaagttcggcaacctggatctgatcttcgtggaaagcggcggggataacctgagcgcgaccttcagcccggagctggcggacctcaccatctacgtcatcgacgtggccgaaggggaaaaaatcccgcgcaagggcgggccggggatcaccaaatccgattttctggtgatcaacaaaaccgaccttgcgccgtacgtcggtgcgtcgctggaggtaatggaacgcgacactaatcgcatgcgcggcgagcgtccgtggacgtttaccaacctgaaagcgggtgacggtttagcgacgattattgcgtttctggaagagaaaggaatgttgcgggtgtag

SEQ ID NO: 115345 - DNA, 1014 bp, Enterobacter cloacae
atgcgtgtactgggtattgaaacatcctgcgatgaaaccggcatcgcgatttacgacgacgaaaaagggcttctggccaaccagctgtatagtcaggtgaaattgcacgctgattacggcggcgtcgtgcctgaactggcctctcgtgaccacgtgcgtaaaacggttcccctgattcaggcggcgcttaaagaggccgggttgagtgcaaaagatattgatgccgtggcctataccgcagggccgggcctggtcggcgcgctgctggtcggcgcaacggtagggcgttcgctggccttcgcgtgggatgttccggccattccggttcaccatatggaagggcatcttctggcgccgatgctggaagacaatccgccagagttcccgtttgtggcgctcctggtttccggtgggcatacccagctgattagcgtaacgggcattggcaagtacgcgctgctgggcgagtcgatcgacgatgctgccggtgaagccttcgacaaaaccgccaagctgctggggctggattacccgggcggcccgatgctgtcgaaaatggcgtcgcagggaacggaagggcgctttgtcttcccgcgcccgatgaccgaccgtccggggctggatttcagcttctctggcctgaaaactttcgcggccaatactatccgcaataatgacgacagtgagcagacccgtgccgatatcgcccgtgcgttcgaagacgcggtggtggatacgctgatgatcaagtgcaagcgcgcgctggatcagaccggctttaagcgtctggtgatggccggtggcgtcagcgctaaccgcacgctgcgcgcgaagcttgccgaaatgatgcaaaagcgtcgcggggaagtgttctacgcgcgtcctgaattttgcaccgataacggggcgatgatcgcctacgccgggatggtgcgtctgaacgccggcgcaacggctgacctgagcgtgtctgtgcgtccgcgctggccgctggcggaactgcctgaggcgtga

SEQ ID NO: 115346 - DNA, 216 bp, Enterobacter cloacae
atgccggtaattaaagtacgtgaaaacgagccgttcgacgtagcactgcgtcgcttcaaacgttcatgcgagaaagcaggtgttctggctgaagttcgtcgtcgtgagttttatgaaaaaccaacgaccgaacgtaagcgcgctaaagcttccgctgtgaaacgtcacgcgaagaaactggctcgcgaaaacgcacgccgtactcgtctgtactaa

SEQ ID NO: 115347 - DNA, 1746 bp, Enterobacter cloacae
atggccggaagaatcccacgcgttttcatcaatgacctgcttgccagaaccgacatcgtcgatctcatcgacgcgcgggtgaagctaaaaaagcagggcaagaactaccatgcgtgctgtccgttccataacgaaaaaaccccctctttcaccgtaaacggtgaaaaacagttctaccattgcttcggctgtggcgcacacggtaatgccgtcgattttttgatgaactacgacaagctcgagttcgttgaaaccgtcgaagagctggcggcgatgcataaccttgaagtgccgtatgaagcaggcagtgggccaagtcagatcgagcgccatcagcggcaaacgctgtaccaactgatggatggcctgaattcgttttaccaacagtctcttaagcactctgcggctgagcctgcgcgtcagtatctgaacaagcgcggactgagtgacgatgtgattgcgcgtttcgctattggttacgccccgcccggctgggacaacgtgttaaagcgttttggcggcaatagcgaagatcgtaaatccctcatcgacgcaggcatgctggtcaccaacgaccagggacgaagctacgaccgcttccgtgaacgggtgatgttcccgatccgcgacaagcgtggccgggtgataggttttggtggtcgcgtgctgggtgatgtcctgccgaaataccttaactccccggaaaccgatattttccataagggccgccagctttacggtctttatgaggcacagcaggataatgcggaacctccgcgtcttctggtcgtcgaaggctatatggatgttgttgcgctggcgcagtacgacattaattatgccgttgcgtcgctgggaacgtccaccacggcggaccatatccagctgctgttccgcgtcaccaacaacgtgatttgctgttacgacggtgaccgcgcaggacgcgacgccgcctggcgagcgctggaaaccgcgttgccgtatatgaccgacgggcgtcagctacgctttatgttcctgcccgacggtgaagacccggatacgctggtgcgtaaagagggtaaagcggcgtttgaagcgcggatggagcaggcacagccgctctccacgtttctgtttaacagcctgatgccgcaggttgatttgagtacccctgacgggcgcgcgcaactcagcacgctggcgctgccgttaatcagccaggtgcccggcgaaacgctgcgcatctatctgcgtcaggagttaggcaacaagctcggcattctggatgacagccagcttgaacgtttaatgccgaaacaggctgaaaacggcacggtacgccccgcgcctcagctaaaacgcacaaccatgcgtatactgatagggttgctggtgcaaaaccccgaacttgctccgcaagtgccgtcgctggcgggtttgaaccacgaaaaattgcccgggcttggcttattttcagaattggtcaacacttgtttgtctcagccaggtctgaccaccggacaacttttagagcattatcgcggcacaaaagaggccgctacccttgaaaaactgtcgatgtgggacgatatagcagataaggatatcgcagaaaaaacgttcaccgactcgctcaaccatatgtttgattcgatgcttgagttgcgccaggaagagttgatagctcgcgagcgcacccatggcctgagcagcgaagaacgccgggagctctggatgattaaccaggaactggcgaagaaataa

SEQ ID NO: 115348 - DNA, 1845 bp, Enterobacter cloacae
atggagcaaaacccgcagtcacagctgaaacttcttgtccaacgcggtaaggagcaaggctatctgacctatgccgaggtcaatgaccatctgccggaagatatcgtcgattcagatcagatcgaagatatcatccaaatgatcaatgacatgggcattcaggtgatggaagaagcaccggatgccgatgatctgttgctggctgaaacctccaacaacactgacgaagatgcggaagaagctgctgcacaggtcctgtccagcgtggaatctgaaatcgggcgtaccactgacccggtccgcatgtacatgcgcgaaatgggtaccgttgaactgttgacccgcgaaggcgaaattgacatcgcaaaacgcatcgaagacgggatcaaccaggttcagtgctctgttgccgaatacccggaagcgattacctatctgctggagcagtacgatcgcgtcgaagcggaagaagcgcgtctgtccgatctgatcactggctttgtcgacccgaacgctgaagaagatatggcgccaaccgccactcacgtcggttctgagctgtctcaggaagagatggatgacgacgaagacgaagatgaagaagaagaggacgacagcagcgacgatgacaacagcatcgaccctgaactggcgcgtgagaagtttgccgagctgcgtacccagtacgaagtgacgcgtgacaccatcaaagcgaaaggccgcagccatgccgccgctcaggaagagatcctgaagctgtctgaagtgttcaaacagttccgcctggtgccaaaacagttcgactacctggtgaacagcatgcgcgtgatgatggatcgcgtacgtacccaggaacgtatcatcatgaagctgtgcgttgaacagtgcaaaatgccgaagaagaacttcattaccctcttcaccggcaatgaaaccagcgaaacctggttcaacgccgctatcgcgatgaacaagccgtggtctgaaaagctgcacgacgtgaaagaagacgtacagcgcggcctgcaaaaactgcatcagattgaagaagagaccggcctgaccatcgagcaggtgaaagacatcaaccgtcgtatgtccatcggtgaagcgaaagcccgccgtgctaagaaagagatggttgaagcgaacttacgtctggttatctctatcgccaagaaatacaccaatcgtggcctgcaattcctggatctgattcaggaaggcaacatcggtctaatgaaagcggtagataagtttgaataccgtcgtggttacaagttctccacctatgctacctggtggatccgtcaggcgatcacccgctctatcgcagaccaggcgcgcaccatccgtattccggtgcatatgattgagaccatcaacaaactcaaccgtatctctcgccagatgttgcaggagatgggccgcgagccgacgccggaagagctggctgaacgcatgttgatgccggaagacaagatccgtaaagtgctgaaaatcgctaaagagccaatctccatggaaacgccaatcggtgatgatgaagattcgcatctgggtgatttcatcgaggataccaccctcgagctgccgctggactctgccaccaccgagagcctgcgtgccgctacgcacgacgtgctggctggcctgaccgcccgtgaagccaaagtgctgcgtatgcgtttcggtatcgacatgaacaccgaccacacgctggaagaagtgggtaaacagtttgacgttacccgcgaacgtatccgtcagatcgaagcgaaggcgctgcgtaagctgcgccatccgagccgctctgaagtgctgcgtagcttcctggacgattaa

SEQ ID NO: 115349 - DNA, 507 bp, Enterobacter cloacae
atgatcaacgatattctggcccctggcctgcgggtggtgttctgcggtatcaatccgggtaagtcatcggcgcacaccggttttcactttgctcatccgggaaatcgcttctggaaggtgatccaccaggccggatttaccgacaaacagcttaagccggaagaagagcagcagctgctggatacgcgctgtggcatcaccatgctggtcgagcgacccacggtgcaggcgagcgaagtgaatctgcatgagctgcgcgctggcggacgtgagctgatcgcgaaaattgaagactatcagcccgcggcgctggcgatcctcggcaagcaggcctacgagcaggcgttcagccagcgcggcgccagctggggtaagcagaacattaccattggcgtaacgcaggtgtgggtgctgccgaacccgagtgggctgaacagggcgacgctggacaagctggtggaggcgtatcgggaactggatgaggcgctggtggtgagggggctttag

SEQ ID NO: 115350 - DNA, 1170 bp, Enterobacter cloacae
atgagcacaccgatcaaacggctagaaatcattaaaaatgccattgagctggaagatgacgacatcatccggagccagctgaaacgtctcaaagaggaagcctttgacgatgatctcctgtccatcgtcgcggcgcttgagcagaaaaactacaccgcagcccttcgcgctatcaccgcctggctgcaaagccagcgcgccgttaccccgtggcgtgacccacagctggcggctagcaagctggagctgaaagccctggaagagcgtctgcgcgatctgattgatcgccgtaacgcccgggtacagcagctagatgagttcaacgatctttatttctcccgcctcgggccgttgatgcagcagatcctcgccctgcgtaaaacgctggcggagcttaacctgcgtcgtcagcaggcggagacgcgtcgtcgggaagaggattaccgccgctgccaggactatatggcgcaggccgtagaggttctgacaaagctcacccggcgctggcgagatctgcctgcggattccgttcaggcggcagaggcgcgcaaacatcttcagcagcaaagcaatctgattgccaacctgctggccgaagcaatggagctggagaccggtttaacgcgtgaagaagagccggcacgtcaggcgcgcgatgaggccaacgaagagtacaagaagtatcgcgaacagcatcatgatgccgaagttcgcctgcgtaaaggcaaggatctctcagaagaggatcggaacgagctgaagcggctctggcgtcaggcgagcaagctatgccacccggatctggttgccgatgatttaaaagaggaagccaacaggatgatggtgcaactcaaccaggccaaacagcgcggcgacgtgaaggccattcgctcgctggtcgcccgtctgcaacaaggattcgaaccaatgatggcgagcgacaggctgaacgaccttgaacgtattcgtaaaaagatggcgcaggtgcgtgagcaaatcgacaccctggtgaacgagctggcagagctggagaaggaagagtcctggctgctcgtctcgtcgctcagcaatatggaagcctactttgcccagcaggagaaagcgctgaaagaggtatgcgcctcgctcgaacatcaggtgagcgaagcgcagctggatcccgctgcctga

SEQ ID NO: 115351 - DNA, 765 bp, Enterobacter cloacae
atggcatctacccgttaccctcaacgtgtccgcaatgacctgcgttttcgtgagctgaacgtgctgcgcactgagcgagtcagcgcaggatttcagcgcattgtgctaggcggcgaggcgctggagggctttagctctcgcggctttgacgaccataccaaagtctttttcccggcaccgggcaccactttcgtgccgcctgtggtgaccgatgaaggcatcgactggggcgacggcacgcgtccgcaggcacgtgactataccccgctgtacgatgacgaaaaacatgagctggcgctcgatttcttcgttcatgatggcggcattgccagcaactgggcggtagaggctaaggtgggcgacaagctgaccatcggcgggccgcgcggttcgctggtggtgccggaagattacgcctggcagctgtacgtgtgcgacgagtcggggatgcccgcgctgcgccgccgtttagaaggcatcgcaaaactgcctgttcgcccggcgatccacgccatcgtcaccgtgggcgatgcggcgtatcaggactatctggcacacctgagcgggttcaacatcacctgggttatcggccacaacgagcaggcgatggccgaccatcttgccgcgctggccgtgccggaagaggattactttatctggctgaccggggaggggaaggtggtgaaacgcctgagccgtcagtttgaaagcgacgcaattgacccgcagctggtgcgtgccagcgcgtactggcacgccaaataa

SEQ ID NO: 115352 - DNA, 495 bp, Enterobacter cloacae
atgcgacacgaacacgacggcggcggacgccggccacgattttttggtcatggcgatttgcggctggtgatcctggatatcctgacccgcaacgcgagccatggttacgagctgattaaagagatcgaaaacctgacgcagggacattacacgcctagccctggcgtgatctacccgacgctggattacttgcaggatcaggcgcttatcactattaccgaagaagagaacggccggaagcggattgcgattaatgccgccggacagcaatggctggatgacaaccgggaacagctggagcagatccagacgcgtatcaaggcgcgctccgtcgggttccagctgcgcaaaaacccgcagatgaagcgggcgctggataacttcaaagcggtactggatctgaaggttaatcagggagagctcagcgacgcgcagttgaaacagattatcggcgtgattgaccgcgcggcgctggagatctaccagctggattaa

SEQ ID NO: 115353 - DNA, 1560 bp, Enterobacter cloacae
atgttcatacatgacgtaaagatcggcacgaaattatttctggcgtttggattatttattgtcctgatggtcgtcagcgcaagcttgtctctgatgagcctgaatcgggcaaacaatggaatgcaaaccatccttaccagcgactatccaacgacggtaaaagcgaaccagttaatcgacaacttccaggaatttataagcacgcagcagctcatgctgctggacgaacaggggacgtacacggcgcaatcagagcagcgtctgaaggcgatcagcgagcgcatctcctcaatcctgagcgagctggacaacgctctcaaggataaaaaatcccaacaggtgctggccgatatccacggcgtacgccagcaatatcttgactcgcgctaccgcattttgcaggccgtgcagaataacgaccgtgcgggcgcgataaacgaaatgatgaccaacaccctgaatctgcaacagtcctataaagcgaaagtgcaggcgctgattgcgatccaggaccatgaaatgcagagtgcgggcgagcaggtggaaggcgatttccgcaccaatcgtctcctgctggtcctgattacgcttttcagcgtcgcggcagccagcctgactggctggttcattgtgcgatccattacccgaccgctgaacgacgcggtgaattttgcggaggccattgccgatggcgatctcaccggcagcattatctcgcacggtaaagatgaaaccggactgctactcaccgcactgatggagatgaaaacgcgcctgctggagattgtgcagcaggtgcaaaccggatcggaaaacatctccagcgccgccgcgcagattgtcgcgggaaaccaggatctggctgcccgcacggaggagcaggccagttccgttgaacaaacggccgcgtcgatggagcagatcaccgctacggtgaagaacaccgcgtcccacaccggagaagcgacgaacctgtctgccgatgcggctgccgtggtcaaaaacaacggcgagatgatgaagcaggtcaccagcaagatgcgcctgattaacgaaacatcgaacaggatgtccgacattatcgacctgatcgacgccattgccttccagactaatattctggcgctaaacgcggcggtcgaagcggcgcgcgcgggtgagcatggtcgcggctttgcggtggtggcgggcgaggtacgccagctcgcgcagaaaagtgcaacatctgcgagtgagatccgccagctgattgaaagctccacaagccagacgcaggacggcatgaaccttgtggagaaagccagcgggcttatcaacggcatggtcggcaacgtggaggagatggacgtaatcctgcgtgagattcgccaggccagccatgaacagacggaaggcatctcgcagatcaacagcgcgattggcctgatagacgccaccacccagcagaactccgcgctggtggaggagtccgttgcggcggcggcatcccttaacgaacaggcgatgcacctgaaagagctggtccgggtgttccgcgtgagcgacggcgtgctggcttaa

SEQ ID NO: 115354 - DNA, 1521 bp, Enterobacter cloacae
atgtcctctcctgactatgtcacccagaatgaatatccgctggacgatgacaccacgcttatgtcgaccaccgacctccacagctacatgacccacactaacgacacctttgtgcaagtgagcggctttacgctccaggagctgctcgggcaaccgcacaacattgtgcgtcatccggatatgccgaaagcggcttttgccgacatgtggtacacgctgcaaaagggcgaaccctggagcgggattgtcaaaaaccgacgtaaaaatggcgatcactattgggtacgtgccaatgcggtaccaatggtgcgtaacggccagatgacgggctatatgtccattcgtacccgcgccacgcaggacgaggtcgccgcggtggagccgctttataaggcgctcaacgaaggacgctgcaaaaaacgcattcataaagggctggtggtgcgcaaaggctggctcggcaaactaccggcgatgccgctgcgctggcgcgtgcgtagcgtaatggcggtacttttcgcggtgatggccgcaacgcttgttgccagtgccgcgggctgggcttcgctggtggcggcagccgtggtgatgctgcttggcaccctggtgtttgagcaacagattgtccgcccggtggaaaacgtcgcacggcaggcgctcagggtcgctaccggagagcgtaacagcgtgcagcatcttaaccgcagcgatgaactggggctaacgctgcgggccgtcggacagctggggctgatgtgccgctggctgatcaacgacgtctccagccaggtggtgagcgtgcgcgacggcagcgacaggctggcgcagggcaatgaagatctcaacgaccgcacgcgccagaccgtggctaacgtgcagcagaccgtggcaacaatgaaccagatggcggcgtcggtgcagagtaactctgagaccgcagccgaagtcgacaagctatcgatggccgccagcagcgcggccacgcaggggggcaccgtgatgcagaccgtggtgaaaaccatggatgacattgccgacagtacccagcgcattggctctattacctcgcttatcaatgacatcgccttccagaccaatattctggcgctgaacgctgcggttgaggcggcacgcgcgggcgagcaggggaaaggctttgcggtggtggcgggcgaagtgcgtcatcttgccagccgcagcgcgaacgcggctaacgatattcgcaagctgatcgacgccagcgccagcaaagtgcagtcgggcgccgagcaggtccacgccgcgggacgtactatggatgatattgtcgagcaggtgaaaaacgtcacgcagctcatcgcgcagatcagtcacgccacctcagagcaggcgacaggcctgacagagctgacccgtgctgtggcagagctggacagcattacgcagaaaaatgctgacctggtcgaagagagcgcgcagatttccgcgatggttaagcaccgggccggacgccttgaagatgcggttaccgtgctgcattaa

SEQ ID NO: 115355 - DNA, 1380 bp, Enterobacter cloacae
ttgaacaggttaccttccagcgcctcggctcttgcctgtaccgcgcacgcactgaatctcattgagaagcgaacgcttgatcatgaggagatgaaacaacttaaccgtgaggtcattgattactttaaggagcatgtgaatccaggttttctggagtatcgcaaatctgttaccgccggcggggattacggagccgtagagtggcaagcgggcagtctgaatacgcttgtcgacacccagggacaggagtttatcgattgcctgggtggttttggtattttcaacgtggggcaccgtaatccagttgtggtttccgccgtacagaatcaacttgcgaaacaacctctccatagccaggaactgctcgatccgcttcgcgccatgctcgcgaaaacgctggcagccttaacgcccggtaagctgaaatacagcttcttcagcaacagcggcaccgaatcggtcgaagcggcgattaaactcgccaaagcgtaccagtcgccgcgcgggaaatttacctttatcgccaccagcggcgcgttccacgggaaatccctgggcgctctgtcggcgaccgctaaatctaccttccgcaagccgtttatgccgctgctgccgggcttccgccacgtgccgtttggcgacatcaacgccatgcgcatcgtgatgagtgaatgccgtaaaaccggcgacgacgtggcggcggtgatcctggagccgattcagggtgaaggcggcgtgatcctcccgccgcagggctatctgcccgccgtgcgtcagctgtgcgatgagtttggcgcgctgctgatcttcgacgaagtgcagaccgggatggggcgcaccggcaagatgttcgcctgcgagcacgagaacgttcagccggacattctgtgcctggcgaaagcgctcggtggcggcgtgatgccgattggcgcaacggtcgccactgaggaggtcctctcggtgctgttcgataacccgttcttacataccaccacctttggcggtaacccgctggcctgtgcggcggcgctggccaccatcaacgtgctgctggagcaaaacctgcccgcgcaagcggagcagaaaggcgacatgctgctggacggcttccgtcagttgggccgggaatatccggatctggtacaggatgcgcgcgggaaagggatgctgatggcgattgagttcgttgataacgaaaccggttatagcttcgcaagcgagatgttccgccagcgggtactggtggcgggaacgcttaacaactcgaaaaccatccgcattgagccaccgttgacgcttaccattgagcagtgtgagcaagtgctgaaggcggcgcgtaaagcgctggcggcattacgtattgccgtaacatccgcctga

SEQ ID NO: 115356 - DNA, 543 bp, Enterobacter cloacae
atgaaaaagcaagttatagcaatggctgttgccggcgcgctggctggtggcatggcaattaatgcgcaggccgataccgttaccgtttccggcgggaccgtcaactttgtcggccaggtggtaaacgccgcctgttccgtcgcggctgactccgtagaccagacagttaccctgagccaagtgcgtaccgtcaagctgacaacggtcggcatgcaggccaaccagaaagaagattttaaaatcgttctggaagattgcgacgccaccgttagccagaatgccgccgtgatctttaacggccagcaggaccctgctgtagaaggcagcctggcgaacaccgctggcgcaggctcggccaaaaacgttgcgctgcaactgttcgggccggacggccaggcgctgaacattggcgatacctcctccaacgttaagctgatcaacggcgaaaacatcatcccgctgagcgtggattacgtggccacaggcgcggccgagccgggcaacgtctcctccgtcgcaacgttccagatggtttattcctga

SEQ ID NO: 115357 - DNA, 534 bp, Enterobacter cloacae
atgcagcaatccataaatcgggcgctgctgatagccggcactgcgctttttgccgtattgccagccgcggcaaaggacgatggaagcgtgacctttcagggtcaggtcgtcaatgcggcctgttccgtcagcatggattcccaggatcaaatcgtgcatatgggacaggtacgcaatagccagttcatcgccgccggtgactgggccaaaccggtacccttcttcatcacgctggaagcatgcgacaccagcgtaagccagcgcgccggggtgctgtttagcggcgagtctgacagcaacgatccccaggtttttcgcgcgggctatgggcctggcgccgccaccgggattggtatcggtctattcgatgcgatggggaacctggtaaagccagacaccgcgcccccctggtacagacctttgcaggacggtgaaaaccggctgagctatatcgccaggtatcgcgccaccgaagatagcgtcaacgctggtaccgcgaacgcgcaggtctggttcatcgttttttaccaataa

SEQ ID NO: 115358 - DNA, 711 bp, Enterobacter cloacae
atgcgtatcattacatcacgctgtaaactgacttgtctgatagctggcgcgctaacggctctgttcgctatgggggtggccggttctgccagcgcaggcggtatcgcgctcgggggaacccgggtgatttatcgccagggtgataagcaggcttcattagccattattaactcttcaacgaataccacttttttaattcagagctgggtgtccaatgccgaaggggcaaaatcagcggattttgtcattacgccgccgctgtttgttatccatcctaaaaaagagaataccctgcgtattatgtacgtgggccccgatctgcctgtcgatcgtgaaagcgttttttatctgaacagcaaagccattccttccgtcgagaaaaataagctttccggtaatacgctacaaattgccacccagagcgttattaaactttttatccggccgaaaaaattgccgtcgctctctattgatgcacccaaaacattaacctgctcagtcaccaatggaaaagtcactattaccaatccatcgccttattacgtttcgttggttcagtttttcgtcggcagcacgcaactggcaaataacatggtagcgcccaaaaataacctggtggtggagatccccggtggcggcactggcagcgtgaggtttcagaccgttaatgactttggtgccaacacgcccgttcagtcatgcgcgaaataa

SEQ ID NO: 115359 - DNA, 2625 bp, Enterobacter cloacae
atgaagcgtgttcagccacgaagattttacgcgctcgtcagagcgtcgctaacgccgctggcgttgacgattgcgggactcctttcgtccatcaccgtgcgcgcggagtatttttttaacccggcatttttgtcgagcgatccttccgccgtggcggatctctcccgtttttcaacaaatggccaggcgccgggcgtctatcgcgtggatctctggctgaatggaacatttgtcaccacccgcgatatcaactttatcgccagaaccgtaacggacggagccgtacagggcgacgacacggggctaatggcctgcctgacgcccaaagcgtatgaaaacctgggcgtcaacgttcaggcattcccggcgctggccgccgcgaaagccgacagctgcgtggacattgccgccattattccggccgctgccactctctttaatttcgaacagcagcgtctggaaatcagcattccgcaggccgcattacgcaacaacgcgcgcggctatatcccgccagagcagtgggatgaaggtattaacgctctgctgctgaactataactttagcggctcatacagccgcgatcgcagcgaaaacggcacaacccacaaaagctatttcctcggcctgaacagcggggtgaatcttggtgcgtggcgtctgcgggactactcgacgtggaactactataacagcgacgagaaccgccatagcgaatgggaacatatcaacacctatcttgagcggacggtgattccgctaaagggcagactgacggtgggcgatagctatacctcgtcggaaattttcgacagccttccctttcgcggcgcgcagatcgcctcggacgacaacatgctgccagacagcatgaaaggctttgcgcccaccattcgcgggattgccaaaagcaacgcgcaggtcaccatcaagcagaacggctatagtctttaccagagctacgttccgcccggcgccttcgccattaacgatctcttcccaacctcctccagcggcgacctcacggtggaagtgaaggagacggacggcagtatctcccgctattccgttccttactccgccgtaccgctcctccagcgcgaagggcgggtgaagtatgccctgacggcggcacagtaccgcagcaataacggtcagcaggacgaggtgaattttgcccagggcacgctgatttgggggctaccgcagggcgtaaccgtctatggcggctcacagctttccggcgattatcacgcgctggctcttggcgctggcctcaatatgggcaactttggcgccgtctctctcgacgttacccacgcgcgcagtacgctggccgacgacaccagccatacggggcagtctcttcgtttcctgtatgccaaatccctcaacaagatgggtacgaacttccagctgctgggctaccgctactccacgtccgggttctataacctggatgagacaacctacacacatatgcagggctatacgggcgatgcggagcaggatgacgcgaatgaggccacgaactggctggactactacaacctcaactggactaaacgcggcaagcttcaattcaatatttcgcagcagctaggcaggctcggctcgctgttcgtgaccggaagccagcagagctactggcacacggacgacaaaaacacgctcgtccaggtgggatacagcggtacctgggccgggatctcatacagcctgacctacaactacaacaaatcgccgggcatgtcggatagcgatgagatttatgcgattaacctttccttcccgcttagccagtggctttcacctgccaatgacgtcagccagaagcggaactacgcctatgccacctacggcatgagcgccaataaacatggagaaacatctcagaacgcggggattaacggcacgctgctggcggagaacaaccttaactacagcgtgcaggaaggttatgcccgccagggggctggctcgcaaggttccgccagtctggaatacgatgccgcctacggcaacgccagcctgggctacaactacagcgataacggcgattatcgggaagtaacctacggcctgagcggaggcgtggtagcccaccgcaacggcatcaccttaagccagccactgggtgataccaacgtgctgattgccgtaccgggcgcagcggacgtcagcgtcgagaatgaacccggtatccataccgacggacgcggctatgcggtggtgccttacgcctcggcctaccatctgaacaggatggcgctggacattaactccctctcagacgccatggatatcgatgatgccgtcaccagcgtggtgccgacccacggcgccatcgtgcgcgccacgtttaacgcccgtctgggcgcacgcgcgctggtaacgctgcgctaccacggcaagccggtgccgtttggcgccatggtttcccgcgacgataacggcagcgacaccatcgtaggcgaagaaggcgaaacctacctctccggcctgagccaaaagggagtgttgaaggcgcaatggggagaaggggcggataagcgctgtacggccaactaccacttacctgaaagcaaacagccgctgctgcggatcaccatggagtgttcataa

SEQ ID NO: 115360 - DNA, 1008 bp, Enterobacter cloacae
atgaaattaaggatgatgcttctctctgccgctgggctacttttttcgctgagcagcctggccgcaacgtgcaaaaacgctaacggcggaatttccatggtgaattacgatctgaccaccacgctcaccacggatcaaaacatcaagggcaacggtacagagctgaaccgaacccaggatatccacgtcaacgccacctgtcccccaggcaactgggagaagcgcacctatcgtacctatatctcacctttccccgtggtcaaaacggaaggcgagtggaaatatttacagcttgatccggattatattatcggtgcgatgaaaatccatgatgccaccatcggcgatttttatccgccggtggagtatgtccacatgggggggcacgaagaggtggatacgggcggcgtcttcccggtgaacgacagcaatctgaccttcaaaatacagattgtcaggccgttcatcggctcggtcgtgatcccgccgaaactgatgtttaacgtctatgtcaccacgacggaaaatgaccggcccaccgtaatcgtttatcagatcacctacagcggcgtaataaccgtcccgcaaaactgcgtgattaacgccgggcaaaccgtcaccgtcgattttggggcactctaccacggcgatttcacccaggccggacagcgacccgacagcgtagcgccaaaaacctttaccgtgccgatcgaatgcaacgctgatgtcaactcaccggcgcagctcaccctgcgggtacaggggacggcagacgctcgtttcgccaacgcgctggcgacggataacccggacgtggccgtcgtcgtgaccagcccgcagggcgagatcctgcggccaaacgtgttctcaagcagcgtcccctttaccacggatatgtcaggacgcgcggacgtgacgctgcaagcctaccccatcagcaccaccgggcagtcgccagagctgggcgtcttcagggcgctggcgctgttacgcattgatttcgcctga

SEQ ID NO: 115361 - DNA, 546 bp, Enterobacter cloacae
atgaccatttcatggaaaaacaccgtatggctgagcgtggccctgttaaacccgccgctggtgaaggctgacgacacaagctttaacgtgcagtttatcggcaccatcgttggggaatcctgtaacgtcgatactaacagcgcagagcaaacgatcgacctgggtgaatttacgacagaggaatttccgcgcgtgggcgccacgacaccggaaaagcagtttgccatcacgctcaaaaactgcacccgcgcaatcggcggcacgaccgtctggtttaccggcgacgcggacgccaacgatcccacgctgcttgccctctcagatacgggaaaagggacgcagcacatgatggcgaccggactggcagtcgagctgctcgacagcgcgcgggcgtctgtcccgatcaataataccgagtcgccgctatatcccctgctgccgggcgataacacgctgaccttcttcctgcgctataaatctacgctgccgacggtcaccaccggcaacgccaccgccgtgatgtatttcgatctgctttaccagtaa

SEQ ID NO: 115362 - DNA, 522 bp, Enterobacter cloacae
atgacgatcctgaacaggttatttatctgttgcgcgctgctgttgtcaggcaagacgctcgcccatgacggcacggtctatattaccggcgtggtgaaaggcaaaacctgtattgtctcccccggctcggaacagctggtagtggagatgcatgatgtggcggcccgccagctggccgggcaaaaaaacgaaacgccctatgagccgttcactattaaccttgaagcctgcggcgccgggttatccgccgtcagcacccattttgaaggcacgccggacggtaacaatagcgatctgctggccctgaccggcgggccggactatgcaaccggcgtggctatcggcctctataatcctgataaatcgctgatcgccatgggggatgaaagcctgccgttcgcgctaagcaatgaccagaccaccctggcgctgcatttttacgcccgctacctcgccgtgacgaacgccgttacgccgggggtggctaacgctgccgccacctttgtgctgacctatgcgtga

SEQ ID NO: 115363 - DNA, 717 bp, Enterobacter cloacae
atgcgtgaggccagcctgctgaaaaaagcggggatagccctgctgaccgccgcgtctttctggctcttgcctgctcaggccggggtggtgattggcggcacgcggtttgtttatcctcaggatcagcgcgctatcagcgtcaccgtgcgcaataagtcctcgctgccgtatctgattggcacaaaaatttatcgcggcggccgatggccgggggcgcagcagccccccgaagcggccaccgcgtggtttaccgcgacgccgccactttttgcactccagcccggacgtgagaataagatccgtctgtttcgcgccgatgcgccgcttcctgccgatcgcgaaacgcttttcacgctaagcattgcctccattccggccagccagcgtcacagcgataacgttcagatggcggtacgttccagcatgaagtttatctatcgcccggaggggattcagggcgaaccggcgctggcctatcgtcagctacgctggcagctgaccgccgacgggctgacggttgaaaacccgtcgccttattacgttacgctgtatcagctttccgttaacggaacgcgggtggataacgccggcgttgtcgcccctctgagccagcgacgaacggactggtgtaaagggactgtcaggtgccagctcacctggcagtcgctgagcgacgaggggcggatattgccctcgatcgcccgcacggtgaaataa

SEQ ID NO: 115364 - DNA, 603 bp, Enterobacter cloacae
atgactgataaagtcaatataatgaccgatgcgggcgccgatgtcgcccaggtaagcctggccgtggcgaaccgtatccgcagctggcggaaagagaaaaagctgtcgctggacgagctttcccgccgcgccagcgtcagcaaaggcatgctggtggagatcgaaaaaggggctgccaaccccagcattgccattctgtgcaaactggccgccgcgcttggcgtctcggtggcagatatcgttaacgtctccagcgagccgcaggtacacattattcaggaagaggcgatcccggttctgtggcagggcgcacagggcggttatgccagattgctggcaggcaccgcaggaccggacatgattgagctgtggcagtgggagatgcatcctggagagactttcacctctccgggacatccggcgggaacgtttgagctgctgcacgtgaacgaaggcatattaaccctgacggtggacgagacggtggtacaggttaatgctggcgcgtcggcggtagcgaaaacggaagcggcgcacggctatgccaatgagggagaaaaagtgctgcgctttaccatgacggtagcggagtttcaccgctag

SEQ ID NO: 115365 - DNA, 699 bp, Enterobacter cloacae
atgtctcttctaacaccgtcaatagattcgcgacttgtcgggatcgcgcccggctttcgggcactgagcattctggttgaagctgccccgattacccaaccggaagttgcgcccgctgcgcccgctgcgctggcgcaggcctgccagcagatgctcaatgatgatgtgccctgggcagaaaatcatctcgccgcctgggatgaggtgtttaaaacctttggtgcaaaacccaaacgtacgccctgctcggcctcggccctgcgcaagcgcgtgatgagagacggttcgctgccgccgctcgacccggtggtggatatctataatgccatcagtatccgttacgctattccggtagggggagaaaatctggcggcttactcgggagcgccgcgcctgacgctggccgacggcagcgagccgtttgatacctttaaagaaggtgagccggttgtagaaaatccggagccaggcgaagttatctggcgtgacgatctcggcgtcacctgccgccgctggaactggcgacagggggtacgcacgcgtctggacagccaggcgaaatccatgtggtttattctcgaaagcctgccgtcgatgccgctggcggcattacaggaagctggcgatgagctggtgagcaatctgcaaaagctgatgccgggcgcgacggcgcgtattcagttgctggagctggcgtga

SEQ ID NO: 115366 - DNA, 294 bp, Enterobacter cloacae
atgaacgtgacgctggtggagattaatattaaacccgagcgggtggacgagtttctggaggtatttcgcgccaaccacgagggggccatcaaggagccgggaaacctgcgctttgatgtcttgcaggacccgcgggtgaaaacccgcttctttatctacgaagcctataaagacgaagcggcggtgctggcgcataagcaaacgccacactatctggcgtgcgtggataagcttgaagagctgatgtcagagccgcgcaaaaaacgctgttttgtggggttgttgccggagtag

SEQ ID NO: 115367 - DNA, 888 bp, Enterobacter cloacae
atggctgatttagatgacatcaaagacggcaaggattttggcatcggcacgccgcagcagaatgtgccgtacaccctgaagggctgcggctcgctggactggggaatgcagtcgaggcttgcgcgcatcttcaacccacagagcaaccgcacggtgatgctggcctttgaccacggctactttcaggggccgaccaccggccttgagcgtatcgatctctccatcgcgccgctgtttggtgaaaccgacgtgctgatgtgcacccgcggcatcctcaggagccaggtgccagccgccacgaacaaaccggtggtgctgcgtgcctccggcggtaactcgattctgggcgagctgtccaacgagtgcgtggcggtggcgatggaggacgcgctgcgcctgaacgtctgcgcggtggcggcgcaggtgtatatcggaagcccgtttgagcatcagtcgatcaacaacatcatcaagctggtggatgcgggggcgcgctacggcatgccgacgctggcggtgacgggcgtggggaaagagatggcgcgtgacgcgcgctatttctcgcttgccagccgcatcgccgccgaaatgggagcgcagttcgtcaaaacctactacgtggacgagggctttgaaaaagtgaccgccagctgcccggtgccgattgttatcgccgggggcaaaaagctgccggagcacgaggcgctggagatgtgctggcgggcgattgaccagggcgcatccggcgtggacatggggcgcaacatcttccagtccagcgcgccactcgccatgctgaaggcggtgaagaaagtcgttcacgagaacatgagcgcccgggaggcgttccagttctggcaggaagagaaacagggagaagcaaaatga

SEQ ID NO: 115368 - DNA, 1002 bp, Enterobacter cloacae
atgaaaacaaaactattcgtcctggcaatggccctcagcttcgcttcggcgcaggcggcggaccgcattgcctttatcccgaaactggtaggcgtgggattcttcaccagcggcggcaacggcgcgaaagaggcggggaaagatcttggcgtggacgtgacctacgacggcccgaccgagccgagcgtctccggccaggtgcagctcatcaataatttcgtcaaccagggctataacgccatcatcgtctctgccgtgtcgccggacggtctctgcccggcgctaaagcgcgcgatgcagcgcggcgtgaaggtcctgacctgggactccgacaccaaaccggagtgccgcagcatctacatcaaccagggaacgccggagcagctcggcggcctgctggtggagatggcgggcaaacaggtcaccaaaccgaacgcgaaagtggcgttcttctactccagcccgaccgttaccgaccagaaccagtgggtgaaagaggcaaaggccaaaatcgagaaagatcatcctcagtggcaggtcgtcaccacccagtttggctataacgacgccaccaaatctctgcaaaccgccgaagggatcttaaaagcctatccggatctggatgcgatcatcgccccggacgccaacgccctgccagccgcggcacaggcggcggaaaacctgaaacgggaaggggtggcgattgtcggcttcagcacgccgaacgtgatgcgcccgtacgttgagcgcggcacggtgaaagccttcggcctgtgggatgtggtgcaacagggcaaaattgcggtcaatgtcgccgatcgtttactgaaaaaaggcgatcttaaccctggcgacagcgtcgacgtgaaagatatcgggacgctgaaggtcgagccgaacagcgtgcagggctaccagtatgaggcgaagggcaacggcatcgtgctgctgccggagcgggtggtgttcaccaaagagaacatcaacaaatacgatttctga

SEQ ID NO: 115369 - DNA, 978 bp, Enterobacter cloacae
atgaggcttaactgggaaagcgcgctgctgattttactggtgctggagatcctgctcttcggcgccatcaacccgcgcatgcttgatatcaacatgctgctgttcagcaccagcgactttatctgcattggcatcgtggcgctgccgcttacgctggtgattatcagcggcgggatcgatatttccctcggctcaaccatcggcctgtgcgccatcgcgctgggggtgatgatgcaggcagggtggccgatggcggttgccatccctctgacgctgctgctcggcctgctgtgcgggctggtgaatgcggcgctgatccactacaccggcatcagcccgttggtcattaccctcggcacgctctacctctacggcggcggggcgctgctgctctccggcatggcgggggcgacgggctacgaggggatcggcggcttcccggacagctttaccaccttcactaacctcacggtggtgggcctgccgatcccgctggtgctgttcgcggtgattaccgctttcttctggctgattacccaccgcgggcgctttggtcggcatctgtttttaatcggccagaatccgcgcgcggcgcgctatgcggcgctgtcggtgaacggcatgccgtacgcgctgtacggcctggtgggggtagcctcggcggttgccgcgctgatgatggtttcctatttcggttccgcgcgctcggatctggggcgcgatttactcatgcccgcgctcaccgccgccgtactcggcggggcaaatatctacggcgggtcaggttcggttgtcggtacggcgctggcggcgctgctggtggggtacctgcaacagggtttacagatggtcggcatccccaaccaggtgtcgagcgcgctgtcaggggcgctgctggttgtggtggtgatgggacgttcgctgagtctgcaccgcgaatgggtgcgttctctcttcagaaaactatccggagcgtaa

SEQ ID NO: 115370 - DNA, 1032 bp, Enterobacter cloacae
atgaagatcttactgaaaaaccgcgagctgagcgcgtttctctccattctggcgctgttcgccgtgctggtggcgctgaacccgtcctacctgagcttacagacgctggggatgatcttcgccagctcgcagatcctgatcctgctggctatcggcgcggcgctggtgatgctgacccgcaatattgacgtctccgtcggctccaccgtcgggctttcggcgatcgccgtcggcgtggcgctgaacagcggctacagcctgcccgtttccattctcttcgcgctgtcgattggcgcgctggcgggggcgttcaacggttttctggtggtgggcctgcgcattccggcgattgtcgccaccctcggcacgctggggctgtatcgtggggcgatgctgctgtggaccggcgggaagtggatagaagggctgccgccggggctgaaatctctctctgagcccgccgccgtcggcatttcgccgctcggcatgctggtgttgattatcgcggccatcggcgcgtggacgctgtcgcgcaccgcctttggacgtgatttttacgccgtgggggataacctcgccgccgcgcgccagctgggcgtggcggtgaaccgcacccgcatgatcgcctttaccctcaacggcatgctggcggcctgcgccgggattgtgtttgcctcacagattggcttcgtgccgaaccagaccggcagcgggctggagatgaaggccatcgccgcctgcgtgctcggtggcatctcgctgctgggcggcaccggcacgctggtcggcgccttcctcggcgcgttcttcctcacccaaatcgataccgtgctggtgctgttcaggctcccggcgtggtggaacgactttatcgccgggctggtgctgctgggtgtgctggtgctcgacgggcggctgcgtcaggcgctctcacggcatcagcgggcgctgaaatacagccgtttccagccgggtaacaaagggggaaagcacgttaccccgtttcccaaacgcaaaaaagaggtggcgtaa

SEQ ID NO: 115371 - DNA, 1488 bp, Enterobacter cloacae
atgacaccacttctcgacgcgcgtgatatcagcaagcagttttcaggcgtaccggtcttaaaaggcattgatttcacgctgcttgcggggcaggtgcatgcgctgatgggcggtaacggcgcgggaaaatcgacgctgatgaagatcatcgccggggtagaaaccccggatagcggtgaactttcggtggcgggtgagtcttttgcacggcttaccccggcgcaggcgcacaggttaggcatttatctggtgccgcaggagccgctgctatttcccaacctgacggtgcgggaaaacatcctgtttcgtctgccgcgagagcgcgatcgggaaaaacgcctggcggaaaaactccggcagctgcaatgccagcttaacctcgacgctaccgccagcaccctcgaggtggcggaccagcagatggtggagatcctgcgcgggctgatgcgcaacgccagaattctgatccttgatgaacccacggcctcgctgacgcccggtgaaaccgaacggctgtttcgccagatccgcgccttgcaggatcttggcgtcgggattgtttttatctcgcataagctgccggagattagacagctggcgagtcacgtctcagtgatgcgcgacggcgcggtggtgctcagcggcgaaactgcgcattttgacgataacgccctgatcgccgccatgacgccggtaagccgggagacatccctgagcgatacgcaaaagctgtggctggcgctgccgggcaaccgccgcacccaggcgcaggattttcccgtgctgcgcgtggaagcgctcaccggggagggctttatcgatctcagccttgagatttacgccggggagattgtcggtctggccgggctggtggggtccgggcgcaccgagtttgccgaaacgctctacggcctgcgtccggttcgcggcgggcgggtgtggctggagagccaggagatcaccgccgatccggtcagttcacgcctgcaaaaagggctggtctatctgccggaagacaggcaggtgtccggcctgtttctcgacgcgccgatccgctggaacaccgtggcgctgaacgagccgtcgctctggcagcagcgaaagcgggagtctgcggtagtggaacgctatcaccgggcgctggggatcaagctcaaccatgcggatcaaaccgtgcgcacgctctccggtggtaatcagcagaaggtgctgctggcgcgctgtctggaggccaatccgctgctgctgatcgtcgatgaaccgacgcgcggcgtggacgtatcggcgcgcgctgatatttatcagctgctgaaaagcgtggcggcgcagaacgtggcggtgctgatgatctcaagcgatctcgatgagtttcccggcctcgcggatcgggtgctggtaatgcatcagggcgtgctcagcggcgagctgccgcgccacgccgtcagcctcgaccggatgatggcgctggcgtttggagggcaatcatga

SEQ ID NO: 115372 - DNA, 972 bp, Enterobacter cloacae
atgagcgataaacgcactgcggaagaaggacggtttgccgggctggcactggcggaagaggagctggtggcgcgcgtggcctggtgctactaccacgacgggctgacccagaacgacatcggcgaacggctcgggctgccgcgcctgaagatctcccgcctgctggagaaaggccgtcagtccggggtgatccgcgtgcagatcaactcccgctacgagggctgcctggcgctggaaaccgagctgcaacaacgatttggcctgaagctggtgcgcgtgatgcccgccctgaatacgccgccgatgaacgtgcggctgggcattggcgcggcacagtcgctgatgggcgtactgcaacccggccagctgttagcggtgggcttcggtgaaaccaccatgagcagtctgcaacacttaagcggctttatcagctcgcagcagatccgcctggtgacgctctccggcggcgtcgggccgtatatgaccggtatcggccagctggatgcagcctgtagcgtcagcatgatccccgccccgcttcgcgtgtcatccgctgaagtcgccgggatcttaaagcgcgaaaccagcgtgcgggacgtgatcctcgccgccaccgcggctgacgtggcggtggtcgggattggctcggtaaaccagcgccgtgacgcgacgatactgcgctccggctatatcagcgaaggtgaacagctgatgtacgcccgtaaaggcgcggtgggcgatatccttggctatttccttaatgccgaaggggaatgcgttgaggagctggagatccacaaagaattactgggcgtcacgctcgatgaactggcgcagctgcccaccatcgtaggcgtggccggaggggaagagaaagccgatgcgatttatgccgcactaaaaggtcgccgtattaatggcctggtgacggaagagacgacagcccgcgcggtgctggctctggccggataa

SEQ ID NO: 115373 - DNA, 1596 bp, Enterobacter cloacae
atgagttaccttttagcgttagatgcagggacaggcagcgttcgcgccgtgatttttgatttacagggcaaccagattgccgttggccaggccgagtggaagcacctgagcgtggagaacgtgccgggctcgatggagttcgacctcgacaccaactggcggctggcctgccggtgtattcatcaggcgctggagcgcgcacgcctgagcgcggcggatattcagtccgtcgcctgctgctcgatgcgcgaagggattgtgctgtacgaccgcaacggcgaggctatctgggcctgcgccaacgtcgacgcccgcgccagccgcgaggtggctgaactcaaagagatccacgactaccggtttgaatccgaagtgtatgatgtttccggccagacgcttgccctcagcgccatgccgcgcctgctgtggctggcgcaccatcgtccggatatttatcgtaaagccgccaccatcaccatgatcagcgactggatggcggcgaagctctccggtgagctggcggtcgatccgtccaatgcgggcaccaccggcatgctggatctcttctcccgcgactggcgtccggcgctgctcgacatggccgggctgcgcgccgatatcctctccccggtgaaagagaccggcaccgtgctgggcgctgtcaccaaagaggccgcgcagcagagcggcctgcgcgaaggcacgccggtggtgatgggcggtggcgacgtgcagctgggctgtctggggctgggcgtggtccgcgccggacaaacggcggttctcggcggcaccttctggcagcaggtggtgaatctgccgcaggtgcgcaccgaccctgagatgaacatccgcgtaaacccgcacgtcatccccggcatggcgcaggcggagtcgatcagcttctttaccgggctaaccatgcgctggttccgcgacgccttctgcgccgaagagaagctgattgccgaacgaatgggaatggacacctactccctgctcgaagagatggcgagccgcgtcccggcgggctcccacggcgtaatgccgatcttctccgacgcgatgcattttaagcagtggtatcacgcagcgccgtcgtttattaacctctccatcgacccggaaaagtgcaacaaagcgacgctgttccgcgcgctggaagagaacgcggccatcgtctcggcctgcaacctggcgcagatttcgcgcttctccggcgtgacgtttgagtgcctggtgtttgcgggcggcggggccaaaggcgccctgtggagccagattttaagcgacgttaccgggctgccggtgcgcgtgccggaagtgaaggaagcgacggcgctgggttgcgcgattgcggcaggtgctggcgcggggttgtttgcggatatggattcgacgggcgagcggctggtgaagtggagccgcgagttcacgccgaacccgcagcaccgcgagctgtacgacggcatgatgcaaaaatggcaggcagtgtacgccgaccagctcgggctggtggacagcgggctgaccacgtcgatgtggcaggcgccggggctggtgcgggcatccccctcaccccggccctctccctaa

SEQ ID NO: 115374 - DNA, 2022 bp, Enterobacter cloacae
atgagccgctacccgtcgttattcgcccctctcgatctggggttcaccaccctcaaaaaccgcgtgctgatgggctcgatgcacaccgggctggaggagcgtccggacggggctgaacgtctggcagccttctatgccgagcgcgcgcgccacggggtggcgctgattgtcaccggcggcgtagcccctgccccttccggggtgacgatggagggcggcgcagtgttgaacgatgcgtcacagctgccgcatcaccgcattgtaaccgacgcggtccacagcgagggcggcaaaatcgccctgcaaattctgcatactggacgctacagctatcagccgaacctggttgccccctcggctattcaggcgccgattaaccgctttactccccatgccctcagccacgacgagatcctggccctgattgacgacttcgcccgctgcgcggcgctggcgcgggaagcgggctacgacggggtggaggtgatgggctcggaagggtatctgatcaacgaattcctcgccgcacgcaccaaccagcgcgacgacgaatggggtggcgactatgcccgccggatgcgttttgccgtggaggtggtgcgtgcggtgcgtgaacgtgcgggtgcggattttattatcatcttccgcctgtcgatgcttgacctggtggagggcggcggcaccttcgacgaaaccgtgcagctggcgcaggcgattgaagccgctggcgccaccatcatcaacaccgggattggctggcacgaagcgcgcatcccgaccatcgctacgccggtgccgcgcgcggcgttcagctgggtaacgcgcaagctgaaaggcatagtctccgttccactggtcaccaccaaccgcattaacgatccgcaggtggcggaggatgtgatctcacgcggcgatgccgatatggtatcgatggcgcgcccgttcctcgcggatgccgaactgctctccaaagcgcaaagcggccgtgcggacgagattaatacctgcattggctgcaaccaggcgtgtctggatcagatcttcgtcggcaaggtcacctcctgcctcgttaacccccgcgcctgccatgaaaccaaaatgccgatcgttcctgcggtcaacaagaagcgtctggccgtggtgggtgcagggccggcgggcctggcgtttgcagtcaatgccgcctcgcgcgggcacagcgtgacgctgtttgatgcgctggcggaaatcggcgggcagtttactatcgccagacagatccccggcaaagaggagttctacgaaacgctgcgctattaccgccggatgatcgaggtgacgggcgtcgatctgcggcttaaacagtttgtcagcgcggcggatctgatcggtttcgacgaggtgatcctcgcgagtgggatcgccccgcgcacgcctgcgatcgaaggcatcgatcatccgaaggtattgagctatctggatgtattaagggacaaagcgccggttggcgagaaggtggcgatcatcggctgcggcgggatcggttttgataccgcgatgtatttaagccagccgggcgaagccaccagccagaacatcgctgagttctgcgtggaatggggcattgataccagcctcagtcagtccggtggtttacgcccggaaggtccgcagctgccgaaaagcccgcgtcagattgtgatgctccagcgtaaagccagcaagccgggtgaaggtctgggaaaaaccacgggctggatccaccgcgccaccctgctctcacgcggggtgaagatgatcccgggggtgagctaccagaagatcgacgacgacgggctgcacgtgctgatcggcggcgaaccgcaactgctgcgcgtggatcatgtgattttgtgcgccgggcaggagccgaagcgggatctggcggatccgctgcgtgaggcgggaaaaacggtgcatttgatcggcgggtgcgatgtggcgatggagctggatgcgcggcgggcaattgcgcaggggacgaagttagctctggcgatctag

SEQ ID NO: 115375 - DNA, 1149 bp, Enterobacter cloacae
atgagccacttagacaacggtttccgttcactcaaccttaaacgtttcccggaaacggacgacgttaacccgcttcaggcgtgggaagcggcggatgaatatctgctgcaacagttggatgggactgaaatcagcggcccggttctgatcctgaatgacgcgtttggcgcgctggcctgcgcgctggcctgcgcgctggcggaacatgcgccttacagtatcggcgattcttacttaagcgagctggcgacgcgtgaaaacctgcgtcacaacgatatcgaagaatccagcgtgaagttcctcgacagcaccgcggactacccgcaggcgccgggcgtggtgctgattaaagtgcccaaaaccatggcgctgctggagcagcagcttcgcgcgctgcgtaaggtcgtgacgccggatacgcgtattatcgcgggtgccaaagcgcgcgatattcacacctcgacgctggaattgttcgagaaagtgctcggcccgaccaccacgacgcttgcctggaaaaaagcgcgcctgatcaactgtaccttcagcgcaccggcgctggccgacgcgccggagacgctgagctggaagctggaaggcaccgactggaccatccacaaccacgcgaacgttttctcccgtaccggtctggatatcggcgcacgcttctttatggaacatctgccggaaaacctggaaggggaaatcgttgatctcggctgcggtaatggcgtgattggcctgacgctgctggcgaagaacccggaggccagcgtggtgttcagcgacgaatcgccgatggcggtggcctccagccgtctgaacgtggaaaccaacctgccggaggcactggatcgctgcgagtttatgatcaataacgcgctgtcgggcgtagagcctttccgcttcaacgcggtattctgtaacccgccattccaccagaagcacgccctgacggataacgtcgcgtgggagatgttccaccacgcgcgccgctgcctgaaaatcaacggcgagctgtatatcgtggccaaccgccacctggactacttccacaagctgaagaagattttcggcaactgcgtcaccattgccaccaataacaaattcgtggtgctgaaatcggtgaagctggggcgtcgtcggtaa

SEQ ID NO: 115376 - DNA, 504 bp, Enterobacter cloacae
atgaaccagctgacttatctccaggactatccggagcatttactttcccaggttcgtgacctgattgccgcgggaaagctcggcgcggtgctggaaaaacgctacccgggcacgcatgatttcgcgactgacaaagccctctggcagtatacgcaggatctgaaaaaccagtatcttaagagcgccccgccgatcaacaaggtgatgtacgacaataagatccacgtgctgaaaaacgcgctcggcctgcataccgccatctcccgcgtacagggcggcaagctgaaggccaaagcggagatccgcgtcgcgaccgtctttcgcaatgcgccggaagcctttctgcggatgatcgtggtgcacgagctggcgcacctgaaagagaaagagcacgacaaagcgttctactccctgtgctgccatatggagccgcagtaccaccagctggagtttgatacccgtttgtggctgacgcatttatcgttaaagagtaatgcgcagtag

SEQ ID NO: 115377 - DNA, 999 bp, Enterobacter cloacae
atgatacgtttcgcagtcatcggtacgaactggatcacgcgccagttcgtcgacgccgcccacgaaaccggcaaatataagctcaccgcagtctattcccgcagccttgagcaggcgcagagttttgcgaatgactacctggttgaacatctgttcacctcgctcgatgagatggcgcaaagcgacgccattgacgcggtctatatcgccagcccgaattctctgcacttcccgcaaacgaagctgttcctcagccacaaaaagcatgtgatctgcgagaagccgctcgcctcgaatattgaggaagtggaagccgccattgcgcttgcccgcgaaaaccaggtggtactgtttgaagcgttcaaaaccgccagcctgccgaacttcctgctgttgcagcaatcgctgccgaaaattggcaaagtgcgtaaagcctttatcaactactgccagtattcctcgcgctaccagcgctacctggacggcgaaaacccgaacacctttaacccggcattctcgaatggctcgattatggatatcggtttttactgcctggcctctgcggtcgccctgtggggtgaaccgcacggcgtaaccgccaccgccagcctgctggaaagcggcgtggatgcacacggcgttgtggtgctggactacggtgattttagcgtgacgttgcagcactcgaaggtcagtgactccgtactgccaagcgaaattcagggcgaagacggctcgctggtgatcgaaaaaatctccgaatgccagaagctaagcatcgttccccgcggcggcaaagcgcaggagctgacgcagcctcagcatattaacactatgctctatgaggcagaggtcttcgcccgtctggtagaagacaacgaagtgaaccacccggggctggcgatcagccgcaccacggcgaagctgcaaacggagatccgccgacagactggcgtgatcttccccgcagacggcgtgaatgtggaagccgtcgcgtaa

SEQ ID NO: 115378 - DNA, 966 bp, Enterobacter cloacae
atgcattctgtcggcactccaatgctgtggggcggattcgcggttgtcgtgctcatcatgctggcaatcgacctctttttgcagggtcgtcgcggcgagcacggcatgagcgtcaagcacgccgccgtctggtcgctggtatgggttaccctctcactcctcttctgcgccgccttctggtggtatctggcctcaaccgaaggccgcgcggtggccgatcctcaggcactcgccttcctcaccggctatctgattgaaaaagcgctggcggttgataacgtcttcgtctggctgatgctgttcagctacttcgccgtgcctgcggctctgcaacgtcgcgtgctggtgtacggcgtgctgggcgctattgtcctgcgtaccatcatgatcttcgccggtagctggctgattacccagttcgaatggctgctgtatgtatttggcgcgttcctgctgttcaccggggtaaaaatggcgctggcgaaagaagacgataccgggatcggtgataagccgctggtgaagtggatccggggtcatctgcgcatgacggacaagatcgagagcgagcatttcttcgtgcgtaagaacggcctgctgttcgccaccccgctgctgctggtgctgattctggtcgaactgagcgacgtgattttcgcggtggacagtatcccggctatcttcgcggtcactaccgacccgttcatcgtgctgacctcaaacctgttcgccatcctcggcctgcgtgcgatgtacttcctgctggcgggtgcggcagagcgcttctcaatgctgaagtacggtctgtcggtgattctggtgtttatcggtatcaagatgctgatcgtcgatttctaccatattccgatcgccatttcgctcggcgtggtgtttggcattctgctggtgacgctgattatcaatacctgggttaaccgccagcacgataagaagcagcaggcttag

SEQ ID NO: 115379 - DNA, 1242 bp, Enterobacter cloacae
atgagcacacaatcacgcggtctgttcgcgcgcctggcgcagggcagtcttgtaaaacaaattctggtcgggttggtactgggtattctgctggcgatggtgtcaaaacctgccgcggaagcgacggggctgctcggcacccttttcgttggcgcacttaaggccgtcgccccggtactggtgctgatgctggtgatggcgtcgattgccaaccaccagcacggacaaaaaaccaacattcgccctattctgttcctgtatctgctgggaaccttctctgctgccttaacggccgtggtgtttagcttcctgttcccgtccacgctgcacctgaccagcgcggccggtgatatcaccccgccgtccgggattgtggaagtgcttcgcggtctgctgatgagcatggtctctaaccccgtcaccgcgctgatgaacgcgaactacatcggcatcctggtctgggcgatcggtctgggcttcgcgctgcgtcatggtaacgagaccacgaaaaacctggtgaacgatatgtccaacgctgtcacctttatggtgaagctggtgattcgctttgcgccagtcgggatctttggtctggtctcctccacgctggcaaccaccggtttcgatgcactgtggggctacgcgcagctgctggtcgtcctggtcggctgtatgctgctggtggcgctggtgatcaacccgctgctggtgttctggcagatccgccgcaacccgtatccgctggtgctgacctgcctgcgtgaaagcggcgtgtatgccttcttcacccgcagctcggcggcaaacattccggtcaacatggcgctggcggagaagctgaatctggatcgcgatacctattcggtgtcgattcctctgggtgcaaccgtgaacatggcaggtgcggcgatcaccatcaccgtgctgacgctggcggcggtgcatacgctgggcattccggtggatctgccaaccgcgctgctgctgagcgtcgttgcatcactgtgtgcctgtggcgcatccggcgtggcgggcggctcgctgctgctgatcccgctggcctgtaacatgttcggtattccgaacgagattgccatgcaggttgtcgcggtcggcttcattatcggcgtattgcaggattcctgcgaaaccgcgctgaactcctctaccgacgtgctgtttaccgcagcggcctgtcaggcggaagacgcgcgtttagcgaagaacgccctgcgcagttaa

SEQ ID NO: 115380 - DNA, 1488 bp, Enterobacter cloacae
atgcaatacatcaaaatccattcgctggataacgttgccgtcgcgctggccgatttagccgaagggacggaagtgaccttcgacaaccagtcggtgacgttacgccaggccattggacgtggacataagtttgccctgatccccatcgcgaaaggggagaacgtggtgaagtacggtttgcccatcggtcatgcgctggcggatattgcgccgggtgaatacattcattcccacaatacccgcaccaatctcagcgatctggacgagtacagctatcaacctgacttccaggcagaagaaggacaggcggccgatcgtgaggtgcagatctaccgccgcgccagcggggaggtggggatccgcaatgaactgtggatcctcccgaccgtcggctgcgtgaacgggatcgcgcgtcaaattcagacgcgtttcctgaaagagaccaacaatgctgaaggcaccgacggcgtgcatctgttcagccatacctacggttgttcccagctgggcgacgaccacatcaatacccgcaccatgctgcaaaatatggtgcgtcacccgaacgcgggggcggtgctggtgattggcctcggttgtgaaaacaatcaggtcgacgccttccgcgacacgctgggcgagttcgatcctgagcgcgtgcactttatggtgtgtcagcaccaggacgacgaagtggaagcgggcgttgaacagctgcaccagctgtatgaggtgatgcgtcacgacaagcgcgagccgggcaagctgagcgaactgaagtttggcctggagtgcggcggatctgacgggctttccggcattaccgctaacccgatgctgggccgcttctcagattacgtgattgccaacggtggcaccacggtgctgaccgaagtgccggagatgttcggcgcagagcgcattctgatgagccactgccgcgacgaagagacctttgagaagaccgtcaccatggtcaacgatttcaaacagtacttcatcgcccataaccagccgatttatgagaacccgtcgccgggaaacaaggcgggcgggatcaccacgctggaagagaaatccctgggctgcacccagaaagcgggcgccagccaggtggtggacgtgctgcgctatggtgagcgtctgaaaacgcacggtctgaatctgctgagcgcaccgggcaacgatgcggtcgccaccagcgcgctggcgggggcgggctgtcacatggtgctgttcagtaccggacgcggcacgccgtacggcggatttgtgccaacggtgaaaatcgccactaacagcgagctggcggcgaagaaaaaacactggatcgactttgatgccggccagctgatccacggcaaagcgatgccgcagctgctgagcgaattcgtggacacgattgtggaatttgccagcggcaggcagacctgcaacgagaagaacgacttccgcgagctggcgatctttaagagtggtgtgacgctataa

SEQ ID NO: 115381 - DNA, 1413 bp, Enterobacter cloacae
atgacaccgtttatgaccgacgattttctgctagataccgaatttgctcgccgcctgtaccacgactacgcaaaagaccagccgattttcgactaccactgccatttaccgccgcagcaggttgccgaaaattaccgtttcaaaaacctgtatgatatctggctgaagggtgaccactataagtggcgcgcaatgcgcaccaacggcgtggccgagcgcctgtgtaccggcgacgcgaccgatcgcgagaagtttgacgcctgggccgctaccgttcctcacaccatcggtaacccgttataccactggacgcacctcgaactgcgtcgtccgtttggtatcaccggcaagctgctttctcccgccacggcggatgaaatctgggatcagtgcaacgaactgctggcgcaggatagcttctcggcgcgcggcatcatgaagcagatgaacgtgaagatggtgggcaccaccgacgatccggtcgactctctggagcatcacgcggttgtcgcgaaggacagcacctttgacatcaaagtgctgccaagctggcgcccggataaagccttcaacatcgagctgccgacatttaacgactacatggcgaagctggcggaagtttcggataccgacattcgtcgctttgacgatctgcaaaccgcgctgaccaaacgtctggatcactttgccgcacacggctgtaaagtgtctgaccacgcgctggacgtagtgctgttcgcggaatccagtgaagctgagctggacagtattctggcgcgtcgtctctccggcgaagccctgagcgagcacgaagtggcgcagtttaaaaccgcggtgctggtgttcctcggtgcggaatatgcccgtcgcggctgggttcagcagtatcacatcggcgcgctgcgtaataacaaccagcgtcagttcaaactgctgggcgcggacgtaggctttgactccatcaacgaccgtccgatggcggaagagctgtcaaaactgctgagcaaacagaacgagcaaaacctgctgccaaaaaccattctgtactgcctgaacccgcgcgataacgaagtgctgggcactatgatcggcaacttccagggcgaagggatgccgggcaagatgcagttcggttccggctggtggtttaacgatcagaaagacggcatggagcgtcagatgacgcagctggcgcagctcggcctgctgagccgcttcgttggcatgctgaccgacagccgcagtttcctctcctatacccgccatgaatatttccgccgcattctgtgccagatgattggccgctgggtgcacgcgggcgaagcgccagcggatatccagctgctgggcgaaatggtgagaaacatctgctttaacaatgcgcgtgactacttcgccattgaactgaactaa

SEQ ID NO: 115382 - DNA, 1299 bp, Enterobacter cloacae
atgcgtaaaattaaagggttacgttggtacatgatcgcactggtgacgctcggcaccgtgctgggctacctgacacgtaacaccgtggcagcagcggcgccaacgttgatggaagagttacatatctccacgcagcaatactcttacatcattgcggcttactctgccgcttacaccgtaatgcagcctgttgcaggttatgttcttgatattctgggtacaaaaattggttatgccttcttcgctgtagcctgggccgtcttctgtggggcgaccgcgctggccggcagttggggcggactggcgctggcgcgtggtgcggtaggtgctgccgaagcagcgatgatccccgcgggtctgaaagccagctctgaatggttcccggcaaaagagcgttcaatcgctgtcggttacttcaacgtgggctcctccatcggggcgatgattgctccgccactggtggtgtgggcgattgtgatgcacagctggcagatggcgttcatcatctccggtgtgctgagctttgcctgggccatggcgtggctgatcttctataaacacccacgcgatcagaaaaagctgtctgacgaagaacgtgactacattatcaatggtcaggaatctcagcatcagaccgacaacggcaaaaagatgtccgtctggcagatcctgggcacccgtcagttctggggtatcgccctgccacgcttcctggcagaaccggcctggggtacgtttaacgcctggatcccgctgttcatgtttaaagtttacggctttaacctgaaagagatcgcgatgttcgcctggatgccaatgctgtttgcagacctgggctgtatcgtcggcggctacctgccaccgctgttccagcgctggtttggcgtgaacctgattgtgtcccgtaagatggtggtcaccatgggcgccctgctgatgatcggcccgggcatgatcggcctgttcaccagcccttacgtggctatcgccctgctgtgtatcgggggctttgctcaccagtctctgtccggtgcgctgattacgctctcgtccgacgtgtttggtcgtaacgaagtcgctaccgccaacggcctgaccgggatggccgcctggaccgcaagtaccctgtttgcgctggtggtcggcgcgctggcagatacgattggtttcagcccgctgttcgcggtactggctatcttcgacctgatgggtgcggtggttatctggacggtgctgaagagcaaatccgccgatgaactggcgaaagagtcccttgggggaccggcgacgcagagttag

SEQ ID NO: 115383 - DNA, 777 bp, Enterobacter cloacae
atggaaatcaccgaatcacgtcgtttatatcaacaacttgccgccgagctgaaagatcgcatcgagcaaggggtctatcttgtcggtgataaacttcccgctgagcgtttcattgcggatgaaaaaagcgtcagccgcacggtggtccgcgaagccatcatcatgctggaagtggaagggtatgttgaggtacgcaaaggttccggcattcatgtgatttccagccaggcgaaacactcccccaccccggacgaaagtctggagtttgccagctacggtccgtttgagcttctccaggctcgccagctgattgaaagcaacattgcggaatttgctgcgacgcaggtgaccaagcaggacatcatgaagctgatggaaatccaggatcatgcgcgtaaagaaaaatgtttccgcgattccgaatgggacctgcaattccacgtccaggtcgcccttgcgactcagaacacggcgctggcggcaatcgttgaaaaaatgtggactcagcgcgttcacaacccgtactggaagaaattgcacgatcacattgattcccgtacggtagataactggtgtgacgaccacgaccagattcttaaggctctgattcgtaaagatccgcatgcggcgaaactggcaatgtggcagcacctggagaacaccaaacagatgctgtttaatgaaacaagtgatgactttgaatttaacgctgaccgctatctttttgccgataatccggtcgttcacctcgataccgcgaccaatctcgcaaaataa

SEQ ID NO: 115384 - DNA, 663 bp, Enterobacter cloacae
atggaacttttgacccaactactgaacgccctctgggctcaggatttcgaaacgctggccaacccgtccatgattggcatgctctactttgtgttatttatgatcctgttccttgagaacggtctgctgcctgctgcctttttacccggcgacagcctgctggtgctggtcggggtgctctgtgcaaaaggggcgatggctttcccgcaaacggtcctgcttttgaccattgccgccagcctgggctgctgggtgagttacattcaggggcgatggctgggtaacacgcgaatcgttcagaactggctttcgcaccttccggcccattaccaccagcgagcgcaccaccttttccataagcatgggctttccgccttactaatcggccgctttatcgcattcgtacgcaccctgctgcccaccattgcgggcttgtccggcctgagcagtacgcgcttccagttctttaactggatgagcggcttgctgtgggtgctgatcctgaccacgctcggctacgcgctgggtaaaacgccggtctttatgaaatatgaagatcagctgatgtcttgcctgatgctgctgcccgtcgttctgctggtgtttggcctggtcgggtccctggtcgtactgtggaagaagaaatacggagccaggggttaa

SEQ ID NO: 115385 - DNA, 384 bp, Enterobacter cloacae
atggttatctccccgctcgcgctgcgccgcttctcttacgctatcgtcgcgctgatgatgttcagcgctcttatcctgctgtggtctgcgctacagcatcaggagtcgacgctggctatccgtcctgtgagccagggaaccagcgtgccggatggtttttccatctggcatcatctggacgcaaacgggatccgctttaagagcatcacgccgcaagacgatgtgctgctgataaaatttgactccagtgcgcaaagcgccgcggcgaaagccgtgctggaccgcacgctgccgcagggttacatcattgcgcaacaggatgatgacagccacgtagcctcctggatgtcacggttacgcgacacgtcgcatcgatttggttaa

SEQ ID NO: 115386 - DNA, 369 bp, Enterobacter cloacae
atgaaataccgcatcactctggctctggcccttttttctttaagcacagcttccttcgctatgtctctttgtcaggagaaagaacaggatatccaacgcgaaatcagttatgccgaaaagcataacaatcagcaccggatcgacgggctgaaaaaagcgttgagcgaagtgaaagacaactgtacggacagcaagctgcgtgccgatcatcaggaaaaaatcgctcaacagaaggacgagatagccgagcgccgtcaagacctacaggaagcgaaagagaaaggtgatgcggaaaaaattgccaagcgcgagaggaagttgcaagaggcgcaggacgaactgaaagcgctggaagctcgcgattattga

SEQ ID NO: 115387 - DNA, 306 bp, Enterobacter cloacae
atgtcaaaagatacaacttcagaaaatctgcgcgctgaactgaaatccctggcggacaccctggaagaggtgctgaactcttctgcggataaatcgaaagaagaagtaagtaaactgcgcagcaaagcggagcaggcactgaaagagagccgttaccgtctgggcgaaaccggtgatgcgctggcgaaacaaacccgcgaagcggcagcgcgcgcagacgaatatgtacgtgataatccatggacgggtgtaggtattggcgccgcagtgggtgtggtgctgggtgtcctgctgacgcgtcgttga

SEQ ID NO: 115388 - DNA, 399 bp, Enterobacter cloacae
atggaagatccacgtcacgcacaagggcctgctaaaaacgtcctcggcatcggccagcgtattcttacgacgctggtcgggattgccgaaacgcgcgtccggcttgcggtagtggagctggaagaggagaaagccaacctcttccagatgctgctcatgcttgggcttacgatgctctttgccgcgtttggtctgatgagcctgatggtgttaatcatctgggctatcgatccacagtatcgtctgaacgcgatgattgcgactaccgtggttctgctggtggcggcgctgataggcggtatctggaccctgcataaagcgcgcacgtcgaccttcctgcgccatacgcgccaggagctggccaacgaccgcgccctgctggaggatgataagtcgtga

SEQ ID NO: 115389 - DNA, 297 bp, Enterobacter cloacae
gtgagcgacaaagccgaacgtcaaaagcggaaagcgtatctgttgagccaaatccagcagcagcggctggatttgtctgccagccgtcgagactgggttgaagccacgcatcggtttgaccgcggttggaacacggtcctgagcctgcgctcatgggcgctggtcggcagcagcgtgatggcgatctggtcggttcggcatcctaacatgctgatccgctgggcacgccgcggctttggcgcctggagcgcctggcgtctggtgaaaaccacgctgcgacagcagcagttgcgctag

SEQ ID NO: 115390 - DNA, 393 bp, Enterobacter cloacae
atgaaaaaattagaagatgttggtgtactgatagcgcgtattctgatgcctgttctgttcatcaccgcaggctggggcaaaattaccggctatgcgggcactcagcagtatatggaagcgatgggcgtgccggggttcctgctgccactgaccattctgcttgagttcggcggcggcctggcagtgctgttcggtttcctgacccgcactacggcgctgttcaccgcaggctttaccctgctgaccgcgttcatcttccacagcaactttgcggaaggcgtgaactccctgatgttcatgaaaaacctgaccatcgcgggcggcttcctgctgctggctatcacgggtccgggcgcctacagcatcgaccgtcttctgaataagaagtggtaa

SEQ ID NO: 115391 - DNA, 987 bp, Enterobacter cloacae
atgggacaactcgtagacggcgtctggcaggatgtctggtatgacaccaaatccaccggtggacgctttaagcgctctgtttcggccttccgtaactggctgaccgccgacggcgcacccggcccgagtggcgaagggggctttgcggcggaaaaagatcgttatcatctgtatgtttctctcgcctgtccgtgggcgcaccgcacgctgattgtgcgcaaacttaaaggtctcgaatcgttaattccggtttcggtggtcaacccgctgatgctggaaaacggctggacgttcgacagtggcttcccggccgcgacgggtgatgagctttatcatcacgatttcctgtatcagctctatctgcgcgccgatccgcactacaccggacgcgtaacggtgcctgtgctgtgggacaagaaaaaccagacgatcgtcagcaatgaatccgctgaaatcattcgcatgttcaataccgcgtttgacgctcacggtgcacgcgccggggattactacccggttgagctgcgcgagaaaattgacgagctgaacggctggatctacgacaacgtcaacaacggcgtctacaaagcgggctttgccaccagtcaggaagcgtacgacgaagcggtcggcaacgtgtttggatccctggagcgcctggagcagatcctcggccagcatcgttatttagcgggcgatcgcctcaccgaagcagacatccgcctgtggacgacgctgatccgctttgatccggtatatgtcacccacttcaagtgcgacaagcatcgcatcagtgattacctgaacctgcacggtttcctgcgcgacatctatcagatgccggggattgcggagacggtcaattttgaccatattcgcacccactatttccgcagtcataagaccatcaacccaacgggcattatctccattggcccgtggcaggacctggatgaaccgcacgggcgcgacgtgcgtttcggataa

SEQ ID NO: 115392 - DNA, 366 bp, Enterobacter cloacae
atggactggtatttaaaagtactgcgcaactacgttggatttggtggccgtgcccgccgtaaagagtactggatgttcgttctggtgaacttcgtcctgattatggtgctgggcattgtggacaagatcctcggctgggaacgcgaggggggtgaaggcattctcaccaccatttatggtgtgttagttctgctgccttcatgggccgtactgtttcgtcgtcttcacgacaccgatcgttcggcgtggtggctgctgttgctgttgatcccgcttatcggctggatcgtgattttgattttcaactgtcagagcggaacgccgggcgaaaaccgctttggtccggatcctaaggcaagcgcgtaa

SEQ ID NO: 115393 - DNA, 903 bp, Enterobacter cloacae
atggctaaagagagagcattgacgcttgaggcgcttcgcgtcatggacgcgattgacaggcgcggcagttttgccgcggcggcagatgaactggggcgcgttccgtctgccctgagctataccatgcaaaagctggaagaggagctggatgttgtgctctttgaccgttccggtcatcgaacaaaattcaccaacgttgggcggatgctgctggagcgcggccgcgtattgctggaagcggcggataagctgacgacggatgccgaagcgctggcccgcggctgggaaacccatctgacgctggtgaccgaagcgctggtgcccaccgaggcgctgttcccgctggtggacagactggccgcgaaagccaatacccagctgtcgatcatcactgaggtgctggccggggcgtgggagcgtcttgagacgggcagggcggatatcgtgattgcgccggacatgcatttccgctcatcgtcagaaatcaattcgcgcaaactgtacagcgtgatgaacgtctacgtcgcagccccggatcaccctatccatcaggagccggagccgctctctgaggtcacgcgcgtgaaataccgcggtgtggcggtcgcggataccgcccgagagcgcccggtgttaacggtacagttgctggataaacagccgcgactgacggtaacgtcgctggaagataagcgacaggcactcctggcggggctgggcgtggcgactatgccgtatccgtttgtcgaaaaggacattgcagaagggcggctgcgcgtcgtcagcccggaatacaccagcgaagtggatatcattatggcgtggcgtcgcgacagcatgggcgaagccaaatcgtggtgtttgcgtgaaattcccaagctctttgcccaccacaacaaataa

SEQ ID NO: 115394 - DNA, 702 bp, Enterobacter cloacae
atgattacgacaagaacagcgaaacagtgcggacaagccgatttcggttggttgcaggcccgctacaccttttcctttggacactactttgaccctaaactcctcggttacgcttcactgcgcgtattgaatcaggaagtgctcgccccgggcgcgtccttccagccgcgcacgtaccctaaagtcgatatcctgaacctgatcctggaaggcgaggcagaataccgcgatagcgagggcaatcatgtccaggcgaaggctggcgaggcgctgttaatttccacgcagccaggtattagctacagcgagcataacctcagcaaagataaaacgctgacccgcatgcagctgtggctggatgcctgtccggagcgggaaaatccgctggtgcaaaaaatcgatctgaagggcggtaaacagcagctgattgcctcgccagacggcagcaaaggcagcttgcagttgcgccagcaggtgtggttgcaccatatcgaactgaaaaaaggtgaacaggcgagcttccagcttcatggcccgcgtgcctatttgcagtccattcacggaacggtgcatgcggtcacgcatacggaagagaaagaagcgctcacctgcggtgacggggcgtttattcgtgacgaagcgaatatcaccctggttgccgatacgccgctgcgcgcgctgctgattgatttgccggtttaa

SEQ ID NO: 115395 - DNA, 1305 bp, Enterobacter cloacae
atgtctgagcaaattaatcctttatggaaccattttattcgcgctgtgcaggaagaggtaaagcctgcgctgggctgtaccgaacccgtctcgctggcgctggcgtgcgcgatggctgccggacagcttgacggtgaggtgacgcgtatcgaggcgtgggtatcgccgaacctgatgaaaaacgggcttggcgtaacggtgcccggcaccggtatggtcggtttacccatcgcggccgcgctgggggcgacaggcggtaatgcacacgccgggctggaggtgttgaaagacgcgtcggccgaggcgctaacgcgcgccaaagcactgctgaacgcaggtctggtgcaggtgaaattgcaggagccgtgcgaggagatcctctactcacgcgcctgcgtttacgtcggtgaatcctcggcgatggtgaccatcgctggcgggcacactcgcgtggtggaggtagtttgtcagggcgaaacgcgcttcaggcttgacgatcgtcagagccagaacaacgacgatccgctggcggtactctcgaccaccacgctgtcgcagatccttgagtttgtagagcaggtgccgtttgacgcgatccgctttatcctcgatgcggggcggctgaacgatgcgctctcccgcgaaggtttgcgtggcaactgggggctgcatattggcgcgacgctcaataaacagcgcgcacgcggctggatggcgcaggatctgggttcagacattattatccgcaccagcgcagcctcggatgcccgcatgggaggcgcgacgctgccggcgatgagcaactcgggttccgggaatcagggcatcaccgccaccatgccggtagtggtggtggctgagcacgttcaggccgatgacgaacggctggcgcgggcgctgatgctctcgcatctgtcggctatctatatccactaccagcttccgcgcttgtccgcgttgtgcgcggcgacaacggccggaatgggggcagcggcgggtatggcgtggctgatgggcggatcttaccagaccattgccatggcgatcggcagtatgatcggcgacgtgagcgggatgatctgcgatggggcctctaacagctgcgcaatgaaggtctcgaccagcgtcaccagcgcctggaaagccgtgatgatggcgctggatgatactgcggtgacgggtaacgaggggattgtggcgcacgacgtggaacagtctatctctaacctgtgcgccctggcgtgccgctcaatgcaggcgacggaccggcagatcattgagattatggcgagtaaggtgttgtga

SEQ ID NO: 115396 - DNA, 1332 bp, Enterobacter cloacae
atgaatatggcaacaaacagcagtgtgattgtgagtgattcccctgcggcaaggcgggcgggaatgagcgaaagcgaatggcgagaggcgatcaaattcgacagcaccgatacgggctgggtcatcatgagtatcgggatggctatcggcgcgggtatcgtttttcttccggtgcaggtcgggttaatggggctgtgggtgtttttactctcgtcgataattggttatccggctatgtacctgttccagcgcctgtttattaatacgctggcggaatcaccggaatgcaaagattacccgagcgtcattagcggttatttaggtaaaaactggggcatcttattgggtgcgctttattttgtgatgctggtgatctggatgtttgtctattccacggctatcaccaacgacagcgcatcctacctacacaccttcggcgtaaccgacggtttgctgtcggaaaatccgttctacggcttattcctgatctgcattctggtcgccatttcgtcgcgcggtgaaaaactgctgtttaaagtctccagcctgatggtgctgaccaaattatttgtggtggcggcgctggggctttcgatgattggcctctggcatttagccaacgtcggtatgctgccgccgatgggcctgctgattaaaaatgccattattacgctgcctttcaccttaacctccattctgtttattcagacattaagcccgatggtgatttcctatcgttcacgggaaaaatccgtagaggtggcgcgtcataaggcgctgcgggcaatgaatatcgcttttggcgtgctgtttgtgacggtctttttctacgcggtctcctttacgctggcgatggggtacgacgaggcggtaaaagcctacgagcagaatatttccgccctggcaatcgcagcacagttcatcagcggtgacggtgcgggctgggtcaaaatcgtcagcgtgatcctcaacatttttgccgtgatgaccgcgttctttggcgtctatctcggctttcgtgaggcgacgcagggcatcgtgatgaacatcctgcgccgcaaaatgccggcggagaaaatcaatgaaagcaccgtccagcgcgggattatgctgttcgctatcctgctggcctggagcgcgattgtgttaaacgcgccggtgctgagcttcacctccatctgtagccctattttcgggatggtgggctgcttaattccggcgtggctggtctacaaagtgcccgcacttcataaatataaaggcgtatcgctggtgattattgtgattaccgggctgctgctttgtgtttctcctttcctcgccttctcatga

SEQ ID NO: 115397 - DNA, 2295 bp, Enterobacter cloacae
atgaaagtaacaatcgatacgggcgtcgcgccttacagcgacgcatgggccggctttcgcggtgaagaatggaaaaacggcattaacgtgcgcgattttattcagcataactacaccccttatgaaggcgatgaagctttcctcgcgcaggcgacgccagcaacgacggcgctgtggcagaaggtgatggtcggcattagtcaggagaatgctactcacgctccggtggattttgacaccaacatcgccactactattaccgcgcacgggccgggctatattgatcaggagctggagacgatcgttggcctgcaaaccgacaagccgctcaagcgcgccctgcatccgtacggcgggatcaacatgatccgcagctcgttcgaagcctacggtcgcgagatggatccgcagtttgaatatctcttcacagacctgcgcaaaacccacaaccagggcgtgtttgacgtttactccccggagatgatgcgctgccgcaaatcgggggtgctgaccggtctgccggacggctacgggcgcggacgcatcatcggcgactaccgtcgcgtggcgctgtacggcatcagctatctggtgcgcgagcgtgaacttcagttcgccgatctccaggggaaactggagcgcggagaagatctggaggccacgatccgcctgcgcgaggagctggcggagcataaacgtgcgttgctccagatccagcagatggcggcgaactatggctttgatatttcacgtccggcgatgaatgcgcaggaagcggtgcagtgggtctactttgcctaccttgccgcagtgaaatcccagaatggcggggcgatgtcgctggggcgcacggcctcgttccttgatatctacattgaacgcgacatgcaggcaggacggctgaatgaggtgcaggcccaggagctgatcgaccacttcatcatgaagatccgcatggtacgcttcctgcgcacgccggagttcgacacgctcttctccggcgatccgatctgggccacggaagtgattggcggcatggggctggatggccgcacgctggtgaccaaaaacagcttccgctacctgcataccctgcacaccatggggcctgcgccggagccaaacctgacgatcctctggtccgaacaactgccgatcgcgttcaagaaatacgccgcgcaggtgtcgatcgtcacctcctcgctgcaatacgagaacgacgatctgattcgcgccgacttcaacagcgacgactacgccattgcctgctgcgtcagcccgatggtgatcggcaagcagatgcagctcttcggcgcacgcgccaacctggcgaaaacgctgctgtatgcaatcaacggcggggtggatgagaagctgaagatccaggtggggccgaaaaccgagccgctgctggaggaggtactggattacgacaccgtaatggcgagcctcgatcacttcatggactggctggcggtgcagtacatcagcgcgctgaatctcattcactatatgcatgataaatacagctacgaagcctcgctgatggcgctgcacgaccgggacgtctaccgcaccatggcctgcggcattgccgggctgtcggtggcggcggattccctgtcggccatcaaatacgccacggtaaaaccggtgcgcgaccacaccggtctggcggtggatttcgtcatcgaaggcgactatccgcagtacggcaacaacgacgatcgcgtggacagtatcgcctgcgatctggttgagcgctttatgaagaaaatccaggcgctgccgacgtaccgcaacgcggtaccgacgcagtcgatcctgaccatcacctccaacgtggtttacgggcagaagaccggcaacacgccggacggacgtcgcggcggcacgccgtttgcgcctggcgccaacccgatgcacgggcgcgacagaaaaggggcggtggcgtcgttaacctcggtcgccaagctgccgttcacctacgccaaagacgggatctcctacaccttctccatcgtgccgcaggcactgggcaaggacgagccggtgcgcaaaaccaaccttgtcgggctgctggacggatacttccaccacgaagcgaccattgagggcgggcaacacctgaacgtcaacgtgatgaaccgggagatgctgctggatgccgtcgcccatccggagaactatccgaacctgacgatccgcgtttcaggttatgcggtgcggtttaacgccctgacgcgcgagcagcagcaggacgtgatttcgaggacgtttacgcaggcgatgtaa

SEQ ID NO: 115398 - DNA, 1209 bp, Enterobacter cloacae
atgattgagtttccggtagtactggtcattaactgcggatcgtcctctgttaagttctcggtgctggacgccgcaggctgcgatgccctgatgacgggcattgcggacggcatcaacacagaaaaagcctttatttccgtgaatgggggtgagccggtcagactggctcaccaggactacgaaggggcgctggccgccatcgccctggagctggagaaacgcaacctgatgggcagcgtggccttgattggccatcgcattgcccacggcggcgacctcttcagcgagtcgaccctgatcacggaagaggtgatggcgcagatccgccaggtctccccgctggcgccgctgcataactacgccaacctgagcggcgtggaagccgccgggcgcctgttccccggcgtgcagcaggtggcggtatttgataccagcttccaccagaccatggcgccgcaggcgtatctgtacggcttgccgtaccgctattttgaagagctgggcgtgcgccgctacggtttccacggcacctctcaccgctacgtgtcggcgcaggcgcacgcgcttctcgggctctctcccgatgacagcggcctggtgattgcccatctcggcaacggggcgtccatctgcgcggtgcgtaacggcgtaagcgtggacacgtccatggggatgacgccgcttgaaggactggtgatgggcacgcgctgcggcgacgtggattttggcgcgatggcgtggattgcccggcagaccggccagtcgttcgaggatctggagcgcgtggtcaacaaagagtccgggctgctggggatctctggcatctcctccgatttgcgcgcgctggagaaagcctggcatgacggcaacgagcgggcgcggctggcaataaagacctttgtccaccggattgcgcgacatatcgccggtcatgccgcgtccctgcaccgtctggatggcgtggtgtttaccggcgggatcggtgagaactccgtgcttatccgcgcgctggtggtggagcatcttaaggtgtttggcatcatcctcgacgagtccaaaaatgccctgccgggcagcgcgggcgagcgcgtgatctccaccgagtcgtcccgcgcggcctgcgcggtgatccctaccaatgaagaaaaaatgatcgcactggacgccctccgtcttgggaaggttactccggctgcggcttacgcctga

SEQ ID NO: 115399 - DNA, 1332 bp, Enterobacter cloacae
atgagcaacacagaaagcattatcgttggccagactaaaacgtccacctggcgtaaatcggatactacctggacgctcggcctgtttggtacagccattggcgcaggcgtgctgttcttccctatccgtgcaggctttggcggcctgatccctatcctgctgatgctggtactcgcgttcccgattgcgttttactgccaccgcgcgctggcgcgtctgtgtttgtccggcagtaacgtctccggcaacatcaccgaaacggtggaggagcattttggtaagaccggcggggtggtgatcaccttcctctacttctttgccatttgcccgctactgtggatttacggcgtcaccattaccaacacctttatgaccttctgggaaaaccagctccagatgcccgccctgaaccgcggcgtggtggcgctattcctgctgctgctgatggcttttgttatctggttcggtaaagacctgatggtgaaagtgatgagctaccttgtgttcccgttcatcgccagcctggtgttgatttctctctcgctgatcccgtactggaactcggcggtgatcgaccaggttaacctgagcgatatcgccttcaccggtcatgacggcattctggtcacggtgtggctggggatctccatcatggtcttctccttcaacttctcgcctatcgtctcctcgtttgtggtctccaaacgcgaagagtacgaaccagagttcgggaaagagtttaccgagcagaaatgttccaaaatcattggtcgcgccagcctgctgatggtggcggtggtgatgttcttcgcctttagctgcctgtttacgctctctccgcagaacatggcggacgccaaagcgcagaacattccggtgctctcttacctggcgaaccacttcgcgtcgatgtcaggcagtaaatccacgttcgccacggtgctggaatacggcgcctccatcatcgcgctggtcgctatctttaaatccttcttcggccactatctgggtacgctggaggggctgaacggtctgatcctcaagttcggttacaagggcgacaagaagaaagtctccgtgggcaagctgaacaccatcagcatggtcttcatcatgggctccacctggattgtggcctacgccaacccgaacatcctggaccttattgaagccatgggtgcgccaattatcgcctctctgctgtgcctgctgccgatgtacgccatccgcaaggcgcctgcgctggcgaaatacaaaggccggaccgagaacatcttcgtaaccgtggtcggcatgctgaccattctgaacatcgtgtacaaactgttttaa

SEQ ID NO: 115400 - DNA, 990 bp, Enterobacter cloacae
atgcacattacttacgatctcccggtgaccattgaagatattcaggacgccagaaaaagactggcgggaaagatctataaaaccggtatgccgcgctcgaattatctgagcgaacggtgtaagggtgagatattcctgaaatttgaaaatatgcagcgtaccggttcgtttaaaatacgtggggcatttaataaattaagctcgctgactgatgcggaaaaacgcaagggcgtggtggcctgttccgcagggaaccacgcgcagggggtctctctctcctgcgccatgctcggcatcgacggcaaagtggtcatgccgatgggcgcgccgaaatccaaggttgccgccacgcgcgactactccgccgaagtggtgctgcacggcgaaaactttaacgacaccatcgccaaagtgagcgaaatcgtcgagatggaagggcgcatttttatcccgccttacgacgatccgaaagtcattgccggccagggcaccatcggcctggaaatcctcgaagatttatatgacgtggataacgtgattgtccccatcggcggcggcggtttaattgccggtattgcgacagcaattaaatccatcaacccaactatcaatattatcggcgtgcagtctgaaaatgtgcacggaatggccgcatcgtatcaggccggagaaataaccagtcatcgtgttaccggcacattagctgacggctgcgacgtgtctcgcccaggtaatttaaccttcgaaattgttcgtgaattagtcgatgacattgtgctggtcagcgaagacgagattcgcaacagcatgatcgcgcttattcagcgaaataaggtggtcacggaaggtgccggtgcgctggcgtgcgcggcgttattaagcggcaagctggaccactatattcagggccgaaaaaccgtctgcattatttccggcggcaatattgatctctcccgtgtttcccaaattaccggcttcgttgacgcataa

SEQ ID NO: 115401 - DNA, 921 bp, Enterobacter cloacae
atgaatactattattctaccgaaaacacagcacctcgtggtatttcaggaagtcatcaaaagtggctccataggttctgctgcaagacaactggggctgacgcaacctgccgtcagcaaaatcatcagcgacatcgaatcctactttggggtggaagtgatggtgcgtaagaacaccggcgtaaaactcactgccgccggtcaggtgctgctgtcctacgctgagtcgatcacccgcgaaatgaaaaacatggtgagcgagattaacagcctcagtttcagtaccgtcatggacgtctcttttggctatccgtcgctgattggcttcaccttcctgtccgggatgatcaaaaaattcaaggaagtgctcccgaaagcgcgcgtctcaatgtatgaagcgcagctctcttcattcctgcccgccattcgcgatggccggctggatttcgccatcggcacgctgagcgacgggatgcagcttcaggatcttcacgttgagccactgtttgaatccgagtttgtgctggtggcgagtaaatcacgaacgtgcaccggcccgaccagactggcatcgctcacgcacgagcagtgggtgatgccgcaaaccgatatgggctactacaacgaactcctgaccaccctgcaagacaaccacataagcattgaaaacatcgtccagaccgattccgtcgtcaccatctataaccttgtcctcaatgccgattacctgacggtgatcccccgtgacatgattgcgccattcggctcggaccagtttattgttctgccggtggaagatgaattacccgtggcgcgttatgccgccgtgtggtcaaaaaattacagtattaaaaaatcggcgtcagtattagttgaactggcaaaacaatattcgtcgatgaatatcgaaaaacgacgatag

SEQ ID NO: 115402 - DNA, 1146 bp, Enterobacter cloacae
atgaaaatcgtaatcgcgccagactcttataaagaaagcctgtctgccaccgaggtggcgcaggcgatagaaaaaggatttcgggaaattttccccgatgctcattacgtgtctgttcccgttgctgacggcggagaaggtacggttgaagcgatgatcgctgcgacgcagggcacctggcagcaggctgtcgtcaccggcccgttaggggaaaaggtgaaggccagttgggggatctcgggcgacggtaccaccgcgtttatcgagatggccgccgccagcggcctggtgcttgttcctcccgcgcagcgtaacccgctggtcacgacgtcgcgcgggacgggggagctgatcctcagcgcgctggataaaggcgcgcgcaacatcattatcggtatcggcgggagcgcaaccaacgatgggggcgcgggtatgatgcaggcgctgggcgcgaagtttacggatgcgaacgggacggagatcggctacggcggcggcagcctgatggcgcttaaccggattgatatttccgatctcgatccgcgtcttcagggatgcgcaatccgcgtcgcctgtgacgtgacgaatccgctggtcggtgaaagcggcgcgtcgcgtatctttggcccgcaaaaaggcgccacggaggagatgatcctcgaactcgacgccaatcttagccactacgccggggtgatcaaaaaatcgctgcgcattgacgtcaaccgggttccgggggctggcgccgcgggcggcatgggcgcagcgctgatggccttcctgggcgctgagctgaaaagcggcatcgagattgtcactcaggcgctcaatcttgaagaacatattcacgactgcacgtgggtgctgaccggggaagggcgcatcgacagccagagcattaatggcaaagtgcccgtcggtgtggcgagcgtcgccaaaaaataccataagccggtgatcgggattgccggaagtctgacgcaggatgtgggtgtggtgcatcagtacggcatcgacgcggtgttcagcgtactgacccgcatcggttcactggaagaggcgttccagggagcgtatgacaacatttaccgcgcctcgcggaatatcgcggccacattgcaggtaggcatgcgtagccaggggtga

SEQ ID NO: 115403 - DNA, 891 bp, Enterobacter cloacae
atgacgctgaaagtgggttttattggcctgggtatcatgggcaaaccaatgagcaaaaacctcatcaaagcaggttactcactggtggttttagatcggaattcagacgcggtggcagaggtgattgcggctggcgcagaaacggcgacaaccgcaaaagcgattgctgagcagtgcgacgtaattatcaccatgctgccaaactccccgcacgtgaaagaggtggcgctgggtgagaacggcattatcgacggcgcgaagccgggtctggtggtgatcgacatgagttctatcgcaccgctggcaagccgcgaaatcagcgaggcgctgaaagcgaaaggcgtggaaatgctggatgcgccggtcagcggcggcgaaccgaaagccatcgacggcaccttgtcggtgatggtggggggcgataaagccgtgtttgacaaatactacgacctgatgaaagccatggctggctccgtggtgcacaccggtgaaattggcgcaggcaacgtcaccaagctggcaaaccaggtgattgtggcgttaaacatcgcggccatgtccgaagcgctgacgctggccaccaaagcgggcgttaatccggatctggtctatcaggccattcgcggtggtctggcgggcagcaccgtgctggatgccaaggcgccgatggtgatggatcgtaacttcaggccgggcttccgcatcgatctgcacattaaggatctggcgaatgcgctggatacctcccacggcgtgggcgcgcagttgccgctgactgccgccgtcatggagatgatgcaggcgctgcgtgcggacggtctgggcaccgccgatcacagcgcgttagcgtgctattacgaaaaactggcgaaggttgaaattgctcgctaa

SEQ ID NO: 115404 - DNA, 771 bp, Enterobacter cloacae
atgagtaacgacatcttcccgaataaatttaaagcggccctcgcggcgcaccagattcagattggctgctggtctgcgctggccaaccccatcagcaccgaagtgctgggcctggccgggttcgactggctggtgctggacggcgaacatgcgccaaacgatatcaacacgtttattccgcagctgatggcgctgaaaggcagccacagcgcgccggtggtgcgtgtgcccaccaacgagccggtgatcatcaagcgtctgctggatatcggcttctacaacttcctgatcccgtttgttgaaacggaagaagaagcggtgctggccgtggcggcgacccgctatccaccggaagggatccgcggcgtgtccgtctcgcaccgcgccaacatgtttggcaccgtgccggactatttcgcccagtccaacaagaacatcaccattctggttcagatcgagagccagcagggggtcgataacgtcgacgctattgccgcgacggagggggtagacggcattttcgtcggcccgagcgatctggcggccgcctttggtcatctgggcaacgccagccatccggacgtgcagcgcgcaattcagcacatttttgcccgtgccaaagcgcacggtaaaccgtgcggcattctggcgccagtggaagccgatgcccgccgctacctggagtggggcgcaacgtttgtcgccgtgggcagcgatctcggcgtattccgcgccgccacgcagaaattagcggacgcttttaaaaaataa

SEQ ID NO: 115405 - DNA, 1572 bp, Enterobacter cloacae
atggccgatattgaaattcgacaggcgtcgccgacggcgttctatataaaagtgcacgataccgataacgtggcgattattgtcaacgacaatggcttaaaagctggcacccgctttccggatggcctggagctgattgagcacattccgcaggggcataaagtcgcactggtcgatataccggcgcagggcgaaatcgtgcgctacggcgaagtcatcggctatgcggtgcgcgctatcccgcagggtagctggattgaggagtcgctggttgagctgcccaccgccccgccgctggagtcgttgccgctggctacccgcgtccctgagccgttgcctccgctggagggttataccttcgagggttaccgcaacgcggatggcagcgtgggaaccaaaaacctgcttggcatcaccaccagcgtgcattgcgtggcgggcgtagtggattatgtggtgaaaattattgagcgcgatctgttgccgaaataccccaacgttgacggcgtggtgggtcttaaccacctgtacggctgcggcgtggcgatcaacgcgcccgcagcggtcgtgccgatccgcacgattcacaatatcgcccttaacccaaactttggcggtgaggtcatggtgattggtctcggctgtgaaaaattgcagccagaacgcctgttgcagggtactgaggatgtgaaagccattccggttgacgatgccagtgttgtgcgacttcaggatgaacaccatgtcggcttcagatcgatggtcgacgacattttacaggtggcagagcaccatctggagaagctgaacaaacgccagcgtgaaacctgcccggcctctgaactggtcgttgggacacagtgtggcggcagcgatgcgttttccggcgtcaccgccaacccggcagtcggttatgcctccgatctgttcgtgcgctgcggcgccacggtgatgttctccgaagtcaccgaagtacgtgatgctatccacctgctcacgccgcgcgccgtcaacgaagaggtgggcaaacgcctgctggaggagatggcctggtacgataactatctcgacatgggcaaaaccgaccgcagcgccaacccgtctccgggtaacaagaaaggcggcctggccaacgtggtggaaaaggccctcgggtcgattgccaaatccggccagagcgcgattgtggaagtgctctcccctggccagcgaccaaccaaacgcggtctgatctacgcggcaacgcctgccagtgatttcgtgtgcggtacccagcaggtggcgtccggcattacggtacaggtctttaccaccgggcgcggcacgccgtacggcctgatggcggtaccggtgatcaaaatggcgacccgcaccgagctggcaaaccgctggtatgacttaatggatatcaacgcgggcaccatcgccaccggggaagagagtattgaagaagtgggctggaagctgttccacttcattctggatgtggcaagcgggcggaagaaaaccttctccgatcaatggggattgcataactcgctggcggtgtttaacccggcgccggtgacctga

SEQ ID NO: 115406 - DNA, 804 bp, Enterobacter cloacae
atgagcagcaccgattcgtccgcagagaagcgcatcaccggcaccagtgaaaggcgagagcagatcattcagcggttgcgggcgcagggaagcgtgcaggttaacgatctttctcttttattcggcgtgtcgacggtgacgatccgtaacgatctggcctttctggaaaagcaggggattgccgttcgcgcttacggcggtgcgctgatttgcgaaggcaatgcccccggcgtggagccgtccgttgaggacaaaagttcccttaatacggcagtgaagcgcagcatcgcgcaggcggcggctgaactggtgaagccgggtcaccgcattattctggactccggcaccacaacctttgaaattgcccgcatgctgcgccagcacaccgatgtcattgccatgaccaacgggatgaacgtggcaaacgcgctgctggaagcggagggcgtagagctgctgatgaccggcgggcacttgcgccgtcagtcgcagtccttctacggcgaccaggcggagcagtccttacagaattaccattttgacctgctgttcctgggcgtcgatgccatcgatctcgaccggggggtgagtacgcacaacgaggatgaagcccgtctgaaccgcaaaatgtgcgaggtggcggagcgtattatcgttgtcactgactccagcaagtttaaccgttcaagcctgcataaaatcattgatactcagcggatcgacatgattatcgttgatgaaggcattccggcggaaagccttgaaggattacgcaaaagcgggatcgatgtggtgctggtctaa

SEQ ID NO: 115407 - DNA, 1296 bp, Enterobacter cloacae
gtgaaacatctgacagaaatggtggaacaacataaacgggggaatacaaacgggatttatgccgtctgttccgcacatccactggtacttgaagctgcactacgttacgcccattcacaacagacgcccctgctgatagaagccacctcaaaccaggtggatcagtttggcggttataccggtatgacgcccgccgatttttatgggtttgtctgcaatctggcgggatctcttggtttccccacctcgcagctgatccttgggggcgatcatttaggtccaaaccgctggcaaaacctgccgggttcgcaggcgatggcgaacgccgacgatctgatcagaagctacgtggcggccgggtttaaaaaaattcacctcgattgcagcatgtcctgcgaagacgacccagttccgttaaccgatgcaatcgttgccgggcgtgccgctcggctggctaaaattgccgaaaccacctgtctcgagcaatttggcgtagccgatctggtctacgttatcggcacggaagttccggttcccggtggggcacacgagacgctgaccgagcttgaggtcaccacgccagaggcggcacgcgccacgcttgaggcacaccgccacgcattcgagaaggaagggttaagcgacatctggccgcgcattattggcctggtggttcagcctggcgttgagttcgaccatgcgcaggtttgtgactatcaaccgcataaagccgtcgcgctgagcgagatggttgaagcctacgacacgcttgtatttgaagcacactctaccgattaccagacgccgcaggcgctgcgccagttggtgaaagatcacttcgccattctgaaagtcggccctgcgctaaccttcgcgctgcgcgaagcgctgttctcactggcagcaattgaagaagagctgctgccggcaaaagcctgctcagggctgcgtcacgtcctggaaaacgtgatgctcgatcgcccggaatactggcaaagccactatcacggcgacggcaatgcccgtcgcctggcgcgcggttacagctattccgaccgcgtgcgctattactggccagacagccagattgacgacgcctttgagcggctggtacgcaacctggcggatgaaccgatcccgctgccgctgatcagccagtatctgccgttgcagtacagcaaagttcgcgatggcgctctcaggtccacaccacgggaactcatcctcgaccacattcaggacatactccagcagtaccatgccgcctgcgaaggcgtaacgactcaacacgcataa

SEQ ID NO: 115408 - DNA, 474 bp, Enterobacter cloacae
atgccaaacattgtcttatgccgcattgatgaacgcctgatccacggtcaggtgggcgtacagtgggtggggtttgcgggggcgaacctggtgctggtggcaaatgacgaggttgcagacgatccggttcagcaaaacctgatggagatggtgctggcggaaggcatcgccgtgcgtttctggtccctgcaaaaagtgatcgacaacattcatcgcgccgccgaccggcagaaaattctgctggtctgtaaaacaccggctgattttttaacgctggtcgagggcggcgtgcccatcacccgtattaacgtcggaaatatgcattacgccagtggcaaacagcaaattgccaaaacggtatctgtagacgcgaacgatatcgccgcgtttaacggcctgaaggcggccggagtggaatgcttcgttcagggcgttccaacagagactgctttggatctctttaaactgctctga

SEQ ID NO: 115409 - DNA, 780 bp, Enterobacter cloacae
atggaaatcagtctgttgcaggctttcgcgctggggcttctcgcctttatagcgggcctggatatgtttaacggcttaacacacatgcaccgtccggtggtgctcgggccactggttggcctgattctgggcgatttgcacaccggaattctgaccggcggtacgttagaactggtctggatgggactcgcgccgctggcgggcgcgcagccgccaaacgtgattatcggcaccatcgttggcaccacatttgccattactacaggcgtgaagccggatgtcgccgttggggtcgccgtgccgtttgccgtggcggttcagatggggatcactttcctcttctcggtgatgtccggcgtgatgtcccgctgcgatcgcatggcggctaacgcagacacccgtggtattgaacgggtcaactatctggcactgctggcgctcggcgtcttctacttcctgtgcgcgtttctgcccatctacttcggggctgaacatgcgaaaaccgccattgacgtgctgccggaacgtctgatcgacggtctcggcgtcgcgggcggcattatgccagcgatcggcttcgccgtgctgctgaagatcatgatgaaaaacgtttacatcccttacttcattatcggctttgtcgccgcggcctggctgaaactcccggtgctggcgattgccgcggctgcgctggcgatggcgctgatcgacctgctgcgcaaatcgcctgaacccacggcgcctgcggcccagaaagaggaatttgaagatggcatctaa

SEQ ID NO: 115410 - DNA, 879 bp, Enterobacter cloacae
atggcatctaatcacaccaccctgccgggcgtgtctgaaagtgaagagacactgctgaccggcgtgaatgaaaacgtctacgaagaccagcgtattggcgctgaactaacgaaaaaggatattaaccgtgtcgcctggcgttccatgctgctacaggcctcgtttaactacgagcgtatgcaggcctccggctggctgtatgggctactgcccgcgctgaaaaagatccacaccaataagcgggacctggcgcgcgccatgaaaggtcatatgggtttctttaacacccacccgttcctggtgaccttcgtcatcggcattattctggcaatggagcgttccaaacaggatgtgaacagcatccagagcactaaaattgccgtcggcgcaccgctcggtggcattggtgacgccatgttctggctgaccctgctgcccatctgcggggggattggcgccagccttgcgctacagggctccattcttggcgcggtggtctttatcgtgctgtttaacgtggtgcatctcggcctgcgttttggtctggcgcactatgcgtaccgaatgggtgtcgccgcgatccctctgatcaaggccaacaccaaaaaggttggtcatgctgcgtccattgtcgggatgacagtgatcggcgcgctggtcgctacctacgtgcgcctgaataccacactcgagattaaagccggggatgcagtcgtcaaactgcaaaccgatgtgatcgacaaactgatgcccgcctttctgccgctggtctataccctgaccatgttctggctggtacgccgtggctggagcccgctgcgcctgattggtatcaccgtggtgctgggcgttgtcggtaaattctgtcacttcctgtaa

SEQ ID NO: 115411 - DNA, 435 bp, Enterobacter cloacae
atgttaggcattattttgacgggtcacggcagttttgccagcgggctggaacaggcgatgaagcaaatcctcggcgaacagccgcagtttatcgccatcgattttccggaaagctccaccactgcgcggctgaccgcgcagcttgagcaggcagtgaatgaactggatgcagagcacgatatcgtgtttctcaccgatcttctcggcggtacgccgtttcgtgtggcctctaccctcgcgatgcagcgccccggcagcgaagtgatcaccggcaccaatctccagcttttgctggagatggttctggagcgcgacgggttaagcagtgaagcctttcgtttgcaggcgctggagtgcggccatcgcggcctgaccagcctggtggatgaacttgcacgctgtcgcgaggaagcgcccgccgaggaagggatatga

SEQ ID NO: 115412 - DNA, 1134 bp, Enterobacter cloacae
atgaggcaactgctgcgcgcgcgtcgtctgcttaccgggcagggctggctggatgaccatcagctgcgtatggatagaggcgtcatcaccgccatcgagccgattccggcaggggttaatacccgcgaggcagacctgctttgcccggcatacattgatattcacgtccacggcggcgcgggtgtggatgtgatggatgatgcgcccgacgtgctggaccggttagccatgcacaaagcgcgtgaaggcgtgggggcgtttctgcctaccaccgtcaccgctccgctggaggcgatccatggcgcgttacggcgcattgcccggcgctgtcatgccggtggccccggcgcgcagatcctgggcagctatctggaaggcccgtactttacaccgcagaacaaaggggcgcacccgccagaactgtttcgcgaactggatctcgcggaacttgatgagctgattgcggtttcgcagaacacgctgcgggtagtggcgcttgctccggaaaaagtggatgccctgaaggcgatccatcacctcaagcaaaaagggatacgcgtcatgctgggccacagcgccgctacatacgcgcaaaccctggccgcatttgatgcaggcgcagccgggctggtgcactgctacaacggcatgacggggttacaccaccgggagcccggcatggttggcgccgggcttacggacccacgcgcgtggctggagcttattgccgacgggcatcacgttcatcctggagccatgcggctatgttgttgctgcgcgaaggatcgtacggtgctgattaccgatgccatgcaggcggcgggtatgcctgatgggcgctatacgttgtgtggtgaaaatgtcgagatgcagggcggcgttgtccgcacggcctcaggcgggctggcgggcagcacgctcgcgctggatgccgccgtgcgaaatatggtggagcatacggggatcgccccagaaaacgcaatccatatggcctcgctgcatcctgctcgtctgctcggtatggatcacctgctgggaacgttagcgccaggcaaacgcgccaatgttcttgcgctggatgcgggtttacacctccggcagatctggatccagggtcaggctctttccctgtag

SEQ ID NO: 115413 - DNA, 1146 bp, Enterobacter cloacae
atgccacaaaccactatcgccaccaccggcacctggaccgaaaaagagatccgccagcagccagccagctggcttcgctcgctcaacaatattgataatctgcgcgcgtcgatcgacagttttctgacgccactgttgcgcaagcccgatctgcggatcgttctgaccggcgcgggtacgtctgcttttatcggcgacatcattgcgccatggcttgccagccacacggggaaaaacatcaccgcgatacctacgaccgatctggtcaccaacccgatggattatttcagcccttcgcacccgctgctgctggtctctttcgcccgttctggcaatagcccggagagcgtcgccgccgttgagctggcgaatcagtttgtaccggagtgctaccacctgtcgatcacctgtaatgaagcaggcagcctgtaccagaatgctgtcgacagcgataacgcctgcgctctgctcatgccagccgaaacgcacgatcgcgggttcgcgatgacaagcagcatcaccaccatgatggcgagctgcctggcggtattcgcaccggaaacgatcaacagcaaaacgttccgcgacgtgtccgatcgctgtcaggcgatcctcacatcgcttggcgatttcagtcccggcgtctttggtaacgaaccgtggaaacgcattgtttatctgggcagcggtggattacagggcgccgcacgggagtctgcgctgaaggtgctggagctgaccgccggcaagctggcggcattctacgattcgccaacgggtttccgtcacgggcctaagtcgctggtggacaacgaaacgctggtcgtcgtgtttgtctccagccatccgtatacgcgtcagtacgatcgggatctgctcgccgaactgcgacgcgatcgtcaggccatgcgcgtggtagccattgcagccgaaacggatccggtcattgaagctggcccgcatatcctgctgccgccttcccgttcatttaacgatatggagcaggcgttctgcttcctgatgtacgcccaggtcttcgcactgacccagtctctgcacgttggcaatacgccggatacgccatccgccagcggtacggttaaccgtgtggtccagggcgtcgttattcatccgtggcaggcttaa

SEQ ID NO: 115414 - DNA, 873 bp, Enterobacter cloacae
atgagtattatttctaccaaatatcttttgcaggacgcacaggcgaagggctatgccgttccggcctttaacatccataacgccgagacgatccaggcgatcctcgaagtctgtagcgaaatgcgatcgccggtgatcctcgcgggtacgccggggacgtttaaacatattgcgctggaagagatctacgccttgtgcagcgcatattcccttacttatgacatgccgctggcgctacacctcgatcaccacgaatcgctggacgacattcgccgcaaagtccatgccggcgtacgtagcgcaatgatcgacggtagccattaccccttcgaacaaaacgtcaagctggtgaaatcggtcgtcgatttctgccacctcaacgactgtagcgtcgaggccgaactgggccgactgggcggagtggaagatgacatgagcgtcgacgccgaaagcgcgttcctgaccgacccgcaggaagcaaaacgctttgtcgaaatgacaggcgtggacagcctcgccgttgccatcggtaccgcgcacggtctttataccaaacgcccaaaaatcgacttccagcggctggccgagatccgcgaggtagtgacagtgccgctggtgctgcacggtgcgagtgatgtgccggatgaggatgtgcgccgcaccattgagctgggcgtctgcaaagttaacgtcgcaacagagctgaaaatcgccttctctgacgcagtcaaagcctggtttgccgagaacccacagggcaacgatccgcgcttctacatgcgcgtcggcatggatgccatgaaagaggtggtcagaagcaaaatcaccgtttgcggctcggcgaaccggctgctgcttgcggctgaagcctga

SEQ ID NO: 115415 - DNA, 1572 bp, Enterobacter cloacae
atgacacaggaaaagtcgtttaaatcgaaagcgtgggagtttttccagagcctgggaaagacgtttatgttcccggtctcactgttggcctttatggggttgttgttaggtatcggtagttctgtcaccagcccttccaccatcaaaagttttccctttctgggcggcgagttaacgcagctcacctttggttttatcgccatggtcggcggctttgcttttacctatctgccgctgatgtttgccatggcgatcccgatgggccttgccagacgtaataaagcggtgggcgcttttgccggattcgttggctacatgctgatgaacatgagcatcaactactacctgaccgccacccaccagcttgcggatgccgccaccatgagacaggtgggacaatccattgtgcttggcattcaaacgctggagatgggcgtgctcggcggcattgtggtaggggtgatcacctacttcctgcacgaacgtttccaggacacggtgctgcacgacgcgtttgccttctttagcggcattcgttttgtgcccatcattaccgccctcaccctgtcgctggtcggcttgtttatccccctgctgtgggaatatgtggcaatgggcattgccgggattggtcatatcatccagagcaccagcgtctttgggccattcctgtatggcgtaggcgtactgctgctcaaaccttttggcctgcaccacatcctgctggcgatggtgcgcttcaccccggcgggcggcattgagatggttaacggccaggaagtggccggtgcgctgaacattttctacgccgagctgaaagctggcctgccgtttagcccgcacgttacggcatttttatcgcaagggtttatgccgacatttatcttcggcctgcctgccgtggcttacgctatctaccgcaccgcgcgcccggaaaaccgtccggtgattaaagggctgctgctttcaggcgtgctggtttcagttgtcacgggtatttcagagccgattgagttcctgttcctgtttattgcccctgtgctttacgcgtttcatatcgttatgtctggcctggcgctgatggtgatggcgctgctcggcgtcaccatcggcaacaccgacggcggcattctggatctgctgatcttcggcgtcatgcaggggatgtcgaccaaatggtatctgctgttcccggtgggtatcgcctggtttgctatctacttcttcgtcttccgctggtacatcctcaggcacgatattaaaacgccgggccgtgaggttgacgcgcagggtgcgctccaggcggtggaagccaatacccgggcacgtggaaaatcgaaatacgatcatgggcttattcttcgcgcgcttggcggtaaagagaatattgagtcgctcgacaactgcattacccgcttacgtctggtggtaaaagatatggggcttatcgaccagcaggcgctgaaggccgcgggcgccttgtcagtagtggtgcttgatgcccacagcgttcaggtgatcatcggtccgcaggtgcagagcgtcaaatccggcattgaagccttaatttaa

SEQ ID NO: 115416 - DNA, 1173 bp, Enterobacter cloacae
gtgtttgatttcgacagaatcattgagcgtaaaagcgataaatgccgtaaatgggatcatacgtttgtgtgctcgcgtttcggtgatgtcccggagggatttatcccgctgtggatagcagacatggatttcacctcgccacccgccgtgattgaaggcttccagcgcatcgtggagcatggcaccttcggttacacctggtgcttcgacgaattctacgatgcggtcatcgccttccagcgcacccgtcatcaggttgaggtgcataagtcatggatcaccctgacctacggcaccgtttccacgctgcactatacggttcaggcgttctgcaaacccggcgactgcgtgatgatgaataccccggtgtatgacccgtttgcgatggcgacacagcgacagggcgtgcgggtgcttgcaaatccgctgagcgtgaaggaaaaccgctatcagctggattttaatctgattgaagttcagctcaaaactcaccgtccaaaactgtggttcttctgctcgccgcataacccctcgggccgaatctggcgcgcggatgagatacgtcaggtgtccgatctctgtaagcgctacggcacgattctggtggttgatgaggttcacgccgagcacattctggacggtacattcgtcagttgtctgacttcgggctgtgccgcccaggacaacctgattgtgctgacctcccccaataaagccttcaaccttggcgggctaaaaacatcctactcaatgattccagacgattcgctgcgccagcgtttccgccagcagctggagaagaactccattacctcgcccaatatcttcggcgtgtggggaattattctggcttatcagcaaggtctgccatggctcgacgcgctgaatggttatctgcgcggcaatgcccgctaccttgcggatgccattcagacccatttccctgcatggaagatgatgaacccggagtcgtcgtatctcgcctggatagacgtcagtgcggacgatcgcagtgcgacggcgctaactcaacatttcgcaaaacaggctggcgtggtcattgaagatggcagccactacgtacaaaacggcgaaaactacctgcgtattaacttcggcacccagcgctactggctggaacagtccatcaaccgaatgctgaagcattactga

SEQ ID NO: 115417 - DNA, 1890 bp, Enterobacter cloacae
atgaaaaaaatgctcactctctcgctgctgactctctgtgtttctcatggtgcggcggcagcaaactacgcgctcagtaacgacaatattgccctttcgtttgatgatgcaaacgcaacggtagtggtaacggacagcaaagctaaccatccgctcacgccccaggagttgttctttctgacgctaccggatgaaacaaaaatccacaccgctgatttcaaaatcaagcacgtcgaaaagcaggacaatgcgatagtcatcgactttacgcatccggattttatcgtaacggtgaaactgaacctggtgaagggaaaatacgccagcattggctacaccatcgccgccgtcgggcagccgcgggacgtagcgaaaattaccttcttcccgacgaagaagcagtctcaggcaccttacgttgacggggcgattaacagctcgccaatcgtggccgactcgttcttcatcctgccagacaaaccgattgtgaatacttacgcttatgaagccaccacgaacctcaacgtggagctgaaaacgccaattctgcctgagacaccggttagttttaccacctggttcggcactttcccggaaactaatcagctgcgccgcagcgtaaaccagtttatcgatgccgtgcgtccgcggccttataagccttacctgcactacaacagctggatggacatcggcttctttaccccttactccgagcaggatgtcattgggcggatggacgaatggaataaagaatttattgccggacgcggggtggcgctggacgcgttcctgctggacgatggctgggacgatcgcaccggacgctggctgtttggcccggcattcagcaacggttttggcaaagtcagggaaaaagccgacagcctgcatagctcggttgggctgtggctttctccgtggggcggatacaacaagccgcgcgatattcgcgtctcgcatgcaaaagagtatggtttcgaaaccgtagacggcaagctggcgctgtcggggccgaactattttaaaaactttaacgatcagatcatcaagctgatcaaaaacgagcatattacctcgttcaagctcgacggaatgggtaacgccaattcgcatatcaagggcagcccatttgcatcggattttgacgcgtccattgccctgctgcacaacatgcgcagcgcaaatccgaacctgtttatcaacctgaccaccggcaccgacgccagcccgtcctggctgttctatgctgattcaatctggcgtcagggcgatgatatcaacctgtacggccccggcacgccagtgcagcagtggatgacctaccgcgatgccgaaacctggcgatccatcatgcgtaaaggtccgctgttcccgctgaactcactgatgtaccacgggatcgtcagcgcagagaacgcttactatggactcgagaaagtgcaaacagacagcgattttgccgatcaggtctggagctactttgcaaccggaactcagcttcaggagctgtacattacgccgtccatgctgaataaggcgaagtgggataccctggcgcaggcggcgaaatggtcgcgtgagaatgccagcgtgctggtggatactcactggattggcggtgacccaacttcgcttgaggtttacggctgggcctcatggagtaaagacaaagcgatttttggcttacgaaacccgtcggataaaccgcaacgttacttcctggatttaaccaaagattttgagatcccggcaggagagcgttcccagtttaccctgaaagccgtgtacggcagtaattcgaccgtaccagaggagtataaaaacgctgtggtgattacgctgcaaccgctggaaacgctggtgtttgaggcgatgccggggaaatag

SEQ ID NO: 115418 - DNA, 864 bp, Enterobacter cloacae
atgaaacaacacgaaacggcagataattctcaaggccagctttatattgtacctactcctatcgggaatttgtctgatattacccaacgtgcgctcaccgtattgcaagctgttgatttaattgcggctgaagacacccgtcataccggtttactgctacaacactttgccatcaacgcccgtttgtttgccctgcacgatcacaatgagcaacaaaaagccgaaacgctggtggcgaagcttaaagaagggcagaacatcgcgctggtctccgatgcgggaacgccgctgatcaacgatccgggctaccatctggtacgcacctgccgggaagctggcatccgcgttgtgccgctgccggggccgtgcgcggcgattgcggcgttaagcgctgcgggtctgccgtccgatcgtttctgctacgaaggtttcctgccagctaaatccaaaggtcgccgcgatgtattaaaggatctggaagccgaaccgcgtacgttgatcttctacgaatccactcaccgtctgctggaaagcctggaggatatggtgaccgtctggggcgaagggcgctacgtggtgctggcgcgcgagctgaccaaaacgtgggaaaccattcacggtgcgccggtcggcgaactgctggcgtgggtgaaagaagacgaaaaccgccgcaagggcgaaatggtgctgattgtcgaaggccacaaagcgcaggaagacgctctgcctgccgatgcgctgcgtacgctggccctgctacaggctgaacttcctctgaaaaaagcggcggcgctggcggcggagatccacggcgtgaagaaaaatgcgctgtataaatatgcgctggagcagcagggggagtaa

SEQ ID NO: 115419 - DNA, 2139 bp, Enterobacter cloacae
atggtaccgttaacgtttcttcgaaaaaaagccgcgcacagcgtgcccctcctgctggcagccctgatctttaccggctgcggcacccaggcacctgaccagagcactgctcatatgcagggatccgctcaggctgattctggcttttatctgcaacaaatgtcgcagagtacaaatgataccaggatcaactggcaattactcgccattcgtgcactgctgaaagaagggaaaacccagcaggccgccgagctgttcagccagctgccgcaggatcttaacgacactcagcgccatgagcagacgctgctgtcggcagaactgaaggtcgcgcaaaaagattacgacggcgcgaagaagatcctcggcaccatcgatctcagcacgctggataaaaaccagcaggcccgtttctggcaggccggtatcaccgctgagcagggtcgcccttccctgacgctactccgcgcgctgattgcccaggagcctctgctcgcgggtgcagacaagcaaaaaaatattgacgcaacctggcaggcgctcgcctccatgacccaggatcaggccaaggcgctggtaatcaacgccgatgaaaatgtcctgcaaggctggctggatctgcaacagatgtggttcaacaaccgcagcgatccgaacatgctgaaagccggcattaccgactggcaaaagcgttacccgcaaaacccgggagcgaaaatgctgccaacgcagctggtgaacgtgcaaaactttaagcccgcctccaccagcaaaatcgccctgctgctgccgttaaacggtcaggctgcggtgtttggtcgcgccattcagcaaggttttgaagccgcgaaaaacggcaccaccgccgtcagcggcagcgcggttccggcgcaggctgcacaggcggcgaatgtgaatgacgttgtcagcccgtccgccgccgaaaccagcgacctgaccaccgcgcaaacccctgcgcagggcaccatgcagaatccggttaccgccccaacgacgcagcctgctaccccagcgcctgcggcaacacaggccccggctgaaacaccggcgcccgcgacggcagaacaacctcagccgcaaaccgcgcagccggaacagcagccagcaacccagccgcaggctgtggccaccaccagcgcttatcctggtgcagagttgaaaatctacgacaccagcgcccagccgcttgaccaggtgctggcgcaggttcagcaggacggggccagcatcgttgtcggcccgctgttgaaaaacaacgtggaagcgctgatgaagagcaacaccacgctgaacgtgctggcgcttaaccagcctgagcaggttcagaaccgcgccaatatctgttacttcgccctctctccggaggatgaagcccgcgatgcggcccgccatattcacgagcagggcaagcaggcgccgctgctgctgatcccacgcagcacgctgggcgatcgcgttgccaacgcgtttgcgcaagagtggcagacccttggcggtggcgtggtgttgcagcagaaatttggctcagcttccgaactgagagcgggcgtgaacggcggggcaggtattgccctcaacggtagcccggtatccgccagcctgccgcagcagcagagcgtcaccatcggcggtctgacgatcccggcgccacctaccgacgcgcaaatcagcggcggcggtaaagtggattcggcatacatcgtcgctaccccggaagagatcgcctttatcaaaccgatgatcgccatgcgtaacggcagccagagcggcgcaacgctctacgccagctcacgcagcgcacagggtaccgcaggcccggatttccgtctggaaatggaaggactgcaatacagcgagatccccatgctggcaggcagcaacccgcagttgatgcagcaggcgctgggcgcggtgcgcaatgactattccctggcgcgtctgtacgcgatgggcgtcgatgcctgggcgctggcaaaccacttcacccagatgcgtcaggtaccgggcttcgagcttaacgggaataccggcgatctgaccgccgatcaggattgtgtgattaacaggaagttatcatggctcaaataccagcaggggcagattgtcccggccagttaa

SEQ ID NO: 115420 - DNA, 396 bp, Enterobacter cloacae
atggctcaaataccagcaggggcagattgtcccggccagttaagccgtaaacagaccggcgacgcgtgggagttaaaggcgcgtcgctggcttgaaggcaaaggactgcgctttgtcgccgccaacgttcgcgggcgcggcggcgagattgacctgatcatgaaagacggtcagaccatcgtgtttgttgaagttcgctaccgacagtcgtcccgttttggcggtgctgccgccagcgtgacgctcgccaaacaacaaaaattattacagactgcccacttgtggcttgcccgccataatgggagttttgatactgtggattgccgtttcgatgtggtagccttcaccggaaatgcgatcgactggcttaaaaacgcgtttggcgaagacgcataa

SEQ ID NO: 115421 - DNA, 591 bp, Enterobacter cloacae
gtgctcgaacgaattaaagtgtgcttcacagaaagcattcaaacgcagattgccgcggcggaagcccttccggacgcgatctcgcgtgcagcgatgacgctggttcagtcgctgctcaacggcaacaaaatcctctgttgtggcaatggcacgtccgctgctaacgcacagcattttgctgccagcatgatcaatcgcttcgaaaccgagcgcccgagtttacctgccattgcactaaacaccgataacgtggtcttaactgcgattgccaacgatcgtctgcatgacgaaatctacgccaagcaggtgcgcgccttaggccatgccggagacgtgctgctggcgatctccacgcgcggtaacagccgggatatcgttaaagcggttgaagcggcagtgacccgggatatgacgattgtcgccctgaccggttacgacggcggagagctggctggcctgctggggccgcaggatgtggagatccgcattccttcgcaccgtagcgcccgcatccaggagatgcatatgctcacggtgaactgcttatgcgatctgatcgataacacgcttttccctcaccaggatgattaa

SEQ ID NO: 115422 - DNA, 576 bp, Enterobacter cloacae
atgaaggttttatcggcccttgcagtcgtgatgtctgcattactgcttcagggatgcatcgctgccgctgtagtcggcaccgcagcggtcggcaccaaagcagcgaccgatccgcgcaccgttgggacgcaggtggatgacggtacgcttgagctgcgcgtaaacagtgcgctgtcgaaagacgagcagatcaagaaggaagcacgcatcaacgtgacggcttatcagggcaaagtgctgctggcaggccaggcgccaaatcctgaactcgcctcgcgcgccaaacagatcgcgatgggtgtggaaggcacggcggaagtgtttaacgagatccgccagggccagccgattggtctcggcaccgcgtcatctgatacctggatcaccaccaaagtgcgttcccagctgctgggtaccgaccaggtgaaatcctcaaacgtgaaagtgaccacggagaacggcgaagtattcctgctgggtctggtgacggaacgtgaagggaaagcggcggcggatatcgccagccgggtgagcggcgtgaaacacgtcaccaccgcctttacttacattaagtaa

SEQ ID NO: 115423 - DNA, 1038 bp, Enterobacter cloacae
atgactggtcagtcttcatctcaggcggcaacacctgttcagtggtggaagcccgcactcttctttctcgtggtcatcattggcctctggtatgtgaaatggcagccgtactacggtaaagccttcaccgccgccgacacccacagcatcggtaaatcgattctcgcgcaggccgattccagcccgctacgcgcggcgtgggattacgccatggtctattttcttgccgtctggaaagcggcggtattgggcgtattgctgggctcgctgattcaggtacttatcccgcgtaactggctggtgaaaaccctgggacagccgcgcttgcagggcacgctgctggggacgattttctccctgccgggcatgatgtgctcctgctgcgccgcaccggtggcggcgggtatgcgccgacagcgtgtgtcgatgggcggcgcgcttgccttctggatgggtaaccccctgctgaacccggcaacgctggtgtttatgggcttcgttctcggctggcattttgcgtttatccgtctggcggctggcctgctgacggtggtgcttgtcgctacgctggtgcagcacctggtgaaagacaacgaggccgggcctgcctccgttgagctggacgtcagcgagccgcagggcagtttctttgctcgctggggcaaagcgctgtggcagcttttctggagcaccattccggtctatatcctggccgtactggtgctgggggcggcgcgcgtctggctgttcccgcatgcggatggcgctatcgacaacacgctgatgtgggtgattgcgatggcggtggccgggtgcctgtttgtgatcccaaccgcggcggagatcccgattattcagaccatgatgatggctggtatggggaccgcaccggcgctggcgctgctcatcacgctgccggcggtgagcctgccgtcgcttatcatgctgcgtaagtcattcccggcgaaagcgctgtggctgactgcggggctggtggcgttgagcggagttattgtggggagtatggcgcttgtgtga

SEQ ID NO: 115424 - DNA, 645 bp, Enterobacter cloacae
atgagtcaggtactgattaccggcgcaaccgggctggtgggtggacatctgctgcggctgctgatccaggatcggcatatcaattatatcgccgccccgacgcgtcgcccgctgttggatatcaccggcgtctataacccgcacgatccacagctcaccgacgcgctggcgcaggtgcaggatcccattgatatcgccttttgctgccttggcaccacccgacgggaagcgggtagtaaagaagcttttgtccatgcggattacacactggtggtggataccgccctgacggcgaaaaagctgggcgcaaaacatttcctggtggtcagcgcgcacggcgcgaacgcaggctcgccgtttttttacaaccaggtgaagggcaaaatggaagaggcattaatcgcgcagaaatgggagcgcctgaccatcgcgcggccttccatgctgatggggcaccgtgacgaacgtcgttttaacgagtcttttttcgctccgctgtttcgcattctgccgggtaactggaagtccatcgaggcgcgggatgtcgcgctggcgatgctaaaagaggcgctggctccgtcgcaggagggggttaatattatcccttcggcaaaactgcgtgaaatcgcgcagggcgaggcgtaa

SEQ ID NO: 115425 - DNA, 519 bp, Enterobacter cloacae
atgggtaaaaaaatcgcagtattgattaccgacgagtttgaagattcagaatttacgtcgccagcagaggcattccgcaaggcgggccacgaggtggtcaccatcgagaaagaagcgggtaaaaccgtgaagggccataagggcgaagccagcgtgaccattgacgaatccattgataacgtcagcccgtcggatttcgacgccctgctgttaccgggcggtcattcaccggattccctgcgcggagacgagcgtttcgtcacctttacccgtgacttcgtcggcaccggtaaaccggtatttgccatttgccacggtccgcagctgctgatcagcgccgaggtggtacgcgggcgtaagctcaccgcggtgaagccgatcgttatcgatctgaaaaacgcgggagccgagttctacgatcaggaagtggtgaacgataacgatcagctgatcaccagccgtacaccggacgatctgccagcgtttaaccgtgaagcgctacgcctgctcggcgcgtaa

SEQ ID NO: 115426 - DNA, 435 bp, Enterobacter cloacae
atggaaacactggccgccattaaccgctggctggcaaagcagcatgtcgtgacctggtgcgtctgtaaagacgaggagatgtggtgcgcaaatgccttttattactacgatcccgagcgcgtggccttttacgtgatgagcgaagataaaacgcggcatgcgcagatgacgggccagcgggcaaaagtggcgggcacggtaaacggtcagcctaaaaccgttgcgctgatccgcggggtccagtttaaaggcgaaattcgtcgcctggaaggtgaggagagcgacgcgcaacgtaaacgctatacgcgccgcttcccggtggccgcggcgctaaaagccccggtgtgggaaatccgccttgatgagctgaaatttaccgacaacaccctgggctttggcaagaagctgcactggttacgcgccgagcaggcgtag

SEQ ID NO: 115427 - DNA, 330 bp, Enterobacter cloacae
atgctatggtgcgttcaccttaacatactgaatctgtttaccgtgtgctggtttctctatcttgtccgaaccgctgataacgcactctacaccgggatcactaccgatgtggcacggcgttttttacaacatcaaacggggaaaggggcgaaggcgctgcgggggaaaggtgaacttcagttagcgttttcagccgccgtgggcgacagatccctggcgctcaggctggaatactgcatcaagcagctgacgaagcgccagaaagagcgtctcgtcaacggggacgtctctttcgaggcgctacgcgaaagcctgcttaaaaacgattga

SEQ ID NO: 115428 - DNA, 504 bp, Enterobacter cloacae
atgctgattcgagtcgaaattgggattgatgcgccgggtatcgatgcgttgttacgccgctcttttgcaggcgacgccgaagcccaactggttcacgatcttcgcgaagatggcctgattacgctgggcctggttgccaccgacgatgaagggcaggtggtcggctacgtggccttcagcccggtgattgtgcagggtgaagagttacagtgggtcggcatggcgccgctggcggtggatgaaaactaccgtggccagggcctggctcgccagctggtctatgaagggctggattcactgaatgaatttggctatgccgctgtcgtcgttctgggcgatccggcgttctacgaacgtttaggttttaagccagcgtccagatacgatctgcgctgccactggccgggcacggaaacatctttcctggtgcatcctctggcggatgatgcgctcgacggcgttaccggtctggtggagtaccacgatcatttcaatcgtttttaa

SEQ ID NO: 115429 - DNA, 525 bp, Enterobacter cloacae
gtgctggataaactgcgttcacgtctcgtacaatttggtccatcaatgctgagcgtgccggtaaaactggcgccgttcgcgcttaaacgccaggtgctggaacaggtactgagctggcagttccgccaggcgctacaggacggtgagctggagtttctggaaggccgctggttaaagattgaagtgcgcgatatcgggttgcgctggtttacttccgttgagaacgatcggctgatcgtccgtgaaaccgccgaggcggatgtcagctttagcgcggatgccagcgatctgctgatgatcgccgcgcgcaaacaggatccggacaccctcttcttccagcgtcgtctggtgattgaaggcgacacggagctcggtctgtacgtcaaaaatttaatggatgccattgagctggagcagatgccgaaagcgctgcgtatgatgttgatgcaaatggcagatttcgttgaggccgggctaaaaaccccgccggacagtaaacacacttcagtaggtgagccatgctga

SEQ ID NO: 115430 - DNA, 996 bp, Enterobacter cloacae
atggagctgctctgccctgccggaaaccttccggcgcttaaggcggccatcgaaaatggggccgatgcggtctatatcgggctgaaagatgataccaacgcccgccattttgcgggtcttaactttacggagaaaaagcttcaggaagccgttaacttcgttcaccagcaccggcgcaaactgcacatcgccatcaatacctttgcccatcctgatggctatgcccgctggcagcgcgccgtggatatggcggcccagctgggcgcagatgcgctgatcctggctgacctcgccatgcttgagtatgcggcagaacgttatccgcatattgagcgccacgtctctgttcaggcatcggccaccaatgaagaggccgtgcgtttttatcatcgacactttgacgtagcccgcgtggtgctgccgcgcgtgctttctattcatcaggttaagcaactggcgcgcgtcacgccagtgccgctggaggtttttgccttcggcagcctgtgcatcatggccgaaggccgctgctatctttcttcctatctcaccggggaatcgccaaataccgtcggcgcctgctcgcctgcccgcttcgttcgctggcagcaaacgccgcagggactggagtcgcgcctgaatgacgtgttaattgaccgctatcaggacggtgaaaacgcggggtatccgacactgtgtaagggccgctatctggtggacggcgagcgctaccacgcgctggaggagcccaccagcctcaacacgctggaattgctgccggaactgctggccgccaatattgcctcggtgaaaatcgaaggccgccagcgcagcccggcctacgtgagccaggtggcgaaggtgtggcgtcaggccatcgaccgctgcatggcggacccgcaaaactatgctccacaagcggcctggatggagacgctcggcgcgatgtctgaaggcacccaaactacgctcggcgcgtaccaccgtaaatggcagtga

SEQ ID NO: 115431 - DNA, 879 bp, Enterobacter cloacae
atgaaatattcattagggccggtgctttactactggccaaaagagacgctggaagatttttaccagcaggcggctaacagcagcgccgatgtgatttacctcggcgaagcggtgtgcagcaagcgccgcgccaccaaagtgggcgactggctggatatggcgaaaaacctggccggcagcggcaagcaggtggtgctctcgacgctggcgctggtgcaggcgtcctctgaactgggcgagctgaagcgctacgtcgaaaacggtgagttcctgctggaggcgagcgacctgggcgtggtaaacctgtgtgccgagcgtaagctgccgtttgtcgccggacatgcgctgaactgctataacgcggtgaccctgcgcctgttgctcaaacaggggatgacccgctggtgcatgccggttgagctctcccgcgactggctggccaacctgctgaatcagtgcgaagagctgggcattcgcaacaagtttgaagtggaagtcctgagctatgggcatctgccgctggcctactctgcccgctgcttcaccgcacgttccgaagatcgcccgaaagacgagtgcgaaacctgctgcattaagtacccgaacggccgcagtatgctgtcgcaggagaaccagcaggtgtttgtcctcaacggcattcagaccatgagcggttacgtctataacctcggcaacgaactggcgtcaatgcacgggctggtggatatggtgcgtctttcgccgcttgataccggtgttttcgccatgctggacgccttccgcgccaatgaaaacggcgcctcgccgctaccgttgaccgcaaacagcgactgcaacggttactggcgacgtctcgccgggctggaattgcaggcgtaa

SEQ ID NO: 115432 - DNA, 1008 bp, Enterobacter cloacae
atgactgacaaaaccattccgttttcggtgctggatctggcgccgatcccacaaggctcctcggccagagaagccttcacgcactctctcgatcttgctcagcttgccgaaaagcgcggctatcaccgctactggctggcggagcaccacaatatggtgggcatcgccagcgccgccacctcggtgctgattggctatctggcggcgaataccaccactctgcacctgggctccggcggcgtgatgctgccgaaccacgccccgctggtgattgccgagcagttcgggacgctgaataccctttatccgggccgtattgatctagggcttggccgcgcgccgggcagcgaccagccgaccatgcgcgccctgcgtcgccatatgagcggcgatatcgataacttcccgcgcgatgtggccgagctggtggactggtttgacgcgcgggatccgaacccgcacgtgcgtcctgtgccggggtacggggaaaagatcccggtatggctgttaggctcaagcctgtacagcgcgcagctcgccgctcagctggggctgccgttcgcgttcgcttcccacttcgcaccggatatgctgcatcaggcactgcatctttatcgtacgcacttcaaaccgtctgaacgtctggagaagccgtatgcgatggtgtgtatcaatatcattgcagccgacagcaaccgcgacgcggaattcctgtttacctctatgcagcaggcgtttgtgaagctgcgtcgcggcgagacgggccagctgccgccgccggtagagaatatacatcagctgtggtcggcctccgagcagtatggcgtgcagcaggctctgagtatgtcgctggtgggtgataaggcgaaagtgcgtcacgggctggaggcggtgctgcgtgaaacgcaggcggatgagattatggttaacggccagattttcgatcaccaggcgcgtctgcattcgtttgatttagcgatgcaggtgaaagaggagttggtggggtag

SEQ ID NO: 115433 - DNA, 1245 bp, Enterobacter cloacae
atggcaacactaaccaccacccaaacgtcaccttcgctgcttggcggcgtggtgatcatcggcggaaccatcattggtgccgggatgttttccctgcctgtggtcatgtccggtgcgtggttcttctggtcgctggcggcgctggttttcacctggttctgcatgctccattccgggctgatgatccttgaagcaaacctgaactaccgcattggctccagcttcgacaccatcacccgggatctgttgggcaaaggctggaacctggtgaacgggctgtccatcgcgtttgtactctatatcctgacctacgcgtacatttcagcgagcgggtcgattctgcatcacaccttctcagagatgtcgctgaacgttccggcgcgtctggcgggtctctgcttcgcgctgggcgtggcgtttatcgtctggatgagcaccaaagcggtcagccgcatgacggcgatcgtgctgggcgcaaaggtcatcaccttctttctgaccttcggcagcctgctggggcacgtcacgccggccacgctgtttaacgttgcggaagtgaacacctcctacacgccgtacctgctgatgacgctgccattctgtctggcgtcgttcggctaccacggcaacgtaccgagcctgatgaaatactacggcaaggatccgcgcaccatcgtgaaatgcctggtttacggcacgctgctggcgctggggctgtatgtgatctggctgctggggacgatgggtaacatcccgcgtccggaatttatcggcattgcgcagaagggcggtaacattgatgtgctggtacaggcgctgagcggcgtgctgaacagccgcagcctggatctgcttctggtggtcttctctaactttgcggtggcgagctcattcctcggcgtgacgctgggcctgtttgactacctggcggatctgtttggttttgatgactctgcgatggggcgcttcaaaaccgcgctgttgaccttcctgccaccgattgtgggcggcctgctgtggccgaacggtttcctgtacgccatcggctatgcgggactggcggccaccatctgggcggcgattgtaccggcgctgctggcgcgcaaatcacgtaagcgcttcggcagcccgaaattccgcgtctggggcggaaaaccgatgattgcgctgattctggtatttggtatcggcaacgcggtggtgcacgtgctgtcgagttttaatctgttgcctgtgtatcagtaa

SEQ ID NO: 115434 - DNA, 1896 bp, Enterobacter cloacae
atggctgaattcgaaaccacttttgcagatctgggcctgaaggctcctatccttgaagcccttaacgatctgggttacgaaaaaccatctccgatccaggctgagtgtatcccacacctgctttctggtcgtgacgtgctgggcatggcccagactggtagcggtaaaaccgcagcattctcgctgccgctgctgaacaacattgatccggacctgcgcgcgccgcagatcctcgtcctggctccaacccgtgaactggctgttcaggttgctgaagccatgacggaattctctaaacatatgcgcggcgtaaacgtggtagccctgtacggcggccagcgttatgacgtgcagttacgcgccctgcgccagggtccacagattgttgtcggtacgccgggccgtctgctggatcacctgaagcgcggtaccctggacctctctaaactgagcggtctggtactggacgaagccgatgaaatgctgcgtatgggcttcatcgaagacgtagaaaccatcatggcgcagatcccggaaggtcatcagaccgctctgttctctgcaactatgccagaagcgatccgtcgcattacccgccgcttcatgaaagagccgcaggaagtgcgtattcagtccagcgtgaccactcgcccggacatcagccagagctactggtctgtgtacggcatgcgcaaaaacgaagcgctggtacgtttcctggaagcggaagattttgatgcggcgatcatcttcgttcgtaccaaaaacgcgaccctggaagtggctgaagccctggagcgtagcggctacaacagcgcagcgctgaacggcgacatgaaccaggccctgcgtgagcagactctggagcgtctgaaagacggtcgtctggatatcctgattgcaaccgacgtggcagcacgtggcctggacgttgagcgtatcagcctggttgtaaactacgatatcccaatggactccgagtcttacgttcaccgtatcggccgtaccggtcgtgcgggtcgtgcaggccgtgcgctgctgttcgttgagaaccgcgagcgtcgtctgctgcgtaacattgaacgcaccatgaagctgaccattccagaagccgagctgccaaacgcagaactgctgggcaaacgccgtctggaaaaattcgccgcgaaagtacagcagcagctggaaagcagcgatctggatcagtaccgtgcgctgctgtcccagatccagcctgtcgctgaaggcgaagagctggacatggaaaccctggccgcagcactgctgaaaatggcgcagggcgaacgtagcctgatcgtgccacctgatgcgccgatgcgtcctaagcgtgagttccgtgaccgtgacgatcgtttcgaacgtcgtggcgaccgtaacgaccgtggtccacgcggtgaccgtccagagcgtggtggtgaagaccgtccacgtcgcgagcgtcgtgacgctggcgaaatggaactgtatcgcattgaagtgggccgtgatgatggtgttgaagttcgtcacatcgttggcgcgatcgctaacgaaggcgacatcagcagccgttacatcggtaacatcaagctgttcggttcccactccaccatcgagctgccaaaaggcatgccgggcgaagtgctgcaacactttactcgcacccgcatcctgaacaagccgatgaacatgcagctgctgggcgatgcacagccacgtcctgaccgtggcggcgaacgtcgtggcggtggtcgcggtttcggtggcgagcgtcgtgaaggcggtcgcagcgaaggtcgcggtggtgaaggccgtcgtttctccggtgagcgccgcgaaaaccgtggtccacgccgtgaagaaggcgccagccgtcgtcgtttcggtgacgcgtaa

SEQ ID NO: 115435 - DNA, 885 bp, Enterobacter cloacae
atgaagccttttttgcgctggtgtttcgttgcgacagctttaacgctggcaggatgcagcaactctgcctggcgtaagagcgaagtcctcgcagtgccattgcaaccgactttgcagcaggaagtcattctggcacgcatggaacaaatacttgccagtcgggctttaaccgatgacgaacgcgcacagcttttatatgagcgcggagtgttgtatgatagtctcggtctgagggctctggcgcgaaatgatttttcacaagcgctggcgattcgacctgatatgcctgaagtattcaattacttaggcatttatttaacgcaggcaggcaattttgatgctgcctatgaagcgtttgattctgtacttgagcttgatccaacttacaactacgcgcacttgaatcgcggtatcgcattgtattacggcggtcgtgataagttagcgcaagatgatctgctggcgttttatcaagacgatcctaatgatcctttccgcagcctgtggctttacatcgttgagcagaagctcgatgagaagcaggccaaagaagcactgaaacagcgcttcgagaaatcggacaaggaacagtggggatggaacattgtcgagttctacctgggcaacattagcgaagcaacgctgatggaacgcctcaaggcggacgcaacggataacacctcgctcgctgagcatctcagtgaaaccaacttctatttaggtaagtactacctaagtctgggggatatggacagcgctacggcactgttcaaattagcggttgctaacaacgtacataacttcgttgagcaccgttatgcattgttggaattatcgctcttgggccaggagcaagacgacctggcagaatcggaccagcaatag

SEQ ID NO: 115436 - DNA, 2139 bp, Enterobacter cloacae
ttgctgaatccgatcgttcgtaaattccagtatggtcagcataccgtcacgctggaaaccggcatgatggcgcgtcaggctactgctgccgttatggtaagcatggatgacaccgctgtattcgttaccgtagttggccagaaaaaagctaaaccaggtcaggacttcttcccactgaccgttaactaccaggagcgtacctacgctgccggtaaaatcccgggtggcttcttccgtcgtgaaggccgtccaagcgaaggcgaaaccctgatcgcgcgtctgattgaccgcccggttcgtccgctgttcccggaaggcttcgtaaacgaagttcaggttattgcgaccgttgtttccgttaacccacaggttaacccggacatcgttgctatgatcggcgcatctgcggccctgtcactgtctggtattccattcaatggcccaatcggttccgcgcgcgttggctacatcaacgaccagtacgtactgaacccaactcaggaagagctgaaagagagtaagctggacctggttgttgccggtactgaagccgcggttctgatggttgaatccgaagctgaactgctgagcgaagatcagatgctgggcgctgtggtatttggccacgagcagcagcagatcgttatccagaacatcaacgacctggtgaaagaagccggtaaaccacgttgggactggcagccagaagcggtgaacgaggcgctgaacgcacgcgttgctgcactggcagaatctcgtctgagcgacgcataccgcatcaccgacaaacaggagcgctatgctcaggttgatgtgatcaaatctgaagtgaccgcgaccctggttgccgaagacgaaacgctggacgctaacgagattggcgaaatcctgcacgccatcgagaaaaacgttgttcgtagccgcgtcctggcaggcgagccgcgtatcgatggccgtgaaaaagacatgatccgtggtctggacgtgcgtactggcgtactgccacgtactcacggttctgcgctgttcacccgtggtgaaacgcaggcgctggtaaccgcgaccctgggtaccgcacgtgacgcacagatcatcgacgaactgatgggcgagcgtactgacagcttcctgttccactacaacttccctccgtactctgtgggcgaaaccggtatggttggctcaccgaagcgtcgtgaaattggtcacggtcgtctggcgaagcgcggcgtgctggcagtgatgccagaagcagacaaattcccgtacaccgtacgtgtggtgtctgaaatcaccgaatccaacggttcctcttctatggcttccgtgtgtggtgcctctctggcgctgatggatgcaggcgtgccaattaaagccgccgttgcaggtatcgcaatgggtctggtgaaagagggcgacaactacgttgttctgtctgacattctgggcgacgaagaccacctgggcgatatggacttcaaagtagcgggttcccgtgacggtatctctgccttgcagatggatatcaaaattgaaggtatcaccaaagagatcatgcaggttgctctgaaccaggctaaaggtgcgcgtctgcacatcctgggcgtgatggaacaggcgattaatgcgccgcgtggtgatatttctcagttcgctccacgtatccacaccatcaagatcaatccagacaagatcaaagatgttatcggtaagggcggttctgttatccgtgcactgaccgaagaaacgggcaccaccatcgaaatcgaagatgacggtactgtgaaaatcgcagcaaccgacggcgagaaagcgaaatacgctatccgtcgtatcgaagagatcacggcagaaatcgaagtgggccgtatctacaatggtaaagtgacccgtatcgttgactttggcgcattcgttgccatcggtggcggtaaagaaggtctggtacacatctctcagatcgctgacaagcgcgttgagaaagtgaccgattacctgcaaatgggtcaggaagtaccggtgaaagttctggaagttgaccgccagggccgtatccgtctgagcattaaagaagcaaccgagcagtctcagcctgctgcggcgccggaagctccggctgctgaacagcaaggcgagtaa

SEQ ID NO: 115437 - DNA, 270 bp, Enterobacter cloacae
atgtctctaagcgttgaagctaaagctaaaatcgtttctgagtttggtcgtggtactaacgacagcggttctaccgaagttcaggttgcactgctgactgcacagattaaccacctgcaaggtcactttgcagagcacaaaaaagatcaccacagccgtcgtggtctgctgcgtatggtttctcagcgtcgtaaactgctcgactacctgaagcgtaaagatgttgcacgctacaccgcgctgatcgagcgtctgggcctgcgtcgctaa

SEQ ID NO: 115438 - DNA, 951 bp, Enterobacter cloacae
atgagtcgtcctcgtcgtcgcggtcgtgacgtgcatggcgtgctgttgctggataaaccacagggcgcatccagcaacgacgtgctgcaaaaagtgaagcgtatttataacgccaaccgtgcagggcacactggcgcgctggatccgctggcaaccggcatgctgccgatctgcctgggggaagcgacaaagttttcccagtacctgctggattcggataagcgctaccgcgtgattgccaaactgggccagcgcacggatacctccgatgcagatggcctggtggtggaagagcgcccggtgaccttcagcgcggagcaacttgatgcggcgctggacagcttccgtggtgatacgctacaggtgccgtcgatgtattcggcgctgaaatatcagggcaaaaagctctacgaatatgcgcgtcagggcattgaggttccgcgtgaagctcgtccgattaccgtgtatgagttgctgttcattcgccacgaaggtgatgaactcgagctggaagtacactgttcgaaagggacctatatccgcaccatcattgatgacctcggtgaaaagctgggctgcggctcgcatgtgatttatctgcgtcgtctggcggtcagcaaatatccggtcgaacgcatggtgacgcttgagcatctgcacgccctggttgaacaggcgcaagcgcagggcgttgcgccagccgatctgctggacccgctgctgatgccaatggacagtccggcagtggacttcccggttgttaatcttcctttaacatcgtccgtttactttaagaacggaaacccggttcgcacatcgggggcgccgcttgagggcctggtacgcgtgacggaaggtgacgaagggaaattcatcggtatgggcgaaatggacggcgaagggcgtgtggcgccgcgtcgtctggtcgtcgaatatccggtcgaagcgtga

SEQ ID NO: 115439 - DNA, 405 bp, Enterobacter cloacae
atggcgaaagaatttggtcgcccacagcgcgtcgcgcaggagatgcagaaagagatcgctctcattctgcaacgtgaaatcaaagatccacgcgtgggtatgatgaccaccgtgtctggcgtggaaatgtcccgcgacctggcgtacgccaaagtgtttgttactttcctgaatgaccaggatgaagacgccgtgaagaacggcattaaagcgttgcaggaagcctctggtttcatccgctctctgcttggcaaagcaatgcgcctgcgtatcgtgccagagctgaccttcttctacgacaactcgctggttgaaggtatgcgtatgtccaacctggtgaccagcgtggtgaaacatgacgatgagcgtcgtgttaacccggcggacgacagcaaggaggactga

SEQ ID NO: 115440 - DNA, 2688 bp, Enterobacter cloacae
atgactgatgtaactgtaaaatcgctggctgctgagattcagacctccgtggaccgcctggtacagcaatttgctgatgcagggatcccgaagtccgctgatgactcggtgaccgcgcaagaaaaacaaaccttgttagcgcacctgaaccgtgaacacggctctacgcctgacaagttaacgctacagcgtaaaacgcgtagcacgttgaacatccctggtaccggtggcaaaagcaagtcggtacaaattgaagtccgcaagacgcgcacctttgtaaaacgtgatccgcaagaggcagaacgccttgccgcggaagagcaggcacagcgtgaagcggaagaacaagctcagcgtgaggcagaagccactgccaaacgtgaagcagaattaaaagctgaacgtgaggccgcagaaaaagcgaaacgcgacgccggtgaaaaagcgaagcgtgacgctgcggaaaaagacaaagtgagcaatcaacagaccgacgaaatgaccaaaactgcccaggctgaaaaagcccgccgtgaaaatgaagctgccgagctgaagcgtaaagcggaagaagaagcccgccgcaagcttgaagaagaagctcgccgcgtcgccgaagaagcgcgtcgcatggcagaagaaaacgagaagaacggtgtgaataccgctgaaccaactgaagataccagcgattatcacgtcaccacgtctcagcatgcgcgtcaggcagaagacgacaacgaccgcgaagttgaaggtggtcgtggccgtactcgcagtgcaaaagctgcgcgtcctgcgaaaaaaggtaacaaacacgccgaatcaaaagctgaccgtgaagaagcgcgtgcagcggttcgcggcggtaaaggcggcaagcgtaaaggttccgctctccagcagggcttccagaagcctgctcaggccgttaaccgtgacgttgtgatcggcgaaaccatcaccgttggcgaactggctaacaagatggcggtgaaaggctctcaggtcatcaaagcgatgatgaaactgggcgcaatggccaccatcaaccaggtcatcgaccaggaaaccgcacagctggttgccgaagagatgggccacaaagttatcctgcgtcgtgaaaacgagctggaagaagcagtcatgagcgaccgtgatacgggcgcagcggctgaaccgcgcgcaccggtcgtgaccatcatgggtcacgttgaccacggtaaaacctctctgcttgactacattcgttctactaaggttgcctccggcgaagcgggtggtattacccagcacatcggtgcttaccacgtagaaaccgaaaacggcatgatcaccttcctggataccccaggccacgcagcgtttacctcaatgcgtgctcgtggtgctcaggcaacggatatcgttgttctggttgttgctgccgacgatggcgtgatgccacagaccattgaagctatccagcacgcgaaagcggcgcaggtgcctctggttgtcgcagttaacaaaatcgataagccagaagccgatatggatcgcgtgaagaacgaactgtcccagtacggcgttatgccggaagagtggggcggtgaagcgcagttcatccctgtatctgcaaaagcaggtaccggtatcgacgacctgctgaacgctatcctgcttcaggctgaagttctggagctgaaagcggttcgtaaaggtatggcgagcggcgcggtaatcgaatccttcctggataaaggtcgtggtccggttgcaaccgttctggttcgcgaaggtactctgcacaagggcgacatcgttctgtgtggtttcgaatacggtcgcgttcgtgcgatgcgtaacgaactgggtcaggaagtgctggaagcgggtccgtccattccagtggaaattctcggcctgtccggtgttccggctgccggtgacgaagtcaccgtggtacgtgacgagaagaaagcgcgtgaagtcgctctgtatcgtcagggtaaattccgtgaagtgaagctggctcgtcagcagaaatccaaactcgagaacatgttcgccaacatgaccgaaggcgaagttcacgaagtgaacatcgttctgaaagcggacgttcagggttctgtggaagcgatctccgactccttgctgaaactgtctaccgacgaagtgaaagtgaagatcatcggttctggcgtaggtggtatcaccgaaaccgacgcaaccctggcagcagcgtccaacgcgatcctggttggcttcaacgttcgtgctgacgcatctgcgcgtaaagtgattgatgctgaaagcctggatctgcgttactactccgtcatctataacctgattgacgaagtgaaagcagcgatgagcggcatgctgtctcctgagctgaaacagcagatcatcggtctggctgaagtacgtgacgtgttcaaatcaccgaaattcggtgcgatcgcgggctgtatggttaccgaagggaccatcaagcgtcacaacccaatccgcgtactgcgtgacaacgtggttatctacgaaggtgagctggaatccctgcgccgcttcaaagatgacgttaacgaagtccgtaacggcatggaatgtggtatcggcgtgaagaactacaacgacgttcgcgttggcgatatgatcgaagtgttcgagatcatcgaaattcagcgtaccatcgcgtaa

SEQ ID NO: 115441 - DNA, 1503 bp, Enterobacter cloacae
atgaacaaagaaattttggctgttgttgaagccgtctccaacgagaaatcactgccgcgtgagaagattttcgaagcgctggaaagtgcactggctacagcaaccaagaaaaaatacgaacaagagatcgatgttcgcgtagaaatcgatcgtaaaagcggtgacttcgatacattccgtcgttgggtaatcgttgaagaagtgacccaaccgaccaaagagatcacgctggaagcggcacgttttgaagacgaaagtctgaacgtgggtgactacgttgaagatcagattgaatctgttaccttcgaccgtatcaccacccagaccgcgaagcaggttattgtgcagaaagtgcgcgaagccgagcgcgcgctggttgtcgatcagttccgcgatcaggaaggcgaaatcatcactggtgtggtgaagaaagtgaaccgcgacaacatctctctggagatcaaatccgaagggctgccgggtaacgctgaagccgtgatcctgcgtgaagacatgctgccgcgtgaaaacttccgcccaggcgaccgtattcgtggtgtgctgtatgccgtacgtcctgaagcgcgtggtgcacagctgttcgtgacgcgttctaaaccagaaatgctggttgaactgttccgtatcgaagtgccggaaatcggcgaagaagttatcgaaatcaaagcggcggcccgcgatccgggttcccgtgcgaaaattgcggtgaaaaccaacgacaagcgtatcgacccggtcggtgcttgcgtcggtatgcgtggcgcacgtgttcaggcggtttctaccgaactgggcagcgagcgcattgatatcgttctgtgggacgataacccggcgcagttcgtgatcaacgcaatggcaccggctgatgtggcgtctatcgttgttgacgaagacaaacacaccatggatatcgctgtagaagcgggcaacctggcgcaggcgattggccgtaacggtcagaacgtacgtctggcgtcacagctgagcggctgggaactcaacgtgatgaccgttgatgaccttcaggccaagcatcaggctgaagcccacgcggcgatcgataccttcaccaaatacctggacattgacgaagacttcgccactgtgctggttgaagaaggtttctctacgctggaagaactggcctacgtgccaatgaaagagctgctggaaattgacggtctggatgaaccaaccgttgaagccctgcgtgaacgcgctaaaaacgcactgaccaccctggcgctggctcaggaagaaagccttggcgataagaagccggctgatgacctgctgaatctggaaggtcttgatcgtgcgattgcgttcaagctggctgcccgtagtgtttgtacgctggaagatctcgctgagcaaggcgttgatgacctggccgatatcgaaggtttaaccgacgagaaagccggcgaactcatcatggccgcacgtaatatttgctggttcggcgacgaagcgtaa

SEQ ID NO: 115442 - DNA, 453 bp, Enterobacter cloacae
ttgtccacattagagcaaaaattaacagagatgattactgcgccggtcgaagcactgggctacgaactggtcggcatcgaattcgttcgcggccgtacatccacactgcgcatctatattgatagtgaagatggcatcaatgttgatgattgtgctgatgtcagccaccaggtgagtgcggttcttgatgttgaagatccgattaccgttgcgtacaacctggaagtttcctcacctggcctcgatcgtccgatgttcacggccgagcactacgtgcgctttaccggtgaagaagtggctctcgttctgcgtatggccgtacagaaccgccgtaaatggcagggaattatcaaagccgttgatggtgaaatgatcacggtgacagtcgaaggcaaagatgaagtgttcgcgctgagtaatatccagaaggcgaacctggttccccacttttaa

SEQ ID NO: 115443 - DNA, 1347 bp, Enterobacter cloacae
atgacgacgattctcaagcatctcccggtaggacaacgtattggcatcgctttttctggcggcctggataccagcgctgcactgctgtggatgcgccagaagggagcggttccttatgcatatactgcgaacctgggtcagccggacgaggaagattatgacgcgatccctcgtcgtgccatggaatatggcgcagagaacgcacgtctgatcgactgccgtaagcagctggttgccgaagggattgccgcaatccagtgcggtgctttccataatacgaccggcggcctgacctatttcaataccaccccgctgggtcgtgccgtcaccggcactatgctggttgccgccatgaaagaagatggcgtgaacatctggggggacggtagcacctataaaggcaacgatattgaacgtttctatcgttatggcctgctgaccaacgccgagttgcagatctacaaaccgtggctggataccgacttcatcgacgagctgggtggccgtcatgaaatgtctgagtttatgattgcctgcggctttgactacaagatgtccgttgagaaagcctactcaaccgactccaacatgctgggtgcgacgcacgaagcgaaagacctggaattcctgaactccagcgtaaaaattgttaacccgatcatgggcgtgaagttctgggatgagaacgtgaagatcccggcggaagaagtgaccgtgcgtttcgaacgtggtcatccggttgccctgaacggtaaaaccttctccgacgatgttgaactgatgctggaagcaaaccgcatcggcggtcgtcacgggctgggtatgagcgatcagatcgaaaaccgtatcatcgaagcgaaaagccgcggcatttacgaagctccggggatggcgctgctgcacatcgcttacgagcgtctgctgaccggtattcacaacgaagacaccattgagcagtatcactctcatggccgtcagctgggcaaactgctgtatcagggtcgctggtttgatccacaggcgctgatgctgcgtgacgccctgcaacgttgggtggcaagcgcaatcaccggcgaagtgaccctggaactgcgtcgcggcaatgattactccatcctcaataccgtgtctgacaacctgacctataaagcagagcgtctgaccatggagaaaggtgagtcagtgttctctccggacgatcgtattggccagctgaccatgcgtaacctggacatcaccgatacccgtgagaagctgttcaactatgttgagaatggcctgctctccgccagttccggtaatggcctccctcaggttgagaacctggaacacagcgataagaaataa

SEQ ID NO: 115444 - DNA, 333 bp, Enterobacter cloacae
atgtacgaagctcttttagttattttccttattgtagccatcgctctcgtagcgctgattatgctacagcaaggtaaaggcgctgatatgggagcctccttcggagcgggcgcttccggtacgctgttcggttcaagtggttctgcgaacttcatgacccgtacgacggcgattctggctacgctgttcttcatcatcagtctggtgctgggcaatatcaacagcaacaagaccagtaaaggaagcgagtgggaaaatctgagcgcgccagcaaaaactgagcaaactcagccagctgcaccggctaagccaaccagcgatatcccgcagtaa

SEQ ID NO: 115445 - DNA, 1338 bp, Enterobacter cloacae
atgagtaatcgtaaatattttggtaccgatggcatccgtgggcgcgtaggcgatgcgccaattacccctgactttgtcctgaagctgggctgggcagcggggaaagtgctggcgcgtcatggctcccgtaagatcattattgggaaagatacccgtatttcgggttatatgctggagtccgcgctggaagccgggctggcggcggcggggctttcagcttcctttacggggccaatgccgacccctgctgttgcctatctgacccgcaccttccgtgcggaagcgggcatcgtcatttcagcttcccataatccgttctatgacaacggtatcaaattcttctccatcgacggcaccaaactgccggatgacgtggaagaggcgattgaagcggaaatggaaaaagagatcacctgtgttgactccgctgagctgggtaaagcaaaccgtattgtcgatgccgcaggccgctacattgaattctgcaaaggcactttcccgaatgagctgagcctggcacacctcaaaattgtggtggactgtgccaacggtgcgacttaccacattgcgccgaatgtgttccgcgagctgggtgccaaagtgatcactatcggctgcgagccggatggtctgaacatcaacgaagaagtcggcgcgacagacgtgcgtgcgttgcaggcgcgtgtgctggctgaaaaggccgatctgggtattgccctggatggcgatggtgaccgtgtgatcatggttgaccacgagggtaacaaggtcgatggcgatcagatcctctacatcattgcccgtgaaggcctgcgtcaggggcaactgcgcggtggcgcggtgggcacgctgatgagcaatatgggcctggaactggcgttgaaacagctgggcatcccgtttgttcgtgcgaaagtgggtgaccgctacgtgctggaaaaactccaggagaaaggctggcgtattggcgcggaaaactccggccacgtgatcctgctcgataaaaccaccaccggtgacggtattgtggcggcgcttcaggttgttgccgcgatggcgcgtaaccatatgagcctgcacgatctgtgcagcggcatgaaaatgttcccgcagattctggtcaatgtgcgtttcaccgcgggtaaaggcgacccgctggaaaatgataacgtgaaagcggtgatggcagaggtggaagcgactcttggcagccgtgggcgcgtcctgctgcgtaagtcgggtaccgagccgctgatccgcgtgatggtggaaggcgaagacgaagcgcaggtaaccgaatttgcgcaccgcattgcggatgcagtcaaagctgcataa

SEQ ID NO: 115446 - DNA, 849 bp, Enterobacter cloacae
atgaaactattcgcccaggactcgcatctcgacctttcacatccccatgtgatggggatcctgaatgtcacgcctgattccttctctgacggcggcacgcataattcgcttatcgacgcggttaaacacgcgaatttaatgattaacgcgggtgccactatcattgacgttggaggggagtcaacgcggcctggcgcggcggaggtttcagtggaagaagagctggcgcgcgtggtgccggtggtggaggctatcgcccggcgctttgaagtgtggatctccgttgatacctccaaacccgaagtgatccgtgaagtggcgagagtgggcgctcacattatcaatgatatccgctcgctgaccgagccgggcgcgattgaagccgccgcagaaaccgggctaccggtgtgtctgatgcatatgcagggtcagcctaagacaatgcaggaggcgccaaaatatgaagatgtgtttgccgacgtcacccgcttctttattgagcatatcgaacgctgtgaacgtgcgggtatcgcaaaagagaaattgctgctcgacccgggcttcggtttcggtaaaaatctctcacacaattacgcgttgcttgcgcgcttatcagagtttcatcagttcggcctgccactgctggtgggaatgtcgagaaaatcgatgattggtcagttgttgaatgtcgggccgagcgaacgtctgagcggcagtctggcctgcgcggtgattgccgcgatgcaaggtgcacacatcattcgcgtccatgacgtaaaagaaacagtagaagccatgcgtgtggtagaagccacactggcagcgaaggaaaacaaacgctatgagtaa

SEQ ID NO: 115447 - DNA, 1944 bp, Enterobacter cloacae
ttgagtgacatggcgaaaaacctaatactctggctggtcattgccgttgtgctgatgtcagtattccagagctttgggcccagcgagtcgaatggccgcaaggtggattattctaccttcctgcaagaggtcaatcaggaccaggttcgcgaagcgcgtatcaacggacgtgagatcaacgttaccaagaaagatagtaaccgttacacgacttacatcccggtgaacgatcctaagctgcttgataaccttctgaccaaaaacgtcaaagtggtaggcgagccgccggaagaaccaagcctgctggcttctatcttcatttcctggttcccgatgctgcttcttatcggcgtctggatcttctttatgcgccagatgcagggcggtggtggcaaaggtgccatgtcgttcggtaagagcaaggcgcgtatgctgacggaagaccagatcaagaccacgtttgctgacgtagcaggttgtgacgaagcaaaagaagaggtgggtgaactggttgaatacctgcgcgagccgagccgtttccaaaaactgggcggtaagatcccgaaaggcgtcctgatggtcggccctccgggtaccggtaaaaccctgctggcaaaagccatcgcgggtgaagcgaaggtgccgttctttactatttcaggttctgacttcgttgaaatgttcgtgggtgtcggtgcatctcgtgtgcgtgacatgttcgagcaggctaagaaggcagcaccgtgcatcatcttcatcgatgaaatcgacgccgtaggccgccagcgtggcgcaggcctgggtggtggtcacgatgaacgtgagcagacgctgaaccagatgctggttgagatggacggcttcgaaggtaacgaaggtatcatcgttatcgcggcaactaaccgtccggacgtactcgaccctgcgctgctgcgtccaggccgttttgaccgtcaggttgtggtcggtctgccggatgttcgcggtcgtgaacagattctgaaagtgcatatgcgacgcgtaccgctggcgccagatatcgacgcggcaatcattgcgcgtggtactccaggcttctccggtgcggatctggctaacctggtcaacgaagcagcactgtttgccgctcgcggtaacaagcgcgtggtgtccatggtggaattcgagaaagcgaaagacaaaatcatgatgggggcggaacgtcgctccatggtgatgacggaagcgcagaaagagtccacggcatatcacgaagcgggccacgcgattatcggtcgtctggtgccggaacacgatcccgtacacaaggtgacgattattccgcgcggtcgtgcgctgggtgtgaccttcttcctgcctgaaggcgacgcgatcagcgccagccgtcagaagctggaaagccagatttcaaccctgtacggcggtcgtctggctgaagagattatctacggtgcggaacatgtttccaccggtgcgtcgaacgatattaaagtggcgacaaacctggcgcgtaacatggtgactcagtggggcttctccgacaaactcggtccgctgctgtatgcagaggaagagggcgaagtattcctgggccgctctgtggcaaaagcgaaacatatgtccgatgaaacggcacgtatcatcgaccaggaagtgaaagcgctgattgaacgtaactacgctcgcgcccgtcagatcctgaacgacaatatggacatcctgcattcgatgaaagatgcgctcatgaaatatgagaccatcgatgcaccgcagattgacgacctgatggcgcgccgcgaagtgcgtccgccggcaggctgggaagacccaggcgcgtctaacaattctgacaacaatggcaccccgcgtgcgccgcgtccggtcgatgaaccgcgtacgccaaacccgggcaacaccatgtcagagcagttgggcgacaagtaa

SEQ ID NO: 115448 - DNA, 627 bp, Enterobacter cloacae
atgacaggtaaaaagcgttctgccagctccagccgctggcttcaggaacactttagcgataaatatgttcaacaggcgcagaaaaaggggttgcgttcccgcgcctggtttaaacttgatgaaatacagcaaagtgacaaactttttaaaccgggaatgacggtggtcgacctcggtgcggcacctggcggatggtcccagtatgcggttacgcagatcggcggaacgggccgaatcatcgcatgcgatcttttaccaatggatcccatcgtcggtgtcgacttccttcagggcgactttcgtgatgaattagtgcttaaagcactacttgatcgtgtaggtgacagtaaggtccaggttgtcatgtcggatatggcgccaaatatgtgtggaacaccggcggtggatatcccccgcgccatgtatctggtggaactagcgttagaaatgtgtcgtgatgtactagcgcctggtggtagttttgttgtgaaggtgtttcagggcgaaggtttcgaggagtatcttaaggaaattcgctccctgtttgcgaaggtcaaagttcgtaagccggactcttcccgggcccgttcccgtgaagtgtatattgtagcgaccgggcgaaaatga

SEQ ID NO: 115449 - DNA, 333 bp, Enterobacter cloacae
atgaaccgttttcaatcccaacgtaagcaaaaatatacgatgaatctgagtactaaacaaaaacagcaccttaaaggtctggcacatccgctcaagcctgtagtgatgcttggcaacaatggtttgaccgaaggggtgcttgccgagattgaacaagcgctggaacaccacgagctgatcaaggtgaaaatcgcctctgaagacagagacactaaaaacctgatcgtggaagccatcgtgcgcgaaaccggcgcctgtaatgtacaggtcatcggtaaaacgctggtgctctatcgcccatctaaagagcgcaaaatctcgctgccacgttaa

SEQ ID NO: 115450 - DNA, 477 bp, Enterobacter cloacae
atgcaagctattccgatgaccttacgtggtgccgaaaaactgcgcgaagagctggattttctcaaatccgtgcgtcgccctgaaatcatcgccgctatcgcggaagcgcgtgagcatggcgacctgaaagagaatgctgaataccacgcggcgcgtgagcagcagggtttctgtgaggggcgcattaaagatatcgaggcgaaactgtctaacgcgcaggttatcgatatcaccaaaatgccaaataatggccgtgtgatcttcggctctaccgtcagcgtcctgaatctggacaacgacgaagagcagacctatcgcatcgtgggtgatgatgaagcggacttcaaacagaacctgatttcggtgaactcgccgattgctcgtggcctgattggcaaagatcaggacgatgtggtcaccatccgcacccctggtggtgaagtggaatacgaaattattaaggttgaatacctgtaa

SEQ ID NO: 115451 - DNA, 1434 bp, Enterobacter cloacae
atgcgattttccagttttatcatcggattgactaccagtataacgttcaccgttcaggccgcgaatgttgatgagtacattaatcaactgcccgccggcgcgaaccttgccctgatggtgcagaaggttggcgcgcaggctcccgagattgactatcacagtcaacagatggcgctgcctgccagtacccagaaggtgatcactgccctcgccgccctgctccagctcgggcctgacttccgttttactaccacccttgaaaccagaggtaacgttgagggtggcgaactgaaaggcgatcttatcgcccgttttggtggcgatcccacctttaagcgccaggatgtccgcaatatggtggcggtactgaaaaaatccggcgtaacaaaaattgatggcaacgtgctgatcgacacctccattttcgccagccacgataaagcgcctggctggccgtggaacgacatgacgcagtgctttagcgccccgccagccgccgccatcgttgaccgtaactgcttctccgtatcgctttacagcgcgccaaaaccaaatgacttagcttttatccgcgtggcctcatactacccggtcacgatgttcagccaggtgcggacgctggcgaaaggctccccggaggcgcagtattgcgagctggacgtggtaccgggcgatctcaatcgctatacgctcaccggctgcctgacccagcggtccgatcccctcccgctggccttcgccattcaggatggcgcgggctatgccggtgccatttttaaagatgaactgaagcaggcgggcataacctacaccggaacgctgctgcgccagacgcaggtgaatgagccaggcacggtgatcgccagcaaacagtccgcgccactgcatgatttgcttaagattatgctgaaaaagtcggataacatgattgccgacacggtgttccgcatgattgggcacgcgcgatttggtgtgccgggcacctggcgggccggttctgatgccgtacgtcagatcctgcgccagcaggcgggtatcgatctgggcaatacgatcgccgttgatggttccggtttatcgcgtcctaacctgatctcgccggccaccatgatgcaggtgttgcagtacattgctcagcatgacgctgagctaaactttattacgatgctgccgcttgccggacacgacggctctcttcagtaccgcgcgggccttcacgctgcgggcgtggatggcaaagtgtcagccaaaacgggttccctgcaaggcgtttacaaccttgccggttttatcactaccgccagcggacaacgcatggcatttgtgcagtatctttccggctatgccgtcgaaccggctgaccagcgcaatcgccgtattccactggtgcgtttcgaaagcaggctctataaggacatctaccagaataactag

SEQ ID NO: 115452 - DNA, 663 bp, Enterobacter cloacae
atgaaactactgatagttgaagacgatctgttattgcaggaagggttagcgctggcgctggggaatgaaggctacgccctggattgtgccaccacggccgctgaagcagatgccctgatccagagcggtgaatacagcctcgtgatcctggatttagggctgccggataaagacggcgcgacgctgctctgccagtggcgtcgtcgcggggttgagaatcccgtcttgattctcaccgcccgcgatgccattgaagacagaattaacgggctggattctggcgctgacgattatctggtaaaacccttcgcccttgccgagctacaggctcgcgtacgggcgttgatccgccgctatcagggccatagcgacaacctgctgacggacggagatatcaccctcaatctgcaaactcagcaggtgctgcgccagtttcagcctgtggaagtgacgccaaaagagttcgctctgctgacgcgcctgatcatgcgcagcgggcagaccgtgcaccgtgaaacgctgcaacaggacatctactcctggcaggacgatccaggatcaaacacgcttgaagttcacattcataatctgcggcgcaagctcggtaaagatcgcatcaaaaccgtacgcggcgtgggttaccgtctggagagccagaaatga

SEQ ID NO: 115453 - DNA, 1044 bp, Enterobacter cloacae
atgaacagtatgcgccggcgattaatggtgttgctggcggttattctgctattttttcaactcattagcgttgtctggctgtggcatgagagccgcgagcagatcggttttctggtgaacgaaacgttgtccgccaaagcgcgcaacaaccatgtcgaaaaagagatccgcgaagccattgcctccctgctggtcccttctctggtgatggtcggttttaccctgctcttctcattttgggccgtcacctggatcacccgaccactcaacaaacttcgcgccagccttgcgaaccgttcggcggataatctgactcccctgccgatgtattccgatatggaagagataggcgctgtgaccacgtcgctcaatcaactcctcgcccggctggaccacactattcaacaggaacgcctgtttaccgccgatgcggcacacgagttacgtacgccgcttgcggggattaggctccatctggaactgatggctcagtccggttccccgcaggccacgccactgataagccgtatcgatcagttgatgcacacggtggaacagctgctgatgctggcgcgtgccgggcaggcgatggccagcggccattacgataccgtgaactggacggagacgatcattgctccgctcagcctggagcatgaagccaaagagcatacggtaatatggccggcccacagcgcgctgacggtacagggggacgccgtcctgttacgtctgatgctaaggaaccttctggagaatgccgcccgctacagcccggcaggcacaaccattgaagtggcattaacagcgacggagggcggtacccgggtgagcgttaccgatcaggggccgggtattgatgaggcgcaccgccagtcgatcaccgaacctttccgacgtctcgaccagcgctacggcggcagcggccttgggctgagcatcgtacagcgtatcgtacagctccatcatggccatttaacgctggagaacggcgctgagggcggcctcatcgccagctgttggttaccggcgaaaataggataa

SEQ ID NO: 115454 - DNA, 1176 bp, Enterobacter cloacae
atgaagtttgttgatgaagcgacgattctggtcgtggcaggtgatggcggtaacggttgtgtaagcttccgccgtgaaaaatatattcctcgtggcggtcctgacggcggtgacggtggggacggtggcgacgtgtggctggaggcggatgaaaacctcaacacgctgatcgactaccgtttcgaaaaatctttccgcgccgagcgtggccagaacggccagagccgcgactgtaccggtaaacgcggtaaagacgtgacgatcaaagtgccggtgggtacgcgtgtcatcgatcagggcacgggcgaaaccatgggtgatatgaccaaacacggtcagcgcctgatggtggcgaaaggcggctggcatggtctgggtaacagccgtttcaaatcttccgttaaccgtaccccgcgtcagaaaaccatgggtaccccgggtgataagcgcgacctgcaactggaactgatgctgctggcggatgtggggatgctgggtatgccaaacgccggtaaatcgacgtttatccgtgcggtctctgcggcgaaacccaaagtagcggattatccgtttacgacgctggtgccgagcctgggcgttgtccgtatggataacgagaagagctttgtggtcgctgacatcccgggtctgattgaaggggcagcagaaggcgccggtctgggtattcgcttcctgaagcaccttgagcgttgtcgcgtactgttgcacctcatcgacatcgatccaatcgacggttccgatccggttgaaaacgcccgtatcattattggcgagctggagaaatacagtgaaaaactggcgcaaaaaccgcgctggctggtattcaacaagatcgacctgatggacaaagcggaagctgaagcgaaagctaaagcgattgccgaagcgatgggttggaaagataagtactatctgatctctgccgccagccaggttggcgtgaaagatctctgctgggatgtgatgacctttatcatcgagaatccggttgttcaggcagaagaggcgaaacagcctgaaaaagtcgaattcatgtgggatgactaccaccgccagcagctcgaagagctggaagcggaagaagatgatgaagactgggacgatgactgggatgaagacgacgaagaaggcgtcgagttcatctacaagcactaa

SEQ ID NO: 115455 - DNA, 966 bp, Enterobacter cloacae
atgaagcagcaggccggcatgggtattcttttggcgctcactaccgcaatgtgctggggtgcgctgccaattgcaatgaagcaggtactggaagtcatggagccaccgacggtggtgttttatcgcttcctgatggcaagcataggcctgggcgccattctggccgtcaaaggtaagctgccaccgctgcgcatcttccgaaaaccgcgttggctggtgttactggctatcgcgacgggcggtctgttcggtaacttcattctgttcagctcttccctgcaatatcttagccctacagcgtcgcaggtgattggtcagctttcaccggtcggcatgatggtcgccagcgtattcatcctcaaggagaagatgcgcggcacgcagatcatcggggcaagcatgctgctttgcgggctggtgatgttctttaacaccagcctgattgagatttttacccgcctgacggattacacctggggtgtcatttttggggtgggtgcagcaacggtctgggtgagttatggcgtcgcgcaaaaggtgttattgcgccgtcttgcctcacagcagatcctctttttgctgtacactttgtgtacactggcattattgcctttagcgaagccgggtgtaattacccagctcagcgactggcaactggcgtgcctcattttttgtgggctgaatacgctggtcggttatggcgctctggctgaagccatggcgcgctggcaggcagcacaggtgagcgccttaatcacgcttaccccgctgtttacgctgttattttcagatttgttatcaatggcctggcccgatgtcttcgtcaagccgatgctcaacctgttgggttatctcggtgcgtttgtcgtggttgcgggcgcgatgtattccgccattggtcatcgtctctgggggcgttggcgcaaaaatgaagcggttgtaatagtcccccgctcaggcgaatga

SEQ ID NO: 115456 - DNA, 258 bp, Enterobacter cloacae
atggcacataaaaaggctggcggctccacacgtaacggtcgcgattcagaagctaaacgcctgggcgttaagcgtttcggtggcgaatccgttctggcgggtagcatcatcgttcgtcagcgtggcaccaagttccacgcgggtactaacgtaggttgcggtcgtgaccacactctgtttgctaaagcagacggtaaagtgaaatttgaagttaaaggcccgaacaaccgtaaatacatcagcatcgttgctgagtaa

SEQ ID NO: 115457 - DNA, 312 bp, Enterobacter cloacae
atgtacgcggttttccaaagtggtggtaaacaacaccgagtaagcgaaggtcagaccgttcgcctggaaaagctggacatcgcaactggcgaatctgttgagttcgctgaagttctgatgatcgcaaacggtgaagaagtcaaaatcggcgttcctttcgttgatggcggcgttatcaaagctgaagttgttgctcacggtcgtggcgagaaagttaaaatcgttaagtttcgtcgtcgtaaacactatcgtaagcagcagggccaccgtcagtggttcactgatgtgaaaattactggcatcagcgcctaa

SEQ ID NO: 115458 - DNA, 972 bp, Enterobacter cloacae
atgaatttagaaaaaatcaatgagttaaccgcgcaagatatggcgggtgtgaatgcagcaatcctggagcaactcaactctgacgttcagctgatcaatcagttgggctattacatcgtcagcggcggcggtaaacgtattcgtccgatgattgccattctggccgcacgcgcggttggctatcagggaaatgcccacgtcacgatcgcggcgctgatcgaatttatccacaccgccaccctgcttcacgacgatgttgtggatgaatcagacatgcgtcgtggtaaagccaccgccaacgccgcgtttggtaatgcggcaagcgttctggtaggcgattttatctatacccgagccttccagatgatgaccagccttggctcgctgaaggtgctggaagtgatgtcagaagccgtgaatgttatcgctgaaggtgaagtcctacagctgatgaacgtcaacgacccggacatcaccgaagaaaactatatgcgggtgatttatagcaagaccgcacgtctgttcgaagccgccgcgcaatgctccggcattctggcaggctgcagcgaagctcaggaaaagggccttcaggactatggccgttacctcggcaccgcgttccagctgattgatgatttgctggactacagcgcggatggcgaaacgctcggtaaaaacgtcggcgatgacctgaacgaaggcaagccaacgctgccgctgctccacgcgatgcgcaatggcacaccagagcaggcgaaaatgatccgggaggctatcgagcagggaaatggacgccatcttctggaaccggtactggaaacaatggctatctgcggctccctggaatggacgcgtcagcgcgctgaagaagaagcggacaaagccatcgccgccattcaggtcattcccgacagcccatggcgtgatgcgctaatcggcctcgcgcacatcgccgtccagcgcgaccgataa

SEQ ID NO: 115459 - DNA, 288 bp, Enterobacter cloacae
atggatacaaaattcatcgactggcattctgctgacattattgcggcactgcgtaaaaaaggaacatcgctggctgccgaatcacgtcgtcatgggctaagctcgtcgacgctggcaaacgccctgacccgcccatggccaaagggggaactgattatcgcgacggcgcttgatacgcatccgtgggtgatatggccgtcacgctaccacgatcccattacccatgaatttatcgacagaacgcgcatgatgcgccagagcaaaacgaagaaagcgcatcaggactga

SEQ ID NO: 115460 - DNA, 1260 bp, Enterobacter cloacae
atggataaatttcgtgtacagggacccacgcgtctccagggcgaagtcacaatttctggcgctaaaaacgccgcgctgcccattcttttcgctgcgctgctcgcagaagagccggtagagatccagaacgtaccgaagctgaaagatatcgacacgaccatgaagttgctcggccagttgggcaccaaagtggagcgtaacggttccgtctggatcgatgccagcaacgtgaacaacttctcagcgccgtatgagctggtgaaaaccatgcgtgcttccatctgggcgcttggtccgctggtggcgcgtttcggtcagggacaggtttcactgccgggcggatgcgctatcggcgcgcgtcccgttgacctgcatatcttcggcctggaaaaactcggcgcggagatcaagctggaagagggttacgttaaagcgtccgtcaatggtcgtctgaaaggcgcgcacattgtcatggacaaagtgagcgtgggcgcaacagtcaccatcatgtcggctgctacgctggcagaaggcactaccatcatcgaaaacgccgcccgtgagccggagatcgtggataccgcgaacttcctggtcgcgctgggggcgaagatcagcgggcagggcacagaccgtatcaccatcgaaggcgttgaacgtctgggtggcggtgtgtaccgcgttctgccggaccgtatcgaaaccggtactttcctggtggccgcagccatttctggcggtaagattgtctgccgtaacgcccagccggataccctggatgcggtgctggcgaagctgcgcgatgcgggtgcggacattgaaatcggtgaagactggatcagcctcgatatgcacgggcagcgtcctaaagccgttaacgtgcgtactgcgccacatccggcattcccgacggatatgcaggcacagttcacgctgttgaacctggtggccgaaggcacgggcttcatcacggaaactatcttcgaaaaccgtttcatgcacgtaccggaactgatccgtatgggtgcgcatgctgagattgaaagcaacacggtaatttgccacggcgttgaaaaactgtccggtgcgcaggtgatggcgaccgatctgcgcgcgtctgcgagcctcgtgctggcaggttgtattgcggaagggactaccgttgtcgatcgtatctaccacatcgatcgtggttacgagcgtattgaggacaaactgcgcgcgctgggtgcaaatatcgagcgtgtgaagggcgagtaa

SEQ ID NO: 115461 - DNA, 255 bp, Enterobacter cloacae
atggaaaataatgaaatccagactgtgctgatgaatgcactctcccttcaggaagcccacgtctctggcgatggcagtcacttccaggttattgctgtgggtgagatgttcgacggaatgagtcgcgtgaagaaacagcaggctgtgtacgcgccgctgatggaatacattgcggataaccgcatccacgccctgtcgattaaagcgttcaccccacaggagtgggcacgcgatcgcaaactaaacggtttttga

SEQ ID NO: 115462 - DNA, 294 bp, Enterobacter cloacae
atgtcacagcagcttagctgggcgcgtgacggcgagacgttgacgctgacgggagagctggatcaggatctgcttaacccgctgtgggacgctcgccataacgcgatgcagggcgtgacgctgattgatctccatggcgttacgcgggtagataccgccggtatcgccctgctggcgcacctggtggccacgggcaaaaagcaggggagcagcgttaccctgacgggggtaagcgataacgtgattacccttgcacagctttacaatttgcccgaagacgtattacctcgctaa

SEQ ID NO: 115463 - DNA, 636 bp, Enterobacter cloacae
atgtttaaacgactgttaatggttgccatgctggtcattgcccctcttaccgcggcgcacgctgcggatcagagtaacccgtacaaactgatgaatgaggccgcgaagaaaaccttcgaccgtcttaaaaacgaacagccaaaaatccgttctaacccggattatctgcgtgatgtggtggatcaggaactgctgccgtatgtgcagatcaagtatgcgggcgcactggtgctgggccgttactacaaagacgcgaccccggcgcagcgcgaggcttactttgcggcgttccgtgaatacctgaaacaggcttacggccaggcgctggcgatgtaccacgggcagacctatcagattgcccctgaacagccgctgggcgatgccactatcattcctattcgcgtgacgattatcgatccaaacggtcgtccaccggttcgtctggacttccagtggcgtaaaaacagccagaccggaaactggcaggcgtacgacatgatcgctgaaggcgtcagcatgatcaccactaaacagaacgagtggagcgatctgctgcgcactaaaggcatcgatggcctgacggctcagcttcagtccatctctcgtcagaaaattaccctggacgagaagaagtaa

SEQ ID NO: 115464 - DNA, 549 bp, Enterobacter cloacae
atgcaaacgagaaaaaatgaaatttgggttggcgtgtttctgcttctggcgctgctggccgcgctgttcatctgcctgcgagcggcggacatcacctctgttcgcgccgagccgacgtatcgtgtctacgcgactttcgataacatcggcggcctgaaagcgcgctcaccggtgcgtattggtggcgtcgttatcggacgtgtcgctgacattacgcttgatgagaaaacctatctgccgcgcgtcgcgatggatatcgaagagcgctataaccacattccggacaccagctcgctttctatccgcacctctggcctgctgggggagcaatatctggcccttaacgttggttttgaagatcctgagctgggaacgactatccttaaagacggtagcgtaatccaggataccaagtcagcgatggtgctggaagatatgattggtcagttcctttacaacagtaaaggggatgataaaaagtctgacgatgcccctgcgcagagtgaagaccacaccaacgtcgaaccgacgccaggcgcgacgaattaa

SEQ ID NO: 115465 - DNA, 783 bp, Enterobacter cloacae
atgctgttaaatgcgttggcgggtcttggacaccgtggcctaaaaaccatcagtacgttcgggcgtgccggattaatgttgttcaacgcgctggtcggcaaaccggagttccgcaagcatgcgccgttattggtacggcagctttataacgtcggcgtgctgtcgatgcttatcatcatcgtgtcgggtctgtttattggcatggtgctggggttgcaggggtatctggtgctgacaacctacagcgcggaaaccagccttggcatgctggtggcgctctcgctgctgcgtgaactcgggccggtggttgccgcgctgctgttcgccgggcgtgccgggtcagcgttgacggcggaaattggcctgatgcgcgccaccgagcagctctccagtatggagatgatggcagtcgatccgctgcgccgggtaatctcgccgcgcttctgggccggggttatctccttgccgttactgactatcctctttgtggcggtaggtatctggggaggcgcgctggttggcgttaactggaaaggcattgatgccggattcttctggtctgccatgcaggacgccatcgatctgcggatggatctggtgaactgtctgatcaagagcgtggttttcgctgtgacggttacctggattgcgttgtttaatggttacgatgccattccgacgtcggcgggcattagccgtgcaacgacgcgtactgtcgtacattcgtcgctggccgttttaggtctggattttgtgctcaccgcactgatgtttgggaattga

SEQ ID NO: 115466 - DNA, 813 bp, Enterobacter cloacae
atgagccaaacgatggcgaatatagtcgatgtccggggcgtcagtttttctcgcggcaaccggttaatatttgatgatatttcgctgaccgtgccgcgcggtaaaatcaccgccatcatggggccgtcagggatcggtaaaaccacgttgctgcgtcttatcggcgggcaaatcccccctgacagcggcgaaattctcttcgacggcgaaaatgtcccggcgatgtctcgctcgcgcctctacacggttcgcaaacggatgagcatgctctttcagtcgggcgcgctgttcacggatatgaacgtttttgacaacgtggcctatccgttgcgtgagcacacccatcttcctcctgagctgttgcacagtacggtgatgatgaagcttgaagccgtggggctgcggggggctgcgaaactcatgccgtccgaactctcgggtgggatggcgcgccgcgccgcgctggcacgtgctattgccctggaacccgatttaatcatgttcgatgaaccgttcgtcgggcaggaccccatcaccatgggcgtgctggtgaagttaatttcggagctgaacagcgcccttggcgtcacctgcgtggtggtttcccacgacgtgccggaagtgctgagtatcgctgattacgcctatattgtggctgacaaaaagatcgtcgcccacggcagcgcgcaggcgttgcaggagaatggcgatccgcgcgtgcggcagttcctggacggtatcgcagatgggccggtgcctttccgctatccggcgggcgactatcatgacgatttactcggaatagggagttaa

SEQ ID NO: 115467 - DNA, 978 bp, Enterobacter cloacae
atgcttttagcaacagcactgttaataattggtttactgttggtggtctacagtgctgaccgtttggtctttgccgcatccattctctgtcgactcattggcatgccgcccatcattatcggcatgacggtggtcagtgtaggcacatcgcttcctgaaatcatcgtttctgtttcagcctcgctgcatgggcaagtcgacctcgctatcggcaccgcgattggctctaacatcgtcaatatcttactgattttaggcttagccgcattactgcatccatttcgcgtgcattctgatgttttgcgccgggaattgccgttaatgttagtcgtcagtctgctggcaggctacgtactttatgacggggtgctgagcgtcggtgacggtatattcctgctcgccctggccgtgatctggttgctttacagcgtgaagatcgcacgtctggcggaaaaacagggtaacgatagccttacgcgtgagcatctcgccgagctgccccgggaagggaccttacccgtcgccctgctgtggctgggcgtcgcgctgatcatcatgccaatggccacgcggatggtggtcgataacgcgacggtgctggcgaacgcgtttgcgatgagcgaactgacaatcggtctgacggtaatcgccatcggcaccagcctgccagagctggccaccgccatcgccggggcgcgtaaaggggaagatgatatcgccatcggcaatatcattggctcgaatattttcaatatcgcaatcgtgacagggctgccggcgctaatctcgccggggccgtttaaccctatggttttcacgcgcgattacggtgtgatgctgctggtcagcgtgattttcgccctgctctgctggcggcgaaaagagcagatcggcaaaggcgcaggcgcgctgctgacgggtggatttatcgtatggctggcgatgctgtactggctttcgcctcttctctctgggtaa

SEQ ID NO: 115468 - DNA, 987 bp, Enterobacter cloacae
atgtcgcaaatagaattgcagccgggttttgactttcagaaagcaggcaaagacgttctggagattgaacgtgaaggtctggcgcagttagatcagtacattaatcaggattttagtctggcctgtgagaagatgttctactgtgccggcaaagtcgtggtgatggggatgggcaaatccggccatatcggacgcaaaatggcggcgacctttgccagtaccggcacgtcgtcattcttcgttcatcccggtgaagccgcgcacggtgacctcggcatggttacgccgcaggacgtggttattgcgctgtccaactccggggaatcgaatgaaatcctggcgttgatcccggtactgaagcgtctgcacgtaccgctgatttgcatgaccagccgaccagaaagcagcatggcgcgtgcggcggatattcacctgtgcgtgaaagtgcctaaagaagcctgtccgctggggctggcgccgacttccagcacaaccgccgcgctggtgatgggcgatgcccttgccgttgcgctgctggaagcccgcggttttacgcctgaagattttgccctgtctcatcccggcggcgcgctcgggcgcaaactgctgctgcgggttaacgatattatgcacactggagatgagatcccgcacgtgagcaaagaggcctctttgcgcgacgcgttactggagatcacccgtaaaaacctgggcatgacggttatctgcgacgatctgatgaagattcagggcattttcaccgacggcgacctgcgccgggtattcgatatgggtgtggatgtccgaacgctgggcattgctgatgtgatgacgccaggcgggatccgcgtccgtccgggcacgctggcggtagatgtgctgaacctgatgcagtcccgtcatattacctcagtgatggttgccgatggcgaccaactgctgggtgtggtacatatgcatgatctgctgcgcgctggcgtagtgtaa

SEQ ID NO: 115469 - DNA, 567 bp, Enterobacter cloacae
atgagtaatgcgggtgcatcccttgcaacctgttatggcccggtgagcgcccacatgatggcaaaggcggaaaatatccgcctgttgatcctcgatgtggatggtgtgctctccgacggtctgatttatatgggcaataacggcgaagagctgaaagcctttaacgttcgcgacggttacggtatccgctgtgcgctcacgtccggtattgaagttgctatcatcaccgggcggaaagctaaactggtagaagatcggtgtgaaacgctgggcattacccatctctatcaggggcagtctgataagatggtagctttccgggatctgctgggaaaactggccattgcaccagagaatgtggcatacgtcggggatgatttgatcgactggccagtgatggcggaggtgggtctgagcatcgccgtggctgacgcgcacccgctgctgatcccgcgtgctgattacgttacccatattcacggtggccgcggcgccgtccgtgaagtctgcgatctgcttctgctgtcgcagggcaagcttgatgaggcgaaagggcaatcgatatga

SEQ ID NO: 115470 - DNA, 576 bp, Enterobacter cloacae
atgagtaaaaccagacgttgggttatcattctgcttgcgcttgtcgccctggtactgattggcgtcaacctcgctgaccgcgatgatacgcaagcggaagtggttaacacgagcgacccgacctacaaaagcgatcacagcgacaccgtggtctatagcccggaaggcgcgctgaactatcgcctcgttgctcagcatgtagaatatttttcagatgacggtacctcgtggtttacccaaccggtcatgaccacctttgatacggacaaagtgccgacgtggtctatcaagtctgaccgggcaaaactgacaaatgaccgtatgctttacctgtatggtcacgttgaagtcaacgccctgaccgctgacgcgcaactgcgaaaaattacgacggataacgcccagatcaacctggtcacccaggatgtcacgtcgcaggatctagtcaccctgtatggcacaacatttaattccagcggtttaagaatgcgcgggaacttacgcagcaaaaacgccgagctgattgaaaaggttagaacctcctatgaaattcaaaacaaacaaactcagccttaa

SEQ ID NO: 115471 - DNA, 555 bp, Enterobacter cloacae
atgaaattcaaaacaaacaaactcagccttaaagttgttatcgccagcgcgctgctggcggccagtcttcccgcgcttgctgtgactggcgacaccgaacagccgattcatattgaatccgatacccagtctctggatatgcagggtaacgtcgtcacctttaccggcaacgtcgtcatgacccagggcaccattaaaatcaacgccgacaaagtggtcgttacccgtccgggcggcgagcagggcaaagagattatcgatggttatggcaacccggccaccttctaccagatgcaggacaacggcaagccggtgaaaggccatgcctcgcatatgcactatgaactggcgaaggatctggtcatcctgaccggtaatgcttacctggaacagctggacagcaatatcaaaggcgacaagatcacctatctggtgaaagagcagaaaatgcaggcctccagcgaaaaaggcaaacgcgtcacgaccgtgcttgtgccttcgcagttgcaggacaagaacaacggtcaggctccggcacagaaaaagagtaactaa

SEQ ID NO: 115472 - DNA, 726 bp, Enterobacter cloacae
atggcaactttaactgcaaaaaacctcgcgaaagcgtataagggccgccgcgtcgtcgaagatgtcagtctgaccgtcaactccggcgaaatcgtgggtttgcttggccctaacggggcgggtaaaaccacgaccttctacatggtggtgggcatcgtcccgcgtgacgccggcaacatcatcatcgatgatgaagatatcagcctgctgccgctgcatgcccgcgcgcgtcgtggcatcggctatttgccgcaggaagcgtctattttccgccgcttaagcgtgttcgacaacctgatggccgtgctccagatccgtgacgatctgaccagcgagcagcgctctgaccgtgcgaacgagctgatggaagagtttcatatcgaacatctgcgtgacagcctcggccaggcgctgtccggtggtgaacgccgccgcgttgagattgcgcgcgcgctggcagcaaacccaaaattcatcctgctggatgaaccgtttgcgggcgttgaccccatctccgttatcgatatcaaacgtatcattgagcacctgcgcgacagcgggcttggcgtactgatcacggaccacaacgttcgtgaaacgctggccgtgtgtgagcgcgcctacatagtgagccagggccatctgattgcccacggtacgccgcagcaaatcctcgaagatgagcatgttaagcgcgtgtaccttggggaagacttcagactctga

SEQ ID NO: 115473 - DNA, 1434 bp, Enterobacter cloacae
atgaagcaaggtttgcaattacggctcagccagcaactggccatgacgccgcagctacagcaggcaatccgtctgttgcagctgtccacgttagaactccagcaggagctccagcaggcgctggacagcaatccgctgctggagcaaaccgatcttcatgacgaggtagacgcccagcagacgcaggacacagaaacgctcgactccgtagatgcgctcgaacagaaagagatgccggacgaactgccgctggatgccagctgggatgaaatctacaccgcgggtaccccttccgggacgcgcgcagactaccaggacgatgaactcccggtctaccagggcgaaaccacccagtcgcttcaggactacctgatgtggcaggtagagctgacccctttctccgataccgatcgcgccattgccacctcgattgtcgatgccgttgacgacacgggctatttgaccgtgacgctggacgagattcttgaaagcatcggcgatgacgagattgaactggaagagatcgaagccgttctgaaacgcgttcagcgtttcgacccgataggtgtcgccgcgaaagatctgcgcgactgccttctgatccagctttcgcagtttgccaaagagacaccgtggattgacgaagcccggctcatcatcagcgatcatctggatctgctggcgaatcacgacttccgcaccctgatgcgcgtcacacgcctgaaagaagaggtgctgaaggaagcggtgaatctgatccagtcgctcgatccgcgtccggggcagtcgatccagaccagcgaaccggaatatgtcatccccgatgtgctggtgagaaaacacaatggccgctgggtcgttgaactgaacgccgacagcattcctcgcctgcaaatcaaccagcaatacgcctccatgtgcaccagcgcccgtaacgacgctgataatcaatacattcgcagcaaccttcaggaagcacgctggttgatcaagagcctggagagccgtaatgacacgctgctgcgcgtcagccgctgtattgtcgaacagcagcaggcgttctttgagcagggcgaagagtttatgaaaccgatggtgctggcggacatcgcccaggccgtcgagatgcatgaatcaaccatttcccgcgtgaccacgcagaaatatctgcacagcccacgcggtatttttgagcttaagtatttcttctccagtcacgtgaacaccgaaggcggcggcgaagcctcgtcaacggctattcgcgcactggtgaagaagttgatcgccgcggagaaccccgcgaagccactcagtgacagtaagttaaccaccatgctgtccgatcagggtattatggtggcacgtcgtactgtcgcgaagtatcgagagtctttatccattccgccgtctaaccagcgtaaacaactggtttga

SEQ ID NO: 115474 - DNA, 288 bp, Enterobacter cloacae
atgcagctcaatatcaccggacataacgtcgagattactgaggctttacgcgattttgtaaacactaagtttgcgaaactcgagcagtatttcgagaggatcaaccaggtctatgttgtgttgaaagtggagaaagtgacgcatatctcggatgcgaccctgcacgtcaacggaggggaactccatgccagtgcggaagggcaagacatgtacgcggctatcgacggcttgattgataagcttgcgagacagctcaataaacataaagataaactgaaacaacactaa

SEQ ID NO: 115475 - DNA, 492 bp, Enterobacter cloacae
atgataaacaacgattccgctcttcaactgagcaatgtccttaaccaggattgtacccgcagtggcgttcactgccagagcaaaaaacgtgcgctggaaatcatcagtgagctggccgcaaaacagctgggtctgccgccgcagatcgtgtttgaagccattctgacccgtgaaaaaatgggcagtaccggcatcggcaatggcattgcgatcccgcatggcaagctggaagaagatacgctgcgtgccgtgggggtgtttgtgcaactggaaacgcctatcgcttttgacgccatcgataaccagcctgtggatctgcttttcgcgctgctggttcctgccgatcagaccaaaacccacctgcacacgctgtcgctggttgccaaacgtctggcggataaaaccatttgtcgtcgactgcgctcagcccaaagtgatgaagagctttatcaaattatcactgaagcagaaggcaatcaggatgaggcataa

SEQ ID NO: 115476 - DNA, 855 bp, Enterobacter cloacae
atggtgctgatgatcgtcagcggtcgttcggggtccgggaagtccgtggccctgcgcgcgctggaagacatgggattttactgtgtagataacctgccggtagtgttgttacccgatctggcgcggacgctggcggacaggcaaatctctgccgccgtcagtatcgacgtgcgtaacatgccggaatcgccggaaatcttcgagcaggcaatgaacagcctgccggaatgcttctcgcctcagctcttgttcctggatgctgaccgcaacacgctgatccgtcgctacagcgatacacgtcgtttgcatccgctctccagtaaaaatctttcgctggaaagcgccatcgataaagagagcgatctgcttgagccgctgcgttcccgggccgacctgattgtcgacacttccgaaatgtccgtccacgagctggcggaaatgctgcgtacgcgcttactcggcaagcgcgagcgcgaactgacgatggtgtttgaatccttcggctttaagcacggcatacctatcgatgcggattacgtttttgatgtgcgtttcctgccgaacccacactgggatccgaaactgcgtccgatgaccggtctggataagccggtggcagcgttcctcgacagacacacagaagtacacaattttatctaccagacgcgaagctaccttgagctatggttacctatgctggaaacaaacaatcgcagctacctgacggtggcgattggctgtaccggcggtaaacatcgttcggtctacattgccgaacagctggccgattacttccgctcacgcgggaagaacgttcagtcccgtcatcgcacgctggaaaaacgcaaaacatga

SEQ ID NO: 115477 - DNA, 273 bp, Enterobacter cloacae
atgaccgtaaaacagaccgtcgaaatcaccaacaagctgggcatgcatgcgcgcccggcgatgaagctgtttgaactgatgcagggttttgatgctgaggtgctgctgcgcaacgacgagggaaccgaggcagaagccaacagcgtgattgcgctactgatgctggattctgccaaaggccgtcagattgaagttgaagccaccggcccgcaggaagaagaagcgctggcggcagtgattgccctgttcaacgccgggtttgacgaagactaa

SEQ ID NO: 115478 - DNA, 726 bp, Enterobacter cloacae
atgagtcgtaaattctcccccggcgggtggttaaaacggatcctgctgcgtattgtgctggtcctggctgtgttctggggcggcggtattgcgctgttcagcatcctgcccgtcccgttctcggccgtgatggcagagcggcagattagcgcctggctctctggggattttggctatgttgcccattctgactgggtcagcatggatgcaatctcgccgtggatggggctggcggtcattgcggcagaagatcagaaattcccggagcactggggttttgacgtggcggctatcgagaaggcgctggatcataatgaacgtcatgaaaaccgcgtccgcggcgcatcgacgctttctcagcagacggtaaaaaacctgttcttatgggacggtcgcagctgggtgagaaaagggctggaggccgggctgacgctgggcgtcgagacggtgtggagcaaaaaacgcattttaaccgtctacctgaatatcgcggaatttggtgacggcgtatttggtgtcgaagcggcatcgcagcgctattttggcaagcccgccagcaggctgactatgtccgaagcggcactgcttgccgccgtgctgccgaacccgctgcgttttaaggccagcgccccgtcaggctacgtgcgaagccgccaggcgtggattatgcgccagatgcgtcagctgggtggggaagggtttatggagcgaaataatcttaggtag

SEQ ID NO: 115479 - DNA, 654 bp, Enterobacter cloacae
atgaaaaagattggtgtcgtgctgagcggatgtggtgtttacgatggttcagagatacatgaaaccgtattaacgctgctggcattatcgcgccagggggcagacgttatctgcttcgccccggataaaacccaggcagacgtgattaatcatctcaccggcgagccaatggcggaaagccgtaacgtgctgattgaagcggcgcgtattgtgcgcggcgatattcacccgctggcacaggccgatgccgctgaacttgatgcgctcatcgtgccgggcggttttggcgcggcgaaaaacctgagcacgtttgcaacggaaggcacggcgtgtcatgtcgatcccgatttgaaagcgctatcgctggcgatgcatgcggcaggtaagccgcagggctttatctgcattgcgccggccatgctgccgaagatttttgatttcccgctgcggctcacgatcggaaccgacattgataccgctgagattgtcgaggatatgggcggcgaacacgtgccatgtccggtagacgacattgtggtggacgaggacaacaagatcatcaccacgccagcgtatatgctggcgcagaacatcgccgaggctgccgcaggcattgaaaagctggtggacagagtgctggtcctgaccgaatga

SEQ ID NO: 115480 - DNA, 2334 bp, Enterobacter cloacae
atgaagcaaattcgaatgctggcccagtactacgtcgacctgatgatgaagctcgggctggtgcgtttttccatgctgctggcgctggcgctggtcgttctggccatcgtcgtgcaaatggccgtgaccatggttctgcatggtcaggtcgagagcatcgacgtgatccgctctattttctttggcctgctgattaccccatgggcggtctattttctctccgtggtggttgagcaactggaagagtcccgacagcgtttatcgaaactggtggataagctggaagagatgcgcgagcgcgatctcaaactcaacgttcagctcaaggacaacattgcccagctgaatcaggaaatttcagaccgtgagaaggcggaagccgagcgtcagaccacgcttgagcagctaaaagttgagatgaaagagcgtgaagtgacgcagatccagcttgaacagcaatcctctttcctgcgctcgttcctcgatgcgtcgccggatctggtgttctaccgtaatgaagataaagagttctccggctgtaaccgggccatggaactgttgaccgggaaaagcgaaaagcagctgatccacctgaaacctcaggatgtctattccgaagaggcggcagcaaaagtgatggagacggatgaaaaggtcttccgccataacgtttcgctgacctatgagcagtggctggactatcctgacgggcgcaaagcctgctttgagatccgcaaagtgccttattacgaccgggtggggaaacgtcatggtctgatgggctttggccgcgatatcaccgagcgtaagcgctatcaggatgcgctggagcgcgccagccgggataaaaccaccttcatctccaccatcagccatgaactgcgcaccccgctgaatggcattgtggggctgagccgcattctgctggataccgagctgaccagcgagcaggaaaaatacctgaaaacgatccacgtctcggcggtcacgctgggcaatatcttcaatgatattatcgacatggataagatggaacgccgtaaagttcagctcgacaaccagccggttgattttaccggtttcctcgcggacctggaaaacctgtcaggtttacaggctcagcaaaaagggttgagctttgtgatggagccaacgctgccgttgccgcataaagtggtgacggacggcacacgtctgcggcagatcctgtggaacctcatcagcaacgccgtgaagtttacccagaaggggcaggttgcggtgcgcattcgctatgacgaaggcgacatgctgcactttgaagttgaggactcgggtatcggcattcctcaagaggaacaggataagatcttcgccatgtattatcaggttaaagacagccacggcggtaaaccggcgaccggtacgggcattggactggcggtgtcgaaacgtctggcgaaaagtatgggcggggatatcaccgttgccagccagccgggtaaaggctccacctttacgcttaccgtccacgcgcctgccgtggcggaagaggtggaagatacgtttgagaacgacgatatgccgctgccagccctgcacgttctgctggtggaagatattgagctgaacgtcattgtcgctcggtcggtactggaaaaactcggtaacagcgtggatgtggcgatgaccgggaaagccgcgctggagatgttcacgccgggcgagtatgacctggtgctgctcgatattcagctaccggacatgaccgggctggatatctcccgcgagctgacgcgcaaatatgctcctgacgagctgccgccgctggtggcgttgaccgcaaacgtgttgaaagataaaaaagagtatctcgaggccggtatggacgatgtgctcagcaagccgctggcggtacccgccctgacggcgatgatcaagaagttctgggatacctgtgatgaagaggagagcaccatgacgtctgttgatagcgctaaagcccaaacgatactggataccgccatgctggagcagtatatcgatctggtgggaccaaaactgatcaccgatggcctcgccgtgttcgaaaaaatgatgccgggctatctgaacgtgctcgaatccaacctgacggcgcgtgaccagaagggcatcgtcgaagagggacataaaatcaaaggcgcggcaggatctgtcgggttacgccatctccagcagctgggccaacagattcagtctcctgatttacctgcctgggaagataacgtaggtgattgggtcgaagagatgaaacaagagtggcaaaacgatgtggcagtgctgaaagcctgggtggacgccagaaaaaaatga

SEQ ID NO: 115481 - DNA, 1083 bp, Enterobacter cloacae
atgcaggcgtttggcgtacttgaccgctatatcggtaaaacgattttcaccaccatcatgatgaccctgttcatgctggtgtcgctctcgggcattatcaaatttgtagaccagttgaaaaaagccgggcaggggagttacgacgcgttgggcgccgggatgtataccctgctcagcgtaccaaaagatgtgcagatcttcttcccgatggcggccctgttgggggcgctgctgggcctggggatgctggctcagcgtagcgagctggtggttatgcaggcatcgggttttacccgtatgcaggttgcgctgtcggtgatgaaaaccgcgatcccgctggtgctgttgaccatggcgattggcgaatgggtcgcgccgcagggcgaacagatggcgcgtaactaccgtgctcaggctatgtacggcggttcactgctctccacgcagcagggattatgggcgaaagatggtcagaactttgtctatatcgaacgcgtgaaaggggacgatgaactgggcggcgtgagtatctatgccttcaataacgatcgtcgtttacagtcggtgcgttatgccgcctccgctaaatttgatgcgaacaacaagctttggcggttatcccaggttgatgaatctgacctgacgaacccgaaacagatcaccggttcgcagaccgttagcggtacctggaaaaccaacctgacgccggacaagcttggggtggtagcgctcgatcccgatgcgctctccatcagcggtctgcataattacgtgaagtatctgaaatcgagcggacaggatgcggggcgttaccagctcaacatgtggagcaaaatcttccagccgctgtccgtggccgtgatgatgctgatggcgctatcgttcatctttggaccgctgcgtagcgtgccaatgggggttcgcgtggtaaccggtatcagctttggttttgtgttctacgtcctcgatcagattttcggtccgctgacgctggtgtatggcattccgccaattatcggcgcactgttgccgagcgccagtttcttcctgatcagcctctggatgctgctaaaacgctcctga

SEQ ID NO: 115482 - DNA, 1101 bp, Enterobacter cloacae
gtgataatcataagatatctggttcgggagacgctgaagagccaactggcgatcctctttatcctccttctgatctttttctgtcagaagctggtcaggatcctcggcgcggcggttgatggcgaaatcccaacgaatctggtgctttccctgctcgggcttggcgtgccggaaatggcgcagcttatcctgccgttaagcctgttccttggtctgctgatgaccctgggtaagctctataccgaaagtgaaatcaccgtgatgcatgcctgcggcctcagtaaagccgtactggtaaaagcagccatggtgttggcgctgtttacgggcattgttgccgcggttaacgtcatgtgggcggggccgacctcctctcgtcatcaggatgaggtgctggcggaagcaaaagctaacccggggctggcggcgctggcgcaggggcagttccagcaggcgaccgacggtaactccgtgctgtttatcgaaagcgtcgatggcaaccgcttcaatgacgtgtttcttgctcaactgcgcccgaaaggtaacgcccggccttctgtggtggtggcggactccggtcagctgtctcagcgtaaagacggctctcaggttgtcacgctgaacaaaggaacgcgtttcgaaggcacggctatgctgcgcgacttccgtattaccgattttcagaactaccaggccatcattggccatcaggccgtcgcgctcgatcccacggatactgagcagatggatatgcgcaccttaatgaataccgataccgatcgtgcgcgtgctgaactgcactggcgtatcacgctggtcttcaccgtatttatgatggcgctgatggtggttccgctgagcgtggtaaacccgcgccagggccgcgtgctgtcgatgctgccagcgatgctgctgtatctggtgttcttcctgctgcaaacctcaatcaagtctaacggcgggaaaggaaaaattgacccgatgatctggacctgggtcgtgaatggtttgtatctgctgctggcagtcggactcaacttgtgggacacggtgcctgtgcgtcgtcttcgtgcccggtttacgcgtaaaggagccatctaa

SEQ ID NO: 115483 - DNA, 1512 bp, Enterobacter cloacae
atggagttcagtgtaaaaagcggtagcccggagaaacagcggagtgcctgcatcgttgtgggcgtctttgaaccacgccgactctccccgatcgccgagcaactcgataaaatcagcgacggttatatcagcgccctgctgcgccgtggcgaactggaaggcaaaccagggcagaccttgttgctgcaccatgttccgaacgtcctgtccgagcgtattctgctgattggctgtggtaaagaacgtgagcttgatgagcgccagtacaagcaggttattcagaaaaccattaatacactgaatgatactggttcgatggaagccgtctgcttcctgacggagctgcacgttaagggccgcaacacgtactggaaagtgcgccaggccgtcgaaaccgcaaaagagagcctctacagctttgatcagctgaaaaccaccaaaagcgagccgcgtcgcccgctgcgtaaaatggtctttaacgtgccaacccgtcgcgagctgaccagcggcgagcgcgccattcagcacggtctggccattgccgccggtattaaagcggcaaaagatcttggcaatatgccgccaaacatctgtaacgccgcgtacctggcatctcaggcgcgccagctggctgacgcgtacagcaagaacgtcatcacccgcgttatcggcgaacagcagatgaaagagctggggatgcactcttatctggcggtcggtaacggctcccagaacgaatccctgatgtcggtcattgagtacaagggcaatccgtcagaagatgcgcgacccatcgtgctcgtcggtaaagggctgaccttcgactccggcggtatctccatcaagccttcagaaggcatggatgagatgaagtacgacatgtgcggcgcggcggcggtttacggcgtcatgcgcatggtcgcggaacttcagttgcccatcaacgtgatcggcgtgctggcgggctgcgaaaacatgcctggcggccgcgcttatcgtccgggtgatgtgctgaccaccatgtccggccagaccgttgaggtgctgaacaccgacgccgaaggccgtctggtgctgtgtgacgtgctgacctacgttgagcgtttcgaacctgaagcggttatcgacgtggctaccctgaccggcgcctgcgtgatcgcgctgggccatcacatcaccggcctgatgtcgaaccacaacccgctggcgcatgagctgatcggcgcgtccgagcaggccggcgaccgcgcgtggcgtctgccgctgggggacgagttccaggaacagctggagtctaacttcgcagacatggcgaacatcggcggtcgtcctggcggagctattaccgcgggctgcttcctggcgcgctttacccgcaagtacaactgggcgcacctggacatcgcggggaccgcatggcgctccggtaaagccaaaggcgcgaccggacgtccggtggcgctgctgtcgcagttcctgctcaatcgtgcgggttttaacggcgacgagtga

SEQ ID NO: 115484 - DNA, 444 bp, Enterobacter cloacae
atgaagaatgcaacgttctaccttctggacaatgacacccatcaggatggcctcagcgccgttgaacagctggtgtgtgaaattgccgcagaacgttggcgcgcaggtaaacgcgtcctgattgcctgtgaagatgagcagcaggcgattcgcctggatgaagcgctatgggcgcgcccgccggagagttttgttccgcataacctgtcgggcgaaggtccacgcggcggggcaccggtggagattgcctggccgcaaaaacgcaacagcagcgcgcgcgacattctcattagcctgcggacagactttgcagattttgccaccgctttcacagaagtggtagactttgtcccttacgaagaatctttgaaacaactggcgcgcgaacgctacaaagcgtaccgcctggccggttttaacctgaatacggcaacctggaaataa

SEQ ID NO: 115485 - DNA, 2856 bp, Enterobacter cloacae
atggaaaagacatataacccacgcgatatcgaacagccgctttacgagcactgggaacagcagggctatttcaagcctaacggcgacgaaagcaaagagtccttctgcatcatgatcccgccgccgaacgtcaccggcagtttgcatatggggcatgctttccagcagaccatcatggataccatgatccgctaccagcgcatgcagggcaaaaataccctgtggcaggcggggactgaccacgcgggtatcgcgacccagatggtggttgagcgtaaaattgccgctgaagagggtaaaacccgccacgactacggtcgcgacgcgttcatcgacaaaatctggcagtggaaggcagaatccggcggcaccattacccgtcagatgcgccgtctcggcaactccgtagactgggagcgcgagcgcttcaccatggatgaaggcctgtccaacgccgtgaaagaagtctttgtgcgcctgtacaaagaagacctgatttatcgtggcaagcgcctggtcaactgggacccgaaactgcgcaccgccatctctgacctggaagtggaaaaccgcgagtctaaaggctccatgtggcacatccgctatccgctggctgacggcgcaaaaaccgccgacggtaaagattacctggtggtggcgaccacccgtccggaaaccctgctgggcgataccggcgtggccgttaacccggaagatccgcgttataaagatctgatcggcaaattcgtggtgctgccgctggtgaaccgccgtattccgattgtgggcgacgaacacgccgacatggaaaaaggcaccggctgcgtgaaaatcaccccggcgcatgacttcaacgactatgaagtcggtcgtcgtcatcaacttccgatgatcaacattctgaccttcgacggcgatatccgcgaaagcgcagaagtgtatgacaccaaaggcaacgaatccgacgtttattccagcgacatcccggctgagttccagaagctggagcgctttgccgcgcgtaaagccatcgtagccgccgttgacgcactcggcctgctggaagagattaaacctcacgatctgaccgtgccgtacggcgaccgtggcggcgtggttatcgagccaatgctgaccgaccagtggtacgtgcgtgccgacgtgctggcgaaaccggctgttgaagcggttgagaacggcagcatccagttcgtgccgaagcagtacgaaaacatgtacttctcttggatgcgcgatattcaggactggtgtatttcccgtcagctgtggtggggtcaccgtatcccggcgtggtacgacaacgaaggcaatgtctacgttggccgcaccgaagaggaagtgcgtcaggaaaacaacctgggcgctgacgttgccctgcgccaggacgaagacgtgctggatacctggttctcctccgcactgtggaccttctctaccctcggctggccggaaaacaccgacgcgctgcgtcagttccatccaaccagcgtgatggtatccggcttcgacatcatcttcttctggatcgcccgcatgatcatgatgaccatgcacttcatcaaagacgaagacggcaagccgcaggttccgttccataccgtctacatgaccggcctgatccgcgacgacgaaggccagaagatgtccaaatccaagggtaacgttatcgacccgctggatatggtggacggtatctctctggaagagctgctggaaaaacgtaccggcaacatgatgcagccgcagctggcggagaaaatccgcaagcgtaccgagaagcagttcccgaacgggatcgaatctcacggtaccgacgccctgcgcttcaccctggcggcgctggcctccaccggtcgtgacatcaactgggatatgaagcgtctggaaggttaccgtaacttctgtaacaagctgtggaacgccagccgcttcgtgctgatgaacaccgaagatcaggattgcggctttaacggcggcgaaatgaccctgtctctggcagaccgctggatcctggcggaatttaaccagacggtgaaagcgttccgcgacgcgctggacagctaccgcttcgacatcgcggcaggcatcctgtacgaattcacctggaaccagttctgtgactggtatctggagctggcgaagccggtcatgaacggcggttctgaagcggaactgcgcggcacgcgtaatacgctgattaccgttctggaaggtctgctgcgccttgcgcacccgatcattccattcatcaccgaaaccatctggcagcgcgtgaaggtgattgccggtattaatgccgataccatcatgctccagccgttcccggcattcgacgccgcgaaagtggatgaagccgcatctgcggataccgagtggctgaaacaggcgatcgttgcggtacgtaacatccgcgcggaaatgaacatcgctccgggtaaaccactggagctgctgctgcgcggttgcagcgaagctgccgttcgtcgcgtcaccgagaacaacaccttcctgaaaaccatggcgcgtctggaaagcatcaccgtgctgcctgccgatgacaaaggtccggtttccgtgaccaaaatcatcgacggcgcggagctgctgatcccgatggcgggcctgatcgacaaagatgcggagctggcgcgtctggcgaaagaagtggcgaaagtcgacgtggaaattggcaaaatcgaaagcaaactggcgaacgagggctttgtggcccgcgcgccggaagcggtcatcgccaaagagcgtgagcgtctggttgccttcgccgatgcgaagaccaaactgatcgagcagcaggcggttatcgcggcgctgtaa

SEQ ID NO: 115486 - DNA, 504 bp, Enterobacter cloacae
atgagcgtgattacccccgtcgcgacgacaatgcgtcggatcactgagcaggacaacccggctatcgccgccgttatccgcacggtttctgccgaatatggcctgaccgccgacaaaggctacaccgtggccgacccaaatctggacgaactttttcagctgtacagccagccgggtcatgcctactgggtcatcgagcaggacggccaggtcgtgggcggcggcggcattgccccactgctttgcagcgagccggatatctgtgaactccagaaaatgtatttcctgccaacgatacgcggacaaggcctggcgaaaaagctggcgctggtcgccctggaacatgcacgctcacagggctttaaacgttgctaccttgaaaccaccgctttccttaaagaggccattggcctgtatgaacatctcggctttgagcatatcgatgcgccactgggctgcacgggccacgtggactgcgaagtcaggatgctgaaaagtctgtaa

SEQ ID NO: 115487 - DNA, 1020 bp, Enterobacter cloacae
atgtcgaagataaaaagctacgccgcaccgcaggcgggtgcagaacttgagctgtacgagtacgatgcgggcgaactaaaagcggaagacgtcgaagtacaggttgattactgcgggatctgccactcagatctctcgatgatcgacaatgaatggggcttctccagctatccgctggtggccgggcacgaagtcattggccgcgtcgtggcgctcggcagcgccgcgcaggacaaagggctgaaagtgggccagcgcgtgggtatcggctggacggcacgcagctgcggccactgcgacgcctgtatcagcggcaatcagatcaactgccttgagggcgctacgccgaccatcctgaacaagggcggtttcgccgataagctgcgcgccgactggcaatgggttatcccgctgccggacagcattgatatcgaatccgccggtccgctgctgtgtggcggtatcaccgtctttaaaccgctgctgatgcatcacgtcaccgccaccagccgcgtgggcgtgatcgggattggcggtctgggccatatcgccatcaagctgctgcacgcgatgggctgtgaagtgacggcgttcagctctaacccggcgaaagagcaggaagtgctggcgatgggtgcggataaagtggtgaacagtcgcgatccccaggcgctcaccgctctggcaggccagtttgacctgatcatcaacaccgtcaacgtcgatctcgactggcagccgtactttgaagccctggcctacggcggtaacttccacaccgtgggtgcggtgatgaagccgctgccggttccggcgtttaccctgatcggcggcgatcgcagcatatccggctctgctaccggcacaccatatgagttacgcaagctgatgaagtttgccggacgcacaaaagtggcgccaaccaccgagctgtatccgatgtcaaaaatcaacgaagcgatccagcacgtgcgcgacggcaaagcccgctaccgcgtggtgttgaaagcggatttctga

SEQ ID NO: 115488 - DNA, 1647 bp, Enterobacter cloacae
atgtccagattcttttttaacgaccgcaaacagcttgtcaacgatgccattgaaggcatacttctctccgcgccgcacggtaatctcgtcaaactggatatcgatccggccatccgcgtggtggctcgcggcgactgggataaaagccgcgtggcggtgatctccggtggcggctccggccatgaaccagcacatgccgggttcgtcggtaaaggcatgcttaccgcagcggtgtgtggcgatctgttcgcttccccaagcgtcgatgcggtcctcaatgccattgtggcggtgacgggcgatcgtggctgcctgctgattgtgaaaaactacaccggtgaccggcttaactttggcctggcggcggaaaaagccaaacgctacggcctgaaggtcgagatggttatcgtggcggatgatatcgccctaccggataacaagcagccgcgtggtatcgcgggaacggcgctggtgcataagattgcgggatatgcggcagaacaggggaaatcgctaaacgacgtgcgggatattgcgcaacaggcctgcgataacctctggagcctgggggttgcgatgcaaacctgtaacctgccgggtagcgatgatgaagaaggacgcatcaggcaaggccacgtggagctggggctggggattcacggcgagccgggggcatcggtggtggatacgcagaacagcagggcgattatcgatacgctggtgatgccgctaaaagcccaggcgggtgacgggcgctttgcggtgctgatcaacaacctcggcggcgtgtcagcgctggagatggctctgctcaccaaagagctggcgcattcggcgttgaaagagaacattgcgtatctgattggcccggcgccgctggtgagtgctctggatatgaaaggcttttcgctaacgctgttaaagctcaacgatttcttcgagaaggcgattcacgccgaggtcgagacgctgggctggcagaagcccgtcgcgttcgcgcccctgcgtaccgtcccccatagcgcccttcatgatcgcgtggaatataccccgtcggacaatccgcaggtgagcgaggccgtcgcctcggtaacgaaaacattgatccagctggaaaatcgccttaacgcgctggatgccaaagtaggcgatggcgatacgggctccacctttgcgcaaggggcgcgggatattgcgcagcgacttgaggagaacaacctgccccttaacgacgtgccgacattactcctgctggttggcgagcggctggcaacggtaatgggcggatcgagcggcgtattgatgtcgatcttcttcactgcggcaggacaaaagcttcacgatggacagtcgctacctgaagcattgctgagcggactggcgcagatgaagcagtatggcggtgcagatctcggcgatcgtacgctgatcgatgccctgcaaccggcgctggaggcgttacagaaaggcaatattcaggcggcagcgcaggccgcgcagcaaggggctgaagcaacggcgaaaatggcgaaagccggcgcgggacgctcgtcgtacgtgaataaagagaatctggacggggtgatggatccgggggcggtcgcggtggcggaagtgtttaagaccatggtagatgcaaaacggtaa

SEQ ID NO: 115489 - DNA, 1503 bp, Enterobacter cloacae
atgagtacaccattgttaatcgccaggacgctggaaaaagagctgtttttactgcccgcgatggcgaaccgtcatggcctgatcaccggcgcgaccgggacgggaaaaaccgtcaccctgcaaaagctggctgagtcgttgtcagagactggcgtgccggtttttatggctgacgtgaagggcgatttaaccggggtggctcaggaaggtgcagcgtcagaaaaactcctcgagcgcctgaaaaatatcggcatcacggactggacgccgcacggtaatccggtggtggcctgggatatcttcggcgaaaaaggccatccggtgcgtgccaccgtctccgacctcggcccgctgctgctggcccgtctgcttaacctcaacgacgtgcagtccggggtactgaacattatcttccgtatcgccgacgatcaggggctactgctgctcgacttcaaagatctgcgcgccatcacccagtacattggcgataacgccaaatccttccagaaccagtacggcaatatcagcagcgcctcggtgggcgccattcagcgcgggctcctgacgctggagcaacagggggccgaacacttcttcggcgagccaatgctggatatcaaagactggatgcgtaccgacagcaacggcaaaggcattatcaacattctgagcgcagagaagctctaccagatgccgaagctttacgccgccagcctgctgtggatgctctctgaactgtacgaacaactgccagaagcaggcgatctggaaaaacccaaactggtgttcttctttgacgaagcgcacctgttgtttaacgacgcgccgcaggtgttgctggataaaattgaacaggttatccgcctgatccgctccaaaggcgtcggggtctggtttgtgtcgcaaaacccgtcggatattccggacaacgtactggggcaactgggtaaccgcgtgcagcacgccctgcgcgcctttacgccgaaagatcagaaagcggtgaaagccgcggcgcaaaccatgcgcgccaatccggcctttgataccgaaaccgccattcaggcgctgggcaccggtgaagcgctgatttcgttcctcgatgcaaaaggcagcccgacagttgtcgagcgtgcgatggtgattgcgccctgctcgcgcatggggccggtaacggacgatgaacgcaacggcctgatcaaccactccccggtgtacgggaagtatgaagacgaggtggatcgcgaatccgcgttcgagatgctgcaaaaaggggtgcaggcgactgctgaatcgcaggatgcgcctgccgccaaagggcaatctgttgccgtggatgacggtattctcggcgggctgaaagatattctgttcggcagcaccgggccacgcggcggcaaacgcgatggcgtggtgcagaccatggcaaaaagcgcgacgcgtcagattaccaaccagatagtgcgcggcatgttagggagtctgctaggcggccgtcgccggtag

SEQ ID NO: 115490 - DNA, 984 bp, Enterobacter cloacae
atggcaggcttgtcccctttcttcgggacggtctatcagattatgcagttacagaaattagtcaatatgtttggtggggatcttttgcagcgctatgggcaaaaggttcacaaactgacgctgcacggcggctttagctgcccgaatcgcgatggcaccatcgggcgtggtggctgcactttctgtaacgtggcctcgtttgctgacgaggcccagcagcataaatctatcgctgaacagctcgcccatcaggcgagtctggtgaatcgcgcgaagcagtatctggcctatttccaggcctacaccagcacgtgggctgaggtgcaggtgctgcgctcgatgtatcagcaggcggttgctcaagcgaacattgtcgggctgtgcgtggggacgcgtccggactgcgtgccggaggccgtgctggatttacttagtgagtacaaagagaagggctacgagatctggctggagctgggcttgcagaccgcgcatgacaaaaccctgcaccgtatcaatcgcgggcatgatttcgcctgctaccagcgcaccacgcgtctcgcccgtgagcgtggattaaaagtctgctcgcatctgattgtcggcttgccaggagaagggcagcagcacgggctggaaacgctggaaaaagtcgtcgagaccggcgtggatggcattaagctgcatccgctgcatatcgtgaagggcagcataatggcgaaagcctgggaagcggggcggttaagtggtatcgaactcgacgactatacggtgacggcgggggagatgattcgccacacgcctccggagattgtttaccaccgcatctcggccagcgcccgccgcccaacgcttctggcaccgctctggtgtgagaaccgctggacggggatgctggaaatcgaccgctatctacaggagaacggcgtacaggggtcggcgcttggccgcccgtgggttccaccgctaccggcgacggccgcctag

SEQ ID NO: 115491 - DNA, 4461 bp, Enterobacter cloacae
atgttgtacgataaatcccttgagaaggataactgtggtttcggcctgatcgcccacatagaaggcgaacctagccacaaggtagtgcgtactgctattcacgcactggcccgtatgcagcaccgtggcgccatccttgccgatggtaaaaccggcgacggttgcggcctgctgctgcaaaaaccggatcgtttcttccgtatcgtagcggaagagcgcggctggcgtttagccaaaaactacgctgtcggtatgctgttcctgaatcaggatcctgaaaaagctgccgcgtcgcgccgcatcgttgaagaagaacttcagcgtgaaaccctgtcgattgtcggctggcgcgatgtgccaaccaacgaaggggtgctcggtgaaatcgccctctcctcgctgcctcgtattgaacagatttttgtcaatgcgcctgcgggctggcgtccgcgtgatatggaacgccgtctgtttatcgcccgccgccgcattgaaaaacgtctccaggacgataaagagttctacgtctgtagcctctctaacctggtgaacatctataaaggtctgtgtatgccggctgacctgccgcgcttctacctggacctggcggacctgcgtctggaatcggccatttgcctgttccaccagcgcttctccaccaacaccgttccacgctggccgctggcgcagccgttccgctacctggcgcataacggcgagatcaacaccatcaccggcaaccgtcagtgggcccgcgcccgtacctataaattccagacgccgctgatcccggacctgcacgatgccgcgccgttcgtgaacgaaaccggctcggactccagctccatggataacatgctggaactgctgctggcgggcgggatggacatcgtgcgcgccatgcgtctgctcgtgccaccggcctggcagaacaacccggatatggaccctgagctgcgcgcgttcttcgacttcaactccatgcacatggagccgtgggacggcccggcgggcatcgttatgtccgacggtcgttttgccgcctgtaacctggaccgtaatggtctgcgtccggcgcgctacgttattaccaaagacaagctcatcacctgtgcctctgaagtcgggatctgggattaccagccagacgaagtggtcgagaaaggccgcgtcggaccgggcgagctgatggtgatcgacacccgcggtgggcgtattctgcattccgccgaaacagacaacgatctgaagagccgccatccgtacaaagagtggatggagaaaaacgtgcgtcgtctggtgccgtttgaagatctgtcggacgaagaagtgggcagccgcgagctggacgatgacaccctcgcgagcttccagaagcagtttaactacagcgcggaagagctggactcggttatccgcgtgctcggtgaaaacggccaggaagcggtcggctcaatgggtgacgataccccgtttgccgtgctctccagccagccacgcattatttatgactacttccgtcagcagtttgcgcaggtcactaacccgccaatcgatccgctgcgcgaagcccacgtcatgtcgctggccaccagcatcggccgtgagatgaacgtcttctgtgaagctgaaggccaggcgcaccgtctgacctttaaatcaccgatcctgctgtactccgatttcaaacagctcaccaccatgaccgaggagcactatcgcgccgacacgctcgatatcaccttcgacgtgaccgaaacgagcctcgaagagacggtgaacgcgctgtgcgataaagccgagcagatggtgcgtaacggcaccgttctgctggtgctgtctgaccgcaacatcgcgaaaaaccgtctgccggtgcctgcacccatggcggtgggggctatccagacgcgtctggtggacaagagcctgcgctgcgacgccaacatcatcgttgaaaccgcgagcgcgcgcgacccgcaccactttgcggtgctgttaggctttggcgccacggcaatctacccgtatctggcctacgaaacgctggcccgcctggtagatacccgcgcgatcgacaaagactaccgcgccgtgatgctgaactaccgtaacggcatcaacaaaggtctgtacaaaatcatgtccaaaatgggcatctcgaccatcgcctcttaccgctgctcgaagctgtttgaagcggtcggcctgcatgacgacgtcgccaacctctgcttccagggcgtgatcagccgtatcggcggcgccggttttgctgacttccagcaggatctggtgaacctgtcgaaacgcgcctggctggcacgtaagccgctggaacagggcggcctgctgaaatatgtccacgggggtgagtatcacgcttataacccggacgtggtgcgcacgctgcaacaggcggtgcagagcggcgagtacagcgattatcagcagtatgcagagctggtgaataaccgtccggcagcgacgctgcgcgatctcattgccctcaatccaggtgatgaagcggtcagcattgacgaggttgaacccgcgtctgagctgttcaaacgtttcgacaccgcggcgatgtctatcggcgcgctgagcccggaagcccatgaagcgctggcggaagccatgaacagcatcggcggcaactccaactccggcgaaggcggtgaagatccggcccgctatggcaccaataaagtgtcccgtattaagcaggtggcgtccggtcgctttggcgtaacgcctgcgtacctggttaacgccgacgtgattcagattaaagtcgcgcagggtgcgaaaccgggtgaaggcggtcagctgccgggtgataaagtcaccccgtacatcgctaagcttcgctattcagtgccgggcgtgacgctgatctccccgccgccgcaccacgatatctactctattgaggatctggcgcagctgattttcgacctgaaacaggtcaacccgaaagcgatgatctccgtgaagctggtttccgaaccgggcgttggcaccattgccaccggtgtggcgaaagcctatgcggatctgatcaccatcgccggttacgacggcggcaccggcgcaagcccgctctcctccgtgaaatacgcgggttgtccgtgggagcttggcctggtggaaacccagcaggcgctggtcgctaacggcctgcgtcacaagatccgtttgcaggtggacggcggactgaaaaccggcctcgacatcatcaaagcggcgattctgggagcggaaagcttcggctttggtaccggcccgatggttgcgctcggctgtaaatacctgcgtatttgccacctgaacaactgtgcaacgggcgttgctacccaggacgaaaagctgcgtaagaatcactaccacggcctgccgttcaaagtgaccaactactttgacttcatcgcccgtgaaacccgcgagctgatggcgcagctgggcgtgaagcgtctggtagacctgattggccgtaccgacctgctgaaagagcttgagggcttcacggccaagcagcagaagctggagctgtctaagctgctggaaaccgctcagccgcatcctggcaaagcggtttactgtaccgagaacaacccgccgttcgacaacggcgtgctgaacgcacagctgctgcaacaggcgaagccgtatgtggatgagaagcagagcaaaacgttctggttcgatatccgcaacaccgaccgttccgtgggtgcgtccctctccggttacatcgcgcaaacgcacggtgaccagggtctggcgtcggatccgattaccgcgcacttcagcggtaccgcgggtcagagcttcggcgtgtggaacgcaggcggggttgagttatacctgaccggcgatgccaacgactacgtcggaaaaggtatggcgggcggtctgctggcggtgcgccctccggttggttcagccttccgcagccatgaagcgagcatcatcggcaatacctgtctgtacggcgcaactggcggtcgtctgtttgccgcgggccgtgcgggcgaacgttttgcggtgcgtaactccggcgccatcaccgtggtggaaggcatcggcgataacggctgtgaatacatgacgggcggaattgtgtgcgtcctgggtaaaaccggcgtgaactttggcgcgggcatgacgggcggttttgcctacgtcctggatgaagacggtgagttccgcaaacgcgtgaacccggagctggtggaagtgctggacgttgatacgctggccatccacgaagaacacctgcgcggtttaattaccgaacacgtgcagcataccggttcttcgcgcggcgaagagatcctggccaactggccggcgttctctgcgaaattcgcgctggtgaagccgaagtccagcgatgttaaagccctgttgggtcaccgtagtcgtagcgcagcagagctgcgcgtgcaggcgcagtaa

SEQ ID NO: 115492 - DNA, 1419 bp, Enterobacter cloacae
atgagccagaacgtttaccagtttatcgaccttcagcgtgttgatccgccaaagaaaccgctgaagatccgtaaaattgaatttgttgaaatctatgagccgttttcagaaggccaggccaaagcacaggcagaccgctgcctgtcctgcggtaacccttactgcgaatggaagtgtccggtccataactacatcccgaactggctgaagctggccaacgaagggcgtatttttgaagccgccgagctgtctcatcagaccaacaccctgccggaagtgtgcggccgcgtgtgccctcaggatcgtctgtgtgaaggctcctgtacgctgaacgacgagtttggcgcggtaaccatcggcaacatcgaacgctatatcaacgataaagcgttcgagatgggctggcgcccggatatgaccggtgtgcgtcaaaccgacaagcgcgtagcgattatcggcgcgggcccggcaggcctggcctgtgcggacgtgctgacccgtaacggcgtgaaggcggtggtctttgatcgccacccggagattggcggcctgctgaccttcggtatcccggccttcaagctggagaaagaggtgatgacccgccgccgcgaaatcttcaccggcatgggcattgagttcaaactcaacaccgaagtgggccgcgacgtgcagctcgacgacctgctgaaagattacgacgccgtgttcctgggcgtaggcacttatcagtccatgcgcggtggtctggagaacgaagatgcgccaggcgtgtacgacgcgctgccgttcctgattgcgaataccaaacagcgaatgggctacggcgagaccgccgatgagccgttcgtcagcatggaaggcaaacgcgtggtggtgctgggcggcggtgataccgcgatggactgcgtgcgtacctccattcgccagaatgcggcgcatgtcatctgtgcctaccgtcgtgacgaagagaacatgccgggctctaagcgcgaagtgaaaaacgcacgtgaagagggcgtcgagttccagttcaacatccagcctctgggtattgaagtgaatgccaacggtaaagtgagcggcgtgaagatggcgcgcacggagatgggtgcgccagatgcgaaaggccgtcgtcgcgcggagatcgtggccggttctgaacacgtgatcccggctgacgccgtggtgatggcgtttggtttccgtcctcacagcatggagtggctggcgaagcacagcgtagagctggactctcaaggccgcatcattgcgccagaaggcagcgataacgcgttccagaccagcaacccgaaaatcttcgccggtggcgacatcgttcgcggctctgacctggtggtcacggcgattgccgaaggccgtaaagcggctgacgggatcatgaacttcctggaagtgtaa

SEQ ID NO: 115493 - DNA, 1251 bp, Enterobacter cloacae
gtgtcgcaagataacaattatagccagggccccgtccctctggcggcgcggaaaggcgtggttccactcacttttgtgatgttagggttaacgtttttttccgccagtatgtggaccggaggcacgctcggtaccggtctttcctataatgatttcttcctcgcagttctcttcggcaatctcctcctcggtatttacactgcttttcttggctacattggcgcaaaaaccggcctctcaacccatcttcttgcgcgttactcgttcggtataaaaggttcctggcttccctccatgcttttaggcggtacgcaggtagggtggtttggcgtcggcgtagcgatgtttgccatcccggtgagtaaagccacgggcatcgacgtgaacatcctgattgcagtttccggcctgttgatgacgttaaccattttttttggcatctcggcactgacgattttatccatcatcgccgtacccgctatcgtcatcctgggtagctactccgtctggctggcggtggacggcgtgggaggattggaccacctcaaatccattgtgccgcagacgccgctcaacttttccagcgcgctggcgctggtcgtaggctcgtttatcagcgcaggcacgctgaccgccgacttcgtccgctttggccgcaatgccaaaggtgccgttctggtggcgatggtggcatttttccttggcaactcgctgatgtttatcttcggtgcggcaggcgctgccgccgtaggacaggccgatatttctgacgtgatgatcgcccagggactgctgctgccggccattgtcgttcttggcctgaatatctggaccaccaatgacaacgcgttgtacgcctctggtctgggtttcgccaatattactggtctttccagccgtacgctgtcggtggttaatggcattatcggtacgctgtgcgcgctgtggctatacaacaacttcgttggctggctgacctttttgtcggcagcgattccgccggttggcggggtgattatcgccgactacctgattaatcgccgccgctatgccagcttcgaccacgcaaaatttgtgtccgttaactggattgccattttctcggtcgccctgggtgttgctgccgggcactacattccgggaattgtccccgttaacgcagtattgggtggcgtcttcagctatttggtgttaaacccattcgccaaacgtacccttgctaatccttcggaggtttcccatgcagaataa

SEQ ID NO: 115494 - DNA, 1293 bp, Enterobacter cloacae
atgcagaataattccctcactatccgtcaggcccgtttgcaggggcaagagggtttatggcaaatcacgattgaggacggacgcttcagccgtatcgatcctcaggaaaccgcctctgcgccagtcggtcaggtgctggacgccgaatgcgggctggttatccctcctttcatcgagccgcatatccatctggatacaacgcaaacggcgggtgaaccgaactggaaccagtccggcacgcttttcgagggaatcgagcgctgggccgaacgcaaggcgatgcttacccacgaagacgttaaaactcgcgcgatgcagaccctgaagtggcaaatcgccaacggcattcagtacgtacgtacacacgttgacgtctcggaccccacccttacggcactgaaagccatgctggaggtgaagcaggaagtcgccccgtgggtcgatatgcaaattgtggcattcccgcaggaaggcattctttcttatccgaacggtgaagaactgcttgaggaagccgtgcgtttaggggcggatgtcatcggcgcaatcccccactttgaatttacgcgtgaatatggcgttgagtcgctgcataaaacgttttccctggccagaaagtacgaccgactgatcgatgtccactgtgatgaaattgatgatgaacaatcgcgcttcgttgaaaccgttgccgcactggcacatcgtgacggaatgggttcacgcgtgaccgccagccataccacggcgatgcactcctataatggcgcgtatacgtcccgactgttccgcctgttaaaaatgtcaggcattaacttcgtggcaaacccgctggttaacacgcatttgcagggccgtttcgatacctatcccaaacgccgaggcatcacacgcgtcaaagaaatgctggaagcggagatcaacgtctgctttggtcatgacgacgttttcgatccgtggtatccgctgggaaccgcgaatatgcttcaggttctgcatatggggctgcacgtttgccaactgatgggttacgggcaaataaatgatgggcttaacctgatcactacccacagcgcgaaaacgctcgatttgcaggactatggcgtgcgcgttgggaatacagcaaacctggtgattctcccggcagagaatgggtttgatgcagttcgtcgccagacgccggcacgatactctgttcgccacggcaaggtgattgccgagacggtgcccagccagacaaccttgcacctgacgcagccggaagcggtgacgtttaagcgccagaatatcgaataa

SEQ ID NO: 115495 - DNA, 468 bp, Enterobacter cloacae
atgttttttggtgagattcggacgcttccctccacggggttgcatcccgttcttctggaggcgctaaccctcgcgctggctgcccgtccgctggaaaaagcggcaggacgttatgagcttcgcggtgaggatatcttcatgaacgtgatgacgtttgccacgcagtttccagaccagaagaaagcggaactgcatgagcaatatattgatatccaggtgttattgacgggagaagagcgcatcctctttggcgtgacgggctcggcacgccagcgtgaagattttcatcctgaagaagattatcagttgtgcagtgagattgcaggtgaacagtgtgtcaccctccggccggggatgtgcgccgtatttatgccgggagagccacataagccaggatgcgcaatccttgagccaggcgagataaagaaagtcgtgatgaaggtacgcgcccgcttgctggatacgtag

SEQ ID NO: 115496 - DNA, 915 bp, Enterobacter cloacae
atgtcacaacgggataaaaacatttccgagcggggcggtgctatgacgacactggcgatagacataggtggaactaaacttgccgccgccctggtggatgacggtttacagatccacgcgcgacgcgaatgccctacgcccgccagtaagacgcctgacgcactgcgtgaggcgctggctgagctggtcaagccgttacagacccaggcaacgcgtgcggccattgcctcaaccggaatcattcaggacggcaatctgctggcgattaacccgcaaaatctcggaggattgcaccattttccgctggtgcagacgctcgaagacattgctggtttgccgaccctggcgatcaatgatgctcaggctgcggcatgggcggaatatcacgttagtgcgaaggaaattaaagacatggtattcctgactgtttcaacgggcgtggggggcggcgtagtcagtaacgggaaactcgtgaccggaagcggcggactggcagggcatcttgggcatacgctcgccgatccaaacggcccgcaatgcggctgtggtcgcgtggggtgcgtggaagccatcgcgtctggtcgcggtattgccgccgcagccaggggagagcttgcaggatgcgatgcaaaaacgatttttgcgcgcgcggcagagggaaataaacaggcggcggaactggtccaacgttctgcacaggtacttgcgcggcttattgccgacacgaaagcggtgatggactgccagcgcgtggtgattggcggcagcatcgggctggcaggagggtatctggcgcgggtccgcgcgtatcttgaggagcatccttctgtttatcacgttgaattaaccgccgcgcactatcgacacgatgcgggcttactgggcgcggcgctgttagctcagggagaaaggtga

SEQ ID NO: 115497 - DNA, 1491 bp, Enterobacter cloacae
atgagtaagtctacccaaagcatcccgtggtaccgccatcttacccgtcctcagtggcgcgccttctccgccgcctggctgggatatctgcttgatggcttcgattttgtattgatagccttagtcctgacagaaataaaaagcgagtttgccctgacgacagtggaagcggcgagcctgatttcggcggcctttatatcgcgctggttcggcggcctgctgctgggcgccatgggcgaccgctatggccgcaagctggcgatgatcaccagcatcgtgctcttttcctgcggtacgctggcctgcggttttgcgccgggttacgtcaccctgtttatcgcccgcatggtgataggcatggggatggcgggggaatatggctccagcgcaacctatgtgattgaaagctggccaaagcacctgcgcaacaaggcgagtggttttctgatttccggtttctccgtcggcgccgtggttgcggcccaggtctacagccttgtcgtgcccgtctggggctggcgggcgctgttctttatcggcattctgcccatcgtctttgccctgtggctgcggaaaaatattccggaagctgaggactggaaagcgaagcacgaaggcaaagccccggtgcgcaccatggttgatattctgtatcgcggcaaataccgcgtcatcaatatggcgatgacgctgtttgccggtacggcgctgtggttctgttttgcaggcgaactcaacaacgcggggctggtcgttattctcggcctgctgtgcgccatcgtctttatcagctttatggtgcaaagcagcggtaaacgctggccgacgggcgtcacgttgatggttgtcgtactcttcgcctttctctactcctggccgattcaggcgctattacccacttatctgaaaaccgacctggcctatgatccctcaacggtggcgaaggtgctgttctttagcggcttcggcgcggcagtaggctgctgcgtgggtggttttctcggtgactggcttggcacccgcaaggcctatgtctgtagcctgttggcctcacagctcctgattgttcccgtctttgcgatcggcggcgccaatgtctgggtgttgggcttgttactctttttccagcagatgctggggcaggggatctccgggatcttacccaaactcatcggcggctatttcgataccgaccagcgtgcggcgggtctgggctttacctacaacgttggcgcgttgggcggcgcgattgccccggtgattggcgcgctgctgtcgcaggatatggcgctgggcacggccctgggatcgctctcctttggcctgacgtttgtggtgatcttgcttattggtctggatatgccctcccgcgttcagcgctggatcaggccagaagccctgcgtacgcatgacgctattgacggtaaacctttcagcggagccgtcccgtttggcggcgacaaaagcgctttagcgaaaagcaaaagttaa

SEQ ID NO: 115498 - DNA, 894 bp, Enterobacter cloacae
atggcaacgcaattacgcggcgtaatggccgcactcctgaccccgtttaactctgagcagatgctggataaagaaagcctgcgccgtctggtgcggttcaatattgaacagggtatcgatgggctgtacgtcggcggttcaacgggagaggcctttgtacagagcctttcggaacgagagcaggtgatggagattgtggcggaagaggcgaaggggaaaatcacgctcatcgcccatgttggctgcgtcagcacggcggaaagccagcagttagccatggccgccgcccgcgtcggttttgacgctgtatccgccgtcacaccgttttactatccctttagctttgaagaacattgcgaccactatcgtgcaattattgactccgcggaggggttgccgatggtggtttataacatccctgcgctaagcggcgttaagttaacgctggatcagatcaacacgctggtaacgctgcctggcgtcggcgcgctgaagcaaacctccggcgatctcttccagatggagcagatccgtcgtgaacatccggatctggtgctctacaacggctatgacgagatcttcgcctccggcatgctggccggcgcggacggggggatcggcagcacctacaacattatgggctggcgctaccaggcgatcgctaaagcggttcgtgaaggggataacgccaccgcacagcgcctgcaaagcgaatgcaacacggtgatcgatctgctgattaaagccggggtgttccgtggtctgaaaacggttctgcactatatggacgtggtatccgtgccgctgtgccgtaagccgtttgcccctgtggatgaaaaattcgtgccagcgctgaaagcgctggcggagcagctaatggcggaaaaacgctaa

SEQ ID NO: 115499 - DNA, 783 bp, Enterobacter cloacae
atgaaaccgactgatcttaaagctgaaaactctgatgaaaccattggtcgcagcctgcgccgtcggccgctggcgcgcaaaaaactgtctgatatggtggaagaagagctggagcagatgatccgtcggaaggaatttgcccagggagagcagttaccctccgagcgcgaactgatggagttcttcaacgtgggtcgcccctcggtgcgcgaagcgctggcggcgctaaagcgtaaagggctggtgcagattaacaacggtgaacgtgcccgcgtaaccatgccgtctgccgataccatcatcagtgaattgtcgggaatggcgaaagactttctgacccagcccggcggtattgcccatttcgagcagcttcgcctgttctttgaatccagccttgttcgttatgccgcagaatatgccactgacgatcagattgcgcagctcacgaaagccctggagatcaacagccagtccctggatgacaacacgctatttattcgttccgatgtcgattttcaccgcgtgctggcggagatccccggcaatccgatcttcaatgcgatccacgttgcgctgcttgactggttaattgcggcgcgtcctaaagtgccggacgcagagctttatcagcataatgaagtcagctatcgccagcatatcgcaattgtggatgcgatccgccgccgcgatcccgatgaagcggatcgggcgttgcaaactcaccttaacagcgtctccgccacctggcacgctttcggccagcattcaaaagccaaaaaataa

SEQ ID NO: 115500 - DNA, 504 bp, Enterobacter cloacae
atgactgtggaaatgtcacaactttcaccacgccgtccgtatctgctgcgcgccttctatgaatggctgctggataaccagctcacgccgcacctggttgtggatgtgacgttgccgggcgtgctggttccaatggaatacgcgcgcgacggacagattgtactgaatattgcgccacgcgcagtgggtaacctggagctggcgaacgacgaagtgcgctttaatgcgcgcttcggcggcgtgccgcgtcaggtttccgtgccgctggcagctgtgctggctatctacgcccgtgaaaacggtgcgggcaccatgtttgagccggaagcggcttatgatgaagaggttgccagcctgaatgatgatgaggcatccgatgaacgcgaaagcgacacggtaatgtctgtcatcgatggcgataagcccgatcataatgacgacaccgatccggatgacgagccaccaccacgcggtggtcgtcctgcactgcgcgttgtgaaataa

SEQ ID NO: 115501 - DNA, 639 bp, Enterobacter cloacae
atggctgtcgctgccaacaaacgttcggtaatgacgctgttttctggtcctactgacatttatagccatcaggttcgtatcgtgctggccgagaagggtgtcagttttgagatcgagcatgtggaaaaggataacccgcctcaggatctgatcgatctcaacccgagccaaagcgtaccgacgctggtggatcgcgagctgaccctgtgggaatcccgtatcattatggaatacctggatgagcgtttcccgcatccgccgctgatgcctgtttatcctgttgcgcgtggtgaaagccgcctgtacatgcagcgtatcgagaaagactggtactcgctgatgaacgttatcgtcaacggttcctcttctgaagcggatgctgcacgtaaacagctgcgtgaagagctgctggcgattgcgccggtatttggtcaaaagcctttcttcctgagcgacgagttcagcctggtggattgctacctggctccgttgctgtggcgtctgccaaccctgggcgtagagttcagcggccctggcgcgaaagagctgaaaggctacatgactcgcgtctttgagcgcgactctttcctggcatctttaactgaaccggaacgtgaaatgcgtctcggccgaggctaa

SEQ ID NO: 115502 - DNA, 393 bp, Enterobacter cloacae
atggctgaaaatcaatactacggcactggtcgccgcaaaagttccgcagctcgcgttttcatcaaaccgggcagtggtaaaatcgtaatcaaccagcgttctctggaacaatacttcggtcgcgaaactgcccgcatggtagttcgccagccgctggaactggttgatatggtagaaaaactggatctgtacatcaccgttaaaggtggtggtatctccggtcaggcaggtgcgatccgtcacggtatcacccgcgcgctgatggagtacgacgaatccctgcgttctgaactgcgtaaagctggcttcgttactcgtgacgctcgtcaggttgaacgtaagaaagtgggtctgcgtaaagcacgtcgtcgtccacagttctccaaacgttaa

SEQ ID NO: 115503 - DNA, 429 bp, Enterobacter cloacae
atgaaaacttttacagctaaaccagaaaccgtacagcgcgactggtatgttgttgacgcgaccggtaaaactctgggccgtctggctactgaactggctcgtcgcctgcgcggtaagcataaagcggaatacactccgcacgttgataccggtgattacatcatcgttctgaacgctgacaaagttgctgttaccggcaacaagcgtactgacaaaatgtactaccaccacaccggccacatcggtggtatcaaagaagcgacctttgaagagatgattgcccgccgtcctgagcgtgtgattgaaatcgcggttaaaggcatgctgccaaaaggcccgctgggtcgtgctatgttccgtaaactgaaagtttacgcaggcaacgagcacaaccacgcggcacagcaaccgcaagttcttgacatctaa

SEQ ID NO: 115504 - DNA, 1125 bp, Enterobacter cloacae
atgcaaaacctgtccccttcatcgcgttaccaactggccctgagcgagggcacacaccagccggatgatgtccagcgtgaagcggttaaccgcctggacacgatttatcaggaacttctggcgaaacccgccgatgcggtgcagagcagtgggctgaaggcggcattcggccgtttactgggcaaaaaagagcccacggtaaacgcaccggttcgtggcttatatatgtggggcggcgttgggcggggtaagacctggctgatggacatgttctaccagagcctgcccggcacgcgtaagcagcgcctgcactttcaccgttttatgctgcgggtccatgaagagctgacggcgctccagggcgaaaccgacccgctggacattgtggccgatcgctttaaggcggaaacggacgtgctctgcttcgacgagttctttgtttccgatattacggatgccatgctgttggggggcctcatgaaagcgctgtttgcgcgtgggatcactctggtggcgacctccaatatcccgccggatgagctttatcgcaatggtctccagcgggcgcgtttcctgccggccattgatgctatcaaacagcactgcgacatcatgaacgtcgatgccggcgtcgattatcgactgcgcacattaacgcaggcacacctgtggctttcgccgttgaacgccgacacagcccgcgagatggataaactgtggctggcgctggcgggagcgccgcgggataacgcgccagcgctggagattaatcatcgtccgttgccgacgcttggcgtagaaaaccagacgctggccgtctcgtttgcaacgctctgcgtggacgcccgcagccagcatgactacattgcgctttcgcgtctgttccataccgttatgttgtgggatgtgcccgttatgaccccactcatggagagcgaagcgcgccgcttcatcgcgctggtagatgagttttacgagcgccacgttaagctggtggtcagcgccgaggtgcctttatatgaggtttatcagggcgagcgcctgaagtttgagttccagcgctgcctgtcgcgcctgcaagagatgcagagcgaagagtacctcaagcgtgagcatatgccataa

SEQ ID NO: 115505 - DNA, 399 bp, Enterobacter cloacae
atgacctgggaatatgcgctaatcggtttagtcgtcggcatcatcattggtgctgtggccatgcgtttcggtaaccgcaaattgcgtcagcagcagtcactgcaatacgaactggaaaagaacaaagccgaactggaagaatatcgcgaagagctggtcagccactttgcccgtagcgctgagctgctggacaacatggcgacagattatcgccagctctaccagcacatggcgaaaagctccagcagcctgctgccggaaatgaccgcggagaccaaccccttccgcaatcgtctggctgattctgaagccggtaacgatcaggctccggttcagatgccacgcgactattcagacggcgcgtccggcctgctgcgcggtggcgtaaaacgcgattaa

SEQ ID NO: 115506 - DNA, 1368 bp, Enterobacter cloacae
atgaagaaaaaaaaccagctgttgagcgccttagcgttaagtgtcgggttatctctctcggcgtccttccccgccagtgcggcactgccttcgcaggtgcctggacaagaagccattcccagccttgcgccgatgcttgaaaaagtcctgcctgcggtagtcagcgttcaggtggaagggacggcacgccaaagccagcgtattcctgaagagctgaagaaatattttggcgaagacgcgccggatcagcaggctcagccgtttgaaggcctgggctcaggggtgattatcgacgcggctaagggctatatcctgaccaataaccacgtgatcagccaggccgataaaatcagcgttcagctgaacgatggtcgggagtttgacgccaaactgatcggcggtgacgatcagagtgatatcgccctgctacaggtgcaaaaccccagcaacctgacccagatcgccattgcagattccgataagctgcgcgtcggtgattttgccgtcgcggtcggtaacccgttcggtttaggccagaccgccacctccggaattgtctccgccctggggcgcagcggcctgaatctcgaagggctggaaaacttcatccagaccgatgcctccatcaaccggggcaactccggcggtgcgctgcttaatctgaacggcgagctgatcggcatcaacaccgctatcctcgcgccaggcggcggcagcatcgggattggttttgccattccgagtaacatggcgaaaaccctgtctcaacagctgattcaatttggcgaggttaagcgcggtctgctgggcatcaaaggcatggagatgagcgccgatatcgccaaagcctttaagctcaacgtccagcgcggggcgtttgtcagcgaagtgctgcccaactcaggctctgcaaaagcgggcgtgaaatccggcgacattattgtcagcctgaacgataaaccgctgagcagcttcgctgaattacggtcacgtattgccaccacggagccgggcgctaaagtgaagctgggcctgatccgtgagggcaaaccgctgaccgtggaagtgacgctggacaagagcacctcctcttccgccagcgcagaacagatctcccctgctctacagggcgctacgctgagcgacggtcagcttaaaaacggcacgaaaggcattaccgtcactaccgttgagaagagcagcccggccgcgaaggcaggtttacatcaggacgacgtgatcgtgggcgtgaaccgcactcgcgtgcagtctattgccgaaatgcgtaaggtgctggagagtaaaccggcggtcattgccctgcaaattatccgtggcaacgacaccctctacattttactgcgttaa

SEQ ID NO: 115507 - DNA, 1068 bp, Enterobacter cloacae
atgcttttaaagctctttcgttcaattgtcattggtttgatcgttgccggtctgctgctggtggctatgccatctttacgccagttcaacaaactgtcggctcctcagttcgacagcacggatgaaacgcctgcgacgtacaatcaggcggtacgccgtgctgcccccgccgtggttaacgtctataaccgcgggcttaacagttccgctcataaccagctggagatccgcacgctcggttccggtgtgatcatggatgaccggggctacatcatcaccaataaacacgtcattaacgatgccgaccagattatcgtcgccttgcaggatggccgcgtgtttgaagccctgctggtggggtcggacagcctgaccgatctggcggtgctgaagatcaacgccacgggcggtctgccgactatcccgattaatcgcaaacgcacgccgcacatcggcgatgtggtgctggcgatcggtaacccgtacaacctgggccagaccatcactcaggggatcatcagcgcgaccggtcgtatcggcctgaacccgtcagggcggcagaacttcctgcaaaccgatgcctcgatcaaccacggtaactccggcggtgcgctggtgaactctctgggcgaactgatgggcattaacaccctctccttcgacaagagcaacgacggcgaaacgccggaagggattggctttgccattccgttccagctggcgaccaagatcatggacaagctgatccgtgatggccgcgtgatccgtggctacatcggtattggcgggcgtgaaatcgcgccgatgcatacgcagggcggtggtatcgatcagatccaggggattgtggtcaacgaagtggcgcctggcggcccggcggccaacgcaggtatccaggtgaacgacgttatcctttccgtcaacggtacgccagcggtctctgcgctggaaaccatggaccaggtggctgagattcgcccgggctccatcatccctgttgaagtcatgcgtaatgacaagaagctgacgattcaggtcaccatccaggaatacccggccactaactga

SEQ ID NO: 115508 - DNA, 939 bp, Enterobacter cloacae
atgaaagtcgcagtcctcggcgctgctggtggtatcggccaggcgcttgccctactactgaaaacccaactgccttcaggctcagaactctccctgtacgatattgctccggtaaccccaggtgtggcggttgacctgagccacatcccgacagctgtgaaaatcaaaggcttctccggtgaagatgcgcgtcctgcgttgcagggtgccgacgtggtgctgatctccgcgggtgttgcgcgtaaaccgggtatggatcgttcagacctgttcaacgtcaacgcgggcatcgtgaaaaacctggttcagcagattgctgaaacctgcccgaaagcgtgcatcgggatcatcaccaacccggtgaacaccaccgttgctatcgcagcagaagtgctgaagaaagcgggcgtttacgacaagaacaaactgttcggcgtaactacgctggatatcatccgctccaataccttcgtggctgagctgaaaggcaagcagccaacggaagtggaagtgccggttatcggcggtcattctggcgtgaccatcctgcctctgctgtcgcagatcccgggcgtgagcttcaccgagcaggaagtggctgacctgaccaaacgtattcagaacgcaggcaccgaagtggtggaagcgaaggcgggtggcggttctgcaaccctgtctatgggccaggcggcggcacgtttcggcctgtctctggttcgcgcgttgcagggcgaaaaaggcgttgttgaatgcgcctatgttgaaggcgacggtgaacacgcgcgcttcttctctcagccgctgctgctgggtaaaaacggtgttgaagagcgtaagtctatcggcacgctgagcgcgtttgagcaaaacgcgatggaaggcatgctggatacgctgaagaaagacattacgctgggcgaagagttcgttaacaagtga

SEQ ID NO: 115509 - DNA, 471 bp, Enterobacter cloacae
atgcgaagctcgtctaagcaagaagaattagtgaaggcgtttaaagcgctactcaaagaagagaaattcagttctcagggagaaattgttcaggcgttgcaggaacaaggcttcgacaacatcaaccagtcgaaggtctctcgcatgttaaccaagtttggtgcggtgcgtacgcgcaacgccaaaatggaaatggtttattgcctgcctgctgaacttggcgtgccaacgacctccagcccgctgaaaaacctggttctggacatcgactataacgatgccgtggtcgtgatccacaccagcccgggcgcagcccagctgattgcccgcctgctggactcgctgggtaaagcagaggggatcctcgggaccatcgccggcgatgacaccatttttaccaccccggcaaatggtttctcggtgaaagacctctacgaagcgattctggtcctgttcgaacaggagctgtaa

SEQ ID NO: 115510 - DNA, 264 bp, Enterobacter cloacae
atgaaaattaaaaccactgtagctgccctgagcgtactgtcagtcctgtcattcggtgcgtttgcagccgacaccatcaatgctgaacaggcacaatcccgtcaggctatcgggactgtttctgttggcgccatcggtacgtctccgatggacatgcacgaaatgctgaacaaaaaagcggaagaacagggtgcgtcatcctatcgcatcatcgaagcgcgcagtggcgaccactggcacgctaccgcagaactgtacaaataa

SEQ ID NO: 115511 - DNA, 303 bp, Enterobacter cloacae
ttgccgcccgcctgtaccgggtggctggcaatgaaaatttatacctttgattttgacgaaattgagagtcaggaagacttctatcgcgagtttattcgggcgttcgacctggagcggggcagcgtaagcaatcttgatatgctgtgggatgtggttaccggcgatcgtctgccgttaccgctggaaatcgaatttacccatctgcctgaaaaactacgcagacgctttggtgcattgattttattgtttgatgaagcggaggaggagctggaagggcaactgcgtttcaacgtgcgccagtga

SEQ ID NO: 115512 - DNA, 1455 bp, Enterobacter cloacae
atgacaacccaggctcttcaggacagtatcctttttcagaccgggtatctggttaacggtatctggaaaacactcgacaccacgtttgatgtgctaaacccggccacgggcgaggtggtcgcgaaagtggcgaaagcagggaaagccgaaaccgaagaggccattgcggccgcgacgaaggcctttcccgcatggcgcgcaaaaacggcaaaagagcgctccacgatcctctatcgctggtatgaactgattatcgagaataaaagctggctcgggcgactgatgactaccgagcagggcaagccgctgaaagaggctgaaggtgaggtggactacgctgccagcttcattcagtggtttgccgagcaggccaagcgcgccaacggtgaaatcattcctccggttaaacccggctcccgtattctggccactcgtgaacctgtcggggtggttgctgctatcacgccatggaatttcccgatggccatgctcacccgtaagctcggcccggcgctggcagcaggatgtaccggcgtcatcaagcctgcaaacaacacgccgctgagcgcctttgcgctgctgacgctggcgaagcaggccggtgtgccggatggtgtgctgaatgcggtcgcggggagcacctcagaaattagtgacgccattatggccagccatgacgtgcgcaaaatctcgtttaccggatcaaccgccgtcgggaaaacgctggttcgcaattccgcagagaccatgaaaaaggtatcgatggagctgggcggtaatgcgccatatatcgttttcgaggacgcggatattgaggccgccgtcaaaggcgcgatcgccaataagttccgtaacgctgggcaggtctgcgtcagcgtaaaccgtttctatattcaggagacggtctatgacaagtttgtcaatcaacttgccgatgcggtgaaggcgctgaaggtggggaacggtctggacgagggcgtcgttgtcggcccgctgattgagccttcggctgtcgaaaaagtccgtgagcacgtcgaagatgcggtagcgaagggcgccacggtgctggctgggggtaaaccgcacgaacttggcggcaacttctggatgccaaccgtactcggtgactgccatgaaggcatgaagctggcagaagaggagacctttggtcccgttgccgcctgcttccgcttcacgtcggaagacgaagtggttatgcgcgctaacaatacgccttacgggctggcagcctacttttatacccagaatctctcgcgcgtgttccgcgtctcgcaggccattgagagcggcatgatcggaattaatgaatgtgcggtctcgaccgagctgggtccgtttgggggcgtaaaagagtccgggctgggccgcgaagggtccgtgctggggctggaggagtttctggaagtcaaaaccctgcatatcgggggattataa

SEQ ID NO: 115513 - DNA, 1968 bp, Enterobacter cloacae
atgggcattttttccatcgccagccagcacatccgcttcgccgtgaagctggcatgcgccattgtgctggcgctgtttgttggcttccatttccagcttgaaacaccgcgctgggccgttctgaccgccgcgatcgtcgccgccggtcctgccttcgcggcgggtggcgaaccttactccggggcaattcgctatcgcgggatgctgcgtattatcggcacctttatcggctgtatcgccgctctgaccattatcatcctgatgatccgtacgccgctgctgatgctgattgtgtgctgtatctgggcgggtttttgcacctgggtctcttcgctggtgaaggtggagaactcgtacgcctggggcctggcgggatataccgcgctgattattatcatcaccattcagagtgaaccgctgcttgctccgcagttcgccgtcgaacgttgtagcgagattgtcattggtatcgtctgcgcgattgtcgcagatctgctcttctctccgcgatccatcaagcaggaagtcgatcgtgagctggacgcgctgattgttgctcagtaccagcttatgcagctgtgcattaagcacggcgacagcgaagaggtcgacaaggcctggagcgcgctggtgcgccgcacgcaggcgctggaagggatgcgcagtaatctcaacatggagtcttcccgctgggagcgggccaatcgtcgtctgaaagcgatcaataccgtctcgttaacgctgatcacccaggcgtgtgaaacctacctgattcagaacacccgccccgaagtggtaacggatactttccgcgaactgtttgatgagcccgtggagacggtgcaggacgtgcatcgacagcttaaacgcatgcgtcgtgtgattgcctggacaggagaacgggatacgccagtcaccatttatacctgggtaggcgccgcaacgcgctacctgctcctgaaacgcggcgtgattagcaacaccaaaatcagtgcggcggaagaagaggtattgcagggcgaagtggtgatcaaaccggagtccgccgagcgccaccatgcgatggttaatttctggcgtaccaccctggcttgtatactcggcacgctgttctggctgtggaccggctggacgtccggcagcggcgcgatggtgatgattgccgtcgtcaccgcgctggcgatgcgtctgcccaacccgcgcatggtcgcgatcgattttctgtacggcaccattgcggcgttacccattggtgcgctctacttcctggtgattattccctcgacgcagcaaagcatgcttttgctctgcatcagcctggcggtgatggcgttctttatcgggattgaggtacaaaaacgccgtctgggatcgttgggtgcgctggcgagcacgattaacatcatcgtgctggataacccgatgaccttccatttcagccagttcctggatagcgcattaggtcagctggtgggctgtttcctggcgatgatggtgatcctgctggtgcgggataactctcaggcgcggacagggcgtgtgctgctgaatcagtttgtgtcggccgccgtatcgtcattgactaccaacaccgcgcggcgcaaggagaaccacctgccggcgctctatcaacagctgttcctgttgctgaataaattcccgggcgatgtcgcccgcttccgcctggcgttaaccatgattatcgcgcaccagcgtctgcggaacgcgccagtgccgatcaacgacgatttgtccgcctaccaccgccagctacggcgaacggcggaccatgtgatatcggcatccagtgatgacaaacgtcgccgctactttaagcaactgctggaggaactggatatctaccaggagaaactgcggatctgggaagcgccgccgcaggttaccgagccggtagagcggctggtgtttatgctgcaccgctaccagaatgcgctgacagacagctaa

SEQ ID NO: 115514 - DNA, 933 bp, Enterobacter cloacae
gtgaaaacgctaacaagaaaaatctcccgcactgccatcactatggcgctggtcatcctggcgttcatcgctatttttcgcgcctgggtttattacaccgaatccccgtggacgcgcgatgcgcgtttcagcgcggaggtggtcgcgatagcgcccgatgtcgccggtctcattacggcggtcaacgtccacgataaccaactggtgaaaaaagatcaggtgctgttcaccatcgaccagccgcgctatcaaaaagcgctggaagaagcggaagccgacgtggcgtattacaacgcgctggccgctgaaaaacgccgtgaagcaggtcgccgtaacaagctgggcatccaggctatgtcccgggaagagattgaccagtctaataacgtgctgcaaaccgtgctgcatcagctggcaaaagcgcaggcgacgcgcgatctggcgaagctcgatctggaacgtaccgttatccgcgcgccgtccgatggctgggtgaccaacctcaacgtctatgcgggtgagtttatcacgcgcggctcaactgccgtggcgctggtgaaacagaactccttctacgtcctcgcctatatggaagagaccaagctggaaggcgtgcgtccgggctatcgcgccgaaatcacgccgctcggcagcaaccgggtcctgaagggaaccgtggacagcgtggccgcgggggtgaccaactccagcagtaccaatgatacaaaagggatggcgaccgtcgattctaacctcgagtgggttcgcctggcgcagcgcgtaccggtacgcattcgtctggatgagcagcagagcaacctctggcccgcaggcaccaccgcgacggtggtgatcacgggtgaaaaagaccgtgatgccagccaggattctatcttccgtcaaatcgcccatcgcctgcgcgagtttggttga

SEQ ID NO: 115515 - DNA, 204 bp, Enterobacter cloacae
atgagtctgtttcccgttatcgtggtgttcggtttgtcgttcccaccgatatttttcgagcttcttttatcactggcgatcttctggctggtgcgcaaggtgctggtccctaccgggatttatgatttcgtctggcatcctgcattgttcaataccgcgctgtattgctgcctgttctatttaatatcgcgcatgtttgtctga

SEQ ID NO: 115516 - DNA, 927 bp, Enterobacter cloacae
atggaacgtctaaaacgcatgtccgtctttgcgaaagtggttgagcaaggctcttttaccgccgcagcacgtcagctacaaatgagcgtctcatccattagccagacagtgtcaaaactggaagatgagctccaggtgaagctgctcaaccgcagcacccgcagcatcgggctgacggaagcgggtaaaatttactatcagggctgccgtcgaatgctgcatgaggtgcaggatgttcacgagcagctctatgcctttaacaacacgcctatcggcacgctgcgtatcggttgttcttcaactatggcacaaaatgttctcgctgccatgacggcggaaatgctgaaagagtatcccggtttaaccgttaatctggtaacgggcattccggcaccggacctgattgccgatgggttagacgtggtgatccgcgttggcgcgttgcaggactcgagcctgttctcgcgtcgactgggcagcatgccgatggtggtctgcgcgtcgaaaagctatctggcacagtatggcgtgccggaaaaacctgccgacctgagcaaccactcgtggctggaatacagcgttcggccagataacgaatttgaactgatcgcgccggaagggctttccactaaactgctgcctgaaggccgcttcgtgaccaacgatccgatgaccatctcacgctggctggtggccggagccgggatcgcctacgtaccgctgatgtgggtgatcaatgagatcaacagcggcgtactggagatcctcttcccgcgttaccagtccgatccacgtccggtctacgctctgtataccgagaaggacaaactgcctctcaaagtacaggtgtgtattaactatctgaccgagtattttgtcgaagtggcggagctgtttcaggggatgcgcggcagaagaaaggagtaa

SEQ ID NO: 115517 - DNA, 615 bp, Enterobacter cloacae
atgaatatattcgaacaaacaccgccttcacgcaggcgctatggactcgccgcgttcatcggtttaattgcagggatcgtctccgcttttgtcaaatggggagccgaagtgccacttccgccacgcagtcccaccgatttattcaccggcgcatgcggacctgagcaattaataagagccgcaagccagattgactgctcccgcaattttttaaaccctccctatgtatttttacgcgactggctgggcgttgctgatcctaacgcagccgtttatacatttgccggacatatatttaactgggtcggtgtgacccatattattttctcaatcgtcttcgctgtggggtattgcgttgttgcggaagtctttccgaaaattaaactctggcagggtttgctggcgggtgcgttagcccagctttttgtgcatatgatctccttcccgctgatgggtctgacgccaccgctgcttgagttgccgtggtatgaacacgtgtcagagatcgtggggcatctggtctggttctggtcgatcgaaatcattcgtcgtgacttgcgtaaccgcattactcacgagcctgatccagagataccgctgggtaacttacgttaa

SEQ ID NO: 115518 - DNA, 1446 bp, Enterobacter cloacae
atgagtctgaacctggtaagtgaacatttgctcgcagcgaacggcctgagccatcaggacctgttctccattcttggtcaactgaccgaacgccgcctcgactacggcgatctctatttccagtcgagctatcacgaatcctgggttttagaagacagcatcattaaagatggctcttataacattgaccagggcgtcggcgtgcgcgccgtcagcggcgaaaaaaccggttttgcctatgcagaccagataagcctggccgcgctggagcagagcgcgcaggcggcgcgaaccattgtgcgcgatacgggcgacggacgggtgaaaacgctgggtgaagtgcagcacgctgcgctctataccagcatcgacccgctgcaaagcatgagccgcgaggagaagctggacatcctgcgtcgcgtggacaaagtggctcgcgcggcggataaacgcgtgcaggaagtctctgccagcctgaccggggtttatgaactgatcctggtggcagcgacggacggtaccctggcggcggatgttcgcccgctggtgcgtctctctatcagcgtgcaggttgaagacgacggtaagcgcgagcgcggctccagcggtggcggtggtcgttttggttatgactggttcctgggtgatgtcgacggcgaagcccgtgcggatgcatgggcaaaagaagccgtgcgcatggcgctggtcaacctgtctgccgtggctgcaccagccggtacgttgccggtggtactgggcgcaggctggccgggcgtgctgctgcacgaagcggtcggtcacggcctggaaggtgatttcaaccgtcgcgggacgtccgtattcagcggtcagatggggcagcttgtctcctcagagctgtgtaccgtggtggatgatggcaccatgctcgaccgtcgcggctcgatttctatcgacgatgaaggtacgccgggtcagtacaacgtgctgatcgaaaacggcgtactgaaaggctacatgcaggacaagcttaacgcgcgcctgatgggcgttgcgccgacgggtaacggccgtcgtgaatcctacgcacatctgccgatgccccgcatgaccaatacttacatgctgccgggccagtccacgccgcaggagattatcgaatccgttgattacggtatcttcgcgccaaactttggcggcggtcaggtggatatcacctccggcaaatttgtcttctctacctcagaggcgtatctgattgagaagggcaaagtgaccaaagcggtgaagggcgcaaccctgattggctccggcattgaggccatgcagcagatttccatggtcggtaacgacctgaaactggataacggcgtgggcgtttgcggcaaagagggccagagcctgcctgtgggcgtcggtcagcctacgctgaaagtggataatctgacggtgggcggcacggcctga

SEQ ID NO: 115519 - DNA, 3807 bp, Enterobacter cloacae
gtgaggcgattgccggggattttactgcttacaggggcaacgctggtcgtgattgtcgcgttgctcgtgagcgggctgcgtctcgccttgccgcatctggacagctggcggccgcagatcctggcaaaaatcgaatccgccaccggcctgccggtggacgtgagccatatcgaggcaagctggcagaactttggcccgacgcttgatgcgcgcgatatccgcgccagcctgaaagatggcggccacctcgaaatcaaacgcgtcaccctggcgctggatgtctggcaaagcctgctgcatctgcgctggcagtttcgcgatctcaccttctggcaacttcagctgatgactaacacgccgctgcgaagcggcgacagcgatcgggggctggaaaccagccgtatcagcgatctgttcctgcggcagttcgatcatttcgatctgcgcgacagcgaagtgagctttattactctttccggccagcgcgctgagctggcgatcccacagctgacctggttaaacgggaaagatcgccaccgcgccgaggggcaggtgaatctctccagcctgaacgggcagcacggcgttatgcaggtgcggatggatctgcgtgacgacaatggcttgctgaacaacggcagggtgtggctacaggcggacgacgtggacgtgaagccgtggctcggtgagtggctacagcagaacatgcagctggagaccgcgcgcttcagcctggaaggctggatgaccctgacgaacgggacgttcgccagcggcgatatctggcttaagcaggggggcgcgagctggaaaggggaaaaccatcagcatcaactttccgtcgataacctcaccgcacacgtgacgcaggataaaggcggctggcagttcgctattccggatacgcgcatctccatggataacaaaccctggccgcgcggcgcgctgacgctggcgtggatgccggagcaggacgtcggcgggataaacggtaaacgcagcgacgagctgcgtatccgcgccagtaacctggatctgacggcgatcgaagggctgcgttcaatggccgcaaaactctccccggagctgggcgaaatctggctggcgacgcagccgagcgggcagataaaccggctggcgctggatattccgctccaggctacggaaaagacgcgttttcaggcggcatggaaaaatctcgcatggaaacagtggaaactgctgccgggtgccgagcacttcagcggtaaactggaaggaagcgtggaaaacggcaggctgacggcagaaatgcaggacgcgaaaatgccgtacgaaacggtcttccgtgcgccactggagatcgaaaagggaaatgccaccctcaactggctgaagaatgacaaaggttttcagctcgatggccgcgatatcgatgtgaaagccaaagcggtacatgcccgcggtaatttccgttatctacagcctgaaggcgatgagccgtggttgggtattctggcgggcatcagcacggatgacggttcgcaggcgtggcgctacttcccggaaaacctgatggggaaagcgctggtggactatctcagcggcgctattcagggcggccaggcggataacgccacgctggtctacggcggcaacccgcacctgttcccgtataagcacaacgaaggccagttccaggttctggtgcctctacgcaacgccacctatgccttccagccggactggccggcgctgaagaatctggatattgaactcaacttcctgaatgacggcctgtggatgaagacggacagcgttgcgctgggcggcgtaacggcaagcaacctgacggcaaacatcccggattactccaaagagaaactgctgattgatgcggatattaaggggccaggtaaagcggttggcccgtactttgaagatacgccgctgaaagactccctggcagccacccttcagcagttgcagttagatggcgatgtgaatgctcgcttacatctggatatcccgctggacggtgaaatgaccaccgccaaaggcgacgttcgccttaataacaacagcctctatatcaagccgctggacagcacgctgaaaaacctcagcggtcagttcagctttgttaacggcacgctgaaaagtgagccgctgaaagcgacctggttcaatcaacccgtcaatatcgatttctccaccaccgagggcgataaagcctaccaggtggcggtcaatatggacgcgaactggcagccgtcacgcatggatgttctgccgaagccgattgaaaatgcggtggacggcgcggtgtcatggaatggcaaggtcgccatcgacctgccttatcatgccggtgcgcgctataacgtcgacattacgggcgatctgaaaaacctcagcagccaacttcccgcgccgctgaataagaaaagcggtgaagcattgcccgtcaatgttaaggttgcgggcaaccttaacagcttcgatttaaccggaaacgctggtggaacaaaccacttcaacagccgctggctgcttaaccgcaagctgacgctggacagagcgatctggacgacggacagccgtaccacgccgccgctgccggagcaggcgggcgttgaactgaatctcccgccgatggatggcgcagagtggctggcactgttccagaaaggtgtcgggcaaaacgtcgaccaaacggcgcagttcccacagtccattaccttgcgcacgcctgcgctgacgctgggcgggcagcagtggaacaacctgagtattgtctcccggccgacggtaaacggctcaaaggtcgaggcgcaggggcgtgagattaacggttcgttgaccatgcgcgatcacgcgccatggcaggcggctatccgttatctctattacaatccgacctttacggcgtctaaagcagagtcgacaagcgcttctcctgtcagtggcagtgggaggtcgcgcgtggatttcagcggctggcccgatctccagttgcgctgtgcggagtgctggctgtgggggcaaaaatatggccgtatcgacggtgattttgctattcagggcaatacgctgagcctctctggtgggctggtggataccggctttggccgcatgactgccgctggcgaatgggtgaacaaaccgggtgaacagcgcacctcgctgaaaggcgatattaaaggcaacaagctggacgccgcagctaacttcttcggcattagcacgccgcttcgcggatcgtccttcgatgtgaattacgatctgcactggcgcgcagcgccatggacacccgatgaagcttcgcttaacggcatcctgaaaacccacttcggtaagggggagattgccgatgtgagcacggggcgcgccgggcagatcctgcgtctgctgagttttgacgcgctgctgcgcaagctgcgcttcgactttagcgacaccttcagcgaaggtttctactacgattccattcgcagcacggcgtggatcaaagacggcgttctgcacaccgacgacacgctggtggacggcctggaagcggatatcgcgatgaaagggtcagtggatctcgtgcgccgcgagctggatatggaagccgtggtggcgccggagatttccgcaagcgtgggcgttgcggcagcctttgtggtcaatcctattgtcggggcggcggtgtttgcggccagtaaagtgctggggccgctctggagcaaagtctcgattctgcgctatcgcattaccgggccggttgataaaccacagattaatgaggtgctgcgccagccgcgcaaagaagcacagcaatga

SEQ ID NO: 115520 - DNA, 1470 bp, Enterobacter cloacae
atgacggctgaattgttggtaaacgtaacgccatcggaaacccgtgtggcctacattgatggtggcattctccaggaaattcatattgagcgtgaagcgcgacgcggaatcgtaggcaatatctacaaaggtcgtgtcagtcgtgtcctgccgggtatgcaggcggcttttgtagatattgggctcgataaggcggcgtttttacatgcctccgatatcatgccgcacaccgaatgtgtggcaggcgaagagcaaaagcagtttgccgtgcgcgacatctctgagctggtgcgtcagggccaggatctgatggtacaggtggtaaaagatccgcttggcaccaaaggcgcgcgtctgaccaccgacatcaccctgccttcacgctatctggtctttatgccgggggcgtcgcacgtcggcgtgtcacagcgcattgagagcgaaagcgagcgtgagcgcctgaaaaaggtggtcagcgcctactgcgacgagcagggcgggtttattatccgtaccgcggcggaagggatcagcgaagaagatctggcctcggatgcggcctatctgaagcgcgtctggaccaaagtgatggagcgtaaaaaacgcaaccagacccgctaccggctgtacggtgagctggcgctcgctcagcgcgtattacgtgatttcgccgacgcccagcttgaccgcatccgcgtggactcccgtctgacgtacgaagccttactggagttcaccgccgagtacatcccggaaatgccgggtctgctggagcattacaccggacgccagccaatatttgacctctatgacgttgaaaacgaaatccagcgtgcgctggagcgtaaggttgagctgaaatcgggtggctatctgatcatcgatcaaaccgaagcgatgaccaccgtcgacatcaacaccggcgcgtttgtcggccatcgcaacctcgatgacaccatcttcaacaccaacatagaagcgacgcaggccatcgcgcgtcagcttcgtctgcgtaatctgggcggcattatcatcatcgactttatcgatatgaacaatgaagatcaccgccgtcgcgtgctgcactcactggagcaggcgctgagtaaggaccgcgtgaaaaccagcatcaatggcttctcgcagctcggtctggtggaaatgacccggaaacggacccgcgaaagcgtggaacatgtcctgtgtaatgagtgtccaacctgccatggacgcggaacggtaaagacggtggagacggtctgctacgaaatcatgcgtgagattgtccgtgtccatcatgcctacgactcagaccgttttctggtctatgcttcccctgcggtggcggaggccctgaaaggggaagagtcgcacgcgctggcagaagtggaaatctttgtcggcaaacaggtaaaagtgcaaattgagccgctctataaccaggagcagtttgacgtcgtcatgatgtaa

SEQ ID NO: 115521 - DNA, 594 bp, Enterobacter cloacae
atgacgtctttgtatcttgcctccggttctccgcgtcgccaggaactgctcgcgcagttgggtgtctccttcgaacgcatcgttaccggtatcgaagaaaaacgtgctgagggtgaaagcgctcagcagtatgtctctcgtctggcgcgtgaaaaagcgcaggcgggcgtggcatgcgtgccgcgtgacttaccggtgctgggtgcggataccatcgttattctcaatggtgaggtgcttgagaaaccccgcgacgtagaccatgcggcgcggatgctgcgtaatatgtccggacaaacccatcaggtgatgacggcggtagcgctggcagatagccagtacgttctggattgccttgtggtaacggaagtgacgttcagagtcctcaccgacgagaagatcgccggctatatcgccagcggtgaacctatggataaagcaggtgcatacggtattcaagggttgggtggctgttttgtcaggaagataaatggcagctatcacgccgtagtcggcttaccgctggtggaaacgtatgagttgctgagcaattttaactcactgcgtgagggaagggataattatgacggctga

SEQ ID NO: 115522 - DNA, 489 bp, Enterobacter cloacae
gtggccagttatcgtagccaggggcgctgggtaatctggctctcattcctcgttgcactgttgctgcaaattatgccctggccggacgacattcttgttttccggccaaactgggtattgctcattttgctctactggatccttgccctgccgcaccgcgtaaatgtcggcacaggttttgtgatgggtgccatactggatcttatcagtggctctacgcttggcgtccgcgccttatccatgagcattattgcgtatctcgtcgcactcaaattccagctctttcgtaaccttgcgctctggcaacaggcgctggtagtgatgttgttgtcgctcgctgcggatatcgttgttttctgggcagagtttttagtgatcaacgtctctttccgaccggaagtgttctggagtagtgtagtaaacggtgtgctctggccgtggctgttcctgctgatgcgtaaaattcgccagcagtttgccgtgcaataa

SEQ ID NO: 115523 - DNA, 1017 bp, Enterobacter cloacae
atgaagccaatttttagccgtggcccgtcgctacagtttcgcctgatcctggcggttctggttgcgctcggggtcattattgccgatagccgcctcggtacgttcagccagatccgaacgtacatggataccgccgtcagtcctttctactttatttcaaatggtccccgtgaactgctcgactccgtgtcgcaaacgctctcatcgcgtgaccagctcgaactcgaaaaccgtgcgttacgccaggaactgctgctgaaaaatagcgagctgctgatgctggggcaatataagcaggaaaacgcccgtctgcgcgaactgctcggctcgccgctgcgccaggatgaacagaaaatggtcacccaggtaatctccaccgtaaacgatccgtacagtgatcaggtggtgattgataaaggcagcgtgaacggcgtatacgaaggtcagcctgtcatcagcgataagggcgtcgtgggccaggttgtggcggttgccaaactgaccagccgcgtgttgctgatttgcgatgccacccatgcactgccgattcaggtgctgcgtaacgatattcgcgtgattgccgccggtaatggctgcacggacgatctgcaactggaacacctgcctgccaacacggatatccgagtgggcgacgtgctggtgacgtccggtctgggcggtcgtttccctgagggctacccggttgcggttgtctcttccgtgaagctcgacactcagcgtgcctacaccgtgattcaggcgcgtccaacggccggcttgcagcgtttgcgctacctgttgctgctgtggggcgccgatcgtaacggcgctaacccgatgaccccggaagatgtgcatcgcgtggccaacgaacgcctgatgcagatgatgccgcaggtgctgcctgcgccggatgcgatgggaccacctgcacccgtaccggctccggcgacggggttaacgcagccgctgccggatgcgcccccaccgccgcaagtctcgggtggagggcagtag

SEQ ID NO: 115524 - DNA, 1044 bp, Enterobacter cloacae
atgttgaaaaaatttcgtggcatgttttccaatgacctgtccattgacctgggtaccgcgaatacccttatttatgtaaaaggacaaggcatcgtattgaatgagccttccgttgtggccattcgtcaggatcgtgccggctcgccaaaaagcgtggccgcagtaggtcatgatgcgaagcagatgctgggccgtacgccgggcaacatcgccgcgatccgccctatgaaagacggcgttattgctgacttcttcgtgaccgaaaaaatgcttcagcacttcatcaagcaggttcacagcaacagcttcatgcgcccaagcccgcgcgtgctggtgtgtgtgccggttggcgcaacccaggttgaacgccgtgcgatccgtgaatccgctcagggtgccggtgcgcgtgaagtgttcctgattgaagaaccgatggctgcggcaattggtgcgggtctgccggtttctgaggctaccggttctatggtggtggatatcggtggcggtaccactgaagtggccgttatctccctgaacggtgtggtgtactcctcttccgtgcgtatcggcggcgaccgtttcgacgaagccatcatcaattacgttcgccgtaactacggctctctgatcggtgaagcaaccgcagagcgcatcaagcatgaaatcggttctgcctatccgggtgatgaagtacgcgagatcgaagttcgcggtcgtaacctggctgaaggcgtgccacgcggattcaccctgaactccaacgaaatcctggaagcgttgcaggagccgctgaccggcatcgtgagcgcggtgatggttgcgctggaacagtgcccgccagagctggcttccgatatctccgagcgcggtatggttctgaccggtggtggtgcgctgctgcgtaacctcgaccgcctgttaatggaagagacaggtattcctgtcgtagttgcagaagatccactgacttgcgtcgcccgtggtggtggcaaggcgctggaaatgatcgacatgcacggcggcgacttgtttagcgaagagtag

SEQ ID NO: 115525 - DNA, 1941 bp, Enterobacter cloacae
atgcgattaacgacgaagttctcagcttttatcaccttgctgacggggctgaccatatttgtcacgctaatcggctgctcgctgagcttttacaatgccatccaggataagctggttaaccgggttgaatcggttgcatcggttatcgacactcgcctgattgcaacctccttcccggcgctttcgcgtgagctggatgagttaatggtgcctgtggatatcgtgcagatcgacattaaacaggggaagcagaccgttttccgccatacccgccagggcagctatcgtcctgccggcacggtagatcagtatcggaacgtcacggttaattcacttaaacatccgggtatgacaattcatctgatgtaccaggatccgatgagcaactatttacgctcgcttatgaccaccgcgcccttaaccatcgccgttgcctttatcgtactgctgattttcctcgccgttcgctggcagcgtcgtcaactttccggccaggaactgctggaaacacgctccgtgcggatactgaatggcgaacggggtccacaggtgcggggatcggtttatgaatggccatcacgcaccagtagcgccctggacgtgctgctctccgaaatccagtttgccagcgatcagcgtagccgtatggacacattgattcgctcttacgccgcgcaggataacaaaacgggcctcaacaaccgtctcttctttgataatcagctggctacccttcttgatgaccccgaaaaggtgggtacgcatggcgtggtaatgatgattcgcctgcccgacttcgatctgctccgtgatacctggggtcagcgcgtggcggaagagaacctctttacgctgattaacctgctgtccacctttattatgcgctaccccggcgcgttactggcacgctaccaccgcagcgattttgccgtcttgctgccgcatcgcaccttaaaggagtccgagagtatcgccagccagctgctgaaagccgtcgatgcgctgccccagagcaaaatgctcgacagagacgatatggtgcatatgggcatctgtgcctggcgcggcggtcagtcgacggagcaggtgatggaacatgcggaagcggccacgcgtaacgccgtattgcagggggcgaacggctgggcagtctatgatgatacgctgccggagaaagggcgcggcaacgtgcgctggcgaaccctgattgaacagatgctgagccggggcggaccgcgcatctatcaaaaaccggcggtcatgaagaatggtcatgttcatcatcgtgagctgatgtgccgtatttttgatggcactgaagaggttatctccgcggaatatctgcccatggtgttgcaattcggattgtccgaagagtatgaccgtcagcaaatcacccgtctcattccgtttttatcgtactggcctgaagaaaatctggctttacaggtgaccgtcgaatcgctgatccgtccgcgtttccagcgctggttacgtgacacgttaatgcaatgcgaaaaatcgcaacgcaaacgcattatttttgaacttgcagaggcagatgtaggtcaacacatcagccggttgcgcccggtagtgcgtttaatcaatgcgcttggggctcgcgtggcggtaacccaggcgggtttgacgctggtgagcacccgctggatcaaagagctggatgttgaattattgaagctgcatccgggtctggtaaggaatattgaaaaacgcacggaaaaccagctgctggtacaaagcctggtggaagcgtgcaaaggaacgcaaacgcaagtatttgccacaggcgtacgttcacgtagtgaatggcagatgttgacagagcgcggcgtgacgggcggtcagggggatttttttgccgcctctcagccgcttgacaccaatgtgaaaaaatatttgcaaagatactctgtttga

SEQ ID NO: 115526 - DNA, 975 bp, Enterobacter cloacae
atgcaggctttgatcttagaacagcaggacggcaaaaccgttgcctcagtgcaagccatcgaggagagccgcctgccggagggcgacgtgaccgtagatatcgactggtccagcctgaactataaggatgcgctggccattacgggaaaaggtaaaatcatccgaaatttcccgatggtgccaggaatcgactttgcaggccgcgtacataccagtgaagatccacgttttcacgccggacagcaggtgctgctcaccggctggggcgtaggtgaaaaccactggggcggactggcagcgcaggcgcgcgtaaaaggtgactggctggtcccgatgccgaaaggcctggacggtcgtaaggcgatgatcatcggcacggcaggtttcaccgccatgctgtgcgtgatggcgctggaagaggccgggatccgccctgactctggcgaaattgtcgtcaccggcgccagcggcggcgtgggcagcacggccgtcacgctgctgcacaagttggggtatcaggtcgctgccgtctcaggccgcgaaagtacgcatgattatctacgtcaattgggcgcaagccgcattctgagccgcgacgaatttgccgagacccgcccgctggaaaaacaggtctgggctggcgcagtagataccgtcggcgacaaagtgctggcgaaggtgctggcgcaaatgaattacggcggctgcgtggcggcctgtggactggcgggtggttttgccctgccgacgacggtgatgccatttattctgcgtaacgtgcgtcttcagggtgtcgattcggtcatgaccccagccgagcggcgggctgaggcctgggaacgtctggtgcaggatctgccagcctcattctttgaccagagcgccactgagattaccctgagccaggcgccagagttcgccaataaaatcatggacaaccagttccacggtcgtgcgcttgttaaaatcgcctaa

SEQ ID NO: 115527 - DNA, 1002 bp, Enterobacter cloacae
atgaaaacccgaaaactgacggaagccgacgtaacgtctgaatctgtctttatgctacagcgccgccagatcctgaaaatgcttggcatcagcgccaccgccctgacgctcacccctgcggcccatgccgatctgctcgactggtttaagggcaacgatcgcccgaaagccccttccggcgcaccgcttaacttcaccaaaccggcgcagtggcagaataaactggcgctgacgccggaagataaagtcaccggctataacaacttctatgagtttggtctcgataaggccgatcctgccgccaacgccgggagcatgaaaaccgatccctggacgctgaagatagatggcgaggtggcaaaaccgctgacgctggatcatcatgacctcaccacccgcttcccacttgaagagcgcatttaccgtatgcgctgtgtggaagcctggtcgatggtggtgccgtgggtaggtttccctttgcataaactgctggcgctggttgagcccaccagcaacgcgaagtatgtttccttccagacgcgctacgccccggacgagatgccaggccagaaggatcggtttatcggcggcgggctggagtatccctacgttgaaggtttacgtctcgacgaagccatgcatccgcttacgctgcttaccgtcggggtttatggcaaagcgctaccgccgcaaaacggggcgcccattcgcctgaccgtaccgtggaaatacggtttcaagggcatcaaatcgatcgtcagcattaagctcacccgtgaacgcccccccaccacctggaacctggcagcgcctgacgagtatggtttttttgccaacgttaacccgcacgttgaccatccgcgctggtcgcaggcaacggaacgttttatcggctccggcggcgcgctggatgttaaacgccagccaacgctgctgtttaacggctatgcggatgaggtggcatccctctaccgtgggctgaatttacgggagaacttctaa

SEQ ID NO: 115528 - DNA, 600 bp, Enterobacter cloacae
gtgcgtttaacggcaaagcagataacctggctgaaggtactcctgcatttagccggattgctcccctttatctggctcttctgggcagccagccagggacagttcagtgccgatccggcgaaagatattcagcattttacgggtcggatggctctgaaatttatgctggcgaccttgctcgtctcaccgctggcgcgctacgctaaacagccattattgatacgcacccgtcggcttttagggctatggtgttttgcctgggcgacgctgcatctcaccagctacgccctgctggaactgggcattaacaacctggcactccttggcagcgaactggtgacgcgtccctatctgacgctgggtatcgtaagctggctggttttactggcgctgacgctgacatccacgcagtatgcgcagcgaaaactgggtcgacgctggcaactgctgcacaacttcgtctatcttgtcgcgatcctcgccccgattcattacctgtggtcggtgaagattttatcccctcagccggtcatctacgccctgctggccctggcccttttagcgtggcgttacaagaagttccgccagtggttgcgatag

SEQ ID NO: 115529 - DNA, 453 bp, Enterobacter cloacae
atggctgacaaattccaaattttagtattgaacggtccgaacctgaacatgctcggcacccgtgagccagagaagtacggcacgctgacattgagcgaaattgttaaccgtctgagtacggaagcagcctcgctgaatgtggatttggaccattttcagtcaaacgcggagtacgcaatcatcgaccgtattcatcaggctaaagacactgtggactatatcctgatcaatccggccgcgtttacgcacaccagtgttgctatacgcgacgcactgctcgcggtgagtatcccgtttatcgagatccacctgagtaacgtgcacgcccgagagccgttccgccaccattcctacctgtcagatatcgccgctggcgtgatttgtgggctgggtgcagacggctattcatacgctttacagacagcggtaaaacgcttgtcacaatcacactaa

SEQ ID NO: 115530 - DNA, 465 bp, Enterobacter cloacae
atggatattcgtaagattaaaaaactgatcgagctggttgaagaatcaggcatctccgaactggaaatttctgaaggcgaagagtctgtacgcatcagccgtgcagccccggccgctagcttcccggtaatgcagcaagcttacgctgcgccagtgcagcagcctgcgctctccgcagccgttgcaccagtggcagcagaagcggcacctgcggctgcaacagaaatcagtggtcacatcgtacgttccccaatggttggtactttctaccgcaccccgagcccggacgcgaaggcgttcatcgaagtgggtcagaaagtcaacgtaggcgataccctgtgcatcgttgaagccatgaaaatgatgaaccagatcgaagcagacaaatcaggtactgtgaaagcgatcctggtcgaaagtggtcagccggtagaatttgacgagccgctggtcgtcatcgagtaa

SEQ ID NO: 115531 - DNA, 1350 bp, Enterobacter cloacae
atgctggataaaattgttatcgccaaccgtggcgagattgcactgcgtattcttcgtgcctgtaaagaactgggcatcaagaccgtggccgtgcactcaagcgcggatcgcgatttaaaacacgtattgctggcggatgagacggtctgtatcggtccggctccgtccgtaaaaagctatctgaacatcccggctatcattagcgccgccgaaatcactggcgcggtcgcgattcacccgggttatggtttcctctctgagaacgccaactttgctgagcaggttgaacgctctggctttatcttcattggcccgaaagccgacaccattcgcctgatgggtgacaaagtgtctgccatcaccgcgatgaaaaaagccggcgtgccaaccgtaccgggctctgacggcccgctgaccgacgatatggatgctaaccgcgcccatgctaaacgcattggctacccggtgatcatcaaagcgtccggcggcggcggcggtcgcggtatgcgcgttgtacgcagcgatgctgaactggcgcagtccatctccatgaccaaagcggaagcgaaagcggctttcagcaatgacatggtgtacatggaaaaatacctggaaaacccacgccacatcgaaattcaggtgctggctgacggtcagggtaacgcaatctatctggcagaacgtgactgctccatgcagcgtcgtcaccagaaagtggtcgaagaagcgccagcgccgggcattacgcctgaactgcgtcgctacatcggcgagcgttgcgctaaagcgtgtgtcgatatcggctatcgcggggcgggtacctttgagttcctgttcgaaaacggcgagttctacttcatcgagatgaacacccgtattcaggttgaacacccggttaccgaaatgatcaccggcgttgacctgatcaaagaacagctgcgtatcgcagccggtcagccgctgtccatcaaacaggaagaagttgtggttaaaggccatgcggtagagtgccgtatcaacgccgaagacccgaataccttcctgccaagcccgggtaaaatcacgcgtttccacgcgccgggtggctttggtgtgcgctgggagtcccatatctacgccggttacaccgtaccgccgtattatgactcaatgatcggtaagctgatctgctacggcgaaaaccgtgacgtggccattgcccgcatgaagaacgcccttcaggagctgatcatcgacgggatcaaaaccaacgttgatctccagatgcgcattatgagcgacgagcacttccagaatggtgggactaacatccactacctggaaaaaaaactcggtctaaacgagaagtaa

SEQ ID NO: 115532 - DNA, 243 bp, Enterobacter cloacae
atggacaaacgttttgttcaggcccataaagaagcgcgctgggcgctgtggctgacccttctctatctcgccgcgtggttagtaactgcttacttacctgattcggcgattggcattaccggcctcccgcactggtttgaaatggcctgcctgctgctgccgctggtgtttatcctgctgtgctgggcgatggtgaaattcatctatcgcgatatatcactggaggacgatgatgcagcttga

SEQ ID NO: 115533 - DNA, 1452 bp, Enterobacter cloacae
atgcagcttgaagtcattctgccccttatcgcttacctgttcctggtgtttggcctgtcggtttatgcgatgcgtaaacgttcgaccggcacctttctgaacgagtatttcctcgggagccgctctatgggtggcgtcgtgctggccatgacgctgaccgccacgtacatcagcgccagttcgtttattggtggccccggcgccgcttataagtacgggctgggttgggtactgctggcaatgatccagctgcctgccatctggctctctctgggcatactgggtaaaaagtttgccattctggcccgtcgctacaatgccgtaacgctgaacgatatgctgtttgcccgctatcagagtcgcttgctggtatggctggcaagcctgagtctgctggtggcgtttattggcgcaatgacggtgcagtttatcggcggcgcacgtctgctggagacggcagccggtatcccctatgaaacaggtctggtcattttcggtgtgagtatcgcgctgtataccgcgtttggcgggttccgcgccagcgtactcaacgacacaatgcaggggatggtgatgctcattggcaccctcgttctgctggtaggtatcgtgcatgccgcaggaggcctgagccatgcggttgaaaccctggaagcgatcgatccgaaactggtctcaccgcagggggcggatgacatcctctctccaacctttatgacctcgttctgggtactggtgtgctttggcgtgattggcctgccccatactgccgtgcgctgcatctcatataaagacagcaaagcggtgcaccgcgggatcattatcgggacaattgtggtggcgatcctgatgttcggtatgcatctggcgggcgcgctgggacgcgcggtgatccctgaccttaccgtaccggatctggtcattccgaccctgatggtgaaagtgcttccgccgtttgccgccgggattttcctcgccgcacccatggcggccattatgtcgaccatcaacgctcagttgctgcaaagttccgctacgatcattaaagatctctatctgaatttgcgtcctgaacaggtcgaaaatgagcgacgcctcaagcgcatgtcggcggtgattaccctggtgctgggggcgttgctgctgctggccgcgtggcgtccaccggagatgatcatctggttgaacctgctcgcctttggtgggctggaggccgttttcctgtggccgctggtgctggggctctactgggaacgcgcgaatgccgcgggtgcattaagcggcatgattgtcgggggcgtcctgtatgccgttctcgccacgtttaaaattcagtatctgggcttccatccgatcgtgccttcgttactggtaagtttactggcgtttgtggtgggaaaccgttttggtcgaccggtgccacaaactgccctgatttctactgataaataa

SEQ ID NO: 115534 - DNA, 882 bp, Enterobacter cloacae
atgccgtggatccaattaaaactgaacacaaccggcgcgaacgccgaagaactgagtgatgcgctgatggaggccggttcggtctctatcaccttccaggacacgcatgacacgccggtctttgagccgctgccaggcgaaacgcgcctgtggggtgatacggacgttatcggcctgttcgatgcagaaaccgacatgaaagaggtcgtggcgattctggaaaaccatccgctgctgggcgtgggtttcgcgcataaaattgaacagctggaagacaaagactgggaacgcgagtggatggacaacttccatccgatgcagtttggtcagcgtctgtggatctgcccaagctggcgtgaagttcccgataaaaacgccgtcaacgtgatgctggatccgggtctggcgttcggcaccggcacccacccgacaacctccctgtgcctgcaatggctggatggcctggatctggaaggcaaaaccgtgatcgacttcggttgcggatccgggatccttgctatcgcggcgctgaaactgggcgcggcaaaagccatcgggatcgacatcgatccgcaggcgattcaggccagccgtgataacgccgagcgtaatggcgtttccgatcgccttgaactgtatctgcccgatgcacagccagaggcgatgaaagccgatgttgtggtcgcgaatatcctggctggcccgttacgcgagctggcgccgttaatcagcgtgctgccggttgaaggcggtctgctgggcctgtccggtatccttgccagccaggcagacagcgtctgtgaagcctacgccgatctcttcgcgctcgacccggtggtcgagaaagaagagtggtgtcgcatcaccggccgtaaaaaataa

SEQ ID NO: 115535 - DNA, 744 bp, Enterobacter cloacae
atgatgaaacacatttcaggcaaggcagcgctgctggcgctgagcataatttcggctacggcttacgcatcacactggagttatcagggagaaggcgcaccggaacactggggcgaactggacgaggcgtacaagacgtgtaaaagcggaatgtatcagtcgccggtcaacatagataacacggtcaaagcccacatctctccgctggaaacgcactatatcgacggcccggtcattctgacaaacaacggccatactatccaggcaagtgaaaatgccgatacacgcgacagcatcacgcttgataaacagcgctggacgttacagcagttccatttccatgcgccatccgaaaacacggtgcacggtaaaaaatacgcaatggaaatgcatctggtccataaaaacgctgacggcgaactgacggtcgttgccgttatgttcgatcagggcgcggcaaacactgaactggataaactctggggcgtgatgcccggacaggttgaccagaacgtcacgattaagccaaccctcgatatgaataaattactgcccacggataaaacctactggcgttttagcggctctctgaccacgccaccgtgttcagaaggggtgacatggctggtgctcaagcacccgctgaccgtctctgctgaacagctgcaaaaattcactcacaccatgcaccatgaaaacagccgcccggttcaaccgcttcatggccgtctggttgttgaataa

SEQ ID NO: 115536 - DNA, 966 bp, Enterobacter cloacae
atgcgcatcggacaccaccagctcagaaatcgcctgatcgcagccccaatggcaggtattaccgaccggccgttcaggacgctgtgttatgagatgggagcaggcctgaccgtttccgagatgatgtcgtctaacccgcaggtttgggaaagcgataagtcccgcctacggatggtgcacattgatgaaccaggtatccgcaccgtgcaaattgccggaagcgtgcctgaagagatggcagatgccgcgcgtattaacgtggaaagtggcgcccagattattgatatcaatatgggttgcccggccaaaaaggtgaatcgcaagcttgcaggttcagcccttctgcaataccccgaccaggtgaagtcaatcctgacggcggttgtcagcgcagtggacgttcctgttacgttgaagattcgcacgggttggtcgccggaacaccgtaactgcgtagagattgcccaactggccgaagactgtggcattcaggccctgaccattcatggacgcactcgcgcctgtttgttcaacggtgaagctgaatacgacagcattcgggcagttaagcagaaagtttccattccggttatcgcgaatggcgacattactgacccgcttaaagccagagctgtgctcgactatacgggagctgatgctctgatgataggacgtgccgctcagggaagaccctggatctttcgggaaatccagcattatctggacactggggagctgcttgccccactgcctctggcagaggtcaagcgcttgctttgttcgcatgttcgggaactgcatgaccactacggccaggcaaaagggtaccgaattgcgcgtaaacacgtctcctggtatctccaggagcacgctccaaatgaccagtttcggcgcacattcaacgccattgaggatgccagcgaacagctggaggcgttggaggcatacttcgaaaatcttgcgtaa

SEQ ID NO: 115537 - DNA, 297 bp, Enterobacter cloacae
atgttcgaacaacgcgtaaattctgacgtactgaccgtttctaccgttaactctcaggatcaggtgactcaaaagcccctgcgtgactcggttaaacaggcactgaagaactattttgctcaactgaacggtcaggatgttaatgacctgtatgagctggtactggctgaagttgaacagccactgttggacatggtgatgcaatacacccgtggtaatcaaacccgcgctgccctgatgatgggcatcaaccgtggtaccctgcgtaagaaactgaaaaaatacggcatgaactaa

SEQ ID NO: 115538 - DNA, 165 bp, Enterobacter cloacae
atgattcgtaaatactggtggctggtcgtttttgctgtctctgttttcattttcgatgcgctgctgatgcagtggattgaactgatgagcaccgaaaccgataaatgtcgcaatatgaattccgtgaacccgcttaaactggtcaactgctcagagctggactaa

SEQ ID NO: 115539 - DNA, 2085 bp, Enterobacter cloacae
atgctggttagccaatacaaccaaatcctcgtagtcatctcctttgttgttgccattcttgccgcctataccgcgctgaatatggctgcgcgcgttgccggaagccagggcgtcgctgcacgcgtctggctggcaggtggcggtgtttcgatggggattggcgtgtgggcgatgcatttcatcggtatgctggcgatggatctttccatgagcatgagttacaacgcggtcctgaccgtgctttcgatggttatcgccatcagctcgtcaatgtttgccctgtggctcgttagcggcgagcagctacgtttgcgccggctgctgcctggcgccgtcgtgatgggaacgggcattgttgccatgcactacactggtatggcagccctggaggtcacaccgggtattgtctgggataaaaagtgggtggctatctccgtggtcattgcccttgccgcttcactggccgctctttggctgacgttccgtttacgtcaggaagccgcacgaatggcgttgatgcggctgggggcggcgatcaccatgggcatcgctatcgctggcatgcattacgccggcatggaagcagcacaatttccaatgtcgacgatggtccaccatcatggcattaacgggagctggctggcgatactggttagcgtggtcgcgctcgctattctggggattacgctgctggtgtcgatgttcgatgcccgccttcaggctcgtacctcgctgctggcctcatcactggcagaagctaatcgtgaactcgcacagctggcgttacatgatacgctgacgcgattacccaatcgtattctgcttgaggatcgcctcgatcaggccatcagcaaggccgatcgcgaaggaagccctttcgcgctgatgtttatggatctcgacggctttaaaaccgtcaacgatgcctatggtcatgatgtcggtgacaagcttctggttgcggtgactcagcgtttgctgttgcagttgaaaggtcagtatacgctggcgcgtatcggtggggatgaattcgtcctgctggccgaaaccgccactccggatgatgctgcctcactggcaaattcactggtgcgcgtcattgatagcccgttccatctcgatccttatgaactgatggtcaccctgagcattggcattgcgctctatccacacgatggcaaaaccgatcgtgaactgatgtttaacgctgatgctgcgatgtaccacacgatacatatgggtcgcaacggctatcacttcttccagccgtcaatgaatacgctggcacagacgcatctacagctgatgaatgatctgtggcaggccatcgaccgtaatgagttacgcctgctttatcaacctaaatttcacgcccctgccgggccagtcctcggattcgaagcgctgttacgctggcagcatcccaaacaggggttactcccacccgatctttttctaccgctggcagagaaaacggggctgattattccgattggaaactgggtaatcgacgaggcctgccgccagctgcgtgaatggcatcttcagggccacacggactggtcaatggcggtgaatctttctacattgcagttcgaacagccgtcgctggttaaaacagttctcgattgtctgacgcgccatagcgtaccacccggcatgttgatcctggaggtgaccgaaaccacggcaatgaacaatccggacgaaagcgttcgtgtcctgacagcgctgacggatgcgggagtaaaagcctcgatagacgattttggcaccggttactcaagccttctgtatcttaagcgacttcccgcctgcgagttgaaaatcgatcgtgcttttgtgaaagagttaagtggtgagagcgaagatgcgacgattgtctcggcgattgtcgccctggcaaaaacgctgaatctgaaggtcgtggcggaaggggtcgaaaccgcagcgcagcaaacctttctgacagaactgggatgcaatacgctacagggttacctgctgggcaaaccgattaccgcgcaagctattatggaacagtgccagcacggggagatgtcgccaccccggacgcggtcatga

SEQ ID NO: 115540 - DNA, 648 bp, Enterobacter cloacae
atggcgcgcaaaaagaaagaagaggctcaaaagacccgccagcagctgattgaagccgctatcgggctattcgcgacgcgtggcgtgtccagcaccacgcttaccgacatcgccgatgctgctcaactcactcgcggggcggtttactggcatttctcgagtaaagcggaaatatttaatgcaatatgggatcagcaattgccgatgcgtgagatgattcgtgacaggttaatactttccgaaaatgacgaccctttgttaatgcttcgtgaacaatttattgtcgcactgcaatatattgcgagcgagccgcggcaatatgcgcttttacaaattttgtatcataagtgtgaatttcatgacgatgtgatttcagaatgtgaaatacgcaagcggatcggtttaaacgatgattatcttcgcaagacgctaaagcgatgcattgctcgtaacgttatctcttcgcaaaccaatattgaactggcgctgattgttttccacgccttttttagcggtgtcattaaaaactggttaatggatagcaacaattttaatctgtacaaacaagcaccggcgctggtggataatattctggcgacactaaatatcacccgagtggcaccagtggtttacgatacagcctcatga

SEQ ID NO: 115541 - DNA, 1140 bp, Enterobacter cloacae
atgacgaatcacttcagatgcttacccttatccggtttcattgtctgtgccgcgctgctcaccgggtgcgatgggcaagaaaacccacagcagcatgcgcaagctcctcaggtcagtgttcatattgttaaaagcgcgccactggccgtaacgacagaattgcccggcagaactgacgcgtatcgtgttgcggaggttcgtcctcaggtaagtggtatcattctgcaccgtaattttaccgaaggcagcgacgttaaagcgggtgaatccctttatcaaatcgatccggccacctatcaggcagcctacgacaatgcgaaaggtgaactggtaaaagcacaggcggcggcgaatatcgcccatctgacggtgaaacgttacgttccgctggttggtacgcaatatgtgagcaagcaggagtacgatcaggcggtggcaactgcccagcaggcggatgcgagcgtggttgccgcgaaggctggcgttgaaagcgcgcggatcaacctggcctatacgaaagtcacatccccaatcaacgggcgtataggtaaatccagcgtcaccgaaggggcgttagtcactaatggccaggcaactgcactggcgacggttcagcaactcgatcccatttatgtcgatgtgacgcaatccagcagcgattttatgcgcctgaagcagcagacgagcctgcaaaagggagacaccagcagcgtcgagttgctgatggaaaatggccagccttatccgctgaaagggacgctccagttctctgatgtcacggtagatgaaagtaccggctcaatcacccttcgcgccctcttccctaacccacagcatatgctgttaccgggtatgtttgtccgtgcgcgcatcgatgaaggtacgcaacctgatgccattctggttcctcagcagggggtaacccgtacaccacgcggagatgccaccgtgcttgtggtaaatgagaaaaaccaggtggaatcacgcactgtcgttgcaccgcaggcgattggcgatcgctggctgatcacggaaggcctcaaaaacggcgaccgcgtcattatcagcggcctgcaaaaagttcgccctggcgtcaccgtcgtggctattcctgataccgcagcgactccagccagttaa

SEQ ID NO: 115542 - DNA, 3114 bp, Enterobacter cloacae
atggctaatttctttattcaacggcctgttttcgcctgggtactcgccatcattctgatgattgcgggcgggctggccattttaaaactaccggtcgcgcaatatccgaccattgcgccgccggcggttgcggtgacagcaacctacccgggcgctgatgcccagacggtacaggacaccgtcactcaggttatcgaacagaacatgaacggtatcgataatttgatgtacatgtcgtccaccagtgattccgctggtaacgtcaccatcaccctgacgttcgagtcgggtacggatcctgatattgcgcaggtgcaggttcagaacaaacttcagctcgccatgccgctgctgccacaagaagtgcagcagcaggggatcggcgtggagaaatccagcagcagcttcctgctggttgcaggctttgtgtcggacaataaaaacctcacgcaggatgatatctccgactatgtcgcttctaacgtaaaagatgcgatcagccgtacttccggcgtcggtgacgtgcagctgttcggtgcccagtatgcaatgcgcatctggctggacagcaacgcgatgaacaaatatcagctcacgccgctggatatcattaaccagctaaaaacgcagaacgaccagattgctgcgggccagttgggcggaacaccgtccgtacctgggcagcaactgaacgcctcaattattgctcaaacgcgtctgaaatcgccggaggagtttggtcgtgtgacgctgaaggtgaaccaggacggttcaatggtccacctgaaagatgtggcccgcattgagctgggtggcgaaaactacaatatggtcaccaaaatcaatggccaggcagcaacggggctggggatcaagctggcgactggcgcaaacgcgctggataccgctgccgccatcaagagtaaactggcgcagttgcagcccttcttccctcaaggcctgaaagtcgtgtatccgtacgacactacacctttcgtgaagatctcaatccatgaagtggtgaagacactgtttgaagcgattgttctcgtgttcctggtgatgtacttgttcctgcaaaacctgcgggcaacgcttattccgacgatcgccgtgcccgtggtgttactgggcacctttgcggtactggctgcgttcgggttctccattaacaccctgacgatgttcgggatggtattggcgataggtctgctcgtcgatgacgccatcgtggtggtcgagaacgtagaacgcgtcatggttgaggacaagctgccgccaaaagaggcgacgcagaagtcgatggagcaaatccagggcgctctggtgggcattgccatggtgctttcggcggtatttattccgatggcattctttggtggttcaaccggggctatctatcgtcagttctcgctgaccattgtctccgcgatggccttgtcggtactggtggcgttgatattaacgcctgctctttgtgccacgctgctcaaaccggtttccagcgaacatcatgaaaagaaaggtggtttcttcggctggtttaacgcgctctttgataagagtgtggagcactacagcaacagcgtaagcggcattttacgtaagaccggccgctatctgctggtttacgtcatcatcgtcggcggcatggcagttctgttcctgcgcctgccttcctccttcctgccggaagaggatcagggggtgtttatgacgatggttcagttgccggcaggggcgacgcaaatgcgtactcagcaggtactcgatcaggttcaggattattacctgacgaaagagaaagcgaacgttgaatcggtctttaccgtaaacggttttagctttagcggacaggggcagaactccggtatcgctttcgtcagcctgaagccatgggaagaacgtccgggcaaggaaaacggcgttgaggcgattgtcagccgcgcgacgaaagcgttcagccagatcaaagacggtcttgtatttccgtttaacctgcctgccattattgaactgggtaccgcaacaggctttgactttgaactgattgaccaggcaaacctggggcatacgcagttaacccaggcgcgtaaccagctgctgggcatggtgagagaacatcctgacttactggttcgcgtgcgtcctaatggactggaagatacgccacagttcaagctggacgtcgatcaggagaaggcacaggcgctgggtgtgagcgtgtctgacgtcaatcagacgatttcaacagcgctgggtggcacctatgtgaacgactttatcgatcacggacgggtgaaaaaagtttatgtccaggctgatgctcgcttccgtatgctacccggagacattaacggcctgtatgtgcgtagcgctaacggcgaaatggtgcctttctctgcctttagcagctctcactgtgtgtacggttcaccgcgtctggaacgttacaatgggatgccatcaatggagatcctcggtgagtctgcccctggcaaaagtaccggtgaggcaatggcgttgatggaaagccttgcgtcaaaactgccttccggcatcggctacgactggacggggatgtcttatcaggaacgactttccgggaatcaggctccggcgctgtacgccatctcactgattgtggtgttcctgtgtctggcggccctctatgaaagttggtcaattcccttctcggtcatgctggttgtgccgctgggggtgatcggcgcgcttctggctgcatcaatgcgagggctgaacaatgacgtttacttccaggttggtctgcttacgacaattggtttatcagccaagaacgccatactgatcgttgagttcgccaaggatctcatggataaagaaggcaaagggattatcgaagccacgcttgaagcctcgcgtatgcgtctgcgtcctatcctgatgacttccctggcattcatccttggtgttatgcctctggtcatcagcagcggtgcaggtagtggggcacaaaatgcggtcgggacgggcgtgatgggcgggatgctgtcagccaccctgttggccattttctttgttcctgttttctttgtggttgtccggagacggtttacaaagcacaaggattaa

SEQ ID NO: 115543 - DNA, 222 bp, Enterobacter cloacae
atgaaaagattcctttccgttgcacttctcgctgcgctgcttgctggttgcgcgcacgactctccatgtgtaccggtatacgacgatcaggggcgactggttcacaccaatacctgtatgaagggcactacccaggataactgggaaacagcaggtgcgattgctggtggcgccgcggcaatcgctggcctgacactcggtattgtcgccctgactaaataa

SEQ ID NO: 115544 - DNA, 225 bp, Enterobacter cloacae
gtgcgattaggcaatcgtcactttattgtccagatagacatcctgaaccgcattaatcagcttcacgccgtcggccatggattttttaaacgctttgcggcccaggatcagccccattccgccggcgcgtttgttaatcaccgccgtgcgcaccgcgtcggtcagatcggtttcaccgcctgctgcaccgccggagttaatcagcccggcgcggcccccatgtag

SEQ ID NO: 115545 - DNA, 861 bp, Enterobacter cloacae
atgactgatattgcgcaactgcttggcaaagacgccgacagccttttacagcatcgttgtatgaccattccagccgatcagctttatctgcctggccatgattacgtagaccgcgtcatggtcgacaacaaccgtccgcctgccgtactgcgaaacatgcagacgctttacaataccggtcgtctgggcgggaccgggtatctctccattctgcccgttgaccagggcgtagagcactcggcgggagcgtcgtttgctgctaacccgctctactttgacccgaaaaacattgtcgagctggcgattgaagcgggctgtaactgtgtggcatcgacctatggcgtgctggcctccgtttcccgccgctatgctcaccgcattccgttcctcgtcaagctgaatcacaacgaaaccctgagctacccaaccgaatacgaccagacactgtacgccagcgtcgaacaggcgttcaacatgggtgcggtagcggtcggggcgactatctattttggctctgagcagtcgcgtcggcagatagaagagatctctgccgcgtttgagcgcgcgcacgagctggggatggtgaccgtattgtgggcctatctgcgtaacaacgcgtttaagaaagacggcgtggattaccacgtatcagcggatctgaccggtcaggcaaatcacctggcggcaaccatcggcgcggacatcgtgaaacagaaaatggccgagaataacggcgggtataaagcggtgaactttggctataccgacgaccgcgtctacagcaagctgaccagcgacaaccctatcgatctggtgcgctaccagctggctaactgctacatgggggccgcgccgggctga

SEQ ID NO: 115546 - DNA, 1278 bp, Enterobacter cloacae
atgaaaacgaaagtccaactgtcattcatgatgttcgttgaatggtttatctggggcgcatggtttgtgccgctgtggctgtggctgagtaagagcgggtttaccgccggggaaattggctggtcgtacgcctgtaccgcgattgccgcgatcctctctcccatcctggtcggctcgctgacggaccgtttcttcgccgcccagaaagtgctggccgtgctgatgttcgctggcgcgattctgatgtatttcgcagcacagcaaacccagttcagcaccttcttcccgctgctgctggcctactccctgacttatatgccgaccatcgcgctgaccaacagcatcgccttcgcgaacgtcgatgacgtggaggctgatttcccgcgcatccgcgtgatgggcaccatcggctggattgcctccggcctggcgtgcggcttcctgccgcagatgatgggctatagcgacatctctgacaccaatatcccgctgctgatgaccgctgccagctcccttctgcttggcgtcttcgcgctgttcctgccgaataccccgccgaagagtaccggcaagctggattttaaagtgatgctggggctggatgcgctgatcctgctgcgcgataaaaacttcctggtgttcttcttctgctcgttcctgttcgccatgccgctggccttctactatatctttgccaacggctatctcaccgaagtggggatgaaaaacgccaccggctggatgaccctcggccagttctctgaaatcttcttcatgctcgctctgccattctttaccaaacgctttggtattaataaggtcttgctgctgggcctgatcaccgccgccattcgctacggtttctttgtttacggcggcgccgagcaatacttcacctacgccctgctgttcctcggcattctgctgcacggcgtaagctatgacttctattacgtcaccgcgtacatctacgtggataaaaaagcgcccgtgcacatgcgcaacgcggcgcagggcttgatcacgctgtgctgtcagggctttggtagcctgctgggttaccgtctcggcggcgtgatgatggaaaaaatgttcgcatataaagagccggtgaatgggctgaccttcaactgggccggaatgtggacgtttggtgcaatcatgattgtggtgattgccgtgctgtttatgctgtttttccgcgaatcggataaagagatcaccgcaattgaggtggttgatggcgataccgcgctgacacgaggggaagttaaatga

SEQ ID NO: 115547 - DNA, 1005 bp, Enterobacter cloacae
atgaaacaagaccgtattctcggtgctctttacgggcaggcgttaggggatgcgatggggatgccgtcggagctgtggccgcgcaagcgggtgaaagcgcacttcggctggatcgaccgtttcttacccggcccggctgagaataatgccgcctgttactttaagcaggccgaatttacggatgatacgtcgatggcgctgtgcctggccgacgcgattatcgaatgcgacggggaaattaaccctgacgttatcggtaagcatattctggactgggcgctggattttgacgcgttcaataagaatgtgctcggcccgacctccaaaattgccctgaacgccatccgtgacggcaagccggtgagccagctggaaaacaacggcgttaccaacggggcggcgatgcgcgcctccccgctgggatgcctcctgccagccacgcgtctggcgcactttgtggaacaggttgcgttagcctccagcccgacccataaatcggatctcgccatcgccggtgcggtggtgatcgcctgggcggtttcacgcgctatcgacggcgagcgctggcatcacatcgccgatgccctgccgggtattgcccgtgcggcgcaggaggcgaacacgaccaccttcagcgcatcgctttccgctcgtattgagctggccctgaaaaccgtgcgcgaagccaacggtaccgagtccgccagcgagcagatctatcagcttattggcgcgggcacgagcacccttgagtccgttccggcggcgattgcgatggtcgaactcgcgggtaccgatccgaaccgctgcgcggtgttatgcgccaacctgggcggtgatactgacactatcggcgcgatggcaacggccatctgcggcgcgctgcacggtgtacaggccattgatccggcactcaaaaacgaacttgatgccgtaaaccggctcgatttcggccactactgcgaaaaactgctgcacttccgggagcaaagggagggcgtatga

SEQ ID NO: 115548 - DNA, 954 bp, Enterobacter cloacae
atgagtgcttttgcccgccgtctcgaaacccttcacgccacgcgccccgtaacggtactcggcgcggcggtcatcgacgtgattgccgacgcctacgccctgccctggcgcgggtgtgatatcgagctgaagcaacagggagtgaatattggcggctgcgcgctgaatatcgccatcgccctgaagcggctcggcattgctgcgcaaaacgcccttcccgtcggccacggcgtgtgggccgatattatccgtaacgccatggcgaagcaggatctgcacagcgccgtggaagcggaaacgggcgataacggctggtgcctggcgctggtggagcctgacggtgaacggacctttatgtcgtttagcggcgtggagaaccagtggcagcagcgctggctggacgggttaagcgtgccggcagggagcctgatctctttgtccggctaccagctggcgtcccccagcggtgagctgctgacggcctggctggaaagtcttcaggatgcgacgctctttatcgatttcggtccgcgcatcgcggatattcccgacccgctgatggcgcggatcatggcctgcaaaccaatcgtctcgctcaatcgtcaggaggcggaacttgccgccgaatggcttggcgtaaacgtggaagagctcggcacacggtggcagcagaggtttggcgctgcgctgatcgtacgccatgataaagacggggcggtctggtacgacggtgacgcttccggacacgttccggcgtttcctgctaccgtggtcgataccatcggcgcgggtgacagccatgcgggaggtacccttgccgggctggccgcgggatggtcactgccagaggcggtgcagcttggcaatgccgtagccgcctgggtagtcagccatcgcggtggcgactgcgcccccacgcgcgaggccctactcctcgcacacaaagacgtatag

SEQ ID NO: 115549 - DNA, 747 bp, Enterobacter cloacae
atggaacaagcgcatacccggttaattgctcaactcaaggaacgaattgccgcaccggacaacacgccgttgtacctgaaatttgccgaaacggttaaaaacgcggtacgcagcggcgtgctcgcgcacggtaatattttgccgggcgagcgcgatctgagccagctggccggtgtgtcgcgcattacggtgcgtaaagcgatgcaggcgctggaagaggccggcgtcgtcacccgcgcgcgtggatacggtacgcaaatcaacaatatctttgaatattcgctaaaagaggcgcgcgggttttctcagcaggtggtgctgcggggcaaaacgcccaacacgctgtgggttaataaacgcgtcgtgaaatgtccggaggagatcgcccgccacctttcccttgcgccggacagcgatgtatttctgcttaagcgcatccgctacgtggatgacgatgcggtatcaatagaggagtcctgggtaccggtaggattaatccccaatccggacgacatcggcgtctcgctttacgattacttccgcagccagaatatctttccgcagcgcacccgttcccgcgtcagcgcccggatgccggacagcgagtttcaggcgcatatcaagatggacgataagataccggtgctggtgatcaagcaagtcgcgctcgatcaacagcaccggccaattgagtacagcatcagctactgccgcagcgacctatacgtctttgtgtgcgaggagtag

SEQ ID NO: 115550 - DNA, 801 bp, Enterobacter cloacae
atgacacgcattaatgccctgactattgcgggaaccgatcccagcggcggagcggggatccaggcagacctgaaaaccttctctgcgctcggcgcttacggatgctcggttatcaccgcgctggtggcgcaaaacacgcgcggtgtacagtcggtatatcgtattgagccggattttgtcgccgcacagctggattcggtattcagcgatgtacgcatcgacaccaccaaaatcggcatgcttgcagaggcggacattgttgaagcggtcgctgaacgtctcaaacgttatcagataaaaaacgtggtgctcgataccgtgatgctggccaaaagcggcgatccgttgctctccgcctctgccgtcgacaccctgcgtaaaaagctgctgccgcaggtggcgctgatcacgccaaacctccctgaagccgccgcgctgctggatgcgtcacacgcgcaaaacgaacgtgagatgaaagagcagggcaatgcgctgctggcgatgggatgcagcgcggtgctgatgaaaggcggtcatcttgatgatgcagaaagcccggactggctcttcacccgcgatggcgctcaacgtttcaccgccccgcgggtacagaccaaaaacacccacggcacgggatgtacgctctcggcggcgctggcggcgctgcgtccccgaaacgcgaactgggcggatacggtgcaggaggcgaagatctggctctcgtgcgcgctggcaaaagccgattctctggaagtgggtcacggtattgggccggttcaccattttcatgcatggtggtaa

SEQ ID NO: 115551 - DNA, 771 bp, Enterobacter cloacae
atgcagcctgacctgctagactcacacgttttacatcaattccgaacccgttccccgctcacgcactgtatgaccaacgatgtcgtgcagaccttcaccgccaacgttttgctcgcgctgggtgcttccccggcaatggtgatcgaagccgaggaagcggaacagtttgccgcgcttgccgatgccctgctcatcaacgtgggtacactcaccgcgccgcgcgcccagtcgatgcgtcgggccattgagagcgcggtagccgcgggtacgccctgggttctggatccggttgcggttggcgcgctggcgtatcgcacacgattttgccagcaaatattgtccctcaaacctgcggccattcgtggaaacgcctccgaaatcctcgcccttgccggaatgagtgcgggcgggcgcggggttgattccaccgatacggcggcgagcgcgttgaccgctgcgcagacgctcgcccgccagacccacgccgttgtggtcgtcacaggagaagtggatcacatcactgatggtcagcgaacccgtacggtcgcgggcggcgacccgctgatgacccgcgtggtgggaacaggctgtgcgctctcggcggtcgtcgccgcctgctgttcgctgcctggcgacaggcttgataatgcgacggcagcctgcggctttatgaagcgcgcaggggcagctgcactgactcacagccggggccccggctgctttgccccggcgtttctggatgcgctttacgcgctggaggagctggtatga

SEQ ID NO: 115552 - DNA, 453 bp, Enterobacter cloacae
atgaaatctatgaataaaacctttattgctatttttgtaatgggcgttgtcttagcgggtacaacgagcctggctgaagccgcgaatacggtttgggacgatcagcaaatcactaatattgtaaatgaccatcaggatcagattgcacaaaacaaagctgatagcattaaccgtgatatcgcaacggataaccgcttaacgcaggttaatgacgaccttcagtccacaaaaccaggtgtgttagtcgtggataaaatggctaacgacgcacatcagaaagcgttgcttgccggtgcgcttgctgatgtgagacggccctacagggtgtggcgactaacggcacagatggagagaaaggtgataaaggcgatgccggcgcgacttacaacagcgagagcgcgcttgctgtcggtgcgtccgttaactttaattcccatgtcatcacgaaagtga

SEQ ID NO: 115553 - DNA, 444 bp, Enterobacter cloacae
atgaaaaaagtaatgatgttcgttataagtaccaccgtgcttgcaggttgtgtctcgccggcgcacgccataaacgcccattatcgcgctcaattagagcgttcgggatgcacgcaaatgagcgctggcgatggctcttgtgatatcagcaaaaccaaagcggaaaacgcggcacaacacgaaccagcgacatccgttcacgatcccctgcgtgaagcctcgttctcgtcggacacggttaacgccacgctttctaacggcttttttagcgccaccgttaacggcaagaaagccagcgttaaacgcctgaatgcgaatttctatgagatccgtggtaatggttttgtgatatcgctaagcctggatgaaaacggtattacggacgcgtcgtggaataaaacgaagggacgcgaacacggtattttacgcgttagccagaaataa

SEQ ID NO: 115554 - DNA, 1374 bp, Enterobacter cloacae
atgacggataaagtccgtattgacaccgtagatgcccacaaaagcaacgaaacctatctggcccgtcaggccgaatttgaatctaacgtcaggagttatccgcgcaaattgcctttagcgatcacgaaagcagaaggcgtgtggatcaccgatgcagataataaagaataccttgactgtttagcaggcgcaggcaccctcgcgcttggacacaatcatcctgatgtgctgaaaagcatccaaaatgtcattaccagcggcttgccgttacataccctggatctgaccacgccgttgaaagacgcgttttcagaatacctgctctctctgttgcctggtcagggcaaagagtactgcctgcaattcactggcccgtccggggctgacgccgttgaagcggcgctgaagctggcaaaaaaagtgaccggtcgtagcggtatcatcagtttctctggtggttaccacggtatgacccacggtgcactgtccgtcaccggcaacctgtctccgaaagaagcggttgacggtatgatgccagaagtccagttcatgccttacccacacgagtaccgttgcccactgggtatcggtggtgaagcgggcgtgaaggcgctgacctactacttcgaaaatctgattaacgacgtcgaaagcggcgtgcgtaaacctgccgcggtgatcctcgaagccgttcagggtgaaggtggagtgaacccggcgcctgttgagtggttgcagcgcatccgtaaagtcactcaggaacacggtatcctgctgatcctcgacgaagtccaggctggctttgcccgtaccggtaaattctttgccttcgaacacgctggcattgagccagacatcatcgtgatgtctaaagcagtcggtggcggtctgccgctggccgtgctcggtatcaaaaagcagttcgatgcatgggcgccaggtcaccataccggtactttccgcggcaaccagctggcgatggcaaccggtctgaccacgctgaagatcctgaaagaccagaacatcgcgggcaaagtagctgcacagggcgaatggctgaaaggccagctgaaagagatggcgaaacgctatccggtgatcggccacgttcgcggtctgggcatgatgatcggtattgaaatcgttaagccacatgaagccgccgatcacatgggttgcttcccgggcgatggcgagctgtctgccctgatccagaagaaatgcttcgaagccggcctgattctggagcgtggcggccgtaacggtatcgttctgcgtctgctgccttctctgctgatcagcgatgacgagctgaaagtcttcctggataaattcgagcaggcactgcttgctgcgggcgttagcccggcgtaa

SEQ ID NO: 115555 - DNA, 1467 bp, Enterobacter cloacae
atgtctgattcaaacccaattttgttctcctctgcgcagagcattgaagcttaccagcaggcgattgaacaaagcactcaggctgtgatgcagtggctgaaacagcctgagatgtaccagggcaaaacggtcgcggagctgcgcgaccgtattaagctggatttcaacccgaaagggctgggcaacgaagcggcgatcgaacgcgccgtggagttcttcctgaaagacagtttgtccgttcatcacccgcagtgtgtggcgcacctgcactgcccaagcctggtggttagccaggcggcggaagtgctgatcaacgccactaaccagagtatggactcctgggatcaaagcccgtccgcaaccatcattgagatcaaactgatcgaatggctgcgtacccgcgtgggttatcaggctggcgacgcaggcgtcttcaccagcggcggcacccagagtaacctgatggggctgatgctggcgcgtgacgcgttctttgcgcgtcagggccactcggttcagcaggacggtctgacaggcgatctgcgtaagatccgcgtgctgtgttcggaaaatgcccacttctccgtgcagaaaaacatggcgctgatgggtctgggctaccagtccgtggtgcaggtgaaaactgacgaattctcccgcatggatctcaccgatctggcggcgaaaatcgaacagtgcaacgcgaacggcgagcagatcctggcgattgtggccacggccggtacgaccgatgcgggtgctatcgatccgctgcgtgctattgctgagctggctgcgaaacagaatatctgggtgcacgttgatgcggcctggggcggcgcgctgctgatgtctgagcagtatcgtcactacctggacggtatcgagctcgtggattccgtcaccctggacttccacaagcagttcttccagaccatcagctgcggtgcgttcctgctgaaagaagcgcgtcactatgaactgatgcgctatcaggcggcctatctgaactctgagttcgatgaagaagcgggtgtacctaacctggtctccaaatctctgcaaaccacgcgccgtttcgacgcgctgaaactgtggatgagcctggaagcgctgggtcaggagcaatacgcggcaatcatcgatcacggcgtgacgctggcacagcaggttgcggcttacgtgaaagagcagtctgctctggaactggtgatgcaaccccagctggcaagcgtgctgttccgattccgtccgcaggcgcagatggatgacgccggtattgccctgctgaaccagaaaattggcgatgcgctgctggagtctggccgtgcaaacgtcggtgtgaccgagcataacggtatcacctgcctgaagctgaccctgctgaacccaaccgtgacgctggaggacgtaaaaatcctgctgtccctggttgagcgtaccgcgcaggaagtgatggcgaagtaa

SEQ ID NO: 115556 - DNA, 2199 bp, Enterobacter cloacae
atgtcgtcttacacaacagacaattatggtgcagcggcaccccaacaacatgaagtcgatctcgttcgtttgctcgtcgagatgatcgaccaccgcacgatgattctgtgcgtgacgttcctgttcatcctgtgcgccggtctctatgcctggattgcgccacctgtttatcaggcggatgccatggtgcaaattgaaaacaaacacgataacaacctgctcaaaggtttgagccagctgggcaccgatgtgtcgccggatgttgcccctgaaattttactgctgaaatcccgcatgatcctcggcgagaccgttgacaaattagctctgacacagcaggcaaagcagcgcgttttgcctgtggtggggcgtctctggcagcgtctgcaagggcgtgagcagggcaaaatcacgttaggcgaactccagatcccgcaggtggaaggcaaagcgcaagagctcacgctgaccgtacaggaagcgggaaaatatcacctgacgggcgaaaacattgaggccgacggccaggttgggaaaacgctggttacgcaagggatcgttctgctggtgacgtcgattgaggctgagccaggcacgcaattttcgcttaagtcgttgacgcggcttgagacgatcaacgcgctgaagaaacgtctcacggttgcggaatcggagaaacagagcggtatcgtgaccttaaccctgacgggcgaagatcctgacagcatcgcccgggtgctgaatgcaattgctgaaaattatctccagcaaaatatcgcgcgccaggaggctcaggattctcgtagtctggattttttacaggcgcagttgccgaaaatcagcgcggaccttgatcaggcagaagcgcggctgaatgcctaccgggcgcagcgagactcggtggacctgtctctggaggcaaaatctgtcctggatcaggttgttaacgttgagaatcagctaaatgagctgacgttccgggaggcagagatctcccagctctttaaaaaaagtcaccctacctatcgtgcattgcatgaaaagagacagacccttgagcgggaacgggagcgtctcaataaccgtgtgtcagctatgccctccacgcagcaggagattttacgcctgagccgcgatgttgagtcgggtcgcacgatttatttacagctattgacgcgccagcaggagctgaatatttcccgctccagcgctgtcggaaacgtgaggatcattgatgaggctgttacgctgccggacccgataaagccgcgtaaagcgttaatcatcgttcttggcgcgctgttcgggctaatgctctcaatggggaccgtgctggtacgtcaggcgttcaaacgtgggatcacgctttccgaacagctggaagcgcaggggatgccggttctggctacgttgccacgttcacagtggctgtggagtaaaacgcagttgcgcagaaaaaatccgttttctcgtcgctggaaacacaaaacctcggatgtgcctttcctgcccgtcgatcgccctgctgatatgtttgttgaagcagtacgcgggctgcggaccagtctgcatttcaccatgatggaggctgagaaccgcattgtgatgatttctggccccacgcaggactgcggaaaaacgctggtggcgacgaatctggcggccatcgccgggcagagcggtcagcgggtgctgtttattgatgcggatatgcgccagggctatgttcataatatttttggtctggagaaccgccacggattgtcctgcctgctcgaaggaaaacgcgacttagcggaggtcattcagcatgctgaaaaagggggaattgacgtcatcacctgcggcccggaccccctgcgcccgttagaattgctgttaagcgaaagattcctttccgtcatgtcctgggttaacgagcaatatgacattgtcatcattgatactccgccggtcctggccgtcaccgatgccgcgctggtcgccagagcagccggaacaacgctaatggttgcccgtttcgataaaaccagcgtgaaagagatggagaataccgttaaacggttacagcacgttggcgtgaaggtcagcggcacaatcctcaacgatattgttaaatccgcagcgctgtattacagctcggggtacagccagtatgaatacggttatgcttcgaggaaaaaaggggaaaggcgttag

SEQ ID NO: 115557 - DNA, 450 bp, Enterobacter cloacae
atgttcaaatcaatactcgtggtttgcaccggaaatgtctgccgttctccgattggggagcggcttttgcgccagcacctgcccgacagatatatcgcctcggcgggcatattcgggcttgaagggtgcccggcggatgacagcgcccaggacgtagcctggcggcatgggatttccctcgacggtcatgtggcgcgcaggctgacacgcaatttgatgcagggatccgatcttatcctggttatggagccggaacatcttcgcttcattgcggccatggcgccggagattcgaggaaagtcgctgctttttgggcaatggctggagccgcaggagatccccgatccctaccgtcaaagccgggaagcgtttgaatatgtgtttgggttattgggtaaagccagtcaggaatgggcacgtcgtttaggtcagaaaggaatgaagcattaa

SEQ ID NO: 115558 - DNA, 1140 bp, Enterobacter cloacae
atgaaaaacacaacagttgtatcgatattatttttaattattacccccttatctggctgcgtattttatcctggccagcatctcgatctcgctgggaaaaagataattgccgcagaagatgcaaatgatcgtcttgagaaacggattgatgtttatcctcttacgccttcgttaattgaaaaattgcggccatcggttttgaaatctcaggcaaatcctaatctggatgaacaggtcaaaaactgggaataccgtatcggcattggggatattctaaccgtcaccgtctgggatcaccctgaactgacaaccccggcagggcagtatcgtagcgccagtgacaccggtaactgggtcaatgccgacggcacgcttttctatccctatgtcggtaaattgccggtggctggcaaaacggtcgcacgggtacgcgaggagatcacggcccggctgaacaatgttattgaaagcccgcaggtggatgtcagcgtcgcctcttttcgctcacaaaaagcctatgtgacgggcgaggtggtgaagtcagggcagcaggctattaccaatatcccgttaacggtcatggatgccgtgaacgccgctggggggctctctgccgacgcggactggcgcaatgtcgtgctgacgcataatgggaaggacacgcgcctctcgctatatgcgctgatgcagcatggcgatctcacgcaaaataagctgctctatcccggcgatattctgtttgtcccccgtaacgatgcgctgaaagtgttcgtcatgggcgaggtcgttaaacagagcacgctgaaaatggatcgcagcggcatgaccctggccgaagcgctgggcaatgccggtgggctgaaccagaatatggccgatgccaccggaatttttgtcattcgttcgctgccgaaaagcgagcgttcagaaaaaattgccaacctctaccagctcaatgctcaggacgcatcagccatggtgttaggcaccgagtttcagcttgagccctatgacattgtctatgtccccactgcaccactgtcccgctggaatcgtgtgatatcacagcttgttccgaccatcagcgggatgcatgaccttaccgaaacggttcgttacatcagatcgtggccgcaataa

SEQ ID NO: 115559 - DNA, 333 bp, Enterobacter cloacae
atggctaagcgtaaattgttgcttctgggtgtattactgtcactggcgggggccgcgcacgctgcaccgcaaacatcgacagcgccttccggcatcaaggcctatgaagagcaagagtttattgccgattttacgaagtttaaaatcggcgacaccgcgcccgcgcagtatcagacgcctgagtacaccatcaaacagtaccagctgcgtaaccttcccgcgcccgatgccggcacacactggacctacatgggtgagaattatgttctgattggcgatgccgatggcaaaatctacaaagcctataacggagatattttctatcaccgctga

SEQ ID NO: 115560 - DNA, 486 bp, Enterobacter cloacae
atgccgatggcaaaatctacaaagcctataacggagatattttctatcaccgctgatacgatcctaatccgtccgtggcaggagagcgatcgccctttcctgcgcacgctcttccttcacgcccgacgtgaagcctggccgtggatggacagttctgcgtggcagcttgaagattttgacgcggcaaccctggacgaagggatttgggtggcggagcaggatgggcaccgacttggctttgcctcagtctcgacgaacgataattttttgcacaacctgtttgtcgatccgaactatcagagcctgggcgtcggacatgtgttgcttgaacacgtgcagaagacgtttaccagcacgggttcactcaagtgtctggtgaagaatgagcgggcggttgcgttttaccagcgccacggctggcacattgaggcgacgggagattctccggacggagagtattatttgatgcactatcggcttgggtaa

SEQ ID NO: 115561 - DNA, 1110 bp, Enterobacter cloacae
atgagttctcaatcccaggccaaatcaccggaagccttacgagcaatggtcgccgggacgctggctaattttcagcatccaaccctgaagcacaatctcacgacgctgaaagcgcttcatcacgtcgcatggctggacgatacgctgcacattgagctacagatgccgttcgtctggaccagcgcctttgatgccctgaaagagcaaaccagctctgagctgctgcgcattaccggcgcaaatgcaattgactggaagctaagccacagcatcgccacgctcaagcgcgtgaaaaatcagccgggcgttcacggcgtgaagaacatcatcgccgtcagctcgggcaagggcggggtgggtaaatcgtcgaccgccgtgaacctggcgcttgcgctggcggctgaaggggcgaaagtcggcattctggatgcggatatctacggcccgtccattccaaacatgctgggggcggaaaaccagcgtccaacctcgccggacggcacccacatggcgccaatcgtggcgcacggtctggcgaccaactccattggttacctggtcacggacgataacgcaatggtctggcgtggcccgatggccagcaaggcgctgctgcaaatgttgcaggagacaatgtggcctgacctcgattatctggtactggacatgccgccgggcaccggtgatatccagctgacgctggcgcagaacattccggttaccggcgccgtcgtggtcaccacgccgcaggatatcgcgctgatcgacgccaaaaaaggcatcgtcatgttcgagaaggtggaggtgccggtactgggtatcgtcgagaacatgagcatgcacatttgcagcaactgcgggcaccatgagcctatctttggtaccggtggtgccgaaaagctggcggcgcaataccacacgcaactgctggggcaactgccgctgcatatcacactgcgtgaagatctggatagcggtaagccgacggtggtcagccgtccggatagcgaattcacggaaatctatcgtcagctggcggggcgcgttgcggcgcagctttactggcagggcgaagtcattccgggtgaaatcgccttccgcgcggtgtaa

SEQ ID NO: 115562 - DNA, 2034 bp, Enterobacter cloacae
atgactcaagtcgcgaaaaaaattctggtaacgtgcgccctgccgtacgccaacggctcaatccacctcggccacatgctggagcatatccaggctgatgtctgggtccgttaccagcgaatgcgcggccacgaggtgaacttcatctgtgcggacgatgcccacggcacgccgatcatgctgaaagcgcagcagctgggcatttccccggaacagatgatcgccgaaatgagtcaggagcatcagaccgattttgctggctttgacatcagctatgacaactatcactccacgcacagcgacgaaaaccgcgagctgtcagagctgatctactcccgtctgaaagagaacggtttcattaaaaaccgcaccatctctcagctgtacgatccggaaaaaggcatgttcctgccggaccgtttcgtcaaaggcacctgtccgaaatgtaaatccccggaccagtacggcgataactgcgaagtgtgcggcgcaacctacagcccgaccgagcttatcgaaccgaagtccgtggtctccggcgcgacgccggtgatgcgtgactccgagcacttcttcttcgacctgccgtcgttcagcgaaatgctgaaggcgtggacccgcagcggtgcgttgcaggagcaggtcgcgaacaaaatgcaggagtggttcgaatccgggctgcaacagtgggatatctcccgcgatgcgccctactttggcttcgaaatcccgaacgcgccgggcaaatatttttacgtctggcttgatgcgccgattggctacatggggtcgttcaagaatctgtgtgacaagcgcggcgacaccgtaagcttcgacgaatactggaagaaagattccgatgccgagctgtatcacttcatcggtaaagacatcgtttacttccacagcctgttctggccagcaatgctggaaggcagcaacttccgcaagccgaccaacctgttcgtacatggctacgtaacggtgaacggcgcgaagatgtctaaatctcgcgggacgtttattaaggccagcacctggctgaaccactttgacgcggacagcctgcgctactactacaccgcgaagctctcttcccgcatcgacgatatcgacctgaatctggaagatttcgtgcagcgcgtgaacgcggacatcgtcaacaaggtggtgaacctggcgtcccgtaacgcaggttttatcgccaaacgctttgacggcgtgctttctgccgaactggccgatcctgagctgtataaaaccttcaccgacgccgccgctgcggttggcgaagcctgggaaagccgtgaattcggtaaagccattcgcgaaatcatggcgctggcagacgtggccaaccgctatgtcgacgagcaggcgccgtgggtggtggcgaaacaggaaggccgcgacgccgacttgcaggcgatctgcaccatgggtctgaacatgttccgcgtgctgatgacctggctgaagccggttctgccgcagctggcagcccgcgcggaagcattcctgaacaccgaactgacctgggatgccatccagcagccgctgctcggccacaaggtgaacaccttcaaggcgctgtataaccgcatcgagatgaagcaggttgacgcgctggtggaagcatccaaagaagaggtgaaagcggctgccgcaccggtgaccggcccgctggcggacgatccgattcaggaaaccatcacctttgatgatttcgccaaagtcgacctgcgcgtggcgctgatcgaaaacgcggagttcgtggaaggttctgacaaactgctgcgtctgaccctggatctgggcggcgagaagcgtaacgtcttctccggcattcgttccgcgtatcctgatccgcaggtgctgattggtcgtcagaccgtgatggtggcaaacctggcgccgcgcaaaatgcgcttcggcatctctgaggggatggtgatggccgcaggcccgggcgggaaagatatcttcctgttaagccctgacgaaggcgcgaagccgggtcagcaggtgaaataa

SEQ ID NO: 115563 - DNA, 471 bp, Enterobacter cloacae
atgctaagtaacgatattcttcgtagcctgcgctacaccctgaaagcgaacaataatgacatggtgcgcattcttgcgctctccgacatggaatccacgtccgccgggttcgacacctggatgactaaagaagatgaagagggttttgttcgctgcccggacattattctgtcgggctttctgaatggcctgatctacgacaagcgcggcaaagatgaatctgcgcctgagctggcgttggagcgtcgggtgaataacaacacggtgctgaaaaagctgcgtattgctttctccctgaaaactgacgacattctggcgatcatgaccgagcagaaatttcgcgtgtcgatgccggaaatcaccgccatgatgcgcgcgccggatcataagaattaccgcgagtgtggggatcagtttctgcgttatttcctgcgtgggttgacgcagcgggtgcataaccagaaggggtga

SEQ ID NO: 115564 - DNA, 720 bp, Enterobacter cloacae
atgttaagagtgctgattgtcgatgatgagccgttagcacgggaaaacctgcgtgttctgttgcaggagcagagtgatatcgagattgtgggggaatgtgccaatgcgattgaaggcatcggtgcggtgcataaactgcgcccggacgtgctgttcctcgatattcagatgccgcgtatcagcgggctggagatggtcggcatgctcgacccggagcaccgtccctatatcgtctttctgacggcctttgatgagtacgcggtaaaggcgtttgaagagcacgcatttgattatctgctgaagccgattgaagagaaacgccttgaaaagaccctgacccgcctgcatcaggagcgtaccgtgcaggacgtgacgctgctgccggagcatcagcagcccctgaagtttataccctgtaccgggcacagccggatttacctcctgcaaatggacgacgttgcctttgtcagcagccgtctgagcggggtatacgtcaccagcgctgaaggtaacgaaggctttaccgagctgaccctgcgcacgctggagagccgcacgccgctaatccgctgccatcgtcagtatctggtgaacatggcgcacctgaaggagatccgtctggaagataacggccaggccgagctggtgttacgtgccgggcaaaccgttcccgtcagtcgtcgctacctgaaaagtttgaaagaggcgatagggctgtaa

SEQ ID NO: 115565 - DNA, 1686 bp, Enterobacter cloacae
atgtacgagtttaatctggtgctgctgttgcttcagcagatgtgcgtgttccttgtcatcgcctggttgatgagcaaaacgcgcctgtttatcccgctgatgcaggtcaccgtccgtctgccgcacaaattcctctgctacgtcgtattttccatattctgcattatggggacctggtttggtctccatatcgaagattccatcgccaatacgcgcgccatcggcgcggtaatgggcgggctgctcggaggcccggttgtcggcggtctggtggggttaaccggcggcctgcaccgctattcgatgggtggtatgacggcgctgagctgcatgatctccaccatcgtcgaagggctgctcggtggtctcgtccacagctatatgattaagcgcggtcgcccggataaagtgttcagtccctttaccgcaggggcgattaccttcgtggcggaaatggcgcagatggcgatcatcctgctgatcgcgcgcccgtttgacgatgcgttacatctggtcagcagcattgccgcaccgatgatggtcaccaatactgtaggtgcggcgctgtttatgcgcattctgctcgacaaacgcgccatgttcgaaaaatacacctcggcattttctgccaccgccttaaaagttgcggcgtcgacggaagggatcctgcggcagggattcaacgaggagaacagtatgaaggtggcgcaggtgctgtataaagagctggatatcggagccgtggcgattaccgatcgcgagaagctgctggcgtttaccggtaccggcgacgaccaccatctgccgggcaaaccgatctcctcggcctataccctgcgcgctattgaaacgggtgaagtggtgtatgccgacggaaatgaagtgccgtaccgctgttccctgcatccgcagtgcaaactcggctctacgctggtcattcccctgcggggtgaaaaccagcgcgtcatgggcactattaagctttacgaagccaaaaaccgcctgttcagctccatcaaccgcacgctgggggaggggatcgcccagctgctttcggcgcaaatcctggcggggcattatgaacggcaaaaagcgctgctgacgcagtcagaaattaagctcctgcacgctcaggtgaacccgcatttcctgtttaacgcgctcaacacgctgaaggcggtgatccgccgcgacagcgatcaggccgcgcagctggtgcaatttctctcgacctttttccgcaaaaatctgaagcgaccctcggagatcgtcaccctcgcggacgagattgagcatgtaaacgcctatctgcaaattgaaaaagcgcgcttccagtcacgtttacaggtgtcgttatccgtcccggacgatctggcgtatcagcatcttccggcctttaccctgcaaccgattgtagaaaatgccattaagcatgggacgtcgcagctgctgggaagtggagagattatgatttccgcttcccgttttaaccgccatctggtgctggatattgaagacaacgcggggctgtatgaagcttccgcgtcaggcggtctgggcatgagcctggtggataaacgcctgcgcgcgcattttggtaacgactgcggtatcaccgtcgcctgtgagccagaccgctatacccgaattactttacgattgccgctggaggagaacgcatgttaa
